United States Patent Application Publication US 2024/0404707 A1 - sequence listing, part 4

SEQ ID NO: 393 - DNA, 27250 bp, Homo sapiens
  source 1..27250: mol_type = other DNA
agcggtctcccgcccgcggcgccatcgcgccattcctagttaaggcggcacagggccgaggcgtagtgtgggtgactcctccgttccttgggtcccgtcgtctgtgatactgcagcgcagccatggcagaaccgcagcccccgtccggcggcctcacggacgaggccgccctcagttgctgctccgacgcggaccccagtaccaaggtgggcacaggaccgaagggaacggctcccccagctccgctgggccgggaccgggccgcattctatccaaccccatcccgccgccgctgcaggtccgccggcctcgggcggacgggagtgtgatgggaagagggataatggtgtttgatggggcgatcgtggggcccgcgaagtgtggaggggatctgttgcctcagctagtttcaaagactgcgaccctgttttgaattggcttgtttatgttgcgacggtggctggaagccaggccaacccagggtcagctttcccaaatcagtcgccaaggcccacgagaacagtagtttcagaactcccagaaataggttcaaagatgcctgtcctgtaccagtcctgcccagcctcgtttttccttaccaccctgactgcagtcttaactcctgcaaactaatttgatcgctctaagtttaaccgcgcccagaatttcacttttgcttgcttggcctttgctgtgggtcacaacagcccttcttgccttcctcatcttcgtggggcccaggagagattacagaatcatagagtttggatctgaaaggaatcttagaaattccttctcttaccctctcgttttacagtaatgacccagtaagagaaatgacctgttgcatacaaaggctttcacttaccgaacatgtctttactgggtaagaatcagtgtaactcactcaggtgtggtgtttcggttgccttgttaagatcagacacagttggcgggcgcggtggctcacgcctgtaatcccagcactttgggaggccaaggcgggcggatcacgaggtcaagaggtagagaccatcctaacacggtgaaaccccgtctctactaaaaatacaaaaaaatgagctgggcgtggtggcgggtgcctgtagtcccagctactcgggaggctgaggcaggagaatggcatgaacccgggaggcggagcttgcagtgagctgagatcgtgccactgcactccagcctgggcgacagagtgagactctgtctaaaaaaaaaaaaaaaaaaaaattcaggcacagtaaccgctgtttattccagtgaagtcatcagtgtctgtaaacacctttgtatttatttatttgactacatcatttgtaaattccttgaagattgaatatgtgcttcgtgcagacctttaaaaggggtagataagtggtccatgactctggtccctgcttgttctttaccttcagggcaaagagtcagacacatctcattgctaaaacttttgactagcacctggtacttggcttaggaaaaatgttagtcattgcaaaattaagggggaaggtaaaaaaattccgtcatgcccatctcacttgtatatcccttaatattaatacctggttttttcatataatgtaaattgagtcactcagtgtaaagtattttcccagataactaggggttttatgtaatggggttttcaaataaaaaggattccagggatatctttataaaatatactaagtaaatgtccttgcagcttaatttacattccacagtatctaaatttctcttgatgattcggagtaattaattttgagatcagtaatttttggccatgggagacataaaatggaatacataataatagctggtatatattgagtgtgccaggccctggcttggtattttaagtacattgtttaatttaatcctaacaacaaccctatgaagaaggcataattatgatcttcattttacaaataaggacactcaggcacatagaggtgttgagtgatttgcccagggaggaccccacacttccaacctccaccctgttctgcttctggggtgctgactccagcagtaattttggaatttgccataaaggaaaataaaaaacctcaatgaaggctgggtgcagtggctcatgcctgtaatcccagcactttgggagagcgaggtgggcagatcacctgaggttagcagttcgagaccagcctggccaacatggcaaaactctgctctactaaaaatacaaaaattagctgggcatggtggcgggcacctgtaatcccagctacttgggaggctgaggcaggaaaatcacttgaacccatgaggtggaggttgcagggagccgagatcatgccactgcattccagcttgggtgacagagtgagactttgtccaaaaaaaaaaaaaaaccctcaatgaattaaattcagtttgatcacttgatacatttatgctatatgtaaagaagatggtaagtactttggggatactgggataaacaagatgaggttccctcccttcaccaacttatatcaactctaatatacaatggacctggggttagtgtgctattgaaatataaatcaccctgagagcaccctgggaggtagaggtttttaaaggtagcattagtggaatggggtatgcacagggtatttggagcctgaagacctgcatttgaatccccacttctgttgttggctgcagtgaccttgccagggcacttgggctcagtttgtagaaggagcataaagatatctcagagagctgctatgaggataaaatgacatgtattatgttctctaaactatgaagagtgatacaattcaaggttgtatttcagctgtggggatcagggcacacatcaaaaagatggtggtgatgggcctatgccttgatagattgggtaggattccagcagagtacatgggaaggcattctgatgaaggaaacatcttagcaaaaatgtgttttgatacggggggaacccaccccaatatttcaacgtaggttctttctattttccataagtattggccagctgagaaataaagagtacaaagagaggaattttacagctgggctgccggggggtgacatcacatatcagtaggactgtgatgcccacctgagtcttagaccagcaagtttttattaagggtttcaaaaggggagggggtgtaagaacagggagtaggtacaaagatcacatgcttcaaagggcaaaaagcagaactactaataagggtctaacaaagatcacaaggcaaagggcaaaagcagaactactgataagggtccaacaaagatcacaaggcaaagggcaaaagcagaactactgataagggtctatgttcagcagtgcacgtattgtcttgataaacatcttaaacaacagaaaacagggttcgagagcagagaagcggtctgaccacaaatttactagggtgaagttttttccccaccctagtaagcctgagggtactgcaggagacgagggcgtatctcagtccttatctcaacctcataagacagacattcccagagcgggcgtttatagacctccccccaggaatgcgttcctttcccagggtattaatattaatattccttgctaggaaaataatttagcaatatctctcctacttgcacgtccgtttataggctctctgcaagaagaaaaatatggctctttttgtccgacccctcaggcagtcagaccttatggttgtcttcccttgttccctaaaatcgctgtttttctgttgtttttcaaggtgcgccgatttcatattgttcaaacacagttttacaatcaatttgtacagttaacacaattatctcagtggtcctgaggtgatgtacatcctcagcttacgaagataacaggattaagagattaaagacaggcataagaaattataaaagtattatttgggaactgataaatgtccatattaaaatgaaatcttcacaatttatgttcctctgccacagctccagctggtccctccattcggggtccctgacttcccacaacagttttaggatggtagaattgcaatgcagggcaggtactggagagttagttaaatgttattggttgcagttcaggttatctaagcagtggtggaagaggctaacatggtaggttggggccagattgtggagacagctttgagtgtcacatctaaggaagttagattttatatacatagtggggaatgagtcagggttttgaagtattctataaagtagattggagggatccaagtctggaggtgattaggccacttaaaaagctcttccagaaggtgagataagtgatatgagggtctcgtttgtaaagaagacagcagcaatggcacaaagtcgacttgttttttgatcatttgcatcttcattataaaggaagtccagagaatgtatggctatgtcacattttgggcaatctctctgggctaactttctttaaaaggtcagattctcctggcaacagagagagactccgtctcaaaaaaaaaaaaaaaaaaaaggtcaggttctccttccaagtagtgatctggagatcttttcttttttactatctgtatctgtctccactaatacagtagacaatgtcctcagtgttgccattatttctaccaccactgccaatgtccattttcacatcgttccatatataaatatatgaatatataaaaatataaaaaattaatatatattaatatataaatatatctataaatatatgaatatatatatatatgatggggtccctctccaatcaggtagattggtggaattgaatgcagtagaaaggagaatagggaatggaaaggaggaaggaagaaggacaatggccagataaatggctgactattcaaggcatagagaatcataatatatataaaggcataatgacatcagagaactgaggcagggacctacgggtaacacagtgaatgaagttataagcagtgggacttgagggaagggtgaccaaaacaatcattagggtactcaaagaaaagatgagaattcccattatattcatttgtttttctcaccctgtaatggttgctatttaagtgataagggtatgaaatagaaaatgtttgagatgaccggtttaggggagtggtgataaccgttggtgttagagaagtatgcagctacatatgtggttgcttttgggactgtctctcaaatgtgttgaggaaccactgaagtattgatttttaagccaaaaatgacatgacagggttttctttatggaaagatcactccaaattgcatgtagataagcctatgaaaagcaaagagataattgtctaggcaggaagtagtgaggacttcttgctttcctcaagatacactgaaggcagttgaaaagctcatttttaaaagtctggtgaaaaccactttgttcacttttgttttgtgggagatgtgacacctagtaataaagagttaacaaaccctttccccttttatgaaaatttgacttttcgttaactccctagtttcccagaaaacaatgaaaaattgtgtttgttgcttatggtaaaaataacccaattggtaaattgcatctggagagggagaattgtaaatacttgaaaggaagccatagctttggacttccctgattgtagtgactcttataactgtcccttgtggaaattctagaagttctgcctatggagttgctactagagatactggctcctgtggtacatggggccttctgccctagggtgattctcattcatatccagtgtgaatcttctccctgtacctgatctgtgtcgactcctgtaaggactcccactgaagaggaacacctgatacttctttgttggcaatctgtgttttcctaacagataccgttttgagtaaactggcaccatgtatggcctatggctatggttgtcttataagtctggatgtttagttgagccttaagaagactttctgggccaggcccggtggctcacgtctgtaatcccagcactttgggagaccaaggtgggtggatcatgaggtcaggagttcgagaccagcctaaccaacatggtgaaaccctgtgtctactaaaaatacaaaaaaattagccagacatggtggcgcgtgcctgtaatcccagctactcagggggctgaggcaggagaatagcctgggaggcagaggttgcagtgagccgagatcgtgccattgcactccagcctgggcaacagagtgagactccatctcaaaaaaaaaaaaaaaagaagaaggctttctgttgggggcaatataacacttttgaaagttatttgagagacaaagtagatagtctctaaagggaattggtctcagtcttattaaggtcgaaagacaacattttttaaaccagagaaattttttaatttctgaaaatatggctaatgcaagtgtggaacttctcctttctgcagactgagggtaataaaggtgctatggtctgaatgtttgtgtcccctcaaaattcatgtgttgaaatcctaatccctgaggcaggtattaggaggtggggcctttcagaaagtgattaggtaggtcatgaggacaaagtcttcatgattaggattagcatcctataaaagagactgtaaagaatgatcaagcccttctgccatgtgaggtcacagtgcaaaggtaccatctatgaggacagacactaaatctccaagtgccttgatcttggacttcctagcctccaaacctgtgagaaataaatgtctgttgtttataagccacccagtttatggaatttttgttacagcagcctaaatggactaagataagaggcaatggagattttaactttaagatgtaacctcttacaaagctctctagtaatacttctagagaaataagtatcttcatcactagaagcaaatttgagattttgtagggagaaaacacaaagtcaaacaacgtttttatcattgttgtagctttttgaccagttttgattcatcctgaaaatagacatattgtaaccaaatacactcatatcccattgtgggaggcagttgtataaaattcatttagagactctgcttctgacaagatgaagtagacatacttttccttattcctcctgctaagtacaactaaaaactctggacatgatatataagacaaacattggaagactctgaaaggtggtgagaagaaggtagactggctagggaccttgagaccctaggaacaacaaggcaatgagtttcctaagttttctttttgcctcatattgcccagacttgaagctgaagaagctagtaacctggaaatgctgatggacacagaccaaaaaaaagcctaatgaaagcctgctctctagccacaggacctggaaatgggcagcatttcctggcaagaaagaaaacttttagacaataactgctctactccaactaaactccatagagaaaactgtggcctcagtcccacccatgccagcaaaagctgagtggggagcctagattttcacccaaccagatgtaatgagctgcccagccttcccctgccaaggtgatgtgggggaaggctgggtagggagccaggactttcatcctgccaggctttcccctcttgccatatcaatggagacacatgaggaacctaaaattccaccccaacccagcagtggaaatatttaagataattataagcgggagaaggtacaggaatgtaaagagaggtgaggtttctgtaccttgttcaaactaataaaatgatgtcaccaaatgactgataagttatgtgtgtgtgtgtatacatatacatgggtatatgtatatacatatatacatgtatgtctgtatatatgtgtatgcgtatatgtatatatatgccatatgtatatacatatatagtaacacctagagccaccatttaaaaagctatacaaagagatacatgcaaaaacactacagataaatgaaaattgaattttaaaaagttccagtgacccagagaaaggcaaaaagaagacagaaaacattaaaaaaggaagaacaaacagaaaacaaacatgaataaaatggccaacttaagccctaacatttcagtacttacattagatacaaatacattaagagacaatgattgatagaatggattaaaaaacatgccccagctgtatgctgtctacatgaaactcacttccaatatgatagagacaaggtaaaagtaaaagggtagaaaagataattcatgcagatattcatcaaaagaaagcaggagtggctatcttgatatcagataaagtagactttggggcaaagaaaattaccagacataagaagtacattatacagtgataaaagagttgtgattgaccaagatgacacagtaatcataaatatatgttactaaacagcagagctagggaacacatgaagcaaaactgatataactgaaaggagaaatagaaaaatctaaaattatagttggagacctcaacactgctctttttttttttgagatagggtgtcactcctgtcacccaggctggagtgcagtggtgccgtctcagctcactacaatctctgcttcccgggttcaagggctcctcctacctcagcctcccaaggagctggggctacatgtgtacactaccacacccagctaatttttctattttttgtagaaatggggtctcactatcttgcctaggctggtcttgaactctggggctcaagcaatccagccacctcggcctcccaaagtgctgggattacaagcatgagccaccaagcccagccaacgctcctctttcaacaattgatagaactagacagaaaattaacaaggaaacagaagaactcagcaataccatcaacaaataagatctaattagtatttatagaatgttctaccgaacaacaacagaattcccctttttttttccaagtgtctgtagaaaatataccaaagtagaccatgccctgggtcctaaagccaacttcagcaaatttaaaagaatggaatgatgtattcttcagcaacagtggaattaaactagaaatcagtagcagaaacataataagaacatcttcaagcactgggaaaataaacagcacacttctaaataaataatccatggattacaaaggaagtcttgggaactttttaaaaatattttgagctgaggccgggtgcagtggctcacgcctgtaatcccagcactttgggaggctgaggcaggcggatcacgaggtcaggagatcgagaccatcctggctaacatggtgaaaccccgtctctactaaaaacacaaaaaattagccaggcgtggtggcgggcacctgtagtcccagctactcgggaggctgaagcaggagaatggcgtgaacccgggaggcggagcttgcagtgagccgagatcgctccactgcactccagcctgggtgacagagctagactctgtctcaaaacaaaacaaaacaaaacaaatatatatatatatatatatagagagagagagagagagagagagagagctgaatgaaaatgaaaaagggatcatagctaaacagtgcaaagggggaaatgtatagcactgactgcatacattataaaagaggaaaagtctcaaattaataacgtaagcttcctcctaagaaactagaaaatgaaaagcaaagtaaacccaaaggaagcagaaggaaggaattagagaagcagaaattaatgaaattaagaacagaaaatcagtaaaacagagctggttctttgaaaagaccagtagaatagacaaacctgtagcaagactgacaatgaaaacaaagaagcacaaactaccaatatcaggaatgaaataggggatacactacagacctttctgacataagaaagataagggaatactaaaaacaactttgtatacataaatttgacaacttgaattggaccaattcctcatccaatatgaactaatatgatgagtcctataacttaaggcaattgaatttatgattaacaaacttccaaagaagatttgtccagacccaggtgatttcactggagaattctgccaaatgtaaaagaagaattaacatcaattatacacaaccccttccagaaaactgaagacgggagaacacttcccaattcatttgataaagctaatattaccctgataccaaaaacaaatgaagacagtacaagaaaactacagaccaatatctccaatgaatataaatgtaaaaacccttgacaaaatgttagtaaacagaattcaacagtatatatagaaagaattatacaccttaaccaagtgaggtttatatctaggatgcaagcctggttcagtatacaaaaatcagtcagtataatccaccatattaagagggtaaagaagaatcacatgatcatatcagttggtacagaaaaggcatttgacaaaattcaacactcattcattattttttttaagttcagaaaaaaataggaatgggggcatttctttaacttgataaagagcttctcttgaaaagttagagctaatattacactcagtggtgatgctttctccctaattttggtaataagacaaggatgtctgctgttaccactcttatttgacaaagtgctgaaagttctagacagtgcagtaaagcaagaaaaggaaataagagacatataggttggaaaggaagaaatcaaactgtccttatttgaagatgacatgattgtctacatagggaataataagtaatttacagaaaactcccagaattcataaatgagttcagcaaggttgcagggtacaaaataaacatacagaaatcaatcgcgtttctatatactagcaaagaacacacaggcaccaaaaattaaaaaatacattaccatttacaattgcccaataaaatgaaatacttagatataaatctaataaacatttacaggacacatatgctgaaaacagcaatggcgatgcaaaaagtcatagatctaaataaatggagagatttattgtgttcatgattggaagactcagcacagtaaggatatcaattctccccaaatcaatatacatgtttaacacactccttatcaaacttttttagacagagacagggttattctagattgaaaggcaaaaaaactagaataacaaaccattttggaaaagaataaagtgggaagaatttttctacctgattttaagacttacatagctacagtaatcactactctgtggtattggcagagagatagaacattgaaacaaaatagagaaccccaaaatatacccacactagtatgcccaacagctttttgacaaagatgaaaaagcagttcaccagagggaggatagcctcaacaaatggtgctgaagcaattggacatccttaggttaaaaatgaagctctactcaattctcatcccttataccaaaaaaaaaaaaatccatttactggtgcttaaaggggccttaatcctttggttcacatccttgcctcacttttacagttttgtaaggattgtattgtaggcaggtaggacatgcactagaaacatccttgattgtacctttaaagttttcttggcggttgcggtggctcacacctgtaatcccagcactttgggaggtcaaggcgggtggaccacaagttcaggagtttgagatcagcctggccaatgtggtgaaaccctttctctactaaaaatataaaaattagctgggcgtggtggctggtgcctgtagtcccagctactcaggaggctgaggcaggagaatcgcttgaagctcgggaggcggagcttgcagtgagccaagattgcgccactgcactccagcctgggtgacagagcgagactccatcttaaaaaaaaaaaaagttttcttacagtagttttcttaattaaatttggagaatgacacttcccctccccccgaaaaaaaccttattatttctattgtccaccttttgataaggcacaggagcaaatctttgtcacccagtagccatccctgtaaaaccaaagatagtttaggcataaaagacaccttatttttattgttctaaatttaaagcatgataagggaaagacaaaattaaggactatcaggtgagacaagacatgagcatagcataagtcttactttttaaaacaggagatacatgtattttaaacgatattttagaaccataccaataaagcaataatttttaggaacttaactttttaaaacaggaactttttctcaagatcatgcaagtgttcacaagaggcacatggagttaacagactattttggtgataaaaataaaactgttatctgagcatagaataacttgatcattttcttaaaaataagcccttcttgtttttatatccatttaacaatttgtagcaaaggatttataagcctctattttatcaataaattcactaacgttgaatatatcttactttttttgccacgtatagactttttaaagtgaattttaatattctttatgtgtatgtgtttaggcagatacagtacatagttctcttaataataaagttaaagtctgtaacattaattttaagatataattaatctcaatagcatattaagtggtatttgttttcatatgcatgtgtgtgtgtatatatatataatgtttttaaaagctaatataccattttatatattcccatgccattagacttagtataccatctgtatatatctccatgccatttaatatacctcgacgcagcattttaaatgtttttcataatattcttttatgcctgtgtcatactatctaactattcctttgttagaggcagttagtggtttaaaagcaaggactttggaatcagattgcttgggccagaattttttctctgccacttactttctcagcagtaaaatggggatgataataatatgtatctcatgggcttgttgtgaagattacatgtattagtttctttgaatctcttagaacagcatctggcacatagttattgtgtaagtgttgtgatggatgcctttgtacataaatctttgtcagagtaattatttccttagaattttagaaagagaacatcttggtcaaagaatatgaattcttaggccaaggcaggcggatcacgaggtcaagagatcgagaccatcctggccaacatggtgaaactctgtctctactaaaaatacaaaaattagccgggctgggtggcgggcgcctgtagtcccagctactcgggaggctgaggcaggagaatcgcttgaacccgggaggcgggttgcagtgagccaagatctcactgctgcactctagcctggaaacagagggagactctatctcaaaaaaaaagaaaagaatattaattcgtgcaccaccactactggctgattttttgtatttttagtagagacggggtttcaccatgttgatcagtctgtttctcgagctcctgacctcgtgatccgcccgtctcagccccccaaagtgctgggattacaggcgtgagccactgcacctggccaagaatatgaattcttgaggactcttgatattccagttgttttccagaaagattgtaagataaggatatgatagactatgggatagaatagttaaggttgtctaactttggcaagtacttggcatggcatctacaacaaaaaatacatgctgtgcctaagatatatggatttgagtatagcctgtatagtgtgaacagaagtaatgataaagtcgttggtaaagtaccaatactaatgttggtactagaaagatgttgaagaaacaaaacataaacagggtcactacaaagcagattttaaaagatagtttttagattttatccttttttaaaaaaactgagcaacaaataatgttgggtgcagcttggttggaaatatattatctcataattccataggctagaggtccgacttgggtctgtcccactgtattgacaggactgtgttccttactcagaggctctggggaagaatctgcatctaaatccatttagattgttccctgaattcagtttctttccactgtcggacaggggtcccagcttccttgctggctgtcaggcgtggatgggtatggtggggtgggagcagagggcagctgcctttaactcctggcacatgtgccccatgtctcagagccagcacctgcaggttggccccttctcacacttggaatctgtcccacttccctttatgccacactcctcttctactttctttgcgcgcgcacgctcgctctctctctctcctgcttttaaggtcttgtgtgattacattgaatccacctcagtaatccaggctaatcccattttaaagtccactgatgagtgaccttaatttcctctcagagtctctcacagcagcacctaggttagtgtttgagagaataaggaaggacatctttagaatttagtccttgcttgcacctccctccagggactgcagtgctccctcctgagactgagaaccagtgctgggaggacagatctcccccatgaggcctgccagctaaagtctgtgtgattgtgtgtggtcgggcctgacagatcatacataagactttgtcctgcaggtggcttcctcaagcaaacattgtaatcaatagagaagcagctaccactcatattagctgggaaagaaggatgtttgttattttggtagtgttcatagtgccttgttttaatgtatacttagaccggaatatgaagtggacatggtcttgctgctttaaattttttttttttattttggtatcacatcatggcagccacagagtgactttatatatgttcaacaggagaaaaccaaggcccagctgtgagtaccaggccagcacttggatgtgcagagctacttttctctttctcagctgcttgataaaatcgagacctttaggactgtagcatctgactgagaaaagcaacccaaatgttctagaaacatgtaacctgcctggcatgtgattataagctgcgaataaagaatttaattattatatttattaagatcagttttaataagataaagtagtttttaggctagttttgttttaaatgagaattttaatgcctaaaagagtatgtttcatttacttaaaatttagcaaaagagaaaaatataatttcctaatgaggctgaatgaactatatttgtattttatatgatgtgagttatataggagaaagatggcatgtggctccaaagtaagtggtcagaattttcaggcctgttttgtcaagccatgggtttaacagaaaaaaaaaaaaaatctgttaggaagcaccagtgaggttcacagacttatggtctggaaggtacataccaatggtaaagggagaccaaaacttagaggccttaaacagttaattactcagtgtcagcttctcatctacaacatggggtatgaatatcgacagtaataccatatagagttattacacctagttaagtcctaagtagaattattaatgctattaataatcttaactccatgaatttacataccttctacccttttctcagtcaagccttctgtttcctgataagtaagttgaatttcccaaaggtgttagcaacagtaactttttacccttttagttatttaggagtctaggatcttgtgagtaactctttgctaatttgcgtggtcaccagtaaatggttctagaagggcatttatgccttcattcaacaaatattgtagtgatcaacctctttatgtgtaaaatcagtgtcttagtttgggtagccccaaagcagactagagagaatggtgtggttttaagtttttgagaagtggtcacagagagctctgcagagttagggagagagggtgatcataggtgtatacgagtggattaccactgtgggcaactgaggttcaatcctgctggggattctttgagggactttgtggtacctgcctctgaattgtcccaccaagggacagggatgccaggttttttatcgaccattggttgaaggtcattcctgcagtggaaactttctgacactttggacttgcatcacacaggggcctgcaaccagaagataccactgagcagagagcccttgcaagttgtaggtggtaggttaacaattgtgtttgtatcttgttacagaaagcacaattaatgttggtaataaatggtaaaagtgaaagatgtttaatataaatatttttccataggattttctattgcagcagaccatgctacgagtgaaggatcctaagaagtcactggatttttatactagagttcttggaatgacgtaagtcaagtacttattggcaccttaatgtttaaatatatagctttgcaaatctagagagtgttttcagacccatcttaaagtttgtttcagaagtaacagaagttcttttggccaggagtctgtgattaggcctggctggacagggcttctctcgtaagttctttttcttctctatcccagccagcctgaaagggcaaaacaagacacaaatagttgcattttctccagtctgccttctctgagcgctcccagctaaatccttaatgtgttcagaccccttttgatgttctggccacttttagcctcttgtttacttcagaaaagttatagataataagaacttactactcagaaaaccaatgggtttacttaaaactgaccatctgttctatttttctaggctgtgttttcttttgctcaacaggtcatatccactgatcttgcaatcctaaagcatacttatttttctaaagcatgtttatttttctttttttctccagctttactgaggtatattgagaaataattttgtcatattgttgatttgtttccctaagttatgtgagcattttgcttttgagcatatagatacatgaataataaaataatctttaaatttagtgcctagataacttccattcacattgagagaaaaatttaagtaatatatgtctatatttagaaaatttgaccagttcagaaaaatacaaaatgaaaagtaatagcttccctccccaagttcttctccccagagataactgctgtccagtttcttgtgatttttttctagaaaaaggtattatgaatatatttatgacatatttaaaggacaaaatgaaaacagatttattgaacacttttgccaggcacttcaaatgttattttgttcagtcttcacaccagtcttaggaggtagcttttatccccatttcacagacggagaaaccaaagcttaatgagatgaagttactagctccaaatcccacagttggcatatggcagggctggaacctgtatccattgtctgatgggctctaatgtagacttcctgtgcagagcccccaaatagggtacaagttgacagtaagctggaagatttgaacagctgagaaaagcaagttgcaacagtttcatttccttcagtcccaactgattggtccatgagggttgtgtagtctgctttagtaggtgcagagattgtttttcatgattggagtatttgaggtgtttgatactttattataaacatgttagagtaaatcttatttgtgataagtcaatgcaaggatctaagtgggccaaggtctattatatagcagtgataatgaaataaaagattggaagcagaactctagaaactttccatttgctatatggcaataacagccatttgctcttattgattatgaacaaagtcatctttgaataatctaaagaaaatcatatatgcattctcatgccaccttactccttgccaaataatcctataccatttaaagtcatttaaggttcaggacttcagttatctttcttaaaacctcaggattcataattcattcactctctctcccatcagtctcttctactgtctctttcccctcagagaagcgtaagtcttctttgttccagaatatttcttgccctctgctccttcgcctacctccccattgtcactgccatgcttgctactgttttacctgctcacctgccattctctctccccagtacagtgtaatccagctgatgcttccccactctgctgacattgctctcatgggacctttccatatctcatgaccttttcttagtcttaatactgtttgacctttctacagtatctgatactgttagccaccttactgttgacattcacgtcttctgtgatactagtctgtccttcctccttctttcttaccacctatccttaatttcctttcctagatgttttggcatagtaagaactcaataaatgtgtttatttaactgaatgacatatttatatatgtgtttgtatgtgtgtatatatatgaaatagcaacaaggttctttatatttttcagtacaaataaacacagttctcttttggagatagccgtttctatttattaacaagtaccataatttcagctaaatgttactatatttacagaattgatgaattacagaagttttcatttttgtatttcaaatatttacagatgcatttttcatgatattttttcactgatttttcctcctgcttattccattaaaataggcttactacatatagctcttctttttagtaaaacttgaatattaagttatgttgattatagtatgaattagcctttcctgttgttaatgattcaggcttgttgttttttcattgcaggctaatccaaaaatgtgattttcccattatgaagttttcactctacttcttggcttatgaggataaaaatgacatccctaaagaaaaagatgaaaaaatagcctgggcgctctccagaaaagctacacttgagctgacacagtgagtatgagtttctatatttatatatattatagattttttaaggtagtttttaaaaatcttttttgttttgtttactgaccagtataattcaaaccagatctgcctatgacttcacatttttaataatatattgaagtgtttttcatgcatcttttgatctttgtattgttcttgggcaaatgagatgtgttttttttagagacaggctctctgaagcctctaacttctaggtagtcttcctgcctcagcctcctgagcaccttggactacacatgtgtgccaccacacccagctagtttttgtttgtttgtttttggtagaggcatagaggcaaggtctcactatgttgcccaggctggtctcaaactcctggcctcaagtgatccgcccgcctcggcctcccagactgctgggattataagcatgagccaccacgcctggcccatttgtcttttatttttatttatttatttatttattttttgagacagagtcttgctctgttgcccaggctggagtgcagtggcgcgatctcggctcactgcaagctctgcctcccggattcactccattctcctgcctcagcctcccaagtagctgggactacaggcgcccgccactacgcccagctaattttttgtattttttgtagagacggggtttcaccatgttagccaggatggtctcgatctcctgacctcgtgatctgtctgcctcggccgcccaaagtgctgggattacaggcgtgacccaccacgcccggcctccatttgtcttttagataagagaatataagaccctgaaattgtaagatatttgcctgtttgtctctaactaatttttaggtactataattagtctttcagcatccaaaattttgttcttttattattttgctacattttggatccagaaatgtgatatcatgtgttcctttaaaaattcttcaaaccattttgtaataattaacattcaaatttggtatttttataacttgagcacttaaaaatgtaggcaatttctttacattgtttatctgcatactttaaaagagattgatttcagagtgtgtgatttcgtgtgtcccttgattcaaaataaagctttggaatcaggcaggcttagatatgagtctgtgactctaaacaagtaagtggcagtttcatcaatagaatggagatgttcacacctagcccatggagctgttttaagggtttaaatgaaatataaagtacttagcacaataaatgagcattattattattcttattattgttcttgtccagtacctgtatttactgtctctttagtctcgttaaaatcatactttggccatttgtcctttctatagttgaaaacttaatatttttgtagcaggggttaggccaattatgtaaagtagcatataaacgtggtaagatttcaaagatgttacttgcttttcagaatatctattccctaggacattgtagctatgttttccttccttttgtagcaattggggcactgaagatgatgagacccagagttaccacaatggcaattcagaccctcgaggattcggtaagtttgcctgtttttatgtgatatatgtagatttgtgtgattttgtattatgtatataattatgattttaataaacctaaaacattaatgtcctaattaagtatgatcaatttattagagatatgattatttttattttccacaaataatcttatttaggagttgtttaatttcagagtctcgatctaaaattacacttaccatctcaccatgatttacttttaagtctcagaattaatttccagtagacttttttttttaaaaaagctgtagttaatactaatcccagtttctgctagcacatacacttctgccttgatctccagtctctcaatcaagatgacagtattgcaggcttcagctggctgctatagtcaatgccaaccacaaacctattaagtattagtaaatgattactgttttttggtgtcgattattcttaactgattagactgtatatgagctgatattgattaattttaaataatttataattcaaggcaactaattaactacttatacccagcccattagatctatatttgttctttaatgtattatagattttgaacctacctaagtctgttcccaagtgccttatgttttgaaataaacaagttttggaatctacttgtggtacttggacaccctgttataattatttcttccttctctctgcttttttcggggggtatcacgtaaggtcatattggaattgctgttcctgatgtatacagtgcttgtaaaaggtttgaagaactgggagtcaaatttgtgaagaaacctgatgatggtgagtctactacttactgtgttcaggcctgtctttagttgatatttactaaccacctacagaggccactgttgtagtaaaacccttttggctacaagtaacagaagtctccacttcaaccagagttttaaaaaagagaaatgattggaagaatatctgggtattttagggaactgaaagacagcaactagggtggctttccaaggcactagacacaggacctggacagccatcaaaaccctacgcttcctctcccactgcccgaccccaccactttctttcattggccaccagctttcactatttcagtgtatatctttccgcccaaaaataagttccttaaagtccattttatctgatgctcatataatgacaccagctctctttagtttataatcacatggtatttctttttcatcttttataacctttgtatgtccttaagttttaggtaggttttttgaaatagcctacgtatggattttgctgggtttacatgtattgttattattttacttagatctctttctgaactatttcaaattaaaattgaaatattaaatatttcagagtctcaatctaaacatttgaaatatttcactgtttaatttcaatccttttttaaaaaaattaaaatacttaatatccagtgctgggcgtggtggctcacacctgtcatcccaacactttgggaggccaaggcgggcggatcacgaggtcaggagatccagaccatctgggctaacatggtgaaaccctgtctctaccaaaaatagaaaaaattagccaggcatggtggtgggcgcctatagtccgcctactcaggaggctgaggcaggagaattgcttgaacctgggaggtggaggttgcagtgagccaagatcgcaccactgcactccagcctgggcgacagagtgagactccgtcacaaaaatatatatatatttaatatccaaatcttctccccaataagaaaggaatttgcttcactctgtcctcattgtgtcactattacctagagtgggatagtattgattttattttttaaagataataataaatatatcacggtgtttgatcactttttcttcatatatctcttgtagtgtctcctttgagacaggatctcactctcatccaggctggggtgctgcaatggcactgtcatagctcactatagccttgaaactcctgggctcaaacaatcctctgcctcagcctcctcctaagtagctaggaccacaggcacatgccaccacacccagctaattgttttatttttttgtagagatgagttcctgctatgttgcccaggtttgtctcaaactcctgagctcaagcgattctttcaccttggcctcccaaagcactgggattacaggcgtgagccactatgcccagcctttttagcatcttttggatttttctgttcttttatttaaatacctcaaccaaaatggtctttaaaggggttttgtttttgttttttgagacggagtttcgctcttgttgcccaggttggagtgcaatggcacggtcttggctcaccgcaacctctgcctcctgggttcaagtgattctcttgcctcagcctcccgagtagctgggattacaggcatgcaccaccgtgcctggctaattttgtatttttagtagagacggggtttctccatgttggtcaggctggtctcaaaatcccaacctcaggtgatccgcctgcctcagcctcccaaagtgctgggattacagctatgagccaccgcacccagccctttaaagggtttttaaggcaaaacttttgagattctgtgtaactgaggatgatgcctttatgtctgaaggacagttttatggaaaagcctaggtttaatttccttcagtcttgaaaatactcttctattttctttttgcatatgatgttgctgttgaaaaatctgtcaattcatgttcctttgtatattcttctgttttattctagaagctttttatattatttctttgtcactgcctgcattctgggagatttcctcaaactggaataccaattagctaattttctcccaaatgtatctgttctgatatttaattcatctattttgttcttaaacacctgttataattttgatctctaattttcgcttagtttgcttaatatgttcttgttctttttttcatattggtaatatttcatattgtttattacttttttttttttttgagacagagtcttgctctgttgcccaggctagagtgcagtggtgtgatcatagctcactgcaacctcaaactcctgggatcaaacaataatccacctcagcctcctgagtagctgggactacaggcaaatgccaccatgtatggctaattttttattttttgtagagacagggtcttactatgtatctcaggctggtctcaaactcctggcctcaagtgatccttctgcctcagcctcccaaagtattgggattacagatgtgaaccaccacacccggccggtcattacttttacatgtctaaatagtccttgggtctgggcatggtggctcatgcctgtaattgcagcactttgggaggccgaggcagaggattgggaggttcgggaggatcacttgaggccagcagttcaaggctgcagtgagctatgattgtgccattgcattccagcctgggtgacataggaagaccttgtttctacaaaaaggtttttttttaaattatctgggcatggtggcacatgcctgtagtctgtatgcctagctactcgggaggctgaggtgggaggattgcttgggcccaggagttggaggctgcagtgagctatgatccactgtacttcatttcagtataaacgacagagcaagaccctgtctccagaaaaaaaacaaaaatagctcttggtccattattctaatatttcttctgtttgaatctacagtccattgctttgggggtgttttatggttatgtttctcaaattattattttttgcctctgagcttttttcccctgcaactgttcgctattctaacacatcaagcagtgtgaataggagaatggccagatccctgtccttaacaacccacatgatctcaggacaatgggctggataagcctaggccagagattcctaggcacctagaaatgagacttaaatttatttcaccttccacaaaacacctcttcaggttggatcttcccacttcatccctcagggaagagtattagtaggagacacttccgatagtgttattccctagccctgggcgtggagagagggctggggagatcattcggccctaccagtttttctcagtttctcacaagcacaaggctcctgcactgcccttgtttactggtaaggacatctgaacaagcgagagggcaggtgccgatgcacacagcagtgagggaggagcaagagcaaaactctgttctctcgcagccattatgcactgccttctggtccaggccagaactaccacctcccacacagcccaagttaaaacagtcacccggccccatcctcacccattctccccagctgtcaccagccgggtttctttctttctttccttttcttttcttttcttttcttttccttttcttttccttccttccttccttcctctctctccctccctccttccttccttctctctttctctctttctctttctctttctctttctctctttctttctttttcctgcattttccatctatgttcctctaggattgatcttggagaaaggaggcagagataagagtcaaaccaattcaacataatggtccccaaataaatttctgaggtcatatttttccatttaagcaaacagctctgacatactagactctcaatctcagttttgaattcctgggagaaagactctcgcagagcttgggttgcctaggatagtatttaaaagggtttgtatgacccaagcatctgggtcttttggttgtgggggtaagccatgctaccagctcccttcagcacctccctattttctttttcttctttaaaataagacaatttctgtaactactgaactggtagtgtggtatcatgaaggtgaggcaaatgcctgatacctaaaagatgcagccagtcccacagtttatttcaggagggctggtatttgcaatgtgtgcaagataacattttagtcattatgaaaagtatgacttttcatacttttctgacaataagaatttttaaaatttaaaactgtaaacaaaataatgtacttcattaaaatgcaaagtaaatctttaattaataaaagtttttaaggccaggtgcagtggtttgtgcttgtaatcccaccactttgggaggcaaggcaggaggattgcttgaggccaggagtttgatagcagcctgggcagtacattgagatcccgcctctacaaaatcaaaaaattagccaggcaaggtggtgcgtgcctgtcgccccagctacttggcaggctgagctcaggaggtcaagcctgccttgggccatgatcatcccatgcactccagcctgacattcagagcaagaccttgtctcaaagaaagaaaaacatttttatggtgttttcttttttagtcttttcaataatgaaaattttcattttacaggtaaaatgaaaggcctggcatttattcaagatcctgatggctactggattgaaattttgaatcctaacaaaatggcaaccttaatgtagtgctgtgagaattctcctttgagatttcagaagaaaggaaacaatgtgattcaagatatttacataccagaagcatctaggactgatggatcactgtcccgattcaaattattcttcagtccatttccccttcctatttcagctgttccttttcacctaactgttcagtcattctggttttcaagcagtgctttatctcatgtccttgaatatagttgtgtaactttattttttaggtaataattagaacagttcccttcagaggctgcatttgccttcttctgccacctaaatattacttcccttcaaatctgcctttgaatcatcatttttaaaaaaaaattaacatgtttttgttgtagttatcttctggggtttcaattcctcagaaacaacttttttcacaacggaaaggaaagaacactagtgttctttcagtaaagtacaaagtgtttattttacaaaagagtaggtactcttgagagcaattcaaatcatgctgacaaggatactgatagaaaaagtgatttcttcttattataaagtacatttaaagttcaaggactaaccttatttatttgggaaaggggaggaggaaggaaatgatatggtacccagacactgggctaggctgcaactttatctcatttaatactcccagctgtcatgtgagaaagaaagcaggctaggcatgtgaaatcactttcatggattattaatggatttaagagggcatcaatcagctcaactcaagatttcataatcatttttagtatttagattgtgcctcaaagttgtagtacctcacaatacctccactggtttcctgttgtaaaaaccttcagtgagtttgaccattgtgctcttggctcttgggctggagtaccgtggtgagggagtaaacactagaagtctttagtacaaaactgctctagggacacctggtgattcctacacaagtgatgtttatatttctcataaagagtcttccctatcccaaggtcttcatgatgccagtagccatatatgataaattatgttcagtgataacttagttatcagaaatcagctcagtggtcttccccgccatgattcacatttgatgagtttttaaaaatcaaagtgattttgaaaatctctaatggctcagaaaataaaaacatccagtttgtggatgactatatttagatttctctagactctagtggaagacctttggaaaggccatgccaaccgtgcttgtactgctagaagcactttatgtttcctttttgggtgaaatggatttatgtgagtgctttaaacaaatagcaatacttatagactgaaataaaatgaaacttcaaataagactatgtttaatttgta

SEQ ID NO: 394 - DNA, 2453 bp, Homo sapiens
  source 1..2453: mol_type = other DNA
cacgcgtgacagttaccggctggagagccggaggtgggaccgggagcaggggaccgtagaaccgggccgcgctcctcccctcctagagttcgtggaggcgcagcagagggccgtccctcttccggatgtcggactaagcgaacagcgcccccactgccggccggtagcagccggaagtgccagaccggaggtgcgtcattcaccggcgacgccgatacggttcctccaccgaggcccatgcgaagctttccactatggcttccagcactgtcccggtgagcgctgctggctcggctaatgaaactcccgaaataccggacaacgtgggagattggcttcggggcgtctaccgctttgccactgataggaatgacttccggaggtaaccgagcccgaggaacttggtccttttctggcccttaaatccgtatttcccctttcttgcgaggctggcgcctcagggttttttgtttttgttttttaacattaccagcattgtggcgtcttcgtagctctggctgtgcctcactgagatccctggccaggagagttcccgtgtggcaaaagcgatctttctgtcatgtggctgtatctgtaatgtcaccctgatcaagggaagaagtgctagcacgtaaacaggctttttcggccctggactagtgctttagctgggctttgcgtttgatcttacatttcttttttgttttttttttttttttgagacggagtctcactctgttgcccaggctggagtgcagtggcgcgatctcggctcactgcaagctccgcctcccgggttcacgccattctcctgcctcagcctcccgagtagctgggactacggccgcccgccaccacgccctgctaattttttgtatttttagtagagacggggtttcaccgtgttatccaggatggtctcgatctcctgacctcgtgatccgcccgcctcggcctcccaaagtgctgggattacaggcgtgagccaccacgcccggcctttttttttttttttttttttttttttgagacggagtctcactctgtcgcccaggctggagtgcagaggcgcaatctcggctcactgccccttctgcctcccgggttcaagcgattctcctgcctcagcctccccagtagctgggattacaagcgcgcgccaccacgcccagctaatttttgtatttttagtagagacggggtttcaccatcttgggcaggctggtctcaaactcctgacttctcgatccacccgactctgcctcccaaagtgctgggattacaggcgtgagccaccgcgcccggccacatttatttctttttgagacagcctcgctctgtcgcccaggctggagtgtagtggcggacctcagctcactgcagcctccgcctcccgggttcaagcgattttcctgcctcagcctccccagtagctgggattacaggcgcgcaccaccacgcccagctaatttttgtatttttagtagagacggggtttcaccatgttggccaggctggtctcgagctcctgacttcgtgatccgcctgccttggccttccaaagtgctgggattacaggcgtgaaccaccgcgcccagcctgaccttacacttactaggcacaaaaatgaactccaaattcccacgtgggtcttgagcaacctgccgtcacaaccacgtatcaacgcctcgggaaggtggtgatggaagcctttccccccagtacatttcgttaactgtacaactgactcagtgaccacagggttaataaaacacattgtttttccaggaacttgatactaaatttgggactctttgctgcgggagtttggctggccaggaacttgagtgacattgacctcatggcacctcagccaggggtgtagccaagtaggtaagcactgaactacacccatgcgtgtcttaggagacctagagactgggtgaagcaatgttttctgtcaagtattcatgaaatgtacaaaagaatgtgatgtaaaacccttaactattcctagttaaatgtgttttcagatgttgaaagggatttaagtatctcttaccagtttccctcccatacttttacagttctaatgccacctgtcgtcttatcatctgattgcagacaaatggaatcctgtgctgaacccgaatcttccaaaaaacagcctacaatctgtgaccaccacaagatgtgccctgatggcagctgaagtttgattcagatgggcacttttcttccccttccctgcctagtttccttttgttccttgagtccacgcagaattccattctctggtcagcagacaggcttaagctaaagtattgcctctattctgtaaagttctgtacatagttcccaagcttctgcagggggtgatttttgctcttgtcctgagaaataacagtgctgttttaaaaaacatttgaaataaataccgcacacaaaggcag

SEQ ID NO: 395 - DNA, 7722 bp, Homo sapiens
  source 1..7722: mol_type = other DNA
gaggggggtcccccccgcaggtactccactctcagtctgcaaaagtgtacgcccgcagagccgccccaggtgcctgggtgttgtgtgattgacgcggggaaggaggggtcagccgatccctccccaaccctccatcccatccctgaggattgggctggtacccgcgtctctcggacaggtcagagcgggtcgccgggtggggtcgctgcaaaaaccctgccccggccgcagccggagaggcggagcctcgcggggagggggcgggaccgccgagacaggcctggaaactgctggaaatgccgcagtgccgccgccgcgccttccgccgcatgtcggcaaagagtccccgccagccccggccggcgccctccccctacgctgagctgcccctcagcgcgaaccctccgcccttcctctactcctgcgagagtcgggatctggggctacccaaggttgggtcccgaatgccagtccctctgtcgggacgcgagatgtgtagggcagatgctaggaagaagattgggtctgggagcggtggtccgcgtggttagctgcctccgctctttttcggtgtcccccccagtcccgcccttgggtgtggggacgcctgccccacaagtgtttagggaggtcagtgggttcctcgcccgtagagacaccgtttatgccaaatgagcactcctcatccccgctcttgatggagtcatgtcctagacgtgaaactatggggctgtgatcacaagcaaatgtgtgggcggatccgttgcttgggttcttccccgccccctctttttttcggaccatgacgtcaaggtgggctggtggcggcaggtgcggggttgacaatcatactcctttaaggcggagggatctacaggagggcggctgtactgtgcttcgccttatatagggcgacttggggcacgcagtagctctctcgagtcactccggcgcagtgttgggactgtctgggtatcggaaagcaagcctacgttgctcactattacgtataatccttttcttttcaaggtaaggctgagatctccgctaggcttctttccctttagtgctgtattcgtgttgtttttgtttttttctgtcctttagggagccttagtctagatgtcggggtggcttgtggataacgctctggatttttatagggtgagggtagtggtgggtgaggttttttgagtcctcctcggttttctctagtgtgtttggggggtggggctttctctcggcgcctgctggccgtagcgaggtgggctgtggggttggggcagtgggcggctggcagctgcacgtggtggccgcgcggcccgggacgctgccatttttgcccctccacttccggacgcggctacggggcgtcggagggggaccgcagggtggcgggggtgcccgctcgggtgactcagcacggccttgtgggactggctttgtcacctctcttatcggacgcgttgttaaagccttcttgggtgctttgtttctgtgagggagggttgacggtgtgggaagagagctttcggtctccagcacccgatactccctccttccagatctttcttgcagtcccggtggaggaggggcggggaggggagcaggttctggaagattcatgggctccttcctccgcccttcctcgagagctgagattgttctggaagcttctggattctggcgccccgccccagtgcccggatgctggggcgagggagggtgcactgcggcgccccctcctcgcgtggtcctggccgacgcatgtccggcagtgacgagtgtcggcctggtggctacggccaccatctttcttgggtttggtcctgttctgtaattttgtgctgtgaaagggtcgtggtggagcttttggcttaagaattctttgtccggatttaattgctcctccggtgggtatcgtatggatcccaggttattcctccctgccctatggggcaggagtgtcccgcccttggactggtcttaggaactgacacctcagggggagcagtttaaagttagtgccatttttatcttaaactagtcactttgatctcccccaaataaagaactgtaggtagtgattttcacatttaaatttgtgtaaggattacttgggatctctagatacctgggttggaccaacattatgatttttctgccatactaccagatgatgctgaggctgctggtcaccattctttaagtaggtgggttctgtgacatttggttgaagaatatttagcttattttctttttccttctgaattttcaggcctcccacttagtgtgtagtctgagatctttaagagaatgcatttttagtcttgggaagggatagtactccggttaaaccagtctgaactcactgtctaaggtcctaacaaatgatatgacctttaggatttttaaacatggggccttagtgttcttttgtaattaatgagatttttattttagatgcctgaggaagtgcaccatggagaggaggaggtggagacttttgcctttcaggcagaaattgcccaactcatgtccctcatcatcaataccttctattccaacaaggagattttccttcgggagttgatctctaatgcttctgatgtaggtgctctggtttccacatttggcatggtttttttttttgatactctagaaggaggggaaaggagtggtttggcctttgttggggactactattgaagggggtaaacttgcagctattccaaaaagatgggttttactctggccatcttgaacttggaagggactatgtccagaataagtgggctcatggaactaactggttctaaagcctcaagatagggggcaatcagatttgaggctgagagaggtaaaccaagattttctttgaagatacgggctttaagaaagcaaaagtggctgagcgtgttggctcacacctgtaatgccaaggcaggaggatcacttgagcctaggatttcgagggcagcctgggcaaccgcgagaccttgtctctgcaaaaaattaaatattagttgggcacggtggcatgtgcctgtagtcccagctacttgggaagctggggttgggaggatggctcgaacctgggaggtcaaggctgcagtgagctgtcatccttgccactgcactgtagcttgggcaacagagcaagagtctgtcttggaaagagcaaaagtaagttgctgtttgtatttccaggccttggacaagattcgctatgagagcctgacagacccttcgaagttggacagtggtaaagagctgaaaattgacatcatccccaaccctcaggaacgtaccctgactttggtagacacaggcattggcatgaccaaagctgatctcataaataatttgggaaccattgccaagtctggtactaaagcattcatggaggctcttcaggtattgcagttctgtaggcattcatacttatctgtgttctttggttttttgcttctttaaaacttgtgattgactttaaacttgttggcaggctggtgcagacatctccatgattgggcagtttggtgttggcttttattctgcctacttggtggcagagaaagtggttgtgatcacaaagcacaacgatgatgaacagtatgcttgggagtcttctgctggaggttccttcactgtgcgtgctgaccatggtaagttagcttttctgttacaaggtagttgggttaggattttctgggctcacaccagtagcagaaattttgggcatcctgtctgtaaagcagttcttcacagcagttctgctgatacttactaattgctggtctcaactgcatatactttttaccctgttacacgcttgtaattgactcttctaggtgagcccattggcaggggtaccaaagtgatcctccatcttaaagaagatcagacagagtacctagaagagaggcgggtcaaagaagtagtgaagaagcattctcagttcataggctatcccatcaccctttatgtgagtatggacttttaaatcttttacacttaacgtgcaggatgtttcctgttctggagaatctcattgtccctggcttttgctttccctggtagtgttttgtactccaaggctaacttctgtttttgttacttagttggagaaggaacgagagaaggaaattagtgatgatgaggcagaggaagagaaaggtgagaaagaagaggaagataaagatgatgaagaaaaacccaagatcgaagatgtgggttcagatgaggaggatgacagcggtaaggataagaagaagaaaactaagaagatcaaagagaaatacattgatcaggaagaactaaacaagaccaagcctatttggaccagaaaccctgatgacatcacccaagaggagtatggagaattctacaagagcctcactaatgactgggaagaccacttggcagtcaaggtgtgagaagcctttgcatgttggctcaacatgcacatatggagaggaatgagttaggtggaagagtgttgggtaatagacacacggaacttgtccaactgataacagaaatgtgatagccatgtgatttcacttactgattaccctgtcatagtgaagtgccatcatttctaatgacctcactttctcttcttatggaaatctgggtaatgtctattggcagccttacacatccagggttctgatcagaggggactgttttctacatacagctagtacccatctagatcgtggagggcattaaggctcagttttctcaggagctgcttgttgtgtgtgctctatcccttaggcttagggaggatcattgttccacttttagataatttggtgttggggctaaaaggtcctcttttgaaatgtaccacttatttttggtttctttcagcacttttctgtagaaggtcagttggaattcagggcattgctatttattcctcgtcgggctccctttgacctttttgagaacaagaagaaaaagaacaacatcaaactctatgtccgccgtgtgttcatcatggacagctgtgatgagttgataccagagtatctcagtgagtatctccttggcctaatttagttgggtgaagtcttgggaggttttaggcattctgctaggatattctaaggtaacagttttctgcaatacatagtaggtgtaagggttcaggaggctattagagccttctgtttgaatctggggaccaggtctggtctagctgttttttactgagctttctcaccctggttgatggcagattttatccgtggtgtggttgactctgaggatctgcccctgaacatctcccgagaaatgctccagcagagcaaaatcttgaaagtcattcgcaaaaacattgttaagaagtgccttgagctcttctctgagctggcagaagacaaggagaattacaagaaattctatgaggcattctctaaaaatctcaaggtaaaaaggcaaataatgcttattccctttaccactttcttagtaataacaataaattattccattcacattgaaagtgaagttattgtagttaagctggattgtttttcctcttcccacccttcaagcttggaatccacgaagactccactaaccgccgccgcctgtctgagctgctgcgctatcatacctcccagtctggagatgagatgacatctctgtcagagtatgtttctcgcatgaaggagacacagaagtccatctattacatcactggtgcgttgactctgattgaagcctttttggaggagtggggagcacaattagggcttcctgggaactggcagtatgaggcattttagtcactgagttcatttaattaccctacaggtgagagcaaagagcaggtggccaactcagcttttgtggagcgagtgcggaaacggggcttcgaggtggtatatatgaccgagcccattgacgagtactgtgtgcagcagctcaaggaatttgatgggaagagcctggtctcagttaccaaggagggtctggagctgcctgaggatgaggaggagaagaagaagatggaagagagcaaggcaaagtttgagaacctctgcaagctcatgaaagaaatcttagataagaaggttgagaaggtaagccattctggggctaggatatattttgtaacatcttcgaggtgggctccctcacaagcatgtttctatacaattagtggtttgaggcagcctatttactgtttcatgccttcttgcctcttgttctcttctctagtcaggtttaaggctattttaataaaatttggcacagattaggcattgcttcagttaacttctgagagtagataaaataccatcattttcttttttttttctttttttgagatggggtctcgctctgtcacccaggctggagtgcagtggcacgatctctgctcattgcaagctccgcctcctgggttcacgccattctcctgccttagcctcctgagtagctgccactacaggcgcccgccaccacaccccggctaattttttgtatttttagtagagatggggtttcatcgcgttagccaggatggtctccatctcctgaccttgtgattcgcccacctcggcctcccaaagtgctgggattaacaggcgcaagccaccatgcctggccgattttttttttttttggactggatctcgctcactgcaaactcaagtctcctgagtggctgggattacagatgtgtgctaccacacccggttaattttttgtagacagggttttgccatgttggccagcatggtctcaaactcaagtggtctgtccacctcctccccctgctggaattaggcttgacaatgcctgttttctctttcaaagtggtaatgtcaatctaaggcttttgtgatcgtccacaggtgacaatctccaatagacttgtgtcttcaccttgctgcattgtgaccagcacctacggctggacagccaatatggagcggatcatgaaagcccaggcacttcgggacaactccaccatgggctatatgatggccaaaaagcacctggagatcaaccctgaccaccccattgtggagacgctgcggcagaaggctgaggccgacaagaatgataaggcagttaaggacctggtggtgctgctgtttgaaaccgccctgctatcttctggcttttcccttgaggatccccagacccactccaaccgcatctatcgcatgatcaagctaggtctaggtaagtagctttggtacttggtgtggcaaggagtttgtgcaactcgtctcctctatggatttgacttaatgctatttggtcaagtctcacatggcttaattttacttcaggtattgatgaagatgaagtggcagcagaggaacccaatgctgcagttcctgatgagatcccccctctcgagggcgatgaggatgcgtctcgcatggaagaagtcgattaggttaggagttcatagttggaaaacttgtgcccttgtatagtgtccccatgggctcccactgcagcctcgagtgcccctgtcccacctggctccccctgctggtgtctagtgtttttttccctctcctgtccttgtgttgaaggcagtaaactaagggtgtcaagccccattccctctctactcttgacagcaggattggatgttgtgtattgtggtttattttattttcttcattttgttctgaaattaaagtatgcaaaataaagaatatgccgtttttatacagttct

SEQ ID NO: 396 - DNA, 29724 bp, Homo sapiens
  source 1..29724: mol_type = other DNA
tctgtttacgaatgtttgggcgcgaattactctaagcgcggctctcagaagggtgcaagaagaatcagtggtgagtcgtgatatccttaaccggctgggtggatctaaagttcagggatgagttttaaagccaacgcgtttgtggcagactccgcagtttgcatttgaggatagcgaggggggattgcttacggggaaatgcccgatgtcctaaaagatctgcccttaggatcctgagattgagatgtttgattaggggggagggagcaaagccatgaatacttcctatttctcccgaatcatcctcatggctcatcctcattgctaaatttctcccgcgggcactagtgaagtcaagtgcagccttggacattagtgtctgtgtttctccaggagtcctactcactcttgtgcccacatagaggtctaaattgaggtaattgagtcccatgagtatcaacaagctggtaagaaaaacaagacaacctagaatgcctccctctctcctaaagcatatagtctggcggcaaactactgtaccagccttatttcttttcacttctcctatacacattaaaagcctcgctggattatcctgtccctgaacacgccaggttttttgtgttttttccgagctttcctgccgtccgagttttactgttttcccttggatgcttcatttttctactttttggctaaatatttcaaaatgttattagaataatactttttctatgaataatgtacaaacatacttccgagatattgcggggtcggttccagaccaataaagcctgtcacacgatttttttggtttcccagtgcatataacagttgtatttacactgtattgtaacctattaagtgtgcaatagcattatgtgtaaaaaaaaattacatgctgtaattttaaaatattttattgctaaaaaatgctactaatcatctcagccttcagcaagtcctaatctttttgctggtggagggtcttgcttgatgttgatggctgttgaccaatcagggtgatggttgctgaagattggagttgctgtggcagtttcttaaaataacaaaataatgaattttgtacagcagttgactcttccattcactaaagatttctctgtagcatgtgatgctgtttgaaagcattttacccactgtagaacttctttcaaaattagagtaaatcctcttaacccctaccattgctttagcaactaaggttttgtgatattctgaattctttgttgatatttcaagaatattcacagcatcttcaccaggggtagattccatctcaagaacttcgctcattcataagaagcaacttcttttccactagttttatcatgagattgcagcaattcaggtacatcttcaggctccactatttctcttgctattgccaccagatctttcatcacttcctccactgaagtcttgaacaaagtcatgacctttacaaagtcatccatgagggttggaatcaactttttccagactcctgttaatgttgatattttgacctcctcccgtgaatcatgaatgttcttactagcatttgggatggtgaatcatttccagaagttttcaatttattttgcccagatccatcagaggaatcactgtctagggcagctatagctttacaaaatgtatttcttaaataatataacttgaaagtcaaaattattctttgattcatgggctgcagaatggatgttgtgttagcagacatgaaaacagcattaatctccttgtacatctctatcagagctcttgggtgaccaagtacgtggtcattgagcagtattattttgaaaggaatctttttgtgagctgtaggtctcaaagatgggcttaaaatactcagtaaaccgtgctgtaaacagatgtgctgtcactcatgctttgttcttccatttccagagcacagacagagtagatttaaaagaataagagccctaggatatttcagaatggtcaatgagcattggcttcaagtcaccacccatattagcccctacaagagagtcagcctgtcttttgaagctttgaagccaggcaatgacttctttctagatatgaaagtcctagatagcatcttccaatagaaggctgttttgtcttcattgaaaatctgttgtttagtgtagccccttcatcaattatcttacctagaactggataacttgctgcagcttctgcatcagcacttgctgcttcactttgtactttcatgttatgcagatagcttacttccttaaacctcaggaaccaagctctgctagcttcaggctcttttgctacagctttctcacctctctcagctttcatagaattgaagtgagttaagaccttgccatgaattcgtctttggtttaagggcgtgttgtggctagtttgatcttcaatcccggaccactcaaactttctccctatcagtaataaggctgtttttgctttcttatcattcatgtcttcactggaatagcactttaaatttccttcaagaacttttcctttgcattcacagcttggctaactggtgtagtttccagcctatcttggcttttgacatgcctacctcaccttgcttaaacatttctagcttttaatttaaagtgagagaggtgtgatttttgctttcacttgaacacttagaggccattgtagggttattaaatggcctaatttcaatatcattgtgtctcagggaatagggaggcctaaggagagggagagaggcagggaacagccagttggtggagcagtcaaaacacaacgcaacatttacctattaagttctctgtctgatattggcatggttcatggtgccctaaaacaattacagagtaacatcaatcaccataacagatataataatgaaaaggtttgaaatattgtgagagttatcaaaatatgacacagaaatgtgaagagtgagcacaatctgttggaaaaatggcatcaatatagttgttcagtgcaggcttgccacaaacctttagtttgtaagacaacaacaacaaaatacagtgtctgcgaggctcaataaagtgaaacacaataaaaagagttatgcctgtacattcttacccatagcacaaaccagtttaagacagtcattcgctcacttgcctctttataacatttataaatacacatagtaattattttcatatctgtctctacctgtgcactatcactaagctgtggtttcccttggatctaagaatgggacaaaatacctattcatttttatatgcactgtgagtagcccagaagtgatagaaacaatgtcttttgtttattggattcttactatgtctcaaataccgttctaggtggtttatatattctttgttacatcatttttgctttacaaaagcctttaatgttagtacttttattaatcgttttactaatggggaaaatgagttaatttactggcccaaagatatacagttaattaagtggcagggctagatttggagcttgaacaatttaccctcgttgcaggactgctcttaaccattatggtagtgttctcaacctgggttgattttgacccaggagacatttggcaatgtctggaaacaattttgattggctctactcaggggttggaagtattctagcatctgacggtctacgtagacccaagcatgctgctaaacatcctacaatacacaccacagtctccacaacaaagaatgatccatctaaaatgttaatagtgctgaggttgagaaactttgtgctatagtctagtgcctcaagtaggtttcattgttaacagtacttctcaaactctgttagaccagttttgctttttatttctaatcagtcataactgatacttttgtaaaatgcaattaaaaatcaattattagtcaaactcccttgtggtataataccaggagtgaactctgatgtaaacaatggattttgggtaatatgatgtgtcaacaattacagcaaatgtaccagtttggtgtgtgatgttaatactagaggttgcagggaatggggaagggcagggattatataagaagtttctgtatgttttgctcaattttctgtaaacctaaaactgttctgaaaaaagtcttttttaaaaaaatactaattactagaaaatgatatggcaaagacaaggctaattattttatgataaggttcaatgtgcataaaattactctatcaaattgctacaaaagtttctaaatgattaccttcaatttccacacttgattatggcaaacagtttgaatgagatttggagtagcgctaaattacatgttattttaataaagaatatcaagaagaaaatgattaatggacccaagctataaataagtaccaaatgagacagagcaaaagagccacagacttagagagaaatgaagtagaatagttaggaagattttgaaaagaaggtggctcatgatctgagagggtgggcagagacagaagagagctgctcaggtagaaggtacagtgtatgtttgggaggcagaattactcaaagtgtgttcaggaaatcatcaaatctagctagagagggagatttgattaaggagtagtaggagagaagtatgaaaaggtaggcagagttaggttggtaaggactaaaaatggcatggtaaagagtttgaatgttacacagaacgtattggggtaaattttttactcaattaatttgttccaaaatttgggattgggagggactaggcagggcttgctcatgtcttgtccacacagtgtgggctgcagcatattgacttaggtacatgtaccagactggccagttggtgctggctcttggctgggagctcagctaagactttcctggggtttcagttcctctcggtgttggccttcctcctatggtggtggctgggttataagagcaagtgttggccgggctcagtggctcacgcctgtaatctcagcgctttgggagaccgaggcaggaggatcacttgaggtcaggagttcgagaccggcctgaacaacatggtgaaaccccgtctctactaaaaatacagaaaattagctgggcgtggtggggggtgcctgtagtcccagctacttggaaggctgaggcaggagaatcgcttaaacctgggaggcagaggttgcagcagtgagccgagatcgcaccactgcactccagcccaagcgacagtgcaagacttcttaaaaaaaaagcaagtgtttctaagcaagaagaagtcaaagttgccagtctcttcatgtctaagccagtaagctagaacagaatcacttctactatattctactgctcaaacagcttcagagtctgccaagatttaagacaagggaacatagaccttactgctcattaacaatcatgagaaggaatgtgtaccatttttaatctaaaatctcagctgttacttgtcccttcacctggatgctcttattcagtgaacaacttgaactattgtacatgtcagcccttccaggagagatctacaagtgaaattctgtcatgtggatgggtttttaagtaggggaagtataagggtgtagatgtaaagttgaggtaattaggcattttagaaattgaacacaagatagagaatgagtgtttggtaaggtatcacattgttcaagagcagggtaaagtgatattttgacttccactgctttttgtaactggtgtgatatgtggttgctaaatgtagtttgtgatctttctgttaattctttcccaattttttttccagtcttgtgtggaggggagtttgaagcttttaacgtttgagaggatagatttatcattgtctttctctaaatctgcacatatatttaaactgtatcagtataataattctgaatgtttagaaaataaatgatgaataatttatctgtatatctagctatggctaatatgtgtatatgtttatatgtgtatatatatattttctaggcatatatagctaatatgtgcatatacatatttccttgtatactgcacctaacttctatccacttcttatggtgtaatgcaagaataagtatttcattcttctgttccttttatcagaaattagtttggtaataaaagagggaaaattactctaaattttatcaacatccccatttccaatcccatgtctgttttgtaatttgtgggagggcagggtattcagtacatttctgtactcttgttaaaatgcacatagcccagataggattgcagtttaaattcttaatagtgtcagactaacacatgaatttccacatagattgatggtataatcctaaaaagtgtctccttccatttttggcaaaaattgggtaatggtaaatttattacttaaaataacaagacctaggctttactccttgaactgacattatctgtgactactttatatttctatttccttggacttaaacatggagaggatgttatcatacgatagagtataaaataagagatacaaaagcatttttaaatgattttctaaaatccatacaaacggaagttaatttctaggaatgaaattgaattagatatccttattctgataagagtgaaaattatttcttttaaaaaatgcttgtttaaaagcatacaatactatccccaaacttttattatgatttttctttaaaaaaaaaaaaaaagagaatgtggaacatttacaggatagttttttaaacaaaacattgtgcaaggctttagctttttttgtattattttcatctttacagatttttttttttttcgaagcactgtgtttagatcaagatgtctggtaaagcaaatgcttccaagaaaaacgctcaacagttaaaaagaaatccaaagagaaaaaaggataatgaggaagttgtgttgtcagagaataaggtaatgaaaatatcaagtttctcatttagaaatcttcaactgtggccaagcactatggctcatgcctgtaatcccagcactttgggaggccgaggtgggtggatcacgaggtcaggagatcgaaaccatcctggctaacatgatgaaaccccgtctctacttaaaaaaaacaaaaaaaaaaatacaaaaaattagccaggcgtggtggtgcacacctgtaatctcagctactcgggaggaggttgaagcagcagaattgcttgaacccgggaggcagaggttgcagtgaaccgagtttgtgccactgcactccagcctgggcaaaaagagtgagactccgtctcaaaaaaaaaaaaaaaaaaaaaaaagtttcaggttttaccctactcattaggcaatgcctatatttgtatataacattatttcttaggcaaagtgagtaataattcatttaaaacattctttgacactgtataaaattctgttattatcatcattgtcaagaattgctttagtatgtcctctctgtgataaatatacaccatttttctttagaagtagcaacatacattttttctatgtactagaaattatatgaatactctttgacatatataaaaatctattgtaaaagcaggatccttttatctgatgtttaattctgtttatgtttatgcatgtgtttttccctctaggttagaaacacagtgaaaaaaaataaaaatcatctgaaagatctgtcttctgaaggtatttcttttctattaccttgtttaacctgcttctatatcaagctatatctacattcgtgaaaaaatgttcagcatcttgtttatgagttctgcaaaagatagtaataaacaactacatttgcatttttgtaagaatatgtagtagtggttagttattttggtcaactgaaattttacttagcacctctgacgaaatactgtagaggcttcaatgccactgagttgataggaaatagagaaactcaaagtggcccacagcctgaattattagtgatctgtgatataaatacaaatgtactaatttttcttcaagacaaatatgctttctgttctgtatagattagtttggaaccattattataagtttgtttggagtaaactagtttagagtagttgcctttgcttaaacatcactgtttcatggaaggattctctacgtctcctcagccaacactaggttaggtcctctggttttatactgccatagtgtacaatacttttttttccttttgtatgctttgcacacctataatttgttcaatatcccttctctccaacactcattttcatgagatccagtactatttcttcttttttttaatacctaataagtagaacagtaccaacagcatagttgacactatctatttgtggtttgattagtctgttttgttccagttgccatccaacatttggaaaatagtttcctggtcctctcaatgaaatgtttaaagaatttaggccatttctgagaatgaaacttttcataattaaagtttgattcttcatttaaaattatttctattatcacttggtagtatttctgttaacttatcaatagaaagcatattcatattcaacacctgggatgttacagctgtgtgataaaaagtaaattaaacagtttatacagctttataatattttgttctgataatttcataagcttttttagatgaaaacattccatttttaagcaaaaacatgtaaaacatctagattgatcagagcctcttctattactaacgacaggacaaacaaagcacactaacctaaaacacggaaagacagcagccagcaagagaaaaacctggcaacctctgtcaaagagtaccagagaccatttgcaaactatgatggaatcagtaataatgtgagtataaaattgttccatttcattcttttggttcccatttaggtgtttcctatggatattattcttttaaatattgctatctattttaaggtaatagagtatatttctatttcggaagcagataaaattaatgtgacggtatttgccttcagcagaaaagtctttgttaattttagaaacctgaaattccatcggtgaaataaaagcaagtgtttgtggcctgacttgctatcaataaaattttaatttttgtcaatagagattctttaggaagaagttgagttcaaagtgacactttacatagaagctaccacactggaggggatacagagaaaataagacagaattctgccattgtggagcaaattctatcagaagagccaggcatgtaacttattacaatacagtgtggcaaaatatatatataagaagaattttttcattgtacttctgtttaaagtgtctttaatatgaaaggaaaagtgattgattttgcctggctagtggggaggggtacttgagagaaatcagagagaaaaagtacaaagagtatatgatttgtgcatcagactactatttattccatctttttttcttttctaggacaattttgagtaacagtattaaagaaaaagaagaaatacaataccatctcaacttcctgaagaaaaggtaatactattgcataattaaaatgattaaaacataatttttaaaaacctgacttctttctatgttgccaaatagacacttgtggaatgtaagtttttctttttttttagagaaggtgaacaacttggaagtatgttttctcttttttctaaactgctgctccacatgtttctcaaataagtttcaggggaacttacaaaaaaaaccctgaaaatcacgaaattctgtttccacagttcactcttccatatcagaatttgaaaacagttttgtcaacttgaactcccttcaacttcatttttaataatttgaagttaatagttcacaactcttatctatctgatatttaccctattgctgtgtttttccacttcatattgtcttaaattatttgcatgagcaacaagtataattttctaagatattattgctcttcatcttatggtaaatcaccaatggagatttcttctcaggagttcttaaaaggcacaccactgcctgtgattttcaataattacttttctctagtatttacacaactttttctttttataagaaactaagcttcataagtgaaggagaaataaaatcctttacagacaagcaaatgctgagagattttgtcaccaccaggcctgccctaaaagagcttctgaaggaagcactaaacatggaaaggaaaaaccggtaccagccactgcaaaaacatgccaaattgtaaagaccatcgatgctaggaagaaactgcatcaactaacgagcaaaataaccagctaatatcataatgacaggatcaaattcacacataacaatattaaccttaaatgtaaatgggctaaatgctccagttaaaagacacagactggcaaattggatagagtcaaaacccatcagtgtgctgtattcaggagacccatctcatgtgcagagatacgcataggctcaaaatacagggatggagaaagatctaccaagcaaatggaaaacaaaaaaaggcaggggttgcaatcctagtctctgataaaacagactttaaaccaacaaagatcaaaagagacaaagaagaccgttaataatagtaaagggatcaattcaacaagaagagctaactatcctaaacatatatgcacctaatacaggagcacccagattcataaagcaagtccttagagacctacaaagagacttaggctcccacataataataatgggagactttaacaccccactgtcaacactagacagaccaatgagacagaaaattaacaaggatatacagtaattgaactcagctctgcaccaagcagacctaatagacatctaaagaactctccaccccaatcaacagaatatatattcttctaagcaccacattgcacttattccaaaattgaccacatagttggaagtgaagcactcctcagcaaatgcaaaagaacagaaattataacaaactgtctctcagaccacagtgcaatcaaactagaactcaggattaagaaactcactcaaaaccactcaactacatggaaactgaacaacctgctcctgaatgactactgggtacataacgaaatgaaggcagaaataaagatgttctttgaaaccaacgagaacaaagacacaacataccagaatctctgcgacacatttaaagcagtgtgtagagggaaatttatagcactaaatgcccacaagagaaagcaggaaaaattgacaccctaacatcacaattaaaagaactagagaagcaagagcaaacactttcaaaagctagcagaaggcaagaaataactaagatcagagcagaactaaaggagatagagacacaaaaaacccttcaaaaaatcagtgaatccaggagctgattttttgaaaagatcaacaaaattgatagaccactagcaagactaataagaaaagagagaagaatcaaatagatgcaataaaaaactgataaaagggatatcaccactgatcccacagagatacaaactaccatcagagaatactataaacacctctacgcaaataaaatagaaaatctagaagaaatggataaattcctggacacatacacctcccaagactaaacagggaagaagttgaatccctgaatagaccaataacaggctctgaaatggaggcaataattaatagcctaccaaccaaaaaaagtccaggaccagacagattcacagccgaattctaccagagatacaaggaggagctggaaccattccttctgaaactattccaatcaatagaaaaagagggaattttagaccgatatccctgatgaacattgatgcagaaatcctcaataaaatactggcaaaccaaatccagcagcacatcaaaaagcttatccaccatgatcaagtgggcttcatccctgggatgcaagtctggttcaacatcaataaacgtaatccagcatataaaccaaaccaaaaacaaaaaccacatgattatctcactagatgcagaaaaggcctttgacaaaattcaacaacccttcatgctaaaaactctaaataaattaggtattgaggggatgtatctgaaaataataagagctttttatgacaaatccacagccaatgtcatactgaatgggcaaaaactggaagcattccctttgaaaactggcacaagacagggatgccctctctcaccaatcctattcaacatagtgttggaagttctggccagggcaatcaggcaggagaaagaaataaagggtattcaattaggaaaagaggaagtcaaattgtccctgtttgcagatgacatgattgtatatctagaaaaccccattgtctcagcccaaaatctccttaagctgataagcaacttcagcaaaatctcaggatacaaaatcaatgtgcaaaaatcacaagcattcttatacaccaataacagacaaacagagagccaaatcatgagtgaactcccattcacaattgcttcaaagagaataaaatacctaggaatccaccttacaagggacgtgaaggacctcttcaaggagaactacaaaccactgctcaacgaaataaaagaggatacaaacaaatggaagaacattccatgctcatggatgggaagaatcaatatcgtgaaaatggccatactgcccaaggtaatttatagattcagtgccatccccatcaagctaccaatgactttcttcacagaattggaaaaaaaaaactaaagttcatatggaaccaaaaaagggcccgcattgccaagacaatcctaagcaaaaagaacaaagctggaggcatcacactacctgacttcaaactatataaaaaggctatagtaaacaaaacaccatggtactggtaccaaaacagagatagagaccaatggaacagaacagagccctcagaaataataccacacatctacaaccatctgatctttgacaaacctgacaaaaacaagcaatggggaaaggattcctatttaataaatggtgctgggaaaactggctagccatatgtagaaagctgaaactggatcccttccttataccttatacaaaaattaattcaaggtggattaaagacttaaatgttagaactaaaaccataaaaaccctagaagaaaacataggcaataccattcaggacataggcatgggcaaggatttcatgtccgaaacaccaaaagcaatgacaacaaaagccaaaattgacaaatgggatctaattaaactaaagagcttctgcacatcaaaagaaactaccatcagagtgaacaggcatcctacagaatgggagaaaatttttgcaatctactcatctgacaaagggctaatatccagaatctacaatgaactcaaacaaatttacaagaaaaaaacaaccctatcacaaagtgggcaaaggatatgaacagacacttctcaaaagaagacatttatgcagccaacagacacatgaaaaaatgttcatcatcactggccatcagagaaacgcaaatcaaaaccacaatgagataccatctcacaccagttagaatggcgatcattaaaaagtcaggaaacaacaggtgctggagaggacatgcagaaataggaacacttttacactgttggtgggactgtaaactagttcaaccattgtggaagacagtgtggcgattcctcaaggatctagaactagaaataccatttgatctagccatcccattactgggtatatactcaaaggattataagtcatgctactataaagacacatgaacatgtgtgtttactgcggcactattcacaatagcaaagacttggaaccaacccaaatgtccatcaatgatagactggattaagaaaatgtggcacatatacaccatggaatactatgcagccataagaaaggatgagttcatgtcctttgtagggacatggatgaagctggaaaccatcattctcagcaaactatcacaaggatgaaaaaccaaacaccgcatattctcactcataggtgtgaattgaacaatgagaacacctgggcacaggaaggggatcatcacacaccggggcctgtcatggggtggggggagggggagggatagaattaggagatatacctaatgctaaatgagttaatgggtacagcacaccacatggcacatgtatacatatgtaacaaacctgcacagttgtgcacatgtaccctagaacttaaagtataataaaaaaaaaaaaaagaaaatgttctgtttctcagtttcaagtttgcctagaaatatttgtgacctattttaaggaattcttttgagtacaaattctatttagtttttctttaaatataattttcaacccacaatagccaagtagaaagagtgaatcagatgggttgggtcagggtgggagtttgctgagaaaggtttaacaaattaaaaactgctagaagcaggcttgtaaattgcttaaaggtatagcagcctattattaaagaaggaagaagatattaaaaagataataagctaatacaagtataatgaaaatgtagctgtttaggatctttttaatatagaacaaatactaatgtttagtttatgaatgtgactattacataatagttgctgttcatagtgatcaccttggttcattggaaaagattatattcaacagataggcagtctctttgtcatgtaacagctatggagtacatacatttcaaggcctgactatttcctccttatttttactttcacagcttgctttctttagttcctgaagtcaccatacccaagatacagttacttctaccaatacaacaaagtacaacattagcaaactgatcctaattggaactctaaatacatttttctgtagcagtgtttctgaaagtatatttgaaacacttgttcttacagatagtctatggataaaagtaacctatggtgaattatatttgggtaccttagcatgtaagaagccctgcagtaaataaatctatttcattttctttaagctagcatctcccaaattgctatttctgggaactcattttcatataaatctatttcattttctttaacctagcatctcccaaattgatatttctgggaagtcattttcatatattagtctcatctctgcttttgactaaacgttagcttcattattttcattttttagttttcagttcttactagattacagctatagtcataggcagcttcctgtgtatatcattttagcctggcgaagaaagaggaaaaagacgattcttaccccttagcttcagttagaaaattctaggagatggtttctgatttgctgagcttaggtgatatacacctattcttggcgtgattttgtgacaagagctaccatggatatgattgatatagactggattatatacctagccccatgattacacagacaagtttgctaggcaaacaaaactattcgccattacaattctaaaggaacatacttccagaaagtctgccctatagaaacaatgttataagtggtgattaaatgttgctgatataataggatatattcaagccatggttttagtttctaagagttagtgagactcttggaaatctaactgctatttagaacatttggagcagtgaatgactcttccacataattggtttaataaacatatagaagaaacttcataattaaaatatttttgttaagaaaataaaaaacttattcctcttaggaaagcttaggcagatagtttgtgtttaaatgtgatagcctaatgatgatttttctaaataactagagtttgtcttaacagtttaatgagaattatgatttgtggggtttttgctgcctacttttttctttacaaaaattaaaattttatttgcaaacaatgcatcaaacaaaggtctgtatcaagactctattagaaacttaaacaaattagcaagcaaaaaaccaacaatcctattaaaaagtgggcaaaggacatgaacagacacttttcaaaagaaaacatacatgcggccaacaaacatgaaaaaaatgctctcaacatcactaattactagagaaatgcaaatgaaaaccacaatgagataccatcttaaaccagtcaaaatggctgttattaaaaagtcaaaaagtaacagatgctgggaggttgccaagaaaagggaatgcttataaacttctagtgggaatgtaaattagttcaaccattgtggaaagcagtttggcagattctcaacttaaaacagaactaccatccaacccagcaatcccattagtgggtatatacctgaaggaatataaattgttataaagacacatgcacacttatgtttaccacagaactattcacaattgcaaagacatagaatcaacctaaaggcctatcagtggtagattagataaagaaaatgtagtacatataaaacttggaatgctatgcagccataaaagaatgagatcatgtcctttgcagcaacacggttggagctagaggtcattatcctaagcaaactaacacaggaacagaaaaccacatagtgcattttctcacaagtgggagctaaacattgaatatatatggacacaaagaagggaacaaagataccagggcctacttgcgggaggagagtgagggttgagaaactacctatcaggtactatgcttattacctgggtgaaaaaataatctgtacaccaaagccccacaacatttgcctacataacctgcatatgtattcctgaatctaaaataaaagatttttttttaattaagatttttaaccagatcccaaaagtgggatagtgggttccactattgttcagatttcttcaaatcttaagtagtagaactttttagaacccaaagatactgctgttataaagggaatcaaatttagcttttcctcctcataaaattcaagaatcaaatctgggaaagctattttgcagtctgccagatgtgatgatagaaatagatgtttctactggtgatcaactcaaatttgtaaaagaattttttaactttaatattaaatgccattcatgtttatagaatttttgagcaatgcactttgatcttagtgttttatttgccttaaactctatagaactcagttttctttgaaatcatttagaataactaatgtaaatcttctctatttttgatcacattctctaaaataattgagatttggggtccagggtcatagttaagacttctagactagtgttctgtctctcaaccaataattcacaatgtataatagactcatgtagtgtaatagtctagaaaacatctggatgataaaaggaaattttggttttaaaatgtatataaattgtcaaatgtgtaagatagaaaatttgcttttagtaaagtagccccagtgtcccttaatttgaggtaaatcttaataaattgaaaggctaaatgatgatttgtcagggcttttagagggggagatttactggcaatgttacccagtggtaataaaagaatattgtacccttaagaatatgaggacaagaaaaaatgaggactgttttaaaataataatagtactcaaaaataaacaaaataattgtttttattttatccttaagattgctacaacagtgtgaaactctgaaagtccctcccaaaaagatggaagatttaactaatgtatcaagtctactgaatatggaaagggcacgagacaaagctaatgaagaaggtctggcattactacaggtatgaaatttgaatagggaatccataattagagagttagggaaagggaagaagaccaaagtttttaaaattatcatgatgttcttccagtagtgaatactagatcttgaaccaggttttttcattaaattgtttttttgttgttgttttcattaaagcaaaaatttgtctgaacttggcacctctaaagttgaagtatttctaatatatttgtggttaagtagtgtgtccggaattggtgggttcttggtctcactgacttcaagaatgaagctgcggaccctcgtggtgagtgttacagttcttaaaggtgacgtgtctggaatttgttcctcccggtgggtttctggtctcactggctcaggagtgaagctgcagaccttcgcggtgagtgttacagctcataaaggcagtgtggacccaaagagtgagcagtagcaagatttattgcaaagagcgaaagaacaaagcttccacagcatggaaggggacccgagagggttgccactgctggctcaggcagcctgcttttattatcttaactggccccacccacatcctgctgattggtagagccgagtggtctgttttgacagggcgctgattggtgtatttacaatccctgagctagacacaaaggttctccacgtccccaccagactcaggagcccagttggcttcacccagtggagcccacactggggctgcaggtggagctgcctgccagtcccacaccgtgtgccagcactcctcagcccttgggtggtcgatgggactgggcgccatggagcagggggcagcactcatcggggaggcttgggctgcacaggagcccacggaggagggaggctcaggcatggcgggctgcaggtcctgagccctgccccacagggaggcagctaaggcccggcgacaaattgagcgcagggccggtgggccggcactgctgggggacccagtacaccccccgcagccgctggcttgggtgctaagcccttcattgcctggggctggcagggccagccagctgctccgagtgtggggcctgccaagcccacacccaccggaactccagctggcccgcaagcaccgcgcgcagccccggttcccgctcgcacctctccctccacacctccctgcaagctgagggagccagctccggccttggccagcccagaaaggggctcccacagtgcagcggtgggctgaagggctcctcaagtgccaccaaagtgggagcccaggcagaggaggcgccgagagtgagcgagggctgcaagggctgccagcacgctgtcacctctcaatcccccctctaaacaggacatcccaactgctgttgggaatttgcctgatgaccactctagctacttcctgctggatggggcgatgaaggggccctggagttgtagtgtcctccagaggggaggtctctaggccagggaaagtgccagtgggtcggtccaggggtcctcagtagaagttgttagttgaactcctttgggattctatttgtaagaccatctgtagcttgatggcctcgatttactcagtgataggcaatggtctcactgctcggcgattggcgatggtctcaccgctcggcgattgtctcaccgcttggcgataggcgaaggtccctttgtggtcgccaaaatgtgtctggagttggtgggttcttggtctcactgacttcaagaatgaagccacagaccctcgtggtgagtgttacagttcttaaaggcagcgtttccggagtttgttcctcccagtgggttcgtggtctcgctggctcaggagtgaagctgcagaccttcgcggtgagtgttacagctcataaaggcagcgtggacccaaagagtgagcagtagcaagatttattgcaaagagcaaaagaacaaagcttccatagtgtggaaggggacccaagcgggttgccactgctggctcaggcagcctgcttttagtctcttgtctggccccacccacatcctgctgattggtagagccgagtggtctgttttgacagggcactgattggtgtatttataatccctgagagctagacacaaaggttctccacgtccccaccagagtagctagatacggagtgtagaatggtgcattcacaaaccctgagctagacacagggtgctgattggtgtgtttacaaaccttgagctagatacagagtgcagattggtgtatttacaatcccttagctagacataaaggttctccaagtccccaccagactcaggagcccagctggcttcacccagtggatcccacactggggctgcaggtggagctgcctgccagtcctgtgctgtgcgcccgcactcctcagcccttgggtggtcgatgggactgggcactgtggagcagggggcggcgctcatgggggaggctcctgctgcacaggaaccctctgaggggggaggctcaggcatgtcgggctgcaggtcccaagccctgccccacagggaggcagctaaggcccagcgagaaatcgagcagtgccggtgggctggcactgctgggggacccagtacaccctccacagccgctggcttgggtgctaagcccctcattgcccagggctggcagggccagccagctgctccaagtgtggggcctgctaaacccacgcccacctggaactacagctgacctgcaagcaccgggcgcagccccggttcccgctcgcgcctctccctccacacctccctgcaagctgagggagccagctccagccttggccagcccagaaaggggctcccacagtgcagcagtgggctgaagggctcctcaagtgccgccaaagtgggagcccaggcagaggaggcgccaggagtgagcaagggctgcaagggctgccagcacactgtcacctgtcagtagcagtcctattttttcatcagattttaactgaactatcttagtatttttaattatcaatttagaggagcttatcactaaatactgtggaattttaaaacgtggaaatttttctgacctgtgtatggcaagaaaacacaattatcattagagttaatatatactggggacttcctacactccagacactgttctaagcactttatagttatatcccttaatcctcacaatgacttagagtatgacctaaattattctgtttttataaatgtgataaaaagacataatgctatttctaactgaaccttagacaagttgcttaaagttgagatgctaactttgtcattctgacagtagcacatgattcttgatcactatgttgtatggcatcctgtggaagataataggagataaccttatctatcatggttaacttccagcttttaatgaatggatatccaaacaactaagtcaaagcaaccttgaggagcttattagataattataaaaactaacacatatgggaccgtatctcttagacattttgaagtagtttgtagatgtggtgcatagattttagttgcaatttattaagtacaaggtggtagtagtttctgaaggaatatattcccaaaatttataataattcaaaggtaacaattcattcccatttttccataggattgagaataaagttgaaggaacaatttctgagcacaaatctatatgtatttttagctaatagggcggcattttttggtggctgcctcactttattcaaactgtggtattatattttatttccatcccaaggttcctacttttttagggcatcttttcagtattggcactagcttcatcacctaaacacttagatgacgtttatttaggttattttaaaaggtttgaaagtataatcatggagaattttaacatttagtatttatgcacatcagttaagggtgttctgaagtcataaatgatagtgtgatttttatgctactggtaagcatttctggcctccagctgaaatttgacctccatgggacataagcataattacaatctataatttgcttgttagtcactcagaagaagcaccgctggcatttggggcaggagagttctccattggcataagaagatctttggactagcagcttgtaaactctatctgtattcattagttttctcctctgtgccttagaaccattgctttttctcactgcagcctagagtcattgctggtgatgatcttccaaaacctgtaatagtaacagaaattttattcatttaacattttcatcgtgctctcactcagtaatggtgctggggaaacaacaatggtgaacaccatctcggagattctgggaggatggcattagaacagctgaagcataattttttagactcccttgatcttgtcataaaaatggagccataggatttcagaatcagagttagcataagaaaatatgacaataaagaccaaaaataacattcctgatacaccgaaagcataccaaaaagacacgtgcctagaacagataaacattaacctaatttatcaagtgaactgaaataaattcagaaaaaatgatagaaagtataggggaaaaattataaatcagaattagaaatactgataaatgtaagtagagaattcaagaatgaatgagacataaaagagaaaaccttgcagatatgtagactaaattagaagaaacactaaagcaaataaacaacagataatgcttatggtaaatagaagataaagagaaaattttcagaatcataaaaacatttttaaaaggaattgagaaaaaaaaaacctcaaagaagataccatatgagtatggtagtaatacccaaagataaccaaagcaatggaacaaaataaattttataatgagaaattttaatccttgttatatttaacccttttgttcattcaatgctgttatacattccctttgtagtgggttgaatctaggaaaagggtcttgtccaatataattaaggatctcaagatgaagcatcctgtatcgtcacgggtacgtcctaaatccaatgacaagtgttcttataaaagacaagagaaggcacaaagacaaagaaaaagccacgtgaaacacaatagaaggcataaataaaaagccacgtgaaagcaaaggcagaaactagagcaatgcagctacaaagaatgctgacagctaccaaaagctgaaaaagacaagaaaccattctcctctcttgtcttcagagggattgtggccctgccaacaccttgattttgtacttctgtcctccagaaccatgacagaatgaatttctgttattttaagccaagtaggtggtacagcagccacgggaaactaatatatgtggtttgctttatatttatgttggacagcattctcttagatcctacaaccaattcacagaaaacacagggctgaggaaccagttaaacttcaccagggaatacagttcacaaaatttagcccatgggaaattccacagagtaaactatctaatctccacaaataaattgaaatggaagccttctatggatgaaaagagactcagacatatcaaccagtcacaaccagtttggaacctgattaaaacaaaatgtaaaaaaaaaactccaatttatgagaaaattgaaaatgtgaacactaaccatatgtttgatattaaggaatttattgagatttttttaaagtgtagtaatgatattgtactcttatgtatctttaaatcctttagagctgtatactgaaatatttatagataaaatgataggatatctaggatttgaaatagcacaggggaagcaggagaagcagatggagttaaaggtgtgacaggatggccatgggccaggcgtggtggctcacgcctgtaatcccagcacttttggaggctgaggctggtggataaccagaggtcaggagttcaagaccagcctggccaacatggtgaaaccctgtctctacttacaatacagaaaaaaaaattatctgggcatagtggcaggtgcctgtagtcccagctacttgggaggctgaggcatgagaatcacttgaacctgggaggcagaggttgcagtgagccaaaatagtgccattgcactctagcctgggcaacaagagcaaaactccatctcaaaaaaaaaaaaaaaataaaaaaaataaaaacagagtctgttcctccatggagtttagattcaagtgaatagagctcacagtcccaaaatcttaggcattcagagaacagcacattcccagtaaggggccagacaacattttagcctttatggaccacatgtggttgactgttttgttgcatatccttttgttttgttgaggttttgaccaatcttttaaaatgtacaaacaattcacagttcttgaactgtacaaaaacatcccatgggcaattgctgacccctgcagctaccctttcttaaaaaaaaaaaaaagtcatttagaagccaaaatatatttcttgaggaagactactctcccagcaatagttctgcatccagtatttggaaaagacatagatatagcatcaactttattgctgaacaagatttaagagttattacttatgtatattttctgtgtggcttatttacttgttccccaaagcatacaggcaatgttatcattgactgttgctaggaccatatttgaaagcagtgccatgtttaataccctttagaaacctggaggcttgctaattttaattttatacttggcctgcacacaacacatccttgatgtgttgtccccatacttgttttattcatttcttattttcttttcatcttcctctctaaattatgtattcctttaatgtgggaaactgttactctttttttttattctccctgctctaatgcccaacattacttccttttgacaaattaaaatagcaggctcttaaatgttcctaaataaatgaaaacaattcagaatttctccactacatgaagttttatgctgcttaaggaaggttgctgtatttgttgtcatcagttctgggctctgctagatttacacttggatcttccaggatctctgaccctaccagcattggtacgttttgaggaagtgttcatgtacatctccttattccagggaaattagatatccttataacacattaataccttgacataccagctttccaagaagtctcttttttgaaagaaacaaaagtaaattcaccagttgcttctaaaaatgttttaaatatatatggtgtttttttaaaatgtgtatgtataacaatatctattaggatttaatataataatgtgtttaagttaaaatgttttttttctctttctgactcaggaagaaatagataaaatggtagagaccacagagttaatgactgggaatattcagagcctaaagaacaaaattcagattctggcaagtgaggtggaagaagaagaggagagagtaaaacaggtaattattttaaactgtattattggaatttggatataatttttaatggttaaattatgcaaagataactttcgagtataatatgatgagagaaatcagctttttgaaataatctgtagctttcttctactttagatgcatcaaataaatagtagtggagtactctctcttccggaactttctcagaaaactctcaaagcacccacacttcaggtaagtgcctatttaccatattgattacaggcatactttagagatgttgcaaatttggattcagaccacagcaaaaaagcaaatactgcaataacgcaagtcacacaaatgttttggtttcccacggcatatggaagttatgtttacgctatactgtagtctagtaagtgtgaaaaagcattatttcttttttttttttttaaagggacataccttaatttagaaaacgctttactgctaaaaaatgttaacaatcatctgcaccttcagcaggtcgtaatctttttgccagtggagggtcttgcctcaatgttgatggctgctgactgatagcgtggtgattactgaaggttgggatgcatgtggcaatttcttaaaataagaagacaatgaaatttgccacatcagttgattcttcctttcacgaaagttttccctgtagcatgtgatgctgtttcatagcattttacccacagtagaacctccttcaaaattggagtcagttctctcattccttgtcacagctttgtcagctaagtttttgtcatatactatatccttcattgatatttcaactatgttcataacatcttcatcatgaatagattccatctcaagaaaccactttctttgctcatccataagaagtaactcctcgtccatccaatttttatcatgagattgcagcaattcaggtacatcttcaggctccacttctaattctggttctcttgctgtttccaccacatcttcagtcacttcctccactaaagtcttgaacttctcaaagtcatccatgaggattcaaaattgaatccattttttctaaactcctgttattggtattttgacttcctcttgtgaatcatgaatgctcttactgacatctagaatgataaatttattttaatatgtttacaatttattttgcccagatccatcagagaaatcactacctagggcagctatagccttatgaaatgtatttcttaagtgataagacttgaaaattgaaatgactctttgattcagaggctgcagaacagatgtgttagcagatgtgaaaacaacattaatctccttgtatatcttcatcagagctcttgggtaactgtgaacattttcaatgagcagtaatattttcaaaggaatcttcttttctgagcagtagctcttaacagtgggcttaaaatattcagtaagccatgctctaaacagttgtactgtcatccaggctttgttgttccatttacagagcacagacaacacagatgtagttgatttagtagaattaaggaccctgggattttcagaatgatcagtgagcattggcttcaacttcatgtcaccagctgcattagcccctaacaagagcctaacaaaagcatctcctttaaagctttgaagccaggcattgccttctcttttccaactatcaaagtcctagagatagcatcttcttccaatagaatgctgttttatttacattgaaaatatgttgtttactatagccaccttcaccagtgatcttagctagctaggtcttctgggtaactagctgtaatttttctatcagcacttgctgcttcaccttgcactttttatgttataaacacagcttctttccttaaaccttatgaactaacttctgctagcttcaaacttttcttctgcaacttcctcacctctgtcagccttcatagacttgaaaacagttagggccttgctgtggattaggatttggtttaagggaatgtcgtggctggtttgatcttccatccagaccactcagacttcccatatcaacaataaggctgttttgctttctcattattcatgtattcactgaagtagcactttaaattttcttcaagaacttttcctttgcattcacaacttgggcgtttggcacaagaggcctagcttttggtttgcgtggcttttgataggccttcctcactaaacttagtaatctctagtttttgatttaaagtaagagacatgattcttcttttcacctgaacacttagaggccattgtagcattattaactggcctaatttcaatatcgttgtgtcacagggaatagggaggcccaaggagagggagagaaactgggaaataaatggccggttggtggagccgtcagaacacataacaattaccaattcagttcactgtttgatatggttgcagttatggcacccagaacaattacagcagttccatcaaagaacactgggcatagatcaccataacagataccgtaataatttttaaagtttgaactattacaagaattaccaaaatgtgatgtagagatacaaagtgagcatgtgcttttggaaaaatggtgctgatagacctcctttgcacagagttgccacaaaccttcagtttgtaaaaaatgcagtgtctgggaacacggtaaaatgaggcatcctggtatatcatagaccaattatacattacatatatgaaaacattatgtcctatttcgttctttaaacaaatggaacctgatataaactgtttggcaaattacttttctcattcgactgtatagtttgaacatcttgtcagtcacgtagatctctcatttttgttgatagctatgtaacattctgttgtatggaggtcatataatttgtaaattactgatggaaatacataatttttttaatacaggtaagactgggtacacccttgtacatatgtctttactgatttgtatagtcataattgtaggatacatttctagaagtaaatactgacagtttggtttttttaatgcttctaacaatagcatataactccttataaaatagtactgtcttatttgtagtaaactatttcttccaagggctctagtagacattgtagtataaatgtttgtagcattggaaagtcttcatgttttctcaagaagtaatttgaaattttcctattggctgggcacagtggctcacacctgtaatcccagcactttgggaggccaaggcaggcggattgcctgaggtcaggagttcgagaacagcctgaccaacatggagaaaccccatctctactaaaaatacaaaattagccaggtgtggtggcacatgcctgtaatcccagctattcgggaggctgaggcaggagaattgcttgaacctgggagctggaggttgcagtgagccaggactgcgccattgtactccagcctgggcaagaagagcaaaactccacctcaaaaaaacaaaaacaaacaaacaaacaaatcctatcatttaccagtggtgaaaggagcaggatggggagagggagagatagatttgaaagaagaatggcgattcgttgacaattattgaagttggatgatagatacttaaggtttattttactgttctctctaacatacatttgagatttctcataataaaatgttaacaactacatttaatactatctttcccacagaaagaaattttggcgctaattccaaaccagaatgctcttctaaaggacttggatattcttcataattcatcacagatgaagagcatgtcaaccttcattgaagaagcctataagaaactggatgcatcttaaagagtgttttttttttagattgttccatattaatttaatgttcgtgaatttgtaaaactgttaacctatgattatatgtacagaggctaaggcttctgcaggatttattatctcctgatatgcactttaaaattagtctttgtagttctatcattagcatctaatgtagttctgaagactgtttttagcagttgccaaatctaggaaactaacatttatattgctgtatctataagtatttgcctaaaaccataaaataggaattgccttaaggatctagtagtttataatgcctgaatggaactcatttattggttaacagctcatatcaggagctgtgataagtaagtgtttacatacactgtctagtgcataaaaaccttagtgtttgctatcattcattctgtagccaatggcttacagtttctgtctggtcatctggaacttgaaaaatcctcaaatgccttcactcttttacctaactccctagtctttttgggaagtagttaagatatgcctgctatctttaactttggaggtagtatcaaaattttacttctttggttgtttagtgaattaatgttgaatattttctactgtcatcaaaacatattcccaaaaagtattaaaaaggaaccttagcacatttattttattaaaacaagaaaacccaaaatatataaaccttttcttattatgataataagcttatatatgtgaataagttataacctagtgtataaaaaattatttctaacaaactacagtatactgtcttgggtttttttttttttttttagtctgtaaaataaaatgactgcaattacttttt

SEQ ID NO: 397 - DNA, 20867 bp, Homo sapiens
  source 1..20867: mol_type = other DNA
gaagaagaagaagcttttgattggacagtcgctagtccgacctcagagaactcagccaatcataatgcttatatgctcccaaggtccccgcctcttcctcgaggtaacctttggtggcgggaagagttcggaagttttcgcgccggggtggagtcatcctgggaacctccacgcgactttggtggaggtagttctttggcagcgggcatggcgggtaccgtggtgctggacgatgtggagctgcgggaggctcagagagattacctggacttcctggacgacgaggtgagggaggcgccggcgcgcgggctctagcgctcggagcccctgcggacgcggcccggccgggaagccagaggcccgccagacctccagaccgtgtgccgcagcggagcctgccgggcccgagcctccagccccaatcttgtaacttctcaacgccggactcgctagtttgtgttcgataagtgaactcttaggaagccagctttctcttaagtacaagcgatggtccgggcgcgcaaaaggcgacaggttcccattaagtgcaagcagattggcaaagcccacctcggccttttgcatttcactgctctctcttgatttgaggagactgtgggggaggggctgccctagggctatagtgaccagccgcgttgcagagtgctcagattttagggactgacgttttacctggaggaaaagactccataattcggctgcattctttttcaataccaactaagatgcagataaaaagtgttttgtgtgcaggccaaggggattttatgtgcaacccaagacttaaagccatagaatgttgaaaaaaccatcttgaagggttgatgatgtgaccaaatagctgagattctctattcctttaggtcggggtatgagaaccctttccgtattatagagatgattggaaaaaatattactttttacataattcttaaatgaaaagccattttaatgtgactattaagagtctgttttatttacatttttattgtatatatttgaagtgcacatgttttgatatacatggtgaaatgattactacagtgaaacaacatatccatctattcacgttgttacctttaacattcacattgctaggtttaacttaacattttaacaaagtttgcacttactgtccatttagacttctcatgagctcattttaattctccactaaagacagaaattacagcatgcagaaaagttgtccatgatgatgggaataacagcatggaccttgaggaagtcattataattcttatagtcccctcttagggtgttatttcgaatctaaaaacagtgaatgaaagggagaaattgatgagcacatacttactggggattcagctctgctgcagagattgacttagctatctggctatgagaactacttctgtttagaaacattgtttttaaatttgtggctatggtgatatgtggtggctgttttgcaggaagaccagggaatttatcagagcaaagttcgggagctgatcagtgacaaccaataccggctgattgtcaatgtgaatgacctgcgcaggaaaaacgagaagagggctaaccggtgagaggcaaggggatatactggctgtcagtgagaatggctcccttccctcttggccagattggaacagcctctcaggagaggacttgtatgaaacaggattgatctacaagccctcgtagctcacctgcacctatttttttttttttttttttcaaaaagtgggtggttggcattttcctcccaaatgcccctccttccaatgtttagctgaatatcatttttatatctttgataagttgaggtgaagttggtccttagttctggtattttactgagtcttataggatggtgttttactgagacttataggagaaagcagaagctggattttctcattgtttttaatgatctaagaatgtctgctgttttgaggatccatttttttgagttctgcccagtctaatttttctttctcttgcttatgtacaggcttctgaacaatgcctttgaggagctggttgccttccagcgggccttaaaggattttgtggcctccattgatgctacctatgccaagcagtatgaggagttctacgtaggactggaaggcagctttggctccaagcacgtctccccgcggactcttacctcctgcttcctcagctgtgtggtctgtgtggagggcattgtcactaaatgtaagtgggttaaagggggccgcttaggaaatgaatagacagggagatggggaaagcaggagaggcaaagtagatctgggtagcttgtggcttcaaagaggtggagcattggaattacgtggtaaaacttggagggctcagtgtgtacaatgattgggggaccttgagtaatcacatgtattagtagaatgatgaattctgctgagagctggaggagtcttggttcctggcaatctctaattccaacctctaactccacctatttattagttgggattggtggtacttaaaattttacatggatatggtggtggtctatatataaataaaaaagtgaataaaaggtaatattgaaatatcgtaacctagtcaaaaaaacacagtatttggagtcattataggcttgcatatgtttgggttccacctgtatcatcgtctagttgggtgagtttatatatgcacattttccatccctaggttctctagttcgtcccaaagtcgtccgcagtgtccactactgtcctgctactaagaagaccatagagcgacgttattctgatctcaccaccctggtggcctttccctccagctctgtctatcctaccaaggtaagggggataaatcagttgagctgtcttggaggttggaatcaaagatacctgttttaaggcaaggaattgtgtaatatctgaagtcttttttctgtaaagggtgaaaaataaggattaatccaaaggaaagattgattgcaggccagagtttaatatgaaaagcccacaattcttatttatttatttatttatttttaaagatgaggttctcctatgttgcctaagttggagtgcagtgggtatttgcaggtgcagtcatggtgcactaaatttgcaaactccggggctcaagtgatcctcccaagtagttgggattgcaggcatgtgctacgccacctggcttcacaattcttatttttttttttagagacgggatctgtctctctcaggctggagtgcagtggtgccattatagaacactgcagcctgaaactcctggactcaacgaatcttctcaccttagcctcctgagtacctgggattataggcatgcaccaccaggtccgctaattttttttttcacttttttctagagacagggtctcgctatgttgcccaggctggactggaagtcgtggcctcaagtgatcctcctgcttccatcttccaaagtattgagattacagacatgaaccaccatgcccagccacaactcttattatttttttaagaaaacacttgttcattttagaaaattaaggaatagtcaaaagaagaagtcatctacatagatgttttaacaacgttataattttagaatctgctttttaaaaagtagaaaaataatgctagactgttatgtaatctttacaaatattttgttgcgggtttgggagcaggttggcataggaaaatgctttcttcttggtgttcagattgatctggattgaggacaatgcaaggttttcctctggagacaaaagatcatttatatggattacttgatgtctgaactgattctatcaaacaattcctctcctcccctcatcaaattttaattgagaactactgtattcaaagcactattaggcgctatggaggacaaggatataaataagacccagtcctcgtcattagtcttcacagtggtggagaaatgaaacataaacaaaaacgaatgaatatcttagaattataacttaaacatactttagcatcatttagtctacctccagatgaaatgctgagatcagagaagttaaacaatttgcttacggtcccagttagtgatggccttaaggactaggacctgtgtctctttaattcatgccagttgtattttctaagtcattctgttgtcttcttcggaccttaagatctccacttttttagaatttcctcttcaggaagtacttgggaagtactcttctgttgattactgtggccaagcttctttacttgaaaagtgaaatacattggaccagatcttctggaggttgtctatggtgatgcttaagagcgtgggctttggagttaacacctgtatcaagtcaagactctgctacttaactgtgtgacctgggggaacttacttaatctctcctagtctcctggtttccttgtgcatgacgtgtgaaaataccttctttacaaagttgttgtgataattacatgagataattttgtgaagtaatagcacagtgcctggcacatagcaaacactcaataagtgacaactgtgtttttagaaaattcaaatgtgaaggaagtaaaactttaatatacgtacaggaaagctcacataagtgtatagcttgatgaatttttacaagctgagtacacctgtgtaaccagctccaaatgaggaaatattagcacacagaagtccctcttgagggctcatgttacctaggggtaaccactatcctgatgtctaacagtatggattactttcagctgttttttatttaaatacttatgggctttttatgctcaacattgtgtttatgagatttatccatgttgtgtataggtgtgtttcatacatttttattgctgtatagtattcatttatgtgaatataccgtgtttaaccattacactattgatggcatttttacactttaaaatttttgactactaggcataatgttgctatgagcattacaatgcatggctttgggtgaatgtttctgttgggtattacctaggagtggaaaaactgcttcagaatgtaagcatatattcagctttagaggggaagtaagaatcttaatttagatgttaatataaccatagtccattcagactatgggttgccccttccattcgatggttgttactaaaacagacaggaacacaaaaagctagagaaggtacttggctttttttgttactgaataataaaattttatgaagtcatcttatttgccatgacaggtgagtgtggcatttttaagacaggacggagatcactctgtccctctgtgtgcctttttctaggatgaggagaacaatccccttgagacagaatatggcctttctgtctacaaggatcaccagaccatcaccatccaggagatgccggagaaggccccagccggccagctcccccgctctgtggacgtcattctggatgatgacttggtggataaagcgaagcctggtgaccgggttcaggtggtgggaacctaccgttgccttcctggaaagaagggaggctacacctctgggaccttcaggtaaagggtctgccttaaagtatatggaatgctgttgacagcttccatttctggtaatatcctttctccagtttgccatattccagagagttatatctgataggtggagcactctacctgcctgggagacaggataccttcaatacctcttttctatcagataaagctggtgatacttaaccatcatatgccaaaaatgagagttattggtgacaatgattacagcctcatggctttcctgggagtttctcatttaattacacttcgtccccatacacagttctgtctgaagttctgtgggtcaattccagaggtggggcatgatcagcatatttggatcacagacagaaccagttgtttaattcacaatagctacctgccccctccccaccaactctaattggctggtctagtttggcagcctaaaaaggcttactcctgctaggggtactagctactgatgttaggaattgaatataacgggtttcctctttattctgtttgtcccaggactgtcctgattgcctgtaatgttaagcagatgagcaaggatgctcagccctctttctctgctgaggatatagccaagatcaagaagttcagtaaaacccgatccaaggtctgggcatcctttagaaatttgagggtgggaatggatttctaagagttgtgttttggtgcatggctatttttgtactagatcagaaggaagggttgaggtttggtgttagctttttctatttttgtctcaatcaacaaatgaagggtgtttttgctgtttgttctttagtaattctgttgttattaaacaattttaatacctgctacctgctgggctgctaaatgagcctagtacaaatattaggataggtgttaacttgcccgtgtaccagtaagtctatttattactgaaggcgttagtgatgcattactacttaaacattttttctttgttttagttctccaacttgtttttatctttttaagataggatgtatatccacatttagaattgaactacatatatgaatgtgtgatgataaaggttactgttcaagcacagtacatgttcttattaaacctaaaatgttttgaacctggggatacttttttcccttaaagattaaacctctaaacaagttttggaatccaggctgctctgtgcctactctgataatggcctgatagtgtaatttgtcttagaaaataattttttgcagttaggaacaatgtacctgtttgtgtgtttcttcaagtattttctttttttttttttttttttttttttttggtgagacggaatcttgctctgtgaccgaggctggagtgcaatggtgcgatctctgctcactgcaacctccgcctcttgggtttaagtgattctcctgcctcagcctcccaagtagctgggattacaggcgcacaccaccacgcctggctaattttttgtatttttagtagagatggggtttcaccatgttggccaggctggtctcgaactcctgacctcgtgatctgcctgcctcggcctcccaaagtgctaggattacagacctgagccactgcgcctggccctcttcaagtattttctataggccaaagtatataaagtggagctccacaaagtcccattgaatctcactaggcttgccattggttatttctcctgtaggatatctttgaccagctggccaagtcattggccccaagtatccatgggcatgactatgtcaagaaagcaatcctctgcttgctcttgggaggggtggaacgagacctagaaaatggcagccacatccgtggggacatcaatattcttctaataggtacgatgttggggatttgctttagactgttgttctgatggagtggttgtggagacctataatatgtaagattgtatattctgtacttagcagtatttcagtcctatcaaaggacaaaaggctaaaatgaatcttttttttttttgtcatctctggaattcctgatttatagtatataaatattcttccgtgagtggtgaagggaaaagcgaaggaaaaatattaaaatccacttactgtgtgactctgttgtgtcaagagctgtgctagaaaggcagaatttgctgggggtgctggggagtttcctagagagtcatcactgcccccaccctacaggagacccatccgttgccaagtctcagcttctgcggtatgtgctttgcactgcaccccgagctatccccaccactggccggggctcctctggagtgggtctgacggctgctgtcaccacagaccaggaaacaggtaagggtgtaagggtccttggcaaaggcccagcagagagcctgagcatagatcctttgtgtgccctggcttgtgttctgaagatacagctgataggttagttgggtccagattatagaggactgagtattcagcaatggtgggtgaattatttaagtctttggtgttcatctatttacaggaatgttttcgatttaaaggattaagtcttagcacattagaaaggaaataaaaatgaagattgtactattttatgaactagaggaagggatttggagaccagtgaagagaaggcagaggtctagttggggtattacttgaggttgaggccgaagagagaatctatgaaggaaatttgtgagaagctagttacttaggggtcaaagtgggacaaagagatactattaatatttagattagagctgaaaaggtgacccaccagggtttcctctaagtttctcggagccaacacaccattgccgcattctcacgtgcaaagtgagagattcctaggaaggagattgaaatccttcccttctggcccctataacctagactgtagcacgtatttttaccttctcacttcccaggagagcgccgtctggaagcaggggccatggtcctggctgaccgaggcgtggtttgcattgatgaatttgacaaaatgtctgacatggatcgcacagccatccatgaagtgatggagcagggtcgagtgaccattgccaaggctggcatccatgctcggctgaatgcccgctgcagtgttttggcagctgccaaccctgtctacggcagggtaagtggaatcaggccccaaccattgtcctcaccttcatttggttttgctgactaactgggctgagaagtgtattctaggtgacccaggggaataataggccaaagactaaaagtaaggccattttcttgttattgtcctttgtttagagcagtgttcctcacccattcctgcacagcagaatcccctggaaagttccttatttaaaagtaactttttaacagtacagttaaacagtccatttaacatatttaaccgtccattaaataaaaggactacatgcatgtggcgggagaatttctaaacagaacaggtatatagtatgaaaacgaaaagacttgcttctctctcctgtcactttgccaagaaataacagctttgaagtgttgcaggaaacaaaactttaagcatgtaccagcaaatacactatttccttgttaagaattatctctgtttttaccatgactgtgatgtgctagatataatcttttatatttgtctgtgcgtggggtttgttgagtttttccttttaaaaaaatagatttctagtattccgtcacagggatgtatttaactagtctccatctgatgggtatttagtggtttccattttttcctccctattttgaatgaagctgtagtggccatccctttatgtgtgtggatagatttgggaatatatctgtagtataaatacctagcaaggaaattactggattaagagttatgtgcatttttcttttggtagagattgcaaaattaccctctttaaagattgtaccatattaatacttctattaatgaatgctcataaatgctttgtatttaccaactccttttatcctatcagtaactacctcacaatgtgtagttatctttattttacagatgagaaaatggaggtacaaaagattatgtaacttgctcaagagccacaaacttgaaaatcgcagagccaggatttgagcccagagctcatgctgtgtcctggcagtttataatcaatcccacagtgtatgggaacaccttgttgcgatgcgatggtgttttttatacatacagttgcatggtcccccgttcagagtttctgaattaaaatctcttgagttggagctcttggtagctatggtttagaagggctccacaggtttggttttaatgtgtagccaaggttgaaaaccatagcttttaaaattaatgatagggctgggcgcagtgtctcatgcctgtaatcctagcactttgggaggctgaggtgggaggatcacttgagcctaggagtttgagaccaacctaggcaatatagtgagacctcatctttaaaagtaaaataaaataaaataaatgataatgtatgtttatgtcattctcaagagtgattgggaaatacaagaaaaatggcaggacctgaaacgtgaacatggtcaaaatcattattacctaaaggttgttatgttctctgactgtgaagtgtatgtggatgggtaagtatcagtccagtaggcccagaattgaaaggagagtattggggtttttgaatcccaaggaaaaactcccttgattttttttttttttttctgagacatagtcttaccctgccacccaagctggagtacagtggagtgatcctggctcactgcagcctcgacctccctgggctcaggtgatcctcccacctcagccacttgagtagcttggactacagatgcgtaccaccatgcctggcaaatttttttttctttttaagtttttatagggacagggttttgcatgttgcccaggctggtctcgaactcctgggctcaagcagtccacctgcctcagactcccaaagtgctgggattacaggtgtgagtggatgtgcctggccagtttctaagatgttatgatatatagatcattgaccattttagttgaggttttacttgtatcttctgagtaagggactccaaaaagttctaagtgcttgtagcctaaccaacttgccctgtctttatgacaggtaggggaaagggatcatctttcagagtcaggtcctgccttgggaatgagaagagcagaataaggtttgggaagcaggggcctggttttcagacctacactcagcctgttagaggttcctgtagtagaaagtggggcttcctaggaagctcagttaaagaagggttgcaggtagaagagatgatttacattgtttaatggctttaaaacacttccctttttcactgctttttgtctgttttgctctttgaggtcaagcctttcattcccactcccagaactgcagcagccttgttgttctttcttcctattgatgtcatgtccacttctgttgtcctcgcattccccagtatgaccagtataagactccaatggagaacattgggctacaggactcactgctgtcacgatttgacttgctcttcatcatgctggatcagatggatcctgagcaggatcgggagatctcagaccatgtccttcggatgcaccgttacagagcacctggggagcaggatggcgatggtgaggccataagaatagtaagagtaactaatggaaaggcgctaaacagatggtagtttctcaggcccaacccaggtggtggtaggtgtttcagtgtccgggttgatgttgaagagccctcaactgtttagccacctccccttcttgcttagtggagggtatcctaaggtgtgtcttttgtccatttctgggtctgggaataactgagcatcttgtgtgagccaggcagttccactatctttatttgtgggttccatgtgtctgattctttttgggccctttctttatgaatcttggtgtctccccttcttgtgctatagaagaagcaatttcccctgggttaaactctttattactctcctttctcctaacttgggtataccagctatgcccttgggtagtgctgtggatatcctggccacagatgatcccaactttagccaggaagatcagcaggacacccagatttatgagaagcatgacaaccttctacatgggaccaagaagaaaaagtgagcattctcataactcttcctcaagggaacctgaaatatgtgttatattagagcatgtgtatatctaagcttagctaaggccttatatgcccaggtcaaagccatgcctggagtcataaccacgtggattaattttcttcttttctgggtccacaatatatcctttatcctggccagttgccttgtaaatgtttaggtgattcagcgcaggttcaggtcttttcttaaaatagagttttgatgatacgcctgatggtgggtgtgccttatatatgaaagatggcaagtgtcatgtagccatttgtgatgaagggtcagcagatagcaaacatttgagactttgtaggtagacttggtgaaggagacgtgtgatcaggtgctcaaagcatgaaatgtgggatcttacacctatttttggccatgatgcagtaagaagcatagcataatcttcaaagctgttggtttaagaatgtagaatttggagtcagaaaacttttagtcaacttgagcttctctgagctgtagttttcccacctacaaaatagagcaaataatacctaaactttctgcctaaactacctaacttacaaataatacctgtaataattaaataaaaatatgtgaaagagtcttgtctatgttccatataaatgggagttatgataatgggttctaggctttgttttgaccctggcttttctgagaggcaaagccactaatccaggcaggtggtaaggtgtggcagggagatggaattcactgtgtgtggctccagggagaagatggtgagtgcagcattcatgaagaagtacatccatgtggccaaaatcatcaagcctgtcctgacacaggagtcggccacctacattgcagaagagtattcacgcctgcgcagccaggatagcatgagctcagacaccgccagggtgagtgcctgggggagcctaggcttggggtcccttaggtatatggctgggcaggagtccctgctatctgggagctttgaaagcattttaacttagtgacttttttcctggtctgaagggcttcctgttatacaattttaatcatttccttttataaaggaaaatgaaataaggaccccagagataacatgtctcttattagttaaaatgacattggcctccagaagctgtgattcattcagcaaacataggagtgacttctgggaagtgacctagtctttcctcttacaagcaatgtaaaattaataaacactcttttcaaagagctcagatccggagcgggggaagcacaaaggtagatagaaagacttccgtacatatttataaatatttaccccagtgtggtacttacaaaggaatgaacgtgaaaggctatttgagcatagacgaataaactgttaatttcttttagacttccctgaaggggtatgaatgtcaaggaaggattcccagagagtatgatatttggactggactttgaaaaaatgactaacaggcaaccatgatggttattcaaagcaatttctggtaacctaatataggtgtccatgaatttgtctaaatcttttttttgttttgtttttgtttttgttttggtgagacagagtttcactcttgttggctaggctggagtgcaatggcgcgatctcaactcactgcaatctccacctccctggttcaagcgattgttctgcctcagcctcctgagtagctgggattacaggcatgcaccactacacccggctaattttgtgtttttaatagagaccaggtttctccatgttggtcaggctgctctggaacttcctacctcaggtgatccgcccggcttggcctcccaaagtgctgggattacaggtgtgagccaccatgcccggcccaaatttgtctaaatcttttaggggcagtgtagttcacataggattttacagcagaaagacccaagtccagaactcttattatgttacatagacatagattcttggattagacatgatcccagatcatctactcaagcctcacccactctgtcttttcaaatccctgctgggactttttttttgagatgcggtcttgctgtgttacccaggctggagtgcagtggcatggtctgggctcactgcaacctccgcctcccgggtaggtgggactacaggtgcgtgccaccatgcccggctaattttgtatttttagtagagacggggtttcactgtgttgaccaggctggtctcaatctcctgacctcgtgatccgcccatctcggccttccaaagtgctgggattataggcatgagcccggccgggacttcttaatacccccagtgacagcatgcgcagagcatcactgttttgaaattttagaatatttattaagcttaaacctattttcccacaacttttacctgtgggtgttagtcttgttttctggaggttgtgtatcgcctgtcttcctcattaaacagcttactttctttttaactgttcctttccacatgcgaacttctggtgtgtcccaggccctctcattgaacctagaactgagcgtcatacactattttaattgtcttagtgtggggtctgtaagtgaattccaagagaatttggattctctaggtctgctagtgcaggccaggatttcaccagctttttaggtggtttaagaattagaacttgtcatggagtgtatgacttccaaactccggtagctttctaaattattacaagatttgatgaatgaatttaaatgtgaatgtatttatttttgaatgtcattgtggatatacatggtaatttaggaaacttgaaacaagaagtgaccaggatacgtcagtgatggggtcatataatgggagacccgggaggtgtgacagaaggaagtagtttctttttttttctttttttttttttttttgagatggaatctcgctctgttgcccaggctggagtgcagtggcatgatcttggctcactgcaacctctgcctcccgggttcaagctattctcctgcctcagcctcctgagtagctgggattacaggcatgcgccaccacaccgggctaatttttcttttgtatttttaatagagatggggtttcaccatgttggtcagggtggtctcaagctcctgaccttgtgatccgcctgccttggcctcccaaagtgctaggattacagatgtgagccaccacgtccgggctggaagtagtttcatgtctgatcccagctctgcagctagcttttggactgtggacaaatcctttcacctgtcaggtcagctttcttatccataaaatgagaggattggatacatcagaatcacctgaaacttgtacacatatctagtcctaaacactgagatttctgattcattcatttccaattcattctgattgattaggtcaagaaaggccattcagacaatagcattttaaaagataaaggcatcccagtttggtattcatcggcccctgtgagaaacatttgttaggaatgtgtcagagttctccttctccggactgagtttactgaagttacgtttttgtcctcagattacttctttcctatccctcctttagtgtgactttggaaaatctccttgaaggtctttgagtcccatttccttcatgtataaaacttctccaagttattaagagggtgaaatgacagaatgtatataaaggcaaacttcctgctgcattgcaggcctgcaatcactgatgatttttctcccttctcttttctacgctgtagctttttatctttccagttgttagatgcctaatcttccctgttcacttgctcctccttcctgcaacactcttgtgtatatttccttgatcattgctatcatctttctcatttttatatggtatctgtagagaacacagaactctgaattctttgcttgggcctcctggggcttttctggtagtgtcatttccctttctgtgcagtaggattgatgggcatgcctaaaagacttgggataagcaatcctcccttttcttccctagacatctccagttacagcccgaacactggaaactctgattcgactggccacagcccatgcgaaggcccgcatgagcaagactgtggacctgcaggatgcagaggaagctgtggagttggtccagtatgcttactttaagaaggtgaggattcagatgcctgggcatgagaggatctcctggatatattacagatgcatgggcttcccagccttccgtggctgacggctacatttggattgtcaacagaaagcagtatttgtcttccagtcatcagtctgcctcactctttcctctgaaacactcagtgattctcaaccctgactgcaccagagaatcagatggaaagctttaaaatgctgattccagggctcctagagattctggtttagttgatgtgctgtactttcagttagctgcttctctgtctacccctacttcctttgcatcttaaaaaaaaaagtaggtgttttcaaaagagctaccttggtaatcttccttgtcccactctacctttcctcttggtagtctcttcaaatgtcccattggcacctcagaagctcatgtttaaagttgaactctcaaacttgccactcatcctgtttccctatttctgtttgtgacattgcacctctgtcattttagatatcaagcctcaaagcctagactcccttttcctagttgcccactcccaccccagtctggtgaatgttagccttttggggttgagttgtgagtctaataaactcttccttgctttttgctaggttaagggttgagttgtgagtctgataaactcgtcctcactttttgctaggttaagggttgagttgtaagtctgataaactcttcctcgctttttgctaggttaagggttgagttgtgagtctgataaactcttcctcgctttttgctaggttaagggttgtcttggatttcaattagacacctgatttataaggaaatggattgttttcacttaaccattatgggctagacatttgtttctttattcagtaaacatttattgagtacctactatataaacagcatttaacatacttcccagcattttgaaaagatgggtagcagtctctacttctgcccctggtcctgggacttagggacaagaggagctaggtaaaccattggaaacatggaagtctttcctgcttatgatgcagaagggactgggagttcttgatgcagttcccctgcatcagtgacccctctagcccagccacacttgccttggtcttaggttctggagaaggagaagaaacgtaagaagcgaagtgaggatgaatcagagacagaagatgaagaggagaaaagccaagaggaccaggagcagaagaggaagaggtaaggtggggcaagcaaatgagattaaaaagttagtggccaagaagttgggggtgcacgcctgtaatcttagcaatttgggaggccgaggcgggtgggtcacttgagtccaggagtttgagaccagcctgggaaatatggcaaaactgtctctacaaaaaatagaaaaattagctgggcgtggtggcggacacttgtggtcccagctgctcggtaggctggggtcggaggattgcttgagcctgggaggcagaggttgcagtgaaccaggatcgtgccactgcactccagcctgggcgacagagagagatcccatctcaaaaaaaaaaaaaaaaagtagtaagttccagtgggactggggagagaagtagagggtagaaggtggaaccagcgctgcttattgatgtcaggttgttcatggagagtgttcctagacctgcggggtttgaggatgaagataacctgggtaggctgggcgcggtggctcacgcctgtaatcccagcactttgggaggccgaggcaggcggatcacgaggtcaggagatcaagaccatcctggctaacagtgaaaccctgtctctactaaaaatacaaaaaattaggctggcgtggtggcaggcacctgtagtcccagctacttgggaggctgaggcaggagaatggcgtgaacccaggaggcagagcttgcagtgagtggagatcacaccactgcactccagcctgggtgacagagtgagactccgtccgtctcaaaaaaaaaaaaaaaagaagataccctgggtaaaagagaaggagagcgagtccttcttgtgtgcttttgacccctctactgaagaaatgctaaatagtaggaacagcaacccaaccactgagggttttgaatatatacttcaaaattctaagggaaaaaccttcatgcttatagttgaatttataagggtgagtgatgtggaaaagagcgttgggaagcagcgcctgtttgtgttctagtctggggacttggtctcgtttggaacaagcagcagtttgcaaaggcctaagcctagtgcttcactttgacttagtggttctgtttccttttctccgtagttagaggcacgtgatggggcttccttgcctttctgtctccaaactctttctctctcttaactgctgtgggtattttagaaggaagactcgccagccagatgccaaagatggggattcatacgacccctatgacttcagtgacacagaggaggaaatgcctcaaggtgagtgagcccacttactgatgaaagaggttgttcctgtgactcttggacttttccagttgctctgtgcactttattttcttgtggactcctgtttgtttggctccctgcttggggcctatgtccaagaggtttgtcccaagagagcttcaggggaaactttggaaaaagctttgctatattatatacacctccttgatgaactgtgctgtgctgtttcacctggtataagcatttcagataatatatacattgagggtctcctgcctgactaaattccttcatcatccaatgaagatttccctatatcctaattgttctgcctggccccataagaaccctaggaaataggagtgttcagcaggctgagtgagagattgggagtggagatgatttctctagtgtttgtggaaatggcttcaccttgcttatcttccccatctctacaaccatcaaccctctgaagtacacactccaaagacggcagactcacaggagaccaaggaatcccagaaagtggagttgagtgaatccaggtgagtacggatgttgctcctgccccttcaagaattctgtgtatcgctgaggaagggactttgttcccttggagagggtgggaaacaaactgctggtcatcaatagaactcaaaactagaggcctgcagcttttaacattttatattctcatttaatttcaaacttactgaaaagttatgagaaaagcatgaagaacttctggatgtcctttacccagaatcttcagttgtttaaattaataattctctctttctgagagagaagagttttacaataaggataaaacttaatgtcttactgtaacctcagattcttcttggtgggatagatacattttggccatttgtttttgaaatgaagaatttttaccaccagggttttaggaaacatttttatctatgaattttgtttactggacaccaagaaactccatagccaagttttacgttttttctttttatactttaaacacataatacagtgtatttactgaaaaaaatttgaaacacattgaaaagtatttagaaaaaaaattaaaatcaattgtaactctatccctcaaggacaaccatcaactgtatcttaaaatgcttgaatcagctcgtatagatctcacttttttttttgagaccggagtgcagtgtttattttttacttttttacagtgtttattttttactttttgtagagacgggatctcaccatgttgcccaggctggtcttggactcctggcctcaagcagtccttctacctgagcctcccaaaaggctgggattacaggcataagccactgtgcttgtttgatctcattctttttaatgactgcagggtttccatggtatggatgggtaaaaatttaatgaaattctctgatgatagacatttgggttgttccctgtttacagtaaaacagtattaaatttatcagtgtgcactcatgcaagtatagctataaggtgagttcctagaaatgggctccctgggccaaaggatatacgcttttaagggtttagtaagtgctgttaaattgtcccgcattgacgctgaccgggttactattttacagtgaatgggaatgccaatttcccacacgctagtacaatagtttagctttaaagggggctcctcaagggtagcactgccatcagaggcagatgtgtgtgtgagaaagaatattgaggggacgcctctactgtattaatactatggattttcctagtatagctgtttcctgagagcatttgggtttgtttactcctcttccccctttcttctgtctggggcaggttgaaggcattcaaggtggccctcttggatgtgttccgggaagctcatgcgcagtcaatcggcatgaatcgcctcacagaatccatcaaccgggacagcgaagagcccttctcttcagttgagatccaggctgctctgagcaagatgcaggatgacaatcaggtcatggtgtctgagggcatcatcttcctcatctgaggaggcctcgtctctgaacttgggttgtgccgagagagtttgttctgtgtttcccaccctctccctgacccaagtctttgcctctactcccttaacagtgttgaattcaactgaaggcgaggaatgttggtgatgaagctgagttcaggactcggtggaccctttgggaatgggtcatgaaagctgccatggggtgaggaaagaggagacagtgggagaggacaatgactattgcatcttcattgcaaaagcactggctcatccgccctacttcccatcccacacaaacccaattgtaaataacatatgacttctgagtacttttgggggcacaactgttttctgtttgctgtttttttgttttgttttttttctccagagcactttggtctagactaggctttgggtggttccaattggtggagagaagctctgaggcacgtcatgcaggtcaagaaagctttctttgcagtagcaccagttaaggtgaatatgtattgtatcacaaaacaaacccaatatccagatgaatatccgagatgttgaataaacttagccatttcgtacacatgg

SEQ ID NO: 398 - DNA, 32744 bp, Homo sapiens
  source 1..32744: mol_type = other DNA
cggcccacttaccgcgagaacgcggagtcctgcggatggcgcacgcgcaaacctcctgtgatgcctgcgcctcctggccccgccttccgctcgtgggagttccggatgtttagcgttaccatggatcctggaggtgcccgcgaacactgcttgtcgcctgggcaaccggagaggacgaagcaggacctaggtggcggcggtggtaccggctgcaatggtgtccaatcccgtgcatggcttgccctttcttccgggcacgtcctttaaggactctacggtgagcagttatctgccagactcccacctgtccccaccttccagcagcccaggaggtttccccgctcagtgcacctccattcccctccactcaagtctgtcttctctccaaacacgtcttctgtcctgaccctgttctttattctgggccgaacttctgccgttcttccctagccatcctcatcccctctctccgatcctttgccctccgcctcatccctctctagttttttcccactccatcttggcagtgtgttggcgccttcattctcatcccgttagccgcgttctttcttacggccctgctcctccaagcccctgcctcttgtccctttagatcactgtttcccccaccctactcccaacctatctctgggccctctccctagctcgttctctcacatcataacctgtctccgtccatcgccgcccttaaaaccccccgccactatgcaccttcaacctcattcccacaggtccgtcattcccgccccacctcttcctcttctgaatcctgtacccggtagtatctcccactcccagctccatttcctgttttgtatgtatatcgattccgctcctcttctttccgccaggtctttttcctttcttctttatgcttgcatccaaccccattcttttttctccatcttctacattttccacaatttagtcccatcctctccccattcctttctttctccgttgcgggttttccccaaaacttgctcaccttcctcccaaagcatctttccctgctttgtaagagatattcctttccagttccctcaagaattgattagttgctgtttattcttccccggccctgttctttttattctaacgtttttgtaaaaagattcctgtttagattttgttttgctccttccccaaccttgtgtttttatttgcattttctagacaaaattttttaaaaagtagcagcagcttggattcttttttttttttaaactcttgccacagtttagctcttaaaattatttggtttgttttaattctgacagggctactgaaatgtatgtgctgaaaaatcaataatgagattcagtagactgatcatcatagatgagctaacagtagtttatgtttatatagtttaatactttaaactcttgccttcctctccagcttcacaaagttaaaatattttgtcaatttattttctttggaagaatcaatttagaatgaaatcgaaagtttggtgagagaatttgtattctgaatctctgtaattatccctgcattaagacacaacatcatagatttttagtttcagtggacttttcagttttatgtaatttagaaaatgttgtaggcacttgcctgccctatacaggatgagcttaagcttttggtgttggtgagtatagacagggctgagttgatacagggaattacagaggtgtggatggaagtgcaaagctctaaaaacatattgctgtattacaagtaagaagaactgtgcattggacatatttcagattttaaatacactggccaagtgtcaaccaatttgccctatttgaaatttgaaaagcatcgtcagtatatcttcagcagtgaaggactgaatatgtattaatgtaattctaaagacatgcagataagaagttaaaaaatttttaaaggggagtgggaaaacgattttaaaaaaagacacacagaaggtgaaccataatggacaagaggggtggaaagggccgaggttgccttgcctggggtgtctgtgagttatggctgaatgatggtagagacatttgtctaaaacaaagaaataaactgaagtcactgatgttgcttctgtctttggtggtggaagaagagcttgaagttccataaattacccaatgaggatgtcaactcagcgcattttgttctatgtcatgtttactatatacctggagcagtccctgtcaactgacttgtgactctgaatacatgacctttaaaaacaaatgtcatacatttgtttttatgggttatatacagtttataacccttttagcaaaagaagtttattctgttgtacctttcatgttagtacagatcttgaaagatggtaggctgggctctaaagcaattaggatgtagaaagtttttttcataaaaatattttttatgattaatcttaaattgtatctatgtatatatttgaatattatagataagtaattgtgaaagtatcctcacaacagaaaaaggaaaccattaacataacctctaatttgcctttctactcttttttatttaatcttttaaataaaaatgtgttcattgtaaaaaatcaacataatttagaaatgtataatacagaggaccaaaccagtctcttcatgcacatatttccatgcttataattgcagtacacatataattttatatgttgctttttcaggcttattaaatcataaatattttcaccaggttgccacgtgatctctaaaatcaatattttaatgacagcaccataatccattgagtgagttttcgatcatttactcatgtcttcatatgactgtcttttagattgtcttcaacatttaccattgtaatgggcagcttcaggcatatagttctttctcataattctgaatcatattcgtaaataaatggtcggggtagaattattgagttcaagactttaaatatataccatccagttgctttccaaagagttgtaagaatgtatcactgtcattgtgacaagagggacaggtaaaaataaattcattccatgtaaaaataaaattcacagaaccgtatcttctaggttctacagtttttacggccccagatatcagatgaaaaacatgagaagactagtgaaaaacttaagagtatagatgagatactcttttaatctctcatgcaaggtgaattggtagttaaattgggcattacagagcacagctttaaattttactttaagcttaggtggctacttcgctccttgttcttgttcaagtgttttaacttaaaatacagaatcttttaatgtaggtaagcttttgttttgttttgtttttttgagacagagtctcactgttgcccaggctggagtgcagtggttcaatcatagcttattgcagcttggacctcccaggctcaagtgatccttccacctcagccgactataataggcacaagccaccacacccagctaatttttttttttttttttttttttttttagtttttgtagagacagcatcttgttgcccaggctggtctcgaactctggggctgaagtgattctccctcttcagcctcccagagttctgggattataggcacgagccaccatgcccagccttaatgttggtaagcttcttgatgtaagttttgtgatgcttataagcaaagattcaagttatatttttaaaagttagttttttttttacctaacaaatatttgtctaatgttattaatgacacattcttttcttcttcagaaaacagccttccacagaagtcagacgctgagctacaggaacggctatgcaattgttcgacgtccaacagttgggataggcggagaccggctccagttcaaccagctgtcccaggctgagctggatgagttggccagtaaggcaccagtcttaacttatggccaacctaaacaagccccacctgcggattttattcctgcgcatgtggcctttgacaaaaaggtatcatctggaattttagggtaccccttgaattagggtctgagagccaactgcttgcaaaaaagttaaaacagtaaaccacagaatttccaaagggctctgaggagaaaattgttcagatgccttaacccttagtcatggacagctgaactcaggctaaaaagaggctttctttagtcaggaagctgattacagggagtaaagtagttccctgtagacttcaccagactattttccaaatgcagttaaagaaaagttggctataattctgaattcttgaatttatattctatgtttatcagccgtgtgttctccactttttaaaggtaactgtattctgtaatggtgacatatctaatcttcatgagatgcagaatatcattatgaaaacaatgactccatctattgtcagttttctgcaaggcagtctccataagtttttggttttcagggaacatttcatgtttgatattacataaccaatgggtggtataacatttttgtttgtttctcatttatctttatgtttttgcaatgtgagtttcctcatttccatctattgacattaccacatcattcttgtttttccttgtcaatgagcctcctcttttcactaaagtgaagtagccctagccctgaccatgtagcagaatcactggcgagatttttaagaaagttacgttattccaaccctcatcagttctaatttccagatgagctttatgtgtaactggttctgagaagtactgatcagttttgataagttagctttcttaatttactcttagtctgtttcttttcttgtcttaatttttattttattattcctgttaaatgtctataacattttcatccagccagccaacttttattgagtacctgttgtaagctagaggctggggaggagctatgccatttacatgatagtcacttatttttaaacaatttcagtctctcaactagaatctgtatcatttcctcttccccacttaactcatttatagggacacattcacatatgcattcataggccgaacctaaacatccactaaacagtatgatttatataattggatgtatcttttccttttgcttgtttcttttgtttatttgtggctttgacagacattgcaaaatcagcagagaagggagagggctgaaaatacaagagagaagtgggataggcactaaataattaccaagatatgaatcctggtatgtttaatttttactgaaaagaatagtaagtaactgttataaagtagaaggtgataaagtgatatatgtcgtaagaaagtattagtaaaattcagaggagaaattgcgcttgagtaggaaataggcttcctattttttgttttctatgttattttacactaattgttgttacttaatttgtacttatttaatattcataattcatttctttaaggatagtgcacataaaaatattatttttattttccaattcattttacttggatcatcacaatttctagataaatgagccttagcatagataatggggtagagagaagctaaatgcatgactttgaaactaagtttgtttgtttataataagggaattatggtttctctgaattaaatgaaggttctaattttaaatgaaggacctctaatacccagaggtccacataatagccaacatatttgtctatattttggaaattcttaggactgttcctcatagacagaatataacttcatttcttacttaggtaataaagaccaggacatctattccaagtgccctcatcttttccccttgctcctgtataattccagcatcacctactatattgtgtttcccagactgacttccagctctttatttctgatgttcttctttcatctttttcatcttcaagtttcatattatttctatttcagacactctagtgactgcttctctagctagagtcatatcatcctgtcctctttctataataccttgtgatgcctttaagcaagataactttgtttctcacttgactgtcaaatcacttacaatctgacttctccctacccacagccccagaatactttctcctaggtagccagtgctgtccttttaccagatctagagaggtttactttgccagcattgtctttggcttgtttatgccatctgacactgttgacccttcctcccttcttgaaactgtgctcttcttttgcctccatgactctcattttcctccttctttctatgtggttgcttattctttagcctcccttcctcttttcaattcttaacttacaagtattttcaaggctctatctcattctttatataattttcttgagatctcacccactttcgtgatttcaaccgtcacctcaccgtagagaatgtcactatttagttccaactctgacatcattgagactccagatctgtatccccctggcccatgggatatcttcacctggatgaactgttggtacctcaagttctgtatgtctctaacttatctctatccctcaccttttcccatagatctgctttccctgtgtggttccactaggtaatccaagcttgaaacctgagccatctttggctttttctctcctttatcctccacacttaatgagttgccaagtcaaatatctctcactttcatttcctctgccactatcatagttcagacaagccaaatgactacctaactgttgttttagtctcattcctagtccttatgcttataacaggtatgctgccttgtttattctctagagttcagctctgattatgtcatttttctgggaaaatgccatcaggctttcttaaccaatacagtaaacattaccaccattcacctcactgtgacatgaaagtcatctttcattcttctttcccctcacaatccacatctaatctattagcaagttctattgtttctgcttctaaaatatgtaactaattcatttacttattttcatcctcactattaccataaatttattttccacagagcagccaggcttattttttgaaaatcagattatgtcacatactgactgaaacacttccatggcttccctatcatctataaagatccaactctacaggttcctcacagccctactggagctggccctccctgctctctccccagcctcatcttgggtcctttttctcacctatcatgtttcaatacattggatttatttttactgatttccttgaaatggcagcatttgaaaattccaattcagggcctttttgtacatggcatttctcctatctgaaatagcttccccaccatccttaagtggctgactccatctttcctttcagtgaggcttttcctggccactctgctatggcagttcctcctcatttttctatatcacttccctctcttttttttttttcccctttgcagcactatattataatttgtgttgctgatttgtttagtgtttatctgtcccacctgagtgtatacttcatgaaggtaaggacttatatagtttattatatatttagtgctcaataaatatcagttctaaaatgacatgaataattaacaaaatttatttcttgtctgtgtcactgctgaaaattggcaagtcaaacacgtaccatatatgcttataataatgtaaaattaaaaatgtgacttggctttttataattgtgtgtgatatgaaaatatttatgcagcatttccccccttcatcttgaagtaaatacaaatatttttatgtttattgtggcattctgagcacttcctgggagttagaagacctggattctaattctgggtctcctaccagctaacattgtgaccttgtagtcacaatctctaatttcctcgtctataaactcagaaggttagaatacatgataatcaggagcccagcctgctataaaattccatgaaaagtatatttttaaacacagtatttaaatataatttttcttttctttctacgtaacaatcaagttcttattctacctgggaaagctgatgttatcccactactttaaaaacaattttttttatttccataggttactggggaacaggtcgtgtttggttacatgagtaagttctatagtggtgatttgtgagattttggtgcacccatcacccaggcagtatacagtgcccccaatttgtagtcttttatccctcacccccttcccaccctttccccctgagtccccaaagttcattgtgtcattcttatgcctttgcatcctcataccttagctaccacttatgagtgagaacatacaatgtttggttttctattcctgagttacttcacttagaataatagtctccagtctcatccaagtcactgtgaatgctattaattcattcctttttatggctaaatagtattccatcatatatatcacattttctttgtccacttattgattgatgggtatttgggttggttccatatttttgcagttgcaaattgtgctgctataaacatgcatgtacaagtatcttttttgtatgatgagttcttttccaatgggtagatacccagtagtgggattgctggatcaaatggtggttctacttttagttctttgaggaatcttcacacttttagttctttaaggaatcttccatagtggttgtactagtttacattcccaccagcagttcccagttcattgcatccacaccaacatctaatattttatgatgttttgattatggccattcttgcaggactaagatgatatcacattgtggttttgatttacatttccctgatcattagtgatgttgaacattttttcatatgtttgttggccatttgtatatcttcttttgagaattgtctattcatgtccttagcccactttttgatgggcttctttgtttttccttgctaatttgtttgagttcattgtaaattctggatattaatcttttgtcagatgtatagattatgaagattttttcccactctgtgggttgtctgtttactctgttgactgttccttttgccgtgaaaaagctctttaggttaattaagtcccagctatatatctttgtttttattgcatttgcttttgggttcttggtcatgaaacccttgcctaagccaatgtctagaagaggttttccaatgttattttctagaatttttatagtttcaggtcttagatttaagtccttgatccatcttgagttgatttttatataaggtgagagatgaggatccagttttattctcctacttgtggcttgccaattatcccagcacaatttgttgaatagggtgtcctttcctcactttatgtttttgtttgctttgtcaaagatcagttggctgtaagtatttggctttatttctgggctctctgttctattccattggtctatgtgcctatttttataccagtaccatgctgttttggtaactatggtcttatagtatagtttgaaatcaggtagtgtgatgcctccaggtttattctttttgcttattcttgctttggctatgcgggctctttttaggttctatatgaagtttaggattgttttttctaattctgtgaagaatgatagtggtattttgatgggaattgcattgaatttttagattgcttttggcagtatggtcattttcacaatgttgattcccaccctatcagcatggaatgtgtttccattatttgtttcattatttgtgtcatctgttatttctttcagcagtgttttgtagttttccttgtagaggtctttcacctccttggttatgtatatttctaagtttttgtttgtttgtttgtttttcagctattgtaaaaggggttgagttcttgatttgattctcagcttggtcgctgttggtgtaaagaagagctactgatatgtgtatattaattttgtatccagaaacttcgctgaattcttttatcagttctaggagctttctggaggagtctttaggattttccaggtaaacaatcatatcatcagtgaacagtgacagtttgacttctttacctatttggatgacctttatttctttctgttgtctgattgctctgcctaggacttcttctagtactgtgctgaagaggagtggagagagtgggcatccttatgttgtcccagttctcagagggaatgctttcaacttttccccattcagcattatgttggctgtgggtctgtcatagatggcttttattacattgaggtatgtcccttgtatcaattttgctgagaattttaatcagaaaggggtactagattttgttgattgctttttctgcatctattgagatgatcgtgtgatttttgtttttaattctgtttatgtggtgtatcacatttattgacttgcgtatgttaaatcatccctgcatccctggtatgaaaaccacttaatcgtggtggattatctttttcatatgttgttgaattcggttagctagtattttgttaaggattttagcatctatgttcatcagggatatcagtctatagttttattttttggttatgtcctttcctggttttggtattagggtgatactgccttcatagaatgatttatggaggattccctctttctctatcttgtagaatagtgccaatagtaccagtttttctttgaatatctggtagaattcttctgtgaatctgtctggtcctggactttttcctgctggtagttttttaattatttcagtcttgctgcttgttgttggtctgttcagggtatctaattctacctgaattaagctagcagggttttatctttcaggaatttatctatctactctagttttctagtttatgtgcgtaaaggtgttcatagtagccttgaatgaccttttgtatttctgtggtgtcagttgtaatatcttccattttgtttctaattgagcttattggattttctctcttcttttcttggttaatcttgctaatggtctatcaattttatgtagcttttcaaagaaccagctttttgtttcatttatcttttgttttttttgtttgtttatttcaatttcatttgtttctgctttgatcttggttattttctttcttctgctgggtttgggtttggtttgttcttgtttttctagttccttgaggtgtggccttagattgtctgttagtgctctttcagactttttgatgtaggcgttttggggtttgaacttttctcttagcactgcctttgctgtatcccagaggctttgataggttgtgtcattattgtcattcagttcgaatgattgtttaatttccatcttgattttatttttgacccaaagctcacttaggagcaggttatttaatttccatgtatttgcatggttttgaaggttccttttggagttgacgtccaattttattccactatggtctgagagagtgcttgatataatttcaattttcttaaatttattgaggctaattttgtggcctatcatatggtctgtcttggagaaagttctatgcgctgttgaatagaatgtatattctgcggttgttgggtagaatgttttgtaaatatattaagtccatttgttccagggtatagtttaaatccattgtttctttgttgactttctgtcttggcctggctagtgctatcagtggagtattgaagtccccccctattattatgttgctgtctatctcatttcttaggtctattagtaattgttttataaattgggtgctccagtgttaggtgcatatatatttaggattatgacattttcctgttggacaggtcttttatcattatataatgtccctctttgtcttttttaattgctgttgctttaaagtttgttttgtctgatacaagaatagccactcctgctcacttttggtgtccatttgcatggagtttctttatccacccctttaccttaaatttacatgagtccttatgtattaggtgagtctcttgaaggcagcagatggttggtgaattcttatccattctgcgattctgtatcttttaattggagcatttaggctatttacattcaacattagtattaagatgtgagataccattctgttcatcgtggtatttgttgtctgtatacctggattttttgttttttgtttttaattgtatttttgttttataggtcctgtgagatttatgctttaaagaggttctgttttgatgtgttttgatttgtttcaagattcagagctctttttagcagttcttgtagtgctagcttggtagtggcaaattctctcagaatttgtttttctgaaaaagactgtatctttccttcatttatgaagcttagtttcactgaatacaaaattcttggctgataattcttttgtttaaggaggctgaagatagggccccaatcccttctagcttgtagggtttctgctgagaaactgctattaatctgataggttttcctttataggttacctggtgcatttgcctcacagctcttaagattctttccttcatcttaactttaaataacctgaggaaagtgtgcctaggtgatgatctttttgtagtgaatttcccaggtattctttgagcttcttgtgtttggatgtctagagaagttttccttgattattcccccaaatatgttttccagacttttagatttttcttcttcaggaatgctgattattcttaggtttggttatttaacataatcccaaactttttagaggctttgttcatattttcttattcttttttctttgtctttgttggattgggttaattagaaaaccttgtctttgagctctgaagttctttcttctgcttgtttgattctattgctgagactttccagagcagtttgcatttctataagcacatccattgtttcctgaagtttttattgttttttatttatgctatttcattgaaaaaaatttcccttcacttcttgtatcttttttatttccttaaattgggctttgcctttctctggtgccttcctgatcagcttaataactaaccttctaaattattaggtaaattagggatttcttcttggtttcaatctattgctggtgagctagtgtgatttttgggggcattaaagaaccttgttttgtcatattaccagagttggttttctggttccttctcatttgggtagactctatcagagggaaggtatagggctcaaggctgttgttcagattcttttgtcccacggggtgttcccttgatgtagcattctctcccttttcctatggatgtggctttctgagagccgagctgtagtgattgttatctctcttctggatctagccatccagcaagtctgccaggctccaggctggtactgggggttgtctgcacagagtcctgtgctgtgagccgtctgtgggtctctcagccatagataccagcacctgctccagtggaggtggcaggggggtgaaacggactctgtgagggtccttagccttggttgtttaatgtactatttttgtgctggttggtctcctgccaggaggtggtgttttcaagatagcattagctgtggtagtatggggggaacaggcagtgggtgggcccctagaactcccaagagtatatgccctttgtcttcagttaccagggtgggtagggaaggaccgttaggttggggcagggcaagatgtgtttgagctcagactctccttgggcaggtcttgctgtggctgctgtggaggatgggggtgagggtctgaggtcaatggagttgtgttcctaggaagattatggctgcctctactgtatacttcaggttgtcagggaagtgggggaaagccagcagtcatagacctcacccagctcccatgcaacccaaaggtccaatctcactcccactgtcccgcccctctccaacagcaccaagtctgtttccaggcagtgggtgagcaaggctgagaacttgccccaggctacctgcctcccagctttgaaagcaagtggggctttccttcttcccccacctgtggaatctgtacactggattcacaccttctcccgagttctggccaggagacttctcaattggttcaaatcattacacagttcagctggaggttcccttcttcctgtggccttttcccagtgcctctggctgccctccccaagtacccctgtgaagcaaggcagaaatggcttggtaggggaccccagggagaccataggacttttcccgctgcttcctctacccccgtatttcactcgcctctctgaattgacccagctccaggtaaggtcagaatcttctcctgtaatctagaccttcaggttcctcagtgggggtgtgtgttcggggacagatgatctccctttcccacttccatagtttgggcactcacagtatttggggtgtctcccgggtcctacaagagcaatttgcttccttcagagggtctgtggattctctctgcttacctaatttattcctgcagtcatcctggagcaaaaaagctcacagtgcaagccttcacacgctgctctgcccgtctgagtgggagctgcaatctagtcctaccttccatctgccatgattccagggaaactttccaaagagcttttctacattaactcttctatcccattcattctttgtgggaggagcacagaactcttaattctgttcttaataaatagataagtgccttttaaaaattaacaattaagtaattcttttcggttagcatattctttacctgagaccatatatatatatatatatacatacacacatataacaagaccatatatatatgtgtatctccttgcctcccattctcaggccaacttcctgttgccataggcattttcatgcccaccaatcttagaaaacagatggtttgggagcatggctgtggccacagacttgatctttggttatcttctctgtgattctcttctcactcctttggtgagttgtccaggttcatggcttgaaatgtcctctttatgatgataagttgtcctctaaacatatgtatacataaatgcctatttgccatctcatcttgaatgtctaataaatatctcaaattaagcatatctaaaactgaactcccaattttgtcttcttacccccaaaatctgttctgcagcaatcttcttcatatcaatttgatagtaattctatgctttcagttgcttggccaaaaatgtttgcattatccttgaatgttctgtaatatttacttcttcccctaaacccagtcctgcagtataaattaccccctgcagtatacaacttgtgctgtcacttaaattcagtaagtctaaaatcaaactcaccatctgccatacccaaattatcttctccttatgtttacatttctatgagatcaccactatatcgccagcactgggttttcctcaacacctcatctgcttccaccttcccacttccttactatcaatccagtcagacttctgcttttccattgctggtaattaattactgcagacctggactattgaaggggcttccagtctgattgccatgcctagtacttcctcctccatcatagcctgcatactgctgctgggtttccttcctctgcttctgttattaccactgcttagaagccccccttgtatcctctgctgatctaaaatctttcactcttcaagtctaatacatcttttgtttcctcctagttaagctttctctgaccactttagtccacacagattccttcttggaaccacgatagcatttgttacctgagaagtagcaagatgtgtggagagaatattgggttgtgagttaatagtctgaatttcagttccagttctggccctaaccccttacatggcctcaggcacgccaccttaccaccctgggtctcagtttcctcctttataaaataagtggggttgggctagctgatcagttcagctttaacattttatgtatttataaatatatggctcagatacaggccattttatatatgaattactatgatcatgtcccccctttcagttctttgcagttgatctaaaatgttacttcaacattatctgtcctttgcttttaccatgttatttttctccttcaaacattccactgcacttatccattttatctttttattatgagttttaaggccttcattatattcacatttctcctatgcacttgtatgcacttgccagttctcttggtttttatcttgtttttccacagtagttacgctacccatttttttttttagcaacagtgtccgtgtatagaattatttcatctttccatttatcaagccatatttctgtttcatttaggatcttcttgatttgttcctcttattctagtagaggcttgggtaaactatcttgcctgcttagaatcccattctaatactttctctccttgaaaagacacattaaaaacagagacaaaataacagaaatttaaaaatcccaaagcatgttaacatattctttttataatattgttttatgctttttattttttatttttttgagatggagtttcactctgtcacccacgctggagtgcagtggcgctaactcagctcactgcagcctccacctcctgggttcaaatgattctcctaccatagcctcccaagtaggtggaattacagttgcccaccaccaagcctggctaatttttgtatttttagtacagacggggtttcaccatgttggccagactggtctcaaacaccttaactcaggtgatctgcctgccttggcctcccggtgtgctgggattacaggcgtaagccaccacgcctggcatagtttatgttttttaaatgtgtaatctatatattgataccatgttgacttcacattgatgatgatgctccccagaggaccaatggtttgctcaatgtaatatatatgttcctgagcacaaggagggtatttacacacgttttagagattgtatagcggattgatgatgagggtatgtacacacccttcaaagattctgtagtggattgatgatgtgaaagtcattcatataaagtttataataatgaacgtaattaatatacatttacaaaggactacacttctaaagaagtgcaattaacccttcattttcagtttgaaaccaaaaatcgcaatcttatccaagattttttactcttcccagaagttctgggagggacttttgacatggaggtgaagctagtagagttaagtcctttaagatgtattctcaccaaggaacatatgcaataaatagtttatacacattgtgagtatttaaagcagatgtcagcaaactttttctgtaaagggcagttagcgtatattttggccattgcagtggttttagcctgcgtagtctgccacaacaaaataccacagattgagtggtttaaataatagaatttattttctcacagttctggaggttggaggtccaagatcaaggtgccagctggtttgaattctggtgagggctctcttcctggcttgcatacagcggtcttcttgctatgtcttcatgtggccttaccttggtgtgtacatgtgggagttaggggagggaagtaactctctttctcttcttctcttctaaggcaaccagttctatgggattagacttaaaggtggcatacctctatccttaagatctggtttaaccttaattacctcctaaggatcctgtctccaaatatagtcacattgagggttaggggttcaacatatgaattttggggatgagggggacacaatttagtctgtgtatctctgtcacaactattcaactcttcccttgtaatgggagagcagctgttaacaaaaaagcgtaaattatttacataattatttgtggattgaaaatttaaatttttataatttccatgtgttatgaaacattttttaaaattttttaaaccatttaaatatgtaaaacccactcttagcttgcaggtcataaaaaaaacaggtggcaggttagatttgtcccatggactatagtttgcagtatctgtagttttagagtatcaagatttacaggatagaagtgatgagtgttaaaatctccctgtgtggttctgttttcaggaaggtacttgatatttttcagatgactatgacaagctaatagtacaccatttctcctttccttgtatgttataggtactgaaatttgatgcctatttccaagaagatgttcctatgtcaactgaggaacagtataggatccgtcaggtgaacatttactattatctagaagatgacagcatgtctgtcatagagcctgttgtagaaaattctggaatccttcaaggcaagttaataaaacgccagcggctagccaagaatgaccggggtgaccattaccattggaaagacctaaatcgaggaataaacatcacaatttatggcaaaactttccgcgttgttgactgtgaccaattcacacaggtatagcatatatttttgaaagttgtggggtctgaggcatcattctaatttatagaaggatacatttcatttattagggtaaggggaggacattggtaatctgtcctgcatgaattattatgaatggctaggtatttgcatgtgtgtatgtgctaatatgtgccaacactaatagtaacataattttttcagaatgatattaatacttattcactcaaaatcaaactctcatcatagctgaataatttggtaagaaaccaggttaaaatggcagttcaaacagggagtaggggaatagcatccctgctgggatgtaagtatggaagagggattaaacgttttatcttaagtgtgagtttacaaaaatagcactacttctattagcagatatgagcctaaaattttttgtgtagctcatatatttttggtaaatgatacttgctatattctaggaaagcttaccatctaaagaatttctgaaatgaaaccatttttaaatgaaaaaacctcttctatatgtaaaaagtcctctatttcgtaagtttggattttttaatacaaaggaaacttttattaaagttacatgcatagaggatataggtggcctttctttactacaaagtgtaggaattaggaagtcaattccaaatttgtcttagttaaaaaaatatttctagcagcaaagatatagtttctgaagtattttatgtccctattccaggatacctagtgccatatgtgactaatttttaccatgcactgagctcctatgaatccattattgttttcatttagtagtttgtttaacagatatttatttgcatgcctgctttgttccatgcactgttctaggtgccagatgttttcaggaaggtacttgatatttttcagatgactatgacaagctaatagtgcaccatttctcctttccttgcatgttataggtacttgcccctatagaggttccaatcttgttggaggagataagcaatagcaaataaatagattggttatatgtcagatgatgataacagcaatggaggaaaataaagctgagtaaagggaatggaagttgaggggctctttatagaggcggatcagagaatgcctcagtgataagatgacatatgaatagaggcctgaaggaagtaaagaaaggagccatggcatcagtgccattccaaagcaatagagaaaaatagcttcaaaagtagaggtgctagaccatctttgagatattctcccgttccaacatatttttatctctttgctttttaggtgtctgaggtcttatatatcataggcagtttcacaattgtaccaacagtgagaaatgataaaatgttatctaaacataaatgtattaacaattatttttacagttgtgttttcataacaattatttttacagttgtgtttttatgggcaatttgaacatttgcaagttaatcactgagcgtttgacctaatctatttatagtcggttctcattattgacagtaattaggactataaagtcaccacaaacactgaattagtgaatactgaaccactagtcttagaggaaatacagggttaggttcccactaatctctggccacatttttgtcaactgatcaatacataagtttgattcatgtatgtttctgtttaaagacaccttatttaatatatacggttgattcattaacattaaactcacacccaacagcactataactcacgtctgaacaaagcttatctaagacatgcattttctccatgaggtgtgttacagccttcttgtgcttaggaacactaaatagcacttcatcactaggcactgggaccctttaaacagcaaaatcaccaacaaaaaacacaaaaatgcaaaaaatctggcaccttcatgtatatgtatatgtatgtgtatatgtatcacattttctttttccagtttaccattgatgggcattcaggttgattccatgtctttgctattatgaatagtgctgcgatgaacatacttgcgggtatgtctttatggcagaatgatttatattcctttgggtatatacccaataatgagattcctaggtcaaatggtagttctgttttcaggtcttttaggaatcactacactgctttctacaatggttgaactaatttatactctcatcaccagtgtataaacatttctttttctccacaaccttgacagcacctgttatttttttactttttaataatagccattctgactggtgtgagatgatatttcattgtggttttgatttgcatttctctaatgatagtgatgttgagcttttttttcatatggttattggccatgtgtatgtcttcttttgagaagtgtctgttcatgtcctttgcccactttttaatggggttctttgctttttttcttgtaaattaaagtttcttatagatggtgcatattggacctttgtcagatgcatagtttgcaaatatttctttcccattctttagatagtctttttactctgttgatgctttcttttgctctgcggaagctcttacgtttaattagataccatttgtcaatttttgcttttgttgtgattgcttttggtgtctttgtcatgaaatctttgcccattcctatgtttagaatagtgttgccttggttgtcttccagggtgtttatagttttgggttttacatttaagtcttttatctatcttgagttgatttttatatctggtgtaagatatatggctagcatatggctagcaggttatcccagcacctttccccattgcttatttttgtcaactttgttgaagatcacataattataggtgtgtagccttatttctgagctccctattctattccattggtctatgtgtctgtttttgtaccagtactgtactgttttggttactgtagccctgtagtatagtttgaaggcaggtaacatgatgcctccagctttgttcttttgcttagaattgccttgactattcaggctctttttgggtaccattgaattttaaagtatttttttctagttctgtgaagagtgtcactggcaatttgataggaatagcattgaatctgtacattgctttgggcagtatggtgactgtaaagatattgatttttcgtatccatgagcatgtaatgttttttcatttgcttgtgttatctctgatttccttaagcagtgttttgtaattctcattgtagagatctttcatctccctggttagctgtattcctaggtatcttattctttttgtgacagttgtaaatgggattgtgttcctgattttactctcagcttggctgttgttggtgtataggagtgctagtgatttttgtatgttgattttgtgtcctaaaattttgccgaagttgtttattaacttaaggagtttttgggatgaggctctggagttttctagatatagaatcatgttttctccaaacagggatagtttgactttctctcttcctacttggatgtccttcatttctttctcttgactgattgttctggccaagacttccaatattgtcttggatagaagttgtggaagagggcatccttttcttgtgtcagttttcaagaggaatgcttccagcttttccctgttcaatataatgttggctgtgggtttttcatagatggctctgattattttgaggtgtgttcctttaatacctagtttatttatttatttattttattattatactttaagttatggggtacatgcgcacaacgtgcaggtttgttgcatatgtatacatgtgccatgttggtgtgctgtacccattaatttgtcattcaattaggtatatctcctagtggtatccctccccacaccccccaccctatgacaggccccagtatgtgatgttccccaccctgtgtccaagtgttctcattgttcaattcccacctatgagtgagaatatgcagtgtttggttttctgtccttgcgatagtttgctcagaatgatggtttccagcttcatccatgtccctacaaaggacatgagctcatcattttttatggctgcatagtattccatggtgtatatgtgccacattttcttaatccagtctatcattgttggacatttgggttggttccaagtctttgctattgtgaatagtgccgcaataaacatatgtgtgcatgtgactttatagcagcatgatttataatcctttgggtatatgcccagtaatgggatggctgggtcatatggtatttcttgttctggatccttgaggaatcaccacactgtcttccacaatggttgaattagtttacattcccaccaacagtgtaaaagcattcctatttctccacatcctctccagcacctgttgtttcctgactttttaatgatctccatgctaactggcatgagatgtgtggttttgatttgcatttctctgatggccagtgatgatgagcattttttcacgtatctgttggctgcataaatgtcttcttttgagaagtgtctgttcatatccttcgcccactttttgatggggttgttttattttttcttgtaaatttgtttaagttctttgtagattctggatattagccctttgtcagatgggtagattgtaaaaattttctcccattctgtaggttgcctgttcactcagatggtagtttattttgctgtgcagaagctctttagtttaattacatcccattggtcaattttggcttttgttgccattgcttttggtgttttagtcatgaagtccttgcccatgcctatgtcctgaatggtattacctaggttttcttctagggtgtttatggttttaggtctaacatttaagtctttaatccatcttgaattaatttttgtataaggtgtaaggaagggatccagtttcagctttctacatatggctagccagttttcccagcaccatttattaaatagggaatcctttccccattgcttgtttttctcaggtttgtcaaagatcagatggttgtagatgtgtggtattatttccgagggctctgttctgttccattggtctatatctctgttttggtaccagtaccatgttgttttggttactgtagccttgtactatagtttgaagtcaggtagcgtgatgcctccagctttgttcttttggcttaggattgtcttggcaatgcagactcttttttggttccatatgaactttaaagtaattttttccaattctgtgaagaaagtcattggtagcttgatggggatggcattgagtctataaattaccttgtgcagtatggccattttcacaatattgattcttcctacccatgagtatggaatgttcttccatttgtttgtgtcctcttttatttcattgagcagtggtttgtagttctccttgaagaggtccttcatgtcccttgtaagttggattcctaggcattttattctctttgaagcaattgtgaatgggagttcactcatgatttggctctctgtttgtctgttattggtgtataagaatgcttgtgattttcgcacattgattttgtatcctgagactttgctgaagttgcttatcagcttaaggagattttgggctgagaggatagggttttctaaatatacaatcatgtcatctgcaaacaggaacaatttgacttcctcttttcctaattgaataccctttatttctttctcttgcctgattgccctggccagaacttccaacactctgttgaataggagtggtgagagagggcatccctgtcttgtgccagttttcaaagggaatgcttccagtttttgcccattcagtatgatattggctgtgggtttgtcataaatagctcttattattttgagatatgtcccatcaatacctagtttattgagaggttttagcatgaaggactgttgaattttgtcaaaggccttttctgcatctattgagataatcacgtggtttttgtctttggttccgtttatatgatggattccatttattgattcgtgtatgttgaaccagccttgcatccaagggaggaagccaacttgatcgtggtggataggctttttgatgtgctgctggattcggtttgccagtattttatggaggatttttgcatcgatgtttatcagggatattggtctaaaattctctttttttgttgtgtctctgccaggttttggtatcaggatgatgttggcctcataaaatgaattagggaggattccctctttttctattgattggaatagtttcagaaagaatggtactagctcctctttgtacctctggtagaattcgggtgtgaatctgtctggtcctggactgtttttggttggtaggctattaattattgcctcaatttcagaacctgttattggtctattcagggattcaacttcttcccagtttagtgttgggagggtgtgtgtgtccaggaatttatccatttcctctagattttccagttttttttttttttggtgtagaggtgtttatagtattttctgatggtaggttgtatttctgtgggatcgatggtgatatcccctttatcattttttattgcatctatttgattcttctctcttttcttctttattagtcttgctagcggtctatcagttttgttgatcttttcaaaaaaccagctcctggattcattgatttttttttttggttttttaattaattaatttatttatttttttattattatactttaagttttagggtacatgtgcacattgtgcaggttagttacatacgtatacatgtgccatgctagtgtgctgcacccactaacttgtcgtctagcattaggtatatctcccaatgctgtccctcccccctccccctaccccgcagcagtccccagagtgtgatgttccccttcctgtgtccatgtgatctcattgggattcattgattttttgaagggttttttgtgtctctatctccttcagttctgctctgttcttagttatttcttgccttctgctagcttttgaatgtgtttgctcttgcttctctggttcttttaattgtgatgttagggtgtcaattttagatcttacctgctttctcttgtgggcatttagtgctataaatttccttctacacactgctttaaatgtgtcccagagattctggtatgttgtgtctttgttctcattggtttcaaagaacatctttatttctgccttcattttgtcatgtacccagtagtcattcaggagcaggttgttcaatttccatgtagttgagtggttttgagtgagtttcttaatcctgagttctagtttgattgcactgtggtctgagagacagttttatataatttctgttcttttacatttgctgaggagtgctttacttccaactatgtggtcaattttggaataagtgcgatgtggtgctgagaagaatgtatattctgttgatttggggtggagagttctgtagatgtctattaggtctgcttggggcagagctgagttaaattcctggttatccttattaactttctgtcttgttgatctgtctaatgttgacagtggggtgttaaagtctcccattattattgtatgggagtctaagtctctttgtatgtcactaaggacttgctttatgaatctgggtgctcctgtattgggtgcatatatatttaggatagttagttcttcttgttgaattgatccctttaccattatgtaacgacattctttgtctcttttgatctttcttggtttaaagtctgttttatcagagactaggattgcaacccctgcttttttttgttttccatttgcttggtagatcttctgccatccctttattttgagcctgtgtgtgtctctgcacgtcagatgggtctcctgaatacagcacactgatgggtcttgagtctttatccaatttgccagtctgtgtcttttaattggagcatttagttcatttacatttaaggttaatattgttaagtgtgaatttgatcctgtcattatgatgttagatggttattttgctcattagttgatgcagtttcttcctagcattgatggtttttacaatttggcatgtttttgcagtggctggtaccggttgttcctttccatgtttagtgcttccttcaggagttcttttagggcaggcctggtggtgacaaaatctgtcagcatttgtttgtctataaaggattttatttctccttcacttatgaagcttagtttggctggatatgaaattctggattgaaaattcttttctttaagaatgttgattattggcccccactctcttctggcttgtagagtttctgccgagagatccgctgttggtctgaatggcttcactttgtgggtaacccgaactttctctctggctgcccttaacatttttttccttcatttcaactttggtgaatctgacaattatgtgccttggagttgctcttctcaaggagtatctttgtggcattctctgtatttcctgaatttgaatgttagcctgcctcactagtttggggaagttctcttggataatatcctgcagaatgttttccaacttggttacattctccccatcactttcaggtacaccagtcagacgtagatttggtcttttcacatagttccatatttcttggaggctttgttcatttctttttactcttttttctctaaacttctcttctcacttcatttcattcatttgatcttcaatcactgataccctttcttccacttgatctaatcggctactgaagcttatgcatgcatcacatagttctcatgccatggttttcagctccatcaggtcatgtaaggacttttctacactgtttattctagttagccattcgtctaatctttttttcaaggtttttagcttctttgcgatgggttcgaacatcctcctttagctcggagaagtttgttattactgattgtctgaagcctttttctctcaattcatcaaagtcattctgcatccagctttgttccattgctggcgaggagctgcgttcctttggaggagaagaggcactctgatttttagaatttttagcttttctgctctggtttctccccatgtttgtggttttatctacctttggtctttgatgatggtgacgtacagataggtttttggtgtggatgtcctttctgtttgttagttttccttctaacagtcaggaccctcagctgcaggtctgttggagtctgctggaggtccacttcagaccctgtttgcctgggtatcaccagtggaggctgcagaacagtgaatattgctgaacagcagatgttgctgcctgatccttcctctggaagcttcgtctcagaggggcacctggctgtatgaggtgtcagttggcccctactgggaggtgtctcccagttaggctacttgggggtcagggacccacttgaggaggcagtctgtccgttctcagatctcaaacttcgtgctgggagaaccactactctcttcaaagctgtcagacagggacgtttaagtctgcagaagtttctgctgccttttgttcagctatgccctgccctcagaggtggagtctacagaggcaggcaggcctccttgaggtgccatgggctccacccagttcgagcttcccagctgctttgtttagctgctcaagcctcagcaatggcggatgcccctccaccagcctcgctgccgccttgcagttcaatctcacgctgctgtgctagcagtgagagaggctctgtgggtgtgggaccctctgagccaggtgcgggatataatctcctggtgtgccatttgctaaggccattggaaaagtgcagtattagggtgggagtgtcctgtttttccagatactgtctgtcacagcttccctttgctaggaaagggaattccccgaccccttgtgcttcccagatgaggcaatgccctgccctgctccgtgggctgcacccactgtctgacaaaccccagtgagatgaacccagtacctcagttggtaatgcagaaatcacccgtcttctgcgttgctcatgctgggagcttcagactggagctgttcctgttcggccatcctggaacctctcctacctagtttattgagagtttttctcattaagggatattgaattttacccaaagtcttttatatagctattgagataattatgtggtttctgtctctagttttgtttatgtgatgaatcacatttattgatttgtgtatgttgaaccaactttgcatgctggaaatgaagcctacttgattgtggtggattacctttttgatgtgcttctggattcagtttgcagatattttgttgaggatatttgcattgatgttcatcaaatatattggcctgaagttttctttttctgttgtgtctctgccaggttttggtatcagaatgatgctggcctcatagaatgagttagggaggaatccctcctcctcaactttttggaatattttctgtaggaacagtaccagctcttggctgggtgcggtggctcacgcctgtaatcccagcactttgggaggctgaggcgggtggatcatgaggtcgggagatcgagaccatcctggctaacacagtgaaaccccatctctactaaaaatacaaaaaattagccaggcgtggtggcaggcgcctgtagtcccagctactcggggctgaggcaggagaatggcgtgaacccaggagacagagcttgcaatgagccgagattgtgccactgcactccagtctgggcgacagagcaagactccatctcaaaaaaaaaaaaaaaaatagtaccagctcttctttgtatatctgatagaattcagctgtgaatccctctggccctgggccttttttggttcataggctattgattactgattcattttcagagcttgttatcagtctgttcagggaatcagtttcttcctagttcagtcttgggtgagtgtatgtgtccaggaatttatccatctcttctaggttttctagtgttgtgcatacaagtgttcataatattctctgatggttgcttataattctgtggggtcagtggtaacatcccctttgttgtttctaattgtgtttatttagatcttctctcttctacattagtctagctagtggcctatctttttaataaaaaccaactcctggattcattgatcttttgaatggttttttgtgtcttgatttccttcagttcagctctgattttggttattccttgtcttctgctagctttgaggttgatttgctcttgcttctgtagttctttcagttgtgatattaggttgttaatttgagatgtaactttttgacatcggcatttagtgctataaatttccgtcttaatactgccttagctgtgtcccagagattctggtatgtcatatctttgttccattactttcaaagaaattcttgatttctgccttaatttcattatttacccaaaagtcattcaggagcaggttgtttaatgtccatgtaattgcatggttttgagtggtttttttagttttgacttctatttttattatgctgtcatctgggagtgtgtttgctatgattttggttcttttgcatttcctgagaattgttttctgtttgattatgtggtcgattttagaatatgtgccatgtggtgatgagaataacgtatactctgttgtttttgggtggaaggttctgtagaggtaggtcacatccatttggtccaatgttgagttaggtcctgaatatctttgttaattttctgcctcaatgatctgtttaatactgtcagggaagttttaaagtctcccactgctgttgtatgggagtccaagtctcattgtagatatctaagaacttgctttatgaatctgggtgttcctgtattgggtgcatatgtatttagcatagttagttttttttgttgagttggatcctttaccattatacagtgcccttctttgtcttttttgatctttggtggtttaaagtctgttttgtctgaaattaggactgcaacccctgcttttttctattttccatctgcttggtagattttcttctatccctttattttgaacctttgggtgtcattgcgtgtgagataggtctcttgaagacagcataccattgggtcttccttttttatctagcttgttattctgcattgtggtttttttgtttgtttgtttgttttgtttgtttgtttttgagacagaatctcactttgtcacccaggttggcgtgcagtggcgtgctctcagctcactgcaaactctgcctcccaggctcaagtgattctcctgcctcagcctcccgagtagctgggattacaggtgtgtaccaccatgcctggctaatttttgtattttttagcagagactgggtttcaccatgttggccaggctggtcctaaactcctgacctcaagtgatccacccacctctgcctcccaaagtactgggattacaggcatgagccaccatgcctggcctctgtgccttttaaatggggcctttagcccatttataattaagattagtgttgatatgtgtagatttgatcctgtcattgtgttgttagctggttattatgctggtttgtttgtgtggttgctttatagtgtcactggtctgtgtacttgtgtgttttgtattggctggtaatggccttttctttccatatttagtgctccttttaagatctcttgtaaggcaggtctggtggtaatgaactctgtcagcatttgcttatcagaaaaggatcttatttctcctttgctaagaagcttagtttggctagatatgaaattcttggttgaagatttttcttctttaagaatgttgaatataggcccccaatctcttctggcttatagggtttcagctgagaagtccagtgttagcctgatggggttccctttgtacgtgacctgccctttctctgtagctgcttttaacattctttctttcattttgaccttggaaaatctgatgattatgtggcttggggatgatctccttgcatagaatcttgcagggattctttgtatttccttaatttgattgttggcctctctagcgaggttgaggaggtttttgtggacaatatcctgaaatatgttttccaagttgtttgctttctcactgtccctttcaggaatgtctggtgaaatttgagcacttggtttgtctttcctattttgctaacacgttttctggtctaatataaccagtgggtatgctttcttttttttcttttttggtgaggggaagggacttaatcatatacagtatttgttttaagtgaattagaaaattgggaatatgatttcagcctaacttggccattgtgcatcttgcctccagacctaataggaattacatattgtttgaaaccatggttaggttccagatatatgaaagtaagcaatcctaagacttactctgttacaggcacctaactaaatttgattgatttaaattatttgaaaacagttattttgccattgtgcctcccaactagcttagcaaatacctagcaatataacaatataaaatacttcaggtaactctcaattattacctgcattatggagttggctcagttggagacttaatacagcttacatgcgctcaagcagcaaactaatgtttaacttaagcaatggcatagaaatcattattacactttttctttctttttttctttatttgaggcggggtcttgctgtgacgcaggctggagtgcagtgtcatgatcatggctcactgcagccttgacctcctgagctcaagcagtctactcacttcagcctcctgagtagcctggactgcaggcaaatgccatcaaaccagtctaacttttaaatgtttttgtagaaacagggtctcactatgttgctcaggctgattgtgaactcctgcgtttcaggagtcctcctacctcagcctcccaaagtgctgagattgtaggcctgagccacagtgcctggcccatacacttatttttatataatcagtttataacttactctgaaaagctccaagaaagatgatcattgttaactttcaattatttaggtatttttagaaagccaaggaattgagttaaatccaccagagaagatggctcttgatccttacactgaactccgaaaacagcctcttcgtaagtatgtcaccccatcagactttgatcaactcaagcaatttctcacctttgacaaacaggtaagtgacataggaaccacaataggcttacttatttccaaatgtgacctacatttattggcaaaaggtttgggtagctgtattggtaactattttgaaacat

SEQ ID NO: 399 - DNA, 32744 bp, Homo sapiens
  source 1..32744: mol_type = other DNA
gcattgaccaataggagaccgtagtgatagcgacggggaaattcaaacgtgtttgcggaaaggagtttgggttccatcttttcatttccccagcgcagctttctgtaggtaagttctgtcttaccggtgcaccggcgcactgaggaacagccgcagccggtgtaggggctcattgttagcgctggtcggtgaggggtggggcgaggtgggggcagctcggagccaggtatgcgacgcggctaaacgagctggagggggaggggatgtctcactgcctcagcgggtctggccggtggggtgatgcaggaggttttgttgaggaagtaagaagtgggtgtggcccacgctggaaagaaggggtggtggggtacctgcgcacaagatcgttttccaaaggacagtctctcttgttttgggggttagaactgggaaagaagcgggtggccgtgatctgacagttatctttcaaacctgacttaagaggtggagtgataccttgctgcaactttatgactttttttcattgttaaacctgaagacggggcagcattgttatcagtgacactgagttggtgtttgagagtcacaaagatacgattaacaataagactgcagacactttattgaacaaacaccaccaccatgcagataagcaagtgctcagtaccagtacaatagtttcttagtgttagattaaggtagcaaatcgtgattctgctagatatgcacaagaataaatctgcggatttcctaattatcagtaaagccccatcatgtttatattctgctttgaaagcacttgcactggaagatttactcaagtaaagcaggcgaataaaggaattgttattcccattgccaaacgaattctttatgtctatgtcactaccagaatccaagcaatctttatgtgtatgtcgctaccaaaatccaagcaaacactctatcatattttttttaagtgacactaaatttgcagatttctacagtgtgacgtcattgatgttatattgggggaaaaagtatacttggcctatgaaaccttggtgaataaattacaaagatgtgtaccttgttgttgtgcacttacctccattaatactagcctaataatagctgcatttagatgtgttcacaaaacgaatgctttagtcgtctgggttctaaaaagctagtgcatttttttctttgatgctagttaaagtaggagttatgactgttcagtttttttcttagaaatggaatccgaggatttaagtggcagagaattgacaattgattccataatgaacaaagtgagagacattaaaaataagtttaaaaatgaagaccttactgatgaactaagcttgaataaaatttctgctgatactacaggtgagtttttcttttcttttaagttagtaactgtttgttgggtatcctctaaggtaaagatatagtactaatcactttatttataatttactcatgtgtttattgtctttctcctccattagaatgcaggctacatgatggcagggtttttgtctgttatatccacagaactttgaatggtgtctggcacatggtaggtaggcacttaaacatttattgaacaatgattaatgggtgaaaatgcccagagtttaatactctagctcttctaaaagtattagctcagaagcctgattctttactgtatttcaaatggttggtcatttgaatggtgacctttggataattttcttacatctatactaacctttaaatagatgaggaattgaaaataaatggaagaacctgtgatctaatcatggtggctgactgttcactttgaaaaaacctagaaaatgatagttttagtgttaagcaaaatcttaatggagtataattgtgcttaattatgtcactaacaaaggttgtacatcaaggcaattgagtattttaagtactgaggaagattcaaagatgcttaaaaccatagtttctttctagatgagaatttatatattcactatgctacattgtaatgcatgctgggcatcataggaatactagcatgataaaacacaaatgttttatttgttgattagaggaagaatagggtactcaggcatgaggaatgcatctgcaaagccacagatggcaatgtgtgttttttagacatttcacagactaatttcttaggaaagcaataggaggtaaaaatagaaaattaaggtcagaccaaattaaatttaaaacgacaaagcaaagttatgcatgcactatattttagtagaaagtagaaacaaattttatttataaaagtaaagatgtaggctttgttgaaagtgactgaagttaatagaaggaataatagcttctctggaaatctgaatttaatattgcttagtaataaccaaaatatcctgaacagaagactgacattcaagttatctttttaaaaaactaacactgaagaaagtaaaaagtacatttcagtgtgaacattttgtctgaaggttattcttgctgtttctgttggttggggttccacagagagaaacctgacagtcacaagaggtcctataaattccaaaggtctagaccacggtaactatgagtttgttggaccaagaaattatcagggcctctagcagaaatttaggttacttggagagaagaaaatgattgtctcatttgtttattttttgtaaagctggtttggttttacaagtaagtatgaggtatacagagataatgttgaatggttaaggttgtaaagaaggttatgttaggactggagcagtaggtttaatgaataaatcattgatgggagaattttctaagttaattagtacaagtggcagtgggagagatttagttttctatggataggtaggatgctaaaattatagttatcctgcaacagcataaaattttcttaaactacatacaatttttaaaggctacttacaaaaaaactcacttatttccaaatgttttctttccttcaaaatatatagcttttggataaagtataccttcataaaagataaatacacgataaataagttacttgtatttatatgaacttttacaattttaaaaagtattataaggactttatgtacattgatactgacagtacaaatgtttgactatattttgaaggaaaaatgcaatttggcatttgttttatgtcttttcttgtgatatattttgttccccttatttagataactcgggaactgttaaccaaattatgatgatggcaaacaacccagaggactggttgagtttgttgctcaaactagagaaaaacagtgttccgctaagtgatgctcttttaaataaattgattggtcgttacagtcaagcaattgaagcgcttcccccagataaatatggccaaaatgagagttttgctagaattcaagtgagatttgctgaattaaaagcgtaagtattagcattttaactatgttcaactatgttacataatatgtaactacactgcaaagagagaaaataaaaaacatggcagtattgtgagaaaatattaatttttttaccaaatacttttgcttatagttaacaagagactaatgtaaactcttttctatgcacgtttccacaacagtttacttattttaaactgcctaaaaagatttttttaaaataacttattagtatttaattttacccacagaaaaaagcaatatcccatgttttttggaaaattgaatgaagcattatcaaatttaagtagctatgttctttttcttaaattttgactcaaatcttttattacagtattcaagagccagatgatgcacgtgactactttcaaatggccagagcaaactgcaagaaatttgcttttgttcatatatcttttgcacaatttgaactgtcacaaggtaatctgaaaatgtcaaattcaaattttaagtaaaggataacttattacaacttacttcctaatattaaatcatatatatgaagtggaaatttgaggcaaaagacattaaagttgatcagatgagaatatggggagaaaatgccacctaaatgtaaatgcagagaatatctgttatactagcttttccatgtataaagagtaatccagggaaatgagcatgaacattgtgtatgtgctactagttagattcaggaaacatctaaaggaaagtagctgcttcactgagtatttgtaggaagaaggatatcagatatttaagctagagctttaaatatctagagcttacataaacttttcttatgctatggtttcatagcaccaaaatgtacattaaagtgtagctatgtaacttggtggtcaagtaaactatatatctgtgtgtgtgtgtgtgtgtgtgtgtgtgtgtgtgtgtgtagcgttaattggtagttctttaaaataaaaaagtaaactgctgtagaaactatttcttgctcacttggttcttcatagtctggatttttttgggtaggaccaagacaatctcttcctaagacatttttaacctggccattccttagtcttttctcattttccagggcctttggatacaccctcagtctgccctctggccaggtgtttccattctcccactgccttgtttctgctacaactgtgatccaatttactgccagtgataaacatattaacactattggaagaatccccatgatggtttccatagcagggattggtcactggagagtattccccaggattgagcctggagaaaataattatatgactcagaaataatttgagaaccctgaattgttacccattcagatgatttctgagtcctagtaattgtcttctccaatatgtcctttgctctatcaggttactttttagaactattatccctttcttctctagaaaaatggattcctccttgcttgttagagaaaatttggcaaggcttctttctctccattctgcttgaaaatttcttgaggtattgtggcctctcaataacaaccataaattttacatgtttagaacatgtaaatattgaaactcttaaattgagttatctgtaaaaaagacgaactttatctataccactttatctgcaatgtggtagtaatgcacagtgatgcaatgtggtcaaatgcattgcacagtaatgcagtgtggtcaaattatgattattttgagcacagttgatggcttggctgtcaggaaataatgcagcatccctgaagtcctatgcagagtctggtgtgtgagtatttttatagggatggaggacatttcagtttttaccagattcttaaagaaatctctgatctcaatactaagctatctgattaattaagcttcttaagcctttctctcttttcttgtgctaaaatacacaatacatgaaattctaccactacttagtaaatgtagatgtaagcactatcaaagatatttttaaaaatttataaactaccagaagctagagatcatctcttaagcatttttatacgctaagtaccaagtgcatagcatagctcaatggctcccataaatgttgataatattctgtaagatatgtgatgtatacatttaatatttatatgtcaaatgctaggggtaagtttaccaatttttttggtaatctgtccatactcagaaaggtaattatgatagttcctcagttattctgcattctttttcaggctggtatagctgagtgtgacagctaaagattaatctgtatttattatgtttttccccgaaaatccttttgatggaagatgctctttaacaaaagatgtcatccttcccttaactaaatgtcattatgaatgatacttattatagcatgttgtaagagactgatgctcttggcacttttgtaacatctagaatgccctcctgtttctaactgttgtgattggcctttgctgtcccctgttggtaactgctttgttacacttctgttacttctgaaagtggacagtggtgataaactaatgcaaaattacgtcagctacatattgcaaggaaactatttggtatgcattgttatcagaagagagttggttatctgcataaaaagtgagagattgcttacttgcctatgaaataaaatacatgagccttggaataaatatttttgcttaagtctttttgatttttttttctaggtcctgatgaatacgtatctgggtggtctgggtggtgggcattttactgcctaaaaatgacaattatcttttgctttgttaggtaatgtcaaaaaaagtaaacaacttcttcaaaaagctgtagaacgtggagcagtaccactagaaatgctggaaattgccctgcggaatttaaacctccaaaaaaagcagctgctttcagaggaggaaaagaagaatttatcaggtaactattaaggtatactaatactttctgtggtaggtagtacttcaaataaagattcgggataataatttatagaaaaatattatttatgtagaatggttaaaatctaagattaaattgtaaaggaggtaagactgagaagtaaaaaagtctctacaaccccatgcaaatttgtcttttttgctaactaaactttcgttaacacatgaaaaacaactctaagcaagagaatttttttttttttgcttttggaaatagagaatgtgcttttaccctggggaaatagttatataatttaagagaatttgaagaagtagttagataattatcttggtatcatcttcatgtctgcatatcttacttggggacaagtatttcctatgaattgacttttaaaatattcttatttgtaagatcacttttttgtacttgtcttatttcttataaatttaatcatagtttcaaaatttttacagcatctacggtattaactgcccaagaatcattttccggttcacttgggcatttacagaataggaacaacagttgtgattccagaggacagactactaaagccaggtttttatatgggtaaggaaacggaaacagtttttaaatgttcatcttctatgtaagtacatctgtgttttttaatgtaattacatgtatctgcatatatgttttcatgtgtgtgataatgtttagcagtagagtagaaatacatattaatattgttctttgaaaaattgggggtattttctttctgtttagagagaacatgccaccacaagatgcagaaataggttaccggaattcattgagacaaactaacaaaactaaacaggtaagttactttcaatctgcttgattaaggtggtgatagtctttatttcctagttggttatttaatctttcaaaatatttttagtcatgcccatttggaagagtcccagttaaccttctaaatagcccagattgtgatgtgaagacagatgattcagttgtaccttgttttatgaaaaggtatgttgagttttaatttttaaaatttgttgtccgtatgggaagattaatggcagaatggtcttaaagtcttttactgagtaatagtaattatgattaaatttttattcagttttagaagataatctctaaatgttgtcaggaacaaaggaatgagtggagaaaataactttgttttgctttttcactcattaaaaatattcattaaaggagctttaaaaggaaaaaatattaagtcaacattaagcttaaaagactgatatttgaggatttgtcacttacgggtaggctgtctgctaagaatctcttcctgttttgtttgagagtctccataacgggtagaaggaggtctgggaacaaatatttgctccagatagttcaaggggagaatcgctgtcagtgggatagatgattattcttttgcttgagtctagtgcttcaagaagtgggacaggttaggtacagatgaattactgttcatcacatccagtgtgttctccttccctcaatttgcttgtttattccctgttaagaaatgggaatgtagcctgtagctcagctaaaggagagttattttggcctattcttaattctgaccaacatttgtaatatttatattggaaaaggctccttacagtccagagaatcattttgcaaataaactttagaaatacgattgtttttcattactatcttttataattacatttctattatatttagacttgactaaatattgacattaaaagaacattttgtttgtcaaggttaagctttaaagtcttatcactatgatttcatcttgttcatctctatttcaaatacctagctcaagaataaaggagattttcttccgctccaaaaaattaaaaacaaaaacagaaaaactgcagccattttcttggttcctgttatcgatagacaatgctaggtactgtggaggtccacagaagtgctataccctggttcttatcctttagctatttgtaattggaaatgtagtttcatctgtatactttgcctttcccacagtctaaccctaactccaattgttactgattagataatgaagaagtaggcgatcacctgtgtcacttttgtcattgcccagcacgtaattttgttagctaagtcacttttgtattggaattatgtcactctaaaaaatgtctttttaagagatttttttcaataaaaagtatgtatattattaaaaatccaacttgagatgaaaaaatacattgaaaattttttttttcaaatttaatgttaaaattattttgtttcacgggtaaaagacaaacctctagatcagaatgccgagatttggttgtgcctggatctaaaccaagtggaaatgattcctgtgaattaagaaatttaaaggtattttaattctatatcattatataaagcaagggttcctgatctgggaggatcagtattcatggagctttttctggggaaagggtttataaatagttcatgtatctccaacagtgttccacataccccaagagctgtgggactacgagtgggaagttggtgcagaagtcctagactatgtttctccaagattaaggtggtagagcaaggatcaacaatcttttaagagaatcatgaagtaatatttattatgcacgtgtttaagcagatagttggcctgggtttgggaatacgtgactgggggaactgttgcccccaagttttgttttttgttatgtttaatcatatgattttggtaagacatcttaaaaaaaaatgagagagtaaattgagttagggcagaggtgaggacataaataatcctgacctcctgacatggcagagcaactttgtgtggacttaaaggaaataattttagttcctggtacactgtgatttttagtggttatactattattataattgagttaaacccctggcatcatgatgtgggtcttttcaattttatgttctttgtaatgcctccctctttcatgacctatgctttaagtattaatttttcctaatcctggctgtcctagagaacagtgcataattgtgtcaaaaagattgttctctggatttagagtaactactctcttaagttatgcagttactagttttgacttatttttggtgataaaatagccatcacagtaacaaaatacttaaatcttttttcttgtcatgaggcatactctatgttgaattcaaactttctaaccctttccatctttaagtgaaatatattttagcaattgattaatacatccactgaaagcaaattggccagatttatggttatgacccttcccatttctctaattaataattcaggcagttaacctttgctgggggtttgtgagtctacatataattataatagaaaattttatgagcaatccatgtatagataagactttagtatattgaacagtaagacagattagtagtactactatttatgggactttatttgattttctttttcatgtagtctgttcaaaatagtcatttcaaggaacctctggtgtcagatgaaaagagttctgaacttattattactgattcaataaccctgaagaataaaacggaatcaagtcttctagctaaattagaaggtaagagtaacaaaatcagtagacttgtatgtttagttaagaaaaccacttgatagcttaagaaagcagactagccacctaagaattatgatgtgaaactgtgtctatgttcttttatcttgaatttccgttcagttatatagggtatatgaaaagtactgaatccgcagcaaaggaaatttatttacctaaaaggtgcataaaagaaagagtggagggaaaatgcaatggaactgagttttttttctcagttggcttgacaaatactttctggaagggatacaaaagctgtttttatatgacagctctcatcttttatcaagcgtttggttttctactgcatgggtactgtgatacatgttctagggatatataagtggataaaacagtgtcccaaggaggttgcagttcagtgtggaagatacacagagatatataaatgcaatgctgaatagaatgtggagattgtcatgagagccacataaatgaaatgctatgagaattcagaagagggagaaattaaggaactaatttggtttaggagaaataaggaaatattttgtgatgatggtgaagtttgaagaaacaaattaggatttaaatgggaaataatagagtatttcagatgaagaggataacacagacaacgagtaaaatgtttcaggaacaagagactgtctagttatgctgcagactgtaacatgggtagtgtgcaaataggaaataagactaggcggactttgaatgctattagattttttatttatttttagaatgcagggtaccattaaagatatttaaacagatcattaataggatgatcattgtccagatagaggttgccagattggatgtattaatttttaatttgttttaataggactgaggagggactttgggacaaagtgaggcttgcctttgccagggactttgctgaaagtccaatatcccaagaatgcctcagtcccaggcaaacggggacacacacaaaaaaacattattttggttgggaacagattcttattcctagcgtttggtggaaagtgtttacatttcatattttcttggcatctattgtaactggtatgattgagaaaatcatctttatcaaatatgcttgttaatagtactctcaatacctaatttaatgttttaaatgaatgcttgttgtctacactataccagtaatactttattaatataataaagcatatagtcagaacactgcccaaatcacaagagtgctgcacaatgaaataacacaagtgactgcatacttgtaaccaatagccagatcaaaaaatacaacattactaacacctcaataacctccttgatcctcctcctaaatacctctctccttccagatgtaatcattattctgatttctaacaccacagaatgaaataatacagtgtgtattcttgtatttgcttactcactgttgtttatggaactcatccatgtttttatgatatatagtctgttgatttttattgccgtatactatttaactagtgtaaatatagtataatttgtttattcacatgtacatggataacagttttttgtctaatgaataatgctgctatgaatattttggtgtcttttgattcacatatgtacaaatttctattgagtgtattccaagagtgggattgttgggttacaggatatgcatgtgttcagctttggaagatggtgccaaacagtctgaaaagtggttgtgctaaccttagaccagcaattatgttgctcctgctcctgttctttgcaatcattgtattggcttttaattttaggcattctgatgctatctagtggtatctacctcgttgtggttttaatttgcattttgcatttccttaatgtctacttttgaacatcatttcatatatttattggccatgtggatactctcttgtaacatactgcaactctgtcacccaggttgcagtcttgctaatatttctgttggtttttctttctttttctcattgatttttaagaggtatttatatgatctagatataaatcatttgttggaatatgtgtttgtaagggaaaacgcataattatttttctttccctttttagtttcttagctgagacactctcctgaaaatgcaagaacgattaacaatagaaaaacaagcagaagtttgttaacatgtgctctacccatcacctgggcgggttcagttcagaagtatttctttctctccaagcagtggatttgcttaaatggtattttaacaaagagccataaatcttaaatattggcaagacaaaggagagaacagttccaatctttaaaagcaggaaaatgtggaaaactagtaaaatctatttccagattcctctggtgcctgctagtgctttctgggccaaaaagcaagtgttgtctccagtaaggaaagatttatatcctgccatcaggcaagatatttccatattttttagatttatcattttacttttcaccttctgatttatatctttcctgagtttaatgtttacatatgtgtaagatcaagtgtcagggttcattatttttccccataatggatatccaggtgacctggcaccatttattgaaaagatcctcctttacctcactgacctgttgtaaattaggtgattctatgtatggtgtctggctttggattcttttctgttctatattcatttttgtctttttctttttttgagacagggtcttgctctgtcacccagattgcagtgcagtggtgcaatcacagctcattgcaacctccgcctcctgggcacaagtgatccttctacctcagcctcctaagtagctgggacttctaggcatgtgccaccatgcccggctaatttttagtttttttgtagagatggagtcttgctatgttgcccaggctggtctcaaactcctgagttcaagcaatctgcccacctcagcttcccaaagtgctgggattacaagtgtgagctatcacaccaggcctaatgctctcttagtagctgcactaagtcttgatatctgtcagtgtaaatttttcaactttgttgaaaattcacgactattttggctattcctggcctttggatttccatataaacactagaatctatcttttggttaccacttttaaaacatgggattgtgattgatatttaactgaacctataaagaaatttgggagaaactgacatctttacaattaagttttacagctcaataacctagcatatcttttcattcatttaaagtaatgagataattattttctgtgtagagacctagtgtatcttttgctaggtttattcttgaatatttttttaatgctgatcagatattcttgatattttttgatgctgtgatagtgaatggtatctttttaaaaaccttttctagcctgagcaacaaagggaaaccttgtctacagaaaagttagctgggtgtggtggtatgtacctgtggtcccagctatgcaggaggctgaggtgaaaggatcacttgagcccaggaggtcgagactgcaatgagccatgatcacatgatcatgccactgcactccagcctgggtgacagaagaagaccttgtctcaaaaaaaaaaaactttgttgttagtttataaaaaatataattgatttttacttatttatgcattgctaaatttactgagtaattctaatagttttccatgcattttttggatttttacaggtacacagttatgtttgaaaatagtatagctggccgggcacggtggctcacacctgtaatcccagcactttgggaggccgaggcaggcagattgcctgaggtcaggagttcgaaactagcctggccagtgtggtgaaaccccatctctgctaaaaatacaaaaaaaaaaaaattagccgggtgtggtggcaggtgcctgtaatcccagctaatcgggaagctgaggcaggagaatcgcttgaacctgggaggcggaagttgcagtgagctgagatcctgccattacactccagcagcctgggcaatagagcgagactccgtctcaaaaaaaaaaaaaaaaaaaaaatatagcttttttccttttgaatccttttaactttcttttctatgccttgttataattgctatgacctccagtataacagtgaatagaaagggatgataggtgccattcttgtctcattccttattttaagggaaagctgtcaatattttatccttagtatgatcattactgtagagttttgtccctactttttgtcagattgagtaagttctgttttatactgaggctactaataatagttttttttgtgtgactgggtgttgaattttatcagatgttttttctgcatctatttagttaattatatattttccgtctctattctgttattatggcaaattacattgactttcaaatgttaatcaaactttgcatttaggaataagcccaatttggatataattttttatctcctttgtctatcaattgctaatatttcgtttaggacttttgtatccattataatgaaaggagtggaactgtgtatttgtagaatgttaaatatattgttgaggcgttttgtttatagaccctttgagagaataaattacaaactagcataaggtgaaatttttatgttaaactagaggtcttgtaactgacttaagtccggctgcttgctactcagaggcaaaaaagacaagaaatgaggtgtgatgaaaggaaagcaattttattaaccaaatgctagcagttggagaatgcccaggctcttactttcaaaagactattctgtaatttctgaaacatgctttcccataagataattttttcttaattggaaatgacccagacatctcataagcatcaattatttaattcaaaataatttgaaagtccactacaggcatttatctcatttacatgccctgagctttttccatttttaagtttttctagattacttctgaaaactgaaatgttatacaaagctagtcattatttgaagttgtttccctgttaaccatttttacagtctgagtaacaggtaaacaacctaagtaagaatcttagagttaaatatattttgccgataactcagaagattgagctgttttcattgaaccaccaatctaaattaaattagtcttacttgtcaaaaaaaatcacacaaagattagtctgtttttgactgtgtttatagtcttataaccttgatgtcaaaccctgacatcttaatatatagacatagacaaatataaaaccatttggtcaataaactcagacaaaaatgtatgctgataattctaaagacattttatttttattaataattttaaaatcacttttatttaccaaagattcatatgaacttgaaaagcattaggacttacttaatttatgagtactcatttacttataagccaatttggtagcatgctagattcaacatatacatgtatgtacatataaacatgtctaaacatgtatacatacaggcacaaagatccaatagcttttacctcagaatctagccataagatgacaatacaaactcaccactttataaaagacagctgatcctaattatttttctgatgaaattggaacctgttcacatggctaaaccttgtttgccctgataggtaatctaaggaaagctgtcaaccaaaatttgggtaaaaaagtctctatggcaatttcgttttaaaaacctcttttatcctttttttccccttttttcttcagtttcaaatgagttactaatgattctgttataatcataactggctgacctgtataagaaaaataaaaaaacaaaatctccaagtgagataaaacagtgagttttatctcaactcaactagcttaataacagcacattcaaagcaggcagaaaagaaaagagaaaatagagagctagctttagaagactgtttaattttgtagttaaagattaaccatttgagctctgaatttttcttactggaatttgcccatagttttaaaatgtgcagaaaaacgggccataatgtgtaaccagctggagtcccagatagtccaggaaagagctcacatgctttctcccctaacaaagcttgacgcagatacaagaaatattctggagtccaaaagaggatgacaaaaatcagaggccaggttgttggaaaccatttcttccctagcggggagaggagcagcctatcttgctgctttctagtcttgctgggcgggacggagacagtttcaaagcacccttggaaagagggataacgctaaacagagacacaaatacaggcggatccaatgcagatggagcattccaaacccatccccaagaaggggagactggagaaaagtcctgagatcttgtctcaaatccagacagcactgcagagtgacctgcattgggtccagatggcaaagagacccaaatggcaccacagatgacctatactaggtccagataactagaaagtgcagatggctaagatggaggatttcccagtacactctggttaatttatccaacccttgaattctgttgacctccaagatgccacttccctttcactaactgagtgttacagcagctgatgccacaaagggaagggaaggaaaaatccttcagacaagggtggtctccctagctgctgggagttccttaaggtcccagctgcagggtcagctagccatgagcagctggcatttgcaagtggctcctgcgttggcctggtagcctgagtgggtgagccttggcctgctcccacagccaattgctccacttgttggaaaccaggcgtacaggctgagcccctcaaaacacacagttcctcacacagggcaccacatttgtaactgactcaagtccggctcttcacaacacagaggccaaaaacatgagaagtgaggtgtggtggaaggaaaacagttttattaatcaaatgctagcagctggggactggccaggctcatgccctcaaaagaccatttcaactttttgggctgagtgaaggggtttaaaaaggaaaaggtgtggaagagatgcaggagtggtgcaggtctgaatgtcttgttgtgatagttatattgagtaattgcccatctggaggtatggtttgtgtcatcttgacttcagctgggtaatgctaggctaactgttcgaaactccccccatgcaagaggagtctgcaactccatctctgcttggtttgtttcaaaactggcccctgaaatttctaagcaagtacgtaattagataagtgaacactgttcatggacatgcctggtgggaaagggagaaactaagggtttcaaagtatgcttccaggctgaaagcaaaaaggaaaaaaaaatgttctaaattgcattttgagggttggatactcggtctatgaaaagtgatgaattagcttctctattagtaagactttataacatctatatgtttttaaatttttacttatttattggtaaagaagcatttaaatgtggcaaggtctctgacaaagttcttagtaacaatgtaggaagatgactatagtgcaactttgtgaaattgacttgctaaaagcaaattgttaagcagctggcttaaagcttttagtttctctccctccttgattgtttttaagaactaaatactcatatagtttgtaatatgttctgttgtttaggcttagtttattatgatcaaatattcttgctttttaatgacaacaaatacaatttcagaaactaaagagtatcaagaaccagaggttccagagagtaaccagaaacagtggcaatctaagagaaagtcagagtgtattaaccagaatcctgctgcatcttcaaatcactggcagattccggagttagcccgaaaagttaatacagaggtaacttttccactaaagtacaatattgcttttttgttcataatgcatttccgaaggttgatgatcatattaaatgttttcttttattaaatgtgtatgatatttagtagaatagtttatttaaaggtttttaaaatcatttataaagtggtgatcagtagcagtcatacgttcagtaagtcaggctaaattattttctatcttcgatagtgtttctagattgccgatagactggtgctatgggccaaatctagttcttagcctgattgtgtaaataaagacttactggaacactgacacactcattcatttaatgtctatggctgcttttgcattataagagcagagttgattagttgtattagagaccacttggcctgcaaagtttaaaatgtttactatctggtcctttaccgaaaactgtatgctgatctctgaactagcgcagtgctgtcccaagcacttaacagtttcctgtggtcatactcattgataaaaatagaaaaatatagcctagacaacgtacatgaatttgtaacatactgagtcatcattcctggtggcttttcggaaggaatgatcaagtaggatactaaagagctatagctgcagttcatggccatagtttccttaccatttcttttcagtgacttgtagtaaatatagtaaaggctttattaattcagtggttctcaaacatttggccttttatactcttaattatcagtgcccctaaagagcttttgtttatgttgattatatctatctctatttactatattaggaagtaaagccaagaaactttaaaaatgtttattaatttattaaaaataactgagggctgggcacgatggctcacgcctgtaatcccagcactttgggaggccaaggcgggcagatcacgaggtcaggagatcgagaccatcttggctaacatggtgaaaccctgtctctactaaaaatacaaaaaattagccgggtgtggtggtgggcgcctgtagtcccagctacttgggaggctgaggcaggagaatggtgtgaacccaggaggcggagcttgcagtgagcagatatcatgccactgcactccggcctgggtgacagagcgagactctgtctcaaaaaaaataaaatgaaataaaataactgataaactcatgtgaatataaatgtacttttatgaaaaatatgtattttctgaaacaaaataactacagtgggaagagtagcactgtgttagagtttttacaaatctaatgattggcttaacagaagactagattcttatgtctgcttttgcattcaatgtatttcattattacatgtcatacagtctctggaaaactccttatatactcatgagaaaataaaagtgagaaaggtaaatattgtcatagtaagatctcttaagtagtagatgtagataacaaatgctagatgataaggatcctgataggttgagtcatagattgtatcaaaccagcatctcctcttttttttctatttgaaaattgtacactaataggattgtaagggaactgaaaaccatatggatcattaaagaaatgcaaagcaaaaccataattagatactacttcacacccactaggacggctgtaattcaagagacaataacaagtgttggcaaggatgtggagaattttagaaccttcatatgctgctagtgggaatgtaaaatggtgcagtcattttggataagagtctgggagttcttcaaaaggttaaacgtagctttatatgatccaataattccactcctaggtttgtagttaagagaattgaaaacatacatccacacaaatatttgtacataaatattcatagcagcattttcataattgccaaaaagtggaaataacaaaatatccaaccgatgaatggataaagaaaatgtggtacatccatacaatggaatgttaatcaacaataaacagtaatgaagtactagtacatgttacaacataagtgaacatttacaacgtgctaagtgaaagaagctcaccacaaaagcccatatattttatgatcccatttagataaaatggtcagaataggcaaatccatagaggtggaaagtagattagtggttgccaggggctgggagcagtggggagtggggagtgattgctaatgggtgtgagttttctttttagaagacgaaaatattctaaaattggattgtggtgatggttgcacagctgtgaaccactgagcaactaaaaaccattgaatagtacacgtagaaagaaaaagtatagaatctaggcagtttcttgtggatactgcttgtccagcagtcccttcaagggaggattgtttttgtctcacatctcacttaccatatggctgtgtgctctctgttctgtgtccagaccatttcttcctctttcttgcaaaaggcctgctcttttgatacttctgacttactctcatctctgaatgtcctggtaactccccatcattccttgaagatacaaggctctggatcaaccagatcccaacaactgtcattgtttttgttggcttctacacccctgtgtattaccagtcctacagctggccttcatttttctaacttcttcgtgtctcatgaccatttccttaattttactttagccacctactccttatatcctcaattctgacctccaaaatcgcagatgctaacattccactctatgatcgtgatctttttcattttccttgttcattaatcttattacagcagttcctcagtaacatctttaccactaatcttaaaatatgtgcgtgcttgtacgtgagcacagacacacgaagtcttaaatgagagggaaaatttatcctggaaaaaaaatttcttggccaagactgaaatgtagaaagtaggatagatttagtcattgtaattctcaagtgcgtaatgaggaccagtgtgttgaaattataatagataaaccaatataatccaaattatctgcaaatattttctaataactaaagctgtcctgaaattgaagtgaacctctgtagactagtgagtgcttagttactaaaagtattcaagcaaaacttggttctctatttaattgagatgtgctacagcaggggttagcaaactttatgtaaagggttagcaggctttccaggctagatgggctctgttgtagcttttcacctctgccattagagcatgaaaataaaagccatagacaatatgtaaacaaattggcatagccatattctaataaaactttgtttacaaaaataggcaggcagcaggccacattcagcctgagcctgtaggctgtaatttgctgatttctgctgcagcggatgttccttcatcattgtttggggtttgtataggatgaatcctataggttcttttttttttttttttcccaacaatgcttttggaaaaagaatttctacaggttctgtctcttcttatggaggacacaagataggcatttgtcattccacattttgctaagtaattagtatttgtctacatttgaggagaagggaatagagttttattgattaaagaaaggctgattttcagaaacacaggatactattttagatgataagaatttaatacttgttacaatagctctgatggaagagaatgttaaattctgttttaagtaattttgtgtgccttccctgtacttgccatcagtttgagcagaatgcactaggcttaagaatttggagtaaaataactacactaaaaaaattattgaaagtctaaaatgtatatatatgcctatctcttttagtatgcctttgtatatcatatgttattattttattttaaaagttataatatttgtaaaaactagtgaacaggcaactaatttaaaaactaaatcatggtgttctttattttgttttagcagaaacataccacttttgagcaacctgtcttttcagtttcaaaacagtcaccaccaatatcaacatctaaatggtttgacccaaaatctatttgtaagacaccaagcagcaataccttggatgattacatgagctggtaattactttggccccttgcttgattggcagggtggtatgatagaattaacatgggcttctgggccaaataaatctgggattaaatcctgctcttttactttaaagactttccatcttcatattattttttcagcatcagtgttttcatctataaaatggaaagggggaagtggttgcaataatgcatatttttaaggattgttgtgcatgtagtttctgtcatatcgtaatctgtacctacaacctataaatattctaaggatgtaaaacgtcttgataatcatgtattgccatacagatatctctctattaagagagagattttaaaggttagcattcttagagcagataaagagtagatgaattttttcacataagtggtgttaattggaaagtgatagcttctggaagagattggtttttacagttcatgtagttctggaggtattcaaaggtgtagtatttgagtgaataggaatgatggataagtgaagaagttcgatgatgagtgtgctgatagggaacacaagggatactacaaaagaaaatgaatgacatttcagagaaaggaaataaagggatgcgatacattataaccatcaaccggtggctatatctttaatgtcttaggggatagcttaaatccgtgttgtcttttgcgtttcattttcataatgtaatccttgatcttaattagaactggtcttaaagattttataacccagcctcttacctacttaatatagttttactatatattgcctcattttattatatgtagaatattctaaagaatgattgctaactaaaatagcgataatagatatttcttgtgatactaggttaattattgttaacaaatatttgtggagctcttttgtgccaagcattgttctaggtgttgaggatatattaatagcaaaaaggcaaacaaagcacaaatgtatactggacagatttaagctcaaaggccaaactcctgtgatgtaattggctttctgatatttctagcaagccattatagaacattattgtttaaaaaaaaactcaaaatctatggccggccacaagctgatgtttgctaaattcatataaaataaccctaaccactttgtattttaaatgccatcttttcaaacaaagatttcttgtctgcatacaaatatttactttcagaaagaattccccaaaattaaatatccggtggtggcatatctggaataagtgtcagctatatcatgaaaactaacttgggttctgtttgatgtaacacttttaagtttatatcagtctaaaatacatgaaactgaatcagacttatttgttaaattgtaatgttttaaataaaaatatatatatatttcctagttttagaactccagttgtaaagaatgactttccacctgcttgtcagttgtcaacaccttatggccaacctgcctgtttccagcagcaacagcatcaaatacttgccactccacttcaaaatttacaggttcgataagctttatatatgatggtatatgttaagatacagtccgttttacagcttttatttttatagcatctagttatcaagaaaggtcttaagaacttggccattcttatttccactagacaaaacttttctgatattctaataagagtgtgccttgtggctttgagaggttggttattgaagaagcttacgaagctactcttaataactaggccaaaggatccagtttgaatagctggataaaatttctcttatgaatcaaggttaccttttattttttatttttatttatttatttatttatttatttatttattttttgagacagagtctcgctctattgcccaagctggagtgcagtggcgcgatctcgggtgactacaacctctgcttcccaggttcaagcgattctcgtgccttagcctcccgagtagctgagattacaggcacgcaccaccacacctggctaatttttgtatttttactagagacagggtttcaccatgttgctcaggctggtctcaaactcctggcctcaaaccatccgcccgcctcagccccccaaagttctggggttacaggcatgagccactgcgcctggccagcgttactttttgttgtgttttgtcagctgctagtgagcagcttcattttgtttgttagtatacaattcatttggaaatgtaaattttcaaaaatatcagaatagcaatatgaggtactgctagaatgtattatactaataactaaactaagaggaaagattttttgctgatgaggcaaaagttggtttctagtaactgtcctagaggcagcttaatactggtagaaaacatgggccttggagacactgggcatgaatcttagcctcactacttacagtctgtgtgatcttttgcaagttacctaaattttcggtgcccatttcattatctataaaattagtaaagctaactacctcctaggatggttgtgaagattaaattagttaatatagacgtaactcctaatacagagcatgacacttagtaaatcagaaatgttagtagcaattgttatttaaataaaacaataaaaaacccatgagtaattaactataaaaatcaactgataaaaaaattagctgacagaataagaacagtggttgtcagggaagggaggaagaatggggagttactgtttaatgggtatagagtttcagtggtatttgcaccaccatccatcaccagaactttttcatcatcacatactgaatgtacttaatgccactgaattgtacctaaaaatggttaaagtggtaaattttgcattatgtataatttgcacagtttgaaagaataatggacaaaataatgagctgacagtagatactaactggaaagaggtgatagtgttttaaggattgaaacaatataataaattacaaaggaaaaacaaaaatgatccagtttgttcatgcattgattcaaaacacatttatttagctattactagtgtcaggccctgtttgagttgcaatccagaagacgagtcacagatgacaagtgaaggggcttggtggagccttctagaagaggccagtgtcagaagagaactgaaacgaggccacagtgtggctagaggtcaggaaggggaaggagtgaggcccaaggtttgctgggcccttaagttttaccctaagagggtgggaagctttggaagaggttgaagcagggaagtgaaatgatccaatttgcattttggaaactctaaccacagtgagtagggcatactaagggggatgcgggaagtcctgtggaggaaaccagagttcacattagtgttgagtcagaaataagaattactttattctaaaaactgtcagcagccgtggagaaaggacattgaactgctttcttcccttggcaatgttcacagttttaaatatgaaaggaagaagacagagaaggcacaaaaggaggagtggggaaaccttgatgaaattacaacacatacatgtttagaagcccaatactttgttacaggaaatatatatagacaatgtatctcaatcctagaggtgaaaaaattagaatacttatctttttatttaaataggagattacatgagagattctaccatttggaacctaaagcaggccttagttaaattgaggtttattcagaccttgtttaacttggttaatcagctaatcaggaggtctttttgtttcaccttctttatcagctcagaataagtcctctcagcactccatctgttcaaagcatttataggtacacagagagatcctccaatataagggaaggaatgatggggctggttgtatagtacatcaactgaaagtttgctggggaagacgctgaggttctgaaaaattaagtaacttgttgaacatcactcaggacaaagttgggggctgtattaatgagttcttacactgctataaagaaaagaggtttaattggctaatggttccacaggctgtacagtaggcatgatgctggcaatctggttggcttctggggaggcctcaggaaactttcaatcatggcagaaggtgaaagggagcaaatgtcacatggctggagtgggagggagagagagagttgggggcagatgccacatacttttaaatgaccagatctcttgagaactctcagagaagcactgaggaggaaatctacccccatgattcagtcacctctcaccaggccccgcctccaacattgggaattacaatttgacatgaaatttgacagatccaaaccatatcagggacattgctgaaatttgcatttgtctcattgactttggagctcttagcaccttagcacattgcttcctttataatataacgctaaatgagaaagaagaatacagatatagccggatggtagtggcatgcctgtaatcccagctactcgggaggctgaggagaagaatcgcttgatcctgggaggcagagggtgcagtgagccgagatcatgccactgcagtccagtctgggaggcagagtgagatgctgtctcaaaaaaaaaaaaaaagaaaagaatgcagctataattatgtgtgtgtatatgtacatatgtaagtaaagaggtataaggaaaaagaatagaaaagaaaaatgaaaaatataattttatattttatttttatatatatttttaagcttataagtttgcagattgcatattaagtggttttttcctccttaaattttctttttaagtcaaaactagttaaagggggagaccttggaagtttgtctacattattttttaaggttttttttctttgattaagtagagcaagtccttttaaaaatattgtaacatttctaattaagatttaagataatttcaaaatggggagcagttgactgtaccaaatgtaagctagtttcttaggtatattgattaacttttatttatatattttacttatttaggttttagcatcttcttcagcaaatgaatgcatttcggttaaaggaagaatttattccatattaaagcagataggaagtggaggttcaagcaaggtaagtatcttaaaatatttacgaaataaataaaaatattttaaactttctgtttttttgtctttttacctgtgagggctgcttttcctttacttctaggggcgatgctgcccttgagccaaaaagccatcttaacacctgcctttctcttcccgctgcccctcacatgtgacatatcctctttagatctcttattcccagtcttctgcctttcctttcaatgtcctgtgcttctaaacttcttctttaataacaaaaacattgacatggggtagcgaatgaccactatgtattatcacaaaagaatcagaaatttctgagtcagaatgtgatgtaaattgctaatatgtttagaatcattcagcaaggatttttactaatggattttgttttcttttgagttattcatttcagaaacagaattcagtaacaaatgaatttctggaattagattattttctaaatttacctgagttctaaatttatatcgttttacatctctggatagaaggcatcttaagcattatctaaatttaccatcattaattgtcattcaattaaatctacttccattagatttttgccttcatcactcaccagaataactgtaatcaagaacactaatgacctccatttttttgccaaatctaattcttagcttagattttggattacttagcatttgggacaactgattttttttttcgcagtgaagcttttttccgcacttggtttgtgtttttctcttctcaaactgtccatacctattgtcttcttcgtgttactgatctcagtgaagcactgctccgggcttagtcctcagcattctttcatctttttcttaaactcattcattggtgttctctttcaatcttgtggtttcaaataacatgtgtatgctgacaattcccaaacttgtatttccagctcatacctctcctttgaattccagacttgtatattcaacatcgcttcttagtgtctaccaggcatttaaaacaatatgtccaaacacaactcttgctccatagcttttcccatttgagtaaatggcagcttcattcttccagttgattgaacaaaaaattggtgcctcttactctcatacacatatctagccaatcagcagatcttgttagttctacttcaaagtatctctagaatctatttctcacatctccagcattattattttggtcaaggcaacttttgtattttcacctaaattactttaatagcctcctaaaggaattcatttactcagtccttgccctcctggtctatttttttaaattgtatattgacaaattagagttgtatatttttatggggtacaaagtggtattagctttttaaatacaatatgaaatgattaagctaattaacatctattacctcaattatttgtgtgtaatgagaacattagcaattgactctctgcaatattgaaatgtataatatccaattattattttcagcatgctatgctaatcatctaaaaaaaatcaaacttgtttctcctatttgaggctttgtatcccttcaccaacatctccccatttctctcaacctccagcctttggtaaccaccattgtcaaaggtagtatgagctctgctctatgagtttaatttttagatttcgcatataagtgagaacatgaggtatttgtctttctgtatttagcctatttcagttcctcctggcttattttaacatgacatcctattttcctctagatatcctcatgtgtcttctcagttaggccttccttgcccacactgtaaaacttcaactcccacctttcaatcaccagtgttctccattccccaccggtttgtttttctctgtatcttaccttctaacatgttctgtaatttacttatttggtttgttgtttgtgtccctctgcacttgaatgtgagctccatgaagatagggatgtttttctgatttgctcagtgatattagcccctgcatccagaacagtacctagaacagatagggattgaatttattagttgaattgagtaaactgtctgtcctcagctcttttgctattgtaagttgttaaggatgacacattaaacagacattgttggactcattttaagttttactgtaatttcctaatcccactaacaataattagaattgcataaggctgtcttattaacttaccaaaaataaggtatgtgcattaccatgtgtatcaactcttcaataaatattggtttcattatacatttccttttatcaatctatttgaattacctaatttaattgctttcgtagaaattacttggttaatatttattatttatttgttttttggctatattttagtagtatcaaggtattgagacttaatagaggtatttatttacttgtatgttttcagagaatgtagagtagtcttaatggcattttaacatttttttccttggagtataatgaaggtgtaagcttacttaagtcaagggccaagtgataaagcaatggctggcccatattttctgaattcaattaaattatcatttaagttaattatgatagagttgaaaaaaatcaaatgcctcaaagaaagtaacatgctttatgaaactaataccatttatgctttgcctgtttcagagtttaggcagtgaccaacttttaaggaggctattgagagtatctagaacagtcatggggtaatgagaatggtcaagacactggtaacttcccataaaactaacaaatcacaactctgacactatctctatgaaactgaaataaggcttacctaaaccggattgcaagagttttgccagaacagagacagtgggggcaataataaactcattcatgcaaaaattgctaaatctaggcacaatagagaaaacaacatctgtgaattgaattgactctgtatcatagcctttagtcatccttaacttttttatttttccttgagaccgtgtctcactattttgccgaggctggactcaaactgctgggctcaagcaattgtcccacctcagccttctgagtagttgggattaaaggagcaaactactgcaccaggcttgtccttaacattttggaaagtctttttctttatgctgtttccctgtttagggcatccaacagattgttatatatatctgaagtttaaacttttcttacatgttgatatagaaactttagatttatacctttaaattattgaatgcccatcatcataggtcattgggaatggactgttactctgctatcagaattatttttcttccttctacactcaaaataggcccagaaacttttaatgttcatgtcagtatttcctttagaattttctcaacctaaaatcctaataaatttagaatcattgtgtgatagtgtataaatagtatattctaaacttctctttgttctactctgtaggtatttcaggtgttaaatgaaaagaaacagatatatgctataaaatatgtgaacttagaagaagcagataaccaaactcttgatagttaccggaacgaaatagcttatttgaataaactacaacaacacagtgataagatcatccgactttatgattagtaagaattctttttaaatttaaaaagaaaactttttgccataattcttcaggtaaatatttagtaaactttaatataacctagccatttattgttttgttgcttttatttgtttaattgcagtgaaatcacggaccagtacatctacatggtaatggagtgtggaaatattgatcttaatagttggcttaaaaagaaaaaatccattgatccatgggaacgcaagagttactggaaaaatatgttagaggcagttcacacaatccatcaacatggtatttaacagtttttttatatttgtaaggttaaaatctttgttaatagtgtcatcttagagaaatatacctataattttagggcattggttattggtgtctttaacgagatcaactaaataattagaagtttatttaaagataaaggaacaaaaccatttcttaaaacaccgttaacccaaaggatataggacatcaactcaagttccgacatctgtaatacaaaatgtatttttctcagtattaacgtagtctgtcatccttatctccaaatacttggattatagcaggtctaagactttggggttcaggcatcctgaaaatatgagatgtttactttattcattctcctaatcattttgtattgtatgccctgtgtgagaagttggtttttttgtttgttttttactgttaggcctaccttctgggttggtttttacttgtccttggttctttttagggtttttctctgcctttaccttatcctatatatttttttgttcttaataactgttatcctagttaattgtaatttatctcctcctcatctctctctcttaaattatcttaaaagataattcaccagtgatcaagatcagggctataggggtggagatgtcaggagcattagggtcttactgtctggcagtataatttgtgatgctctctagtgggcagtgaatcacagtggttaagaggatagattctgaagccagactgtctggcttcaattctaactgtcacttaggctgtgtgaccttgtacaagttacttaaactctcattgccttagcttccttgccttatagtggggatgatgataatacttcagcattgatgtgaagattaaatgatgcagtactgtataaacaatgaacttagaacagtgcctggcacataacaagtgctatgtaaatatttgcagaatatataaaaaaattattgaattgggttcactaattgaaggaataaatacagcttgacctgtagactgtgaattttttggtccttagaatgttttgcattgtttaatattacagtggatttttattttaaaggcattgttcacagtgatcttaaaccagctaactttctgatagttgatggaatgctaaagctaattgattttgggattgcaaaccaaatgcaaccagatacaacaagtgttgttaaagattctcaggtaagacttaatgttggttctctcacagtagagttcaattctttttttacctgtgaagtattatattgcaaatgagtgttatatttttaatcacctcattcttcaaaggatttgaagtcttttaataagaatagatttaaaaatataaaccatgatcattgtaatgtagaatagaaagtcaagatcaaatagtaatatctccagcaattgtgaatggttttcctatagctgaagtagagaaacagtaataccttccttggaaatcacttggtcgtgatcaaaaattgacctgaaaatttggctcagagtttccttgtagcaaagagggagttgcagttatatgtttttcactgtctatgaggtaagatcatttttattcttctagagaagccgaccttttcctatcactgaaattggaaaaaaaattcttaagtgggccttcatattgtaaatgccataagtattataagcaacatttttataatagatattgcaacagcaaactaaaagacgttgttctataaaaactaaagcaatggcaccaaagtatatctaaaagatattcttgcttggaaccaagatgatatgttccatgtttacagatttttgatgtgagtccaccttaatcccaggagtaaaatagactttgttaggaggaatgatggacgacatgccctatttgacagtcatgtctctttgtatcaaaagtatggcagatcaatgagttgtaaatcagcttgacaatatctt

SEQ ID NO: 400 - DNA, 32742 bp, Homo sapiens
  source 1..32742: mol_type = other DNA
agtccggccggaacctgtttgcgaccccgagtcccatgacaccgcttctcctcacaccccagtccgcagtgcccctccccagcctcggccgggcctcccgggagccgggcgtggcgttccagctagtgagccgtttctcccctgggctcggaggcggaagcttgaggggcgcggggaggagcttcgcgtgcggggtgaacgcccgctctacgtgctcgttctcttcgcgaccgctgcgcgcgagccccgtgtccccacggcgggcagcagcggcggcggcggcggctgaacgcggagggggcggagggagcccgcggcggcggcagcagctacagcgaaatggcggagaccgtggctgacacccggcggctgatcaccaagccgcagaacctgaatgacgcctacggaccccccagcaacttcctcgagatcgatgtgagcaacccgcaaacggtgggggtcggccggggccgcttcaccacttacgaaatcagggtcaaggtgaggccgtctctcccctctcccaagaaacccctcccgctggctctggtcacccccactcgacccgggagtggacccccgcgggcagccacagcctcccaggccgggagcccccttgcagaggcgggccggggtcgtgagccagggcccctcttcctgtagggctggtgtggggggctgcagagcgagcccggcgcgctggcacttggagaaggtgctcgaagaggagggcgtgggttgagcgccgcttgcccctccagcagctgatcagggaatgacatttgagttggaaaggggtagatctttcgagaacacatcccttcgctgggaagggaaagagatgttgacagagaaaaggggcttgcgcaaagttaaagccttttcccagttttctcttcctggagacttcccagaggtagcaagccaacccggctgctccaggcccttcccgagctgctaaagtaacctgggttgtgcagtcttctgaacgggacttaatgaaagttcacagaagcctgacaatttttgatagggctgagccagaccagaagggtgattggacatggttgacttcagcattttgggccaccgccctgccaaaggctgaggtgtggtgtcacctacctcataatccagaactacagttgctttaagaaaagactagggatcttgctctcttaattcgagatttgcacttaattgaataaagaaatcaacagaaataaaatatacctaatttcataactagtatttgttggcaataatttagatgatttgaaagatgttaattgaaaatagtgcttcactttcactctataattcaggattaaagaatttgcccatgtatggaagcatctttaaaaattaattacattaatttaaagatgacagcaaattattaaaagttaagtgtaaagcgatttttcctttaatcaaaatttatatgacaagctactattaacatttaagtgaaaaaattctcattaacttacacactttgtgtcgtgaaaaacacaaaaatcaaatttaccatcctaaccatttttaagtgtacatacagctcagtagtatattcacattgttgtgaaacttaagtatttttaaaaaatgattcttacgtagttagcattgattttaaaaagttaatcaaactttaagatatgaaacgaatagtttaatgtttcaagccactgttgtcttcttatggatgtgtaaaatgtggatcataggccgggcgcggtggctcatgcctgtaatcccagcactttgggaggccgagctgggcggatcaccgaggtcaggagttcgacaccagcctgaccagcatggagaaaccccatctctactagaaatacaaaattagccgggtgtggtggcgcatgcctgtaatcccagctactcgggaggctgaggccggagaatctcttgaactggggaggcagaggttgccgtgagcctagatcgggccattgcactccagcctgggcaacaagagcaaaatcccttctctaaataaataaataaaaattgaatcataggatatgttgtcatagggaaactgcaaaatccagacttcagtacacctggggaactacattcatacataaacctagtggaaaagtgaatgtttttctaattgtctgtaatacatgacagatggttcactaaaaagaacttcctcttttgccctattcactagtattttctttttttttctttcttgtgctaaaacagaacttggtattcttgtttctatacttccatagcaggtacttcctgtcacaaaactgaattggaatctcctgcctacacttcctccacttactttgagtttatcttgctgaatgcattatattaaatgggttctagtataataatttaatcctcttttttttttaatacacctaataccttagcaaatagctgatgtgacacttaaaaatggtttctgggcctggcgcagtggctcatgcctctagtcccagcactttgggaggctgaggcaggtggatcccttgagctcagaagtttgagaccagcctgggcaacacgttgaaaccccttccccacaaaaaaagaaattagttgggcgtggtggcgcgcatccctgaggtcccagctactccagaggctgaggtgggaggatcacttgagcccaggaggtcgaggctgcagagagctatgatgaggccactctactcaagccggcataacagaatgagaccctatctcaggagagagagaaaaaagggttttggtatagtcatttacatgttaaagaaaattttttttttttttttttgagacggagtctcgctctgttgcccaggctgcagtgcagcggcgctattttggctcacagcaacctccgcctcccaggttcaagtgattctcctgcctcagcctcctgagtagctgggattacaggcatgcgccaccacgcctggctaatttttgtatttttagtagagatgggatttcactgtgttggtcaggctggtcttgaactcctgacctcgtgatccacctgccttggcctcccaaagtgctgggattacaggcatgagccaccgcgcctggcctgaaaataatcttttttaagaacgattaatgagtcagggaactaacaaattatacacttactttggtttgtatttttgtataaaccaactcactgggtgttaatagctgttaacagtcataaatgccagtgcctatgtgaaaacctaattgagtttttaatgcatgaaatgactttggatttctttctttttttatttttatttttattctttttgagacagagccttgctctgtcgccaggctggagtgcagtggcgcgatcttggctcactgcaacctctgccttccgagttcaagcgattctcctgcctcagccgcccaagtagctgggactacaggcacgcgccaccacgcccagctaatttttgtatttttagtggagacggggtttcaccatgttgaccaggatggtctcagtcccttgacctcatgatctgcctaccttggcctcccaaagtgctgagattacaggcgtgagccaccatgcccagcctggatttcttttagtatgtaatgtgttaacttaaaactaaggacaccatatagtaaggaaattaggccttatttgagcagcatatgattttttagagtaattatagtcttgcattaaggcagagtggctatgacatgaatagtttaatattttgtaatttttttcttcttgagataagagtctcgttctgtagcccaggctggaacacagtggcatgattgtggctcactgcattctcaaactcgaggactcaagtattccccccgcctcagcctcccaagtagctggactacagggtactactatacctggctaattttttattttttgtcagatgagacttgctatgttgcccatgatggtcttgaactcctggcctcaagtggccctccccctctcagtctcccaaagtgttggaattacaggcatgagccacctcacccagccctgcaattttatttattattttctaaatgttgctgctctcccgaacccctactgactaccttttgctgttgaatttgctatgtggaaaaccattttatgttccagaatttgggcttttaaactatcttacagttactgtctcattctggtcttgagaaaaatttacagttttacaggatctgattgaaattactctaattcacagggcaattttatatggatggtggcacttagaatgcaagtttcccaatctccatttatcttttggtttgaggatagtgtttaagactattaggatcacttgattagtatctctgggcttttgaaaataattacacagtgttatgtttttaaaaattgttctaatgggtaggtacagcagagagcaccataaatgattaaaggtttaggaaagttcaaggtctggaattatttaggcatattcaagagaaggctgaaagcaaaattcagtcactgtttatgaagtttgtgctgtaatataactttaatattctggagatttttaagttaatcaagatctattttacctggagaccactgttttgaacaggaatggaattagaatctttcttgagctctgacatagtcctcagttcaaagaatagatttaacatttcctagctgggtaagatacaaaatcaaagctccacttcccctctgtgaaataggtgtgctaataatagtacctacctcttaggactaaatgggataaggcacatgaatctttctagcacagtgcctggcacataataagcacgcaaaatttagctctttctaaagatagacattttctaaattaaacgtcagtgatcaactacattttctgtgtgttaatgtttagttgagttactaaaattgttagattttcttgtcaagaaacctacttgtcatggaagtataccttcattaagcaagcatggtataaaaataagctatcttatttggtacttaaccaagtaacctttgtgtatgtatttattttttcgagacagggtctccctctgtctctcagcctagagtgcagtggtgcagtcacagctcactgaagccttgacctcccaggctcaagtgatcctcccaacctcagcctctctactagctgggaccacaggcgcataccaccacacccagctaatttttaaattatttgtagagacgagatctcactatgttgcccaggctgctcttgaactcctgggctcaagtgatactcccacctcagcctccaaaactgctaggattataggtgtgagccaccatgccaggctccaaataatcttttaaagttgagctttattaaagcataaagctgaataataacgttggctgataaaaattttgacaaggtgctaaataaatgtagcatcttatcttgacagtgcttgccgttctaaacttgtatatgttttttcctctgggtcagtcatctaatcttaaattaggagtcattaatatccagattggaagctgagaaataaattttaaaatcttagacttatttttgggaattataaacatgtattattgaagggctaaaatattaatagtattttaaagaatcggggggtcgggcacggtggctcctgtatgtaatcccagcacttgggaggccaaggtgggaggactacttgagctcaggcgttgccacacagcctgggcaacgcagtgagaccctgtccctacaaaaatttaaaaattagccaggcatggtggcgtgtgcctgtagtcccagctatgtgggaggctgaagtgggaggatttcttgagcccaggaggaggtcaacactgcagtgagccacgatcataccaccgcactctaacctgggtgacacagtgagaccctgcctctaaaaaaagcaaagcaaagaaaaaaaaatcagggcattttgatgccagaggacatctgcagaatctatgtagctctatcaattggccaatgagatgttgtctgttacacatgttgctgccagctacggctgacttttccaggatctccatcaaggagaagcatgctattagcagtgaagattctgtccttatctaatccatccccagaatggagagtgggggaggaagacagtggctattttaaagtagtcctgttatattgagtttttagggattctgttctgttaagggatgtatcatttgagtatcttttatgtgcaaagcactgtgctctatctataaaatttaatcttgaggtaaccaagcagagtagataatattcctgtagaagctgatcaactgatcctcatctcttgtcctttcctcattttaactccagtcctgaactggtatctcccaattaagctgagttcttttgtatccaggccttttgcacacacttcctcctctgttaagaacaggcttcctttaagagcctcatctggttactatcacttatcctgcaggactcagccttaatgtcccctttttaaagattttgctgatcccttgactctggaccagatttccttcctgtgtgccctggtagctttgttaggaataaatttgtttgcttgtctttggcttcctgtaagttcctgtgtcacccattataagctcttagaggacagggactgtcataatcacccttactcaatatccaacactgcttggcacatagtggacacttacaaataaatgaagtttaagaaagttaacttccccagggtcacagctattaaatggtaaaactgggatttgaacctagattttcggaccttcagagcccgtacttttgtttgagacagggtctcactctgttgcccaagctagagtgcacggtggtgcaatctgggctcattgtagcctcgacctcctgggctcaggcaaccctcccaaccttcgcctcctgagtaattggggctacaggagcacgccactatgcctggctaatttttttgtatttgtagagacagggtttctccatgttgcccaggcttgtctcagacaaggttttaccatggttgcccagagccctcacagaaaattcatatcacctgaggagcctttgaaaccattcaggttctcttttactggggtggggtggggtttgggcagtggcggtttttttttttttctttgagacggaatctcactctgtcacccaggctggagtgaggtggtgcaatctcagctcactgcaagttccacctcctgggttcatgccattctcctccctcagcctcccgagtagctgggactacaggtgcctgccaccacgcctggctaattttttttgtgttttcagtagagatggtgtttcaccttgttagccaggatggtctccatctcctgacctcgtgatccacccacctcggcctcccaaagtgctggaattacaggcgtgagccaccaagcccggccggcagtggtggtttaaaaagcatcccagtaagggcacttatatgcagcaaggatttctcctgctgcttatcatgctatctgtctcactgagatagatagacagtagagaaggaagagaaatatacatagaaccacaatggttggtagctttgatgggattaaaaaaatagattctaaaatagtaaaacataaaatgaatagcagatcttggcaacagagaggaaaaccagtgacatttgtcaaagatagaaaactttttggaggggaggcatttaaatattaactgaaagcataccaatctctacagcttaagtttttgggaggaaggggagacacagactacattcaatcaagccagatctttttgcccttgtcttgcatcatccatgtctatatccctgtataataatcatgaaagtaagccagaagtaaaaaaaaaaaaaaaaaaaagacatatgtattcatttaagaaaggaattttttggagacaggttctcgctgtgttgtccaggctggtcttgaactcctgggctcaagtgagcctcctacctcagccaagtagttgggattactgttgcatgccatcaagcatgcctcaaaaaaggaatctttataaatattgtcactttatacctgtaaaggggaaaatctaaaaaagtgctttgagctatcctggtgatcacatgcaatagacattttcctctcctgctcacctttatcatcatgcttatctcaccccttccagaaagtagtagactgttattattagatactttgatgtttgtaccatgttatgctgctttcatgtaaatagagccagcaatttcttgaacatcagataagaaagatggtgtccaaaaaaatcttggaactgctattttcttttttccagaagtttattcttagggccgggtgtggtggctcatgcctgtaatcccagcgctttgggaggctgaggcgggtggatccctcgagatcaggagttcgagaccagcctgaccaacatggcaaaaccccatatctactaaaatacaaaaattagccagtgtggtggtgcatgcctataatcccagctactcagggggctgaggcacaaagattgcgtgaaccttggaggcagaggttgcggtgggtggcagcgcgactctgtgccaaaaaaaaagagaaaaagagaaaaaaagtttattcttaaatgtgcaacaggctccaagacatttcatcctttgcttcctagagtggaagcagaagattttatagtaggaaatgcagatatttaaataggaatgggatcaagggtcatcattgcctcggacacagtggtttgttttttggtttttgttcttgttttccagatttctcccttctaagtactaaccaggcccaaccccgcttagcttctgagatcagacgagcaattgcattcaggatagaatggccatagacttttgccggatttcttaattccacctatccagggaacccttccctgtggcctttgcttttagctcctcaagttttttctgctcctcttcttgtttctgcttgaaatccttgtcttcctcatacatctccttggcctgtttctcgtcaggggcttcttgccgtaggtgcctgtcaggaagctggacgtggtgcctgccatcccttccttagacccagcacaggaaactggaactgcagtttactgttttgattccttagttaaaagacaaagctttcaaccaaagttctacttcatttttttgtttgtttgtttgttttatttatttatttatttttgagacagtctctcaccctgttgcccaggctggagtgcaatagtgcagtctcagcttactgcagcctctgcctccctggttcaagcaattctcatgcttcagcctcccaagtagctgggaatatataggtcgtgcaccaccatgcctggctaatttttgtatttttagtaaagatggggtttcatcgtgttgcccaggctggtctcgaactcctggcctcaagtgatatgcccacttcagcctcccaaaatacaggcatgagccaccgcgcctggccactacttctttaaagaaatatttaactgacaacctaggaatttggaatgtgttagtaaaatgtgacgtttgctatagcttgccagaaaggttgtatcaggtagtatagagtttgggctgttctcagataaagaggataattttttgtttttttggtttttttctccacatggagaggtttcaggtacagtccagggttagtattgtggcttgactatcagcttctaacatcatattcacattctagccaaggggaatgtttatttctgcccttgaaggacacaaccaggaagtcgtattatttctgtttctgcgcattgctgtacttagctacaaaagaagctgggaaatttaaccaggtggccatgtgaagaagggaagagtagacactgttctttgctttgccacattaacaaatggttgtggttggcccttctaggatatggctttaagctacactgtgatcatctgttatttcctttttttgctaatgcctggaatttcagtttagagtaagttcatttgatttgcaagaaataaaattgtactttcattagtttggaagtcttaagtgagtaagttttgattctttcatgataattaattttgttaagttgagaaaaaaggcaagcatgaagacatggcatatctgataggggtataccttgagattgggctagagattctaaaggtagttgattaacctttttttttttccttccaaggctgcttaaaactattttggttttacttaggaccaccattgtagttgctgacattgaatgatggagtatataatttgagccaccaaaataaatgaagccagtgtctcttggcagagaatcacttaatctcttagcagagaagtagagaattacttaaaataattttgtaaagttactttgtgtccagcagtattggaatggtcatttgataattatttgttctgtaaactttgattttatcactgatggagcatttcttttggctttcctaaagttattttagcacctgccacctatagcttgtttgctttccgttttttctagtcctgcccttgtgggatgaagttctctgttgtataagtctcgtccatattgagaaacagaggagtctcaaagcccctccttgtgtctggtcttggtatctcacccctctcttgtcttgactttactggttatcttcaagtggaaacaagtagagaaaaatcttgtcagctaggcatgtatgtgtatatcaccaggtcttgtcttaaatttacacccaaagattcccccatggtatataactgaggacattcttaggacactgaggagtttaaatagagcaagggttggcaaattatgggcttacctttttttataaataaagttttattggaacacagcatacccatttcttcccatattatctaagaccacttttactctataagggcagaactgagtagttgaaacagtatgtttactatcttgccctttaagaaaaggtttgccaattttatgtctagagtttgctcatgtaacattgaaataatggaaatcaaaaggcacttggagaatctattatcaaaacatgaggccgggcatggtggctcactcctgtaattccagcactttgggagtctgaggtgggtggatcacttgaggtcaggagttcaagaccagcctgaccaacatggcaaaaccctgtctctactagaaatacaaaaattagccagctgtggtggcgtgcccctctagtcccagctactcaggaacctgaggtgggagcatcacttgaaccctgggggcggaggttacagtgagccaagatcacaccactgcactccagcctgtgtgacagaatggaaccctgtctcaaaccctaaaaaatatcatgaggctatggaaaaagcattcatttaggaagccagtagtaaacgactgaggaaatagtcattaaatataacactgcacattcatcaaataataagatcttaatgcataaccctattgttgggtggtgaatgaaatattagataccattctttcctcctagaggcccagttttacatagaaattgtaactttgtgttgtcatcccactgataatattaaggccaggcacaaggtttttcaacttttgaagtttattttctcactcgaaaccttttatgtaaactcctttgaatacccacataaaggaaagaaagttggtgctgataaactagtgggcagcaggttcatggtggttcagggtcggtcagcaaaccagtgccaacactgaagatgatgccaaacaaaattgactgcaatctgttctagccaggatcatggtttagatattttctagccagaattaattaatttattatttttttctttttttgagacagagtctcgctctgttgccaggctggagtgcagtggtgcgatctcggctcactgcaacctccacttcccaggttcaagcaattctcctgcttcagcctaccaagtagctgggattacaggcacgtgccaccatgcccagctaatttttgtataattaattaatttctcatacagtatcatcatttaatgatttgtggggttttgtgtgtgtatgtgttttaagagacagaatctcactacattgcccaggttggtcttgagctcgtgagctcaagtgatcctcttatctgcctcagtcttctgagtagctggtactacagatgtgagccattacacctgtcttaatgttttgtattcttacatgttaaccccctatgtaatatggcaatgtgcagttgtataaataatttttaataatatttaagttggtattggttgaactattaacataggtaagtcctttctacaaactctgtctctcttgtctaaaagctgggtgtggtgatgcatacctgtagtcccagctactcaggaggttgaggtgggagaatcatttgagccaaggaggttaaggctgcagtgagctataatggtaccactgcactccagcctgggtgacagagtgagaccccgtctcaaaaaaaaaagaaaggaaggaattaagttgaaaattgagaaactgtgataccagctctaaatgggacaacatagtgaattgatagaatttttgtcttagtttagaaggccagattatgttgatatgcttaagttgggataaattgcagttttagagcgtttttgtttagacctcagcatgattcttatctataattgatatttgttcagttttcttccctcaaaacatccgatcaattgtttttttctaactaaatttcttttttagagttgttaactttaacttgagtagctcctgtgggtcagttgatttattgagtacttgcaatgctaagtttaataacacatgttactgcattcagtaagttcacagcagcctgaaacagggctagatttctctgataagttttccccagaactgtccaataaatgaacatttatgaactgtctgttatattccagacattgctagatgcttgtttaaaagatgaataagatatgcctagcctttggaagcttccaaactggtggtaaggagagtggggagaggtaaattcataaaatatgcataatctgtagtgggaacccaggtctgccctgaggggccaggagtgtgtgtgggcagaaagtgagccagtagtctagctagggggagcacctgtctcttttgtgcttcactgccagcatctgacatcaatgacatgccagaatcacacagtaataatactggagtgattccttgttactctctgacacaaacatttttctcgatttttatttataattttatatataatgtataatttggttttaaaattgttattttaatttttattttttaataaatagtgacagggtcttgctgtgttgcccaggctggttttgaactcctgagctcaagcaatcctcctgcctctgcctcccaaagtgctgggattacaggcatgagccaccacacccggctataatttgttttaagcatcgatgttcaggcggtatggtaggcactttcactctgtgttttctctgatatagtttattctactgcattttcttacaaactgtaattactcttatttccagttaaaacaaatgataggctgggcgtggtggctcatgcctataattttagccctttgggaggcagaggtgggaagatcacttgagcccaggtgttcaagaccagcctgggaaacatagggagacttaaacgttgtttttttttgtttgttttttgttttttaattatctgggcatggtggcatggactagtagtcccagctacttaggaggctgaggtagaaggatcacttgagcccaagtggttgaggctacattaagccgtggtcgtgccactgcactccagcctaggtaacagagtgagacccggtcacactcaaaaaatacatcctagatattgaccacttcatcattcttacttagcaataatcgtttcctgtttcctcctgtcttactccattttcacactgctataaatttactacccgagactgggtaatttgtaaaggaaagaagtttaattgactcacagtattgcatagctggggaggcctcaggaaacttacaagcatggaaggcaaagaagcaagtacctgcttcacaaggtgccaggaaagagaaagtgagcagaaagagccccttataaactgtcagctttcgtgagaactcactcattatcacgagaagagcataggggaactgcccccatgatacggtcacctgggggtttacacgtggggattacaattcaagatgagatttggatagggacatacagccaaaccatatcacatcctgaccatgctttatgatatagctaagaaagtctacctgctcttttcccatgctaaactctgatgatctttcctgattcctcttgccagaagctaatccagtgtggacttgagcctgtagtcttagctacttgggaggcagaagtgggaggatcgtttgaggccaggaattagaatctgcactgagttatgatcttgcccctgcactccagcctggacaacacagcaaactctatctctgatgagaatgctgagaacacattctattctatactgaatttatgttcccaggcaaaagaataaaaaaaatacaattttaagaaaaaaaaagggaggcaggagatacagtgtctcacgcctataatcccagcactttgggaggtggaggcgggtggatcaccagagatcaggagtttgagaccagcctgtccaacatggtgaaaccccatgtctactaaaaatacaaaaaaaaaaaaaattaggcatggtggtgtgtgcctgtaatcccagctagtcgggaggctgaggcaggagaatcacttgaacctgggaggcagaggttgcagtgagctgagattgcaccactgtagtctagccagggcaacagagcatgaccctatctcaaaaaaaaaaaaaaaaaaaaaaaaaaaaagaatgctcaaagctcttttaagaatttcttacttagaggcctcagaaataacaccacacgtctacaaccatctgatcctcgacaaacctagcaaaaaacaagcagtagggaaaggattccctatttaataaatggtgctgggaaaactggctagccatatgtagaaagctgaaactggaccccttccttaacaccttatgcaaaaattaactcagatggattaaagacttaaacgtaaaacctaaaaccataaaaaccctagaagaaaacctaggtaataccattcaggacataggcatgggcaaggacttcatgtctaaaacatcaaaagcaattgcaacaaaagccaaaattgacaaatgggatctaattaaagagcttcagcacagcaaaagaaaccatcatcagagtgaacaggcaacctacagaatgggagaaaatttttggaatctatccatctgacaaaggtctaatatccagaatctacaaggaacttaaatttataagaaaaaaacaatcccttcaaaaagtgggcaaaggatatgaacagacacttctcaaaagaagacatttatgcggccaacaaacaattttaaaaaagctcatcatcattggtcattagatgcaaatcaaaactacaatgagataccatctcacgccagttagaatggcagtcgttaaaaagtcaggaaacaacagatgctggcgagaatgtggagaaataggaacgcttttacactgttggtgggagtgtaaattagttcaaccattggggaagacagtgtggcatttcctcaaggatctaaaaccagaaataccatttgacccagcaatcccattactggatatatacccaaaggattataaatcattctactataaagacatgcacacgtatgtttattgcagcactatttacgatagcgaagacttggaaccaacccaaatgcctatcaatgatagactggataaagaaaatgcacgtatataccgtggaatactatgcagccataaaaaagaacgagttcatgtcctttgcggggacatggatgaaactggaaactatcatcctcagcaaactaacacaggaacagaaaaccaaacactgcatgttttcacttattagtgggagttgaacaatgagatcacatggacacagggaggggaacatcacacaccagggcctgctggggattggggggcaaggggagggagagcattaggacaaatacctaatgcatgtggggcttaaaacttagatgacgggttgataggtgcagcaaaccaccatggcacatgtatacctatgtaacaaacctgcacgtttttttgcacgtgtatcccagaactaaaaagaaaatttcttattttcttggccgggcacagtggctcatgcctgtaaccccagcagtttaggaggccgaggcaggtggattacttgaggtcaggagttcgagaccagactggcaacatggcgaaaccccgtctctactgaaaacacaaaaaattagctgggcatggtggtgcatgcctgtagtcccagctactgggaaagctgagacagaatttcttgaacccacgaggtggaagttgcagtgagctgagatcatgccactgcactcccgcctggcaacaacagagcaaaaaaaaaaaaaaaaaaaaaaaactccttacttatattcttatagactatattattttaaatgtggttattccagagattgatggtggtgatgtttgcataacaatatggatttacttaatgccacagaactctgtacacttaaacatgcttaaaataattttatattatgtatattttaccacagtaataaatatggaaacaaacagtatggaggggccaggtacagtggctatctcctgtaatgccagcactttggaaggccaaagcaggaggatcacttgaggtcaagagttaaaaaccagtctgggtaacatagtgagaccctcctctctacaaaaaataaaaattagctaggtatggtggcatgcacctatagtcccagctactcgggagactgaggtgggaggattgtttgagcccaggaggtcgaggttgcagtaggccaggattgcactgctgcactccagcctgggtgacagagtgagacccaccatctcataaagaagaaaaaaaaagcgggggagaactggagagggcagtttctttcccttcaaactatcaaagcaaggaaaaaagtagttctttatgtctttttgccaagaactctcagttcttagtcatctattgtgttttacagtctactttatctgatactaatatagccagtccagttttcttatgagtatttgcagggtatgtaattttctgtcctttcacttttaacctgttttgatttttgaggcagtctcactttcttacccaggctgggatgcagtggcatgatcttggctcactgcaaccttcacctcccaggttcatgcgattcttgtgcctcagccttccaagtagctgggattacaggctcgtaccaccatgcctggctggtttttgtatttgcagtagagacggagattcaccatgttgaccaggctggtctcaaactctcgacctcaggtgatccaccccgccctcggcttcctaaaatgctgggattacaggtgtcagccaccaagcctggctcttcatgtggatttcatttactatctggtatcatttttttcagccggaagggctttctttagtatttcttttttctttttctaaggttcccatcagatgggtaatgtgctgaagtcataacaaggtttgaaggaggcatgtcacacacatgagcatgaaaacccaatcatcatgcttacaaactacagaaggatttctttagcatttcttctaagtcaggtctgctaaccatgaaggcttgtagtttttttgttttgttttgtttttttgtctgggactgtcttatatttttatttttgaaggatagtcttgttagatgtattagttttttattgctgaattaaaaattaccacaattgtagccctcagaacacccccagccaggtgcagtggtttgtgcctatagtctcatctacacaggaggctaagacaggagaatcactttagcccaggagtttgaggcagctgcagtgtgctgtgatcatgcctgtaaatagcctgcactccagcctgggaaataagcaagacgctgtctcttaaaaaaagtaaaaatttaaataagtaaatggagttttaaattattttaaaaacaccaccaaatatcatctcacaagtttctgtaagtgagaagtctgaatatggcttgtctggactttttgctcagggtctcacaattgcctacaatcaaggaggttggtcggggttgtggtttcatctgaggcccgggagttctcttccaggcttacatagttgtgggcagtattaattttcttggagctgtaagtttagagtagccttcctcttaaaggccagtggaaaaaatctctttgatctcagggaagactaaagcccccttttaaggggctcacctaattaagtcaagactactcacaaaacttggtgaagtcaaagtcaaactgattagggagtttaacatctgtaaaatcccttcacctttgccatgtaatgtaacctaattatggaagtgacatccattgcattcataggcctcactcacattctaggggaggtgtgtatgccaaggggtggcaattttaggcaccatcttggaattcagcctaccacgctggatagggaattctttgttgattttctttttttctttgagcgctctgaatatgctgttgcttccttgtctccattgtttctggtgagaagtcagctgttaatcttattatgggtcccctgtagtgatgagtagatttctcttgccactgtattcaagattttgcttttctttggctttttactgtgatgtttattgggtgggaatctctttgtgtttatcctacttagagttcattgagcttcttggatgtatagattaagggtttagtcaaatttttttaagttttcagccattatttattgtttctttctctcatcgtgggactcccattacatgtgtgttgatatgcttgttagtatcctacaggtccctgatgctctgttcattcttatttttttctttctttctgcttttcagaatggacagtttcttgatgtgtcttcaagtttgctgatgcttttgtctgccagtttgaatccactgttgatccccttcagttaatttttcatttcagctattatacttttcagctgtagaggtccaattcagtgttttttaaataatctttttgttgagattctctattccttgaatcattgtcatcatgctgtctttcagttctttaagcatggtttcctttaatttgaacatattgatagctgcttggaaatcctggacagctgaacagctgaaccaccccagagacattttctgactttttatcctcctgtctatggctcacactttccagtttctttgcatgtctcataattttttgttaaactgaacattttagataatacgttgtagagactctgagttagattgcctcctgcccctccccaaaggggaggtggtggttgctatttattttttttagggacttgcccacattaagtctgtagtatgaggtggtgatagcacggatcaattttttttttttaagccaggttttctaagggtcaccctgagtcagtttgtcagcttatctcagtggtcagaaatgactggtcaaaggttatgcgtagctacttgagccagtgaggcttcagcctttttctttttttaagagacaggatcttgttctgttggccaggttggtcttgaactcctggcctcaagcagtcctcccaccttggcctcccaaagtactaggattacagacgtgagccactgcacctgaccagcttctgctttttgccagtgcaggttggggaacaagtcaaagttcaggcagtttacaagttcgccccagcttttacttcgtgccgtcttctcatgtccatggctctcccttgtctgtgaaaggtctcattcagccatggatgtttagataactagggttctctccagctgagcatgcatacagctttgtgtaagcacacatacttttttttttttttttttttttttttgagacggagtcttgctctatcgctcaggctcgagtgcagtggcgcgcaatcgtggttcactgcaacctccacctcccaggttcaagtgattctcttgtctcagactcccaagtagctgggattacaggcatgtacccctatgcccagctaattttttgtatttttagtagagacagggtttcaccgtgttggccagggtggtctcgaactcctgacctcgtgatccacccgcctcagcctcccaaagtgctaggattataggcgtgagccactgcgcccgacatcacacagattttcagacctccacagatacttgggagttaatcaaggccccaccatggctatgtaattcttctggtaagtctgctggttcattgcttgcccccagtattgcaaccttgggttgccgcaatattagccttccccactgtttgctgccaatgttgctgttggtttcaacaatagtcctgcatttgggacttctatattctactcctgaccagtggcccccctccagcagtgatggtgttggttttcacagcttgccacatcctggtagaactaccattgatagagctggtggagcatggtaacaatagccctaggttaaaacacacagacttctggccgggcatggtggctcatgcctgtaatcccaacactttgggaggccagggcgtgtggatcacctgaggtcaggattttgagaccagccttgctaacatggtgaaactccatatctactaaaaatacaaaaattagccaggcgtggtggtgggtgccggtaatcccagctacttgggaagctgaggcaggagaattgcttgaaccagtgaggcagaggttacagtgagccgaggtcgcaccactgcactccagcctgggcaacaagagcgagactccttctcaaaaacaaaaacaaaaacaaacccacacacagacttctgctcttcataactgagttgagtagtttttcttgaatgattacttttcaatttgttatacacctgtgcccactttcctgagttctgatatagtggtttgacatgtttgtctagttttttcattgaattttggagagacgctctgttgagctcactctactattccagcagttccccctttacctttttactttatacctttcttttaggttctcatatttttaagagaaatggtcttattcatattatgtttttcttcacattattatgcttttactcttaatttataggtgctcagaaacactttttatgcagtgtttaaatgtttttagaagcttcttaatcaaatatttccaggccccttgaacatagtagttgttgagatattcattaaatgctcatttagtagagttttaaaggtttatttaatatctgctttgggtcaagtactataaccatagtgtgactttagagcatggactttgaagttgaacgtgtgtaagaatcctctctctgttaatggacatgtgaccttgaacaagttacttaattcttctcttttgaatgtcttcggccataaaataaaacttcagaggagtaaatgtgacttaaggcataatatttgccctacattaagtattcagtaagtgataacttgtgagaatgtgtgagaagaatgtataataatagtttctacttaattattaaggtaagtgacagtattttctttctttttcttttaagagacagggtcttgctatattgcccaggcttgtcttgaactcttggcctcaagcagtgctcctgagtagctgggattacaaacatgagccactgcacctggctcattttaaagatggtaaaactcagattagagaaggaaagtaatttggcatgatcgtactgttaatgagttccagaaagaggagtcgaacccgggtctgcttgactaattcatttttccctgctacttccaggaatcagaaaaggtgtcaagggctaggcacagtggctcacgcctgtaatcccagcactttgggaggctgaggcgggtggatcacctgaggtcaggagttcgagaacagcctggccaatgtggcgaaaccccgtctctactaaaaatacaaaaaaattagctgggtgtgggggcacatgcatgtaattccagctactcgggaggctgacataggaaaatcgcttgaacctaggaggtggaggtttgagtgaaccgagattgcacatggcactccagcctgggtgaccatgtgagactctgtctccaaaaaaaaaaaaagaaagaaaaggtgtcacaagtttgtggttagctcctatcattggtacaaagcaaatattgaattatacttacatatgtttgtttgcattttccccccaccccatgcaacatgtcaagaacttccactacaaaagtgatataccaattatttgaactttgtgtgtttctgtaagatacagccttagtgaataaaacctggaatttcttaggtgagcggaaaaataagaggctttaaactcttcatccacaaatacaagcatgaaaacttggacactttttaaaaaaattttcttttttatggcggttgaggtggaggtttcactgtgttgcctaggctgccctcaaattcctgggctcaaaggatccgcctacctcaggctccctagtagctgggactacaggcacatgccaccgcacctggctctcatgaacacttttgatatgtagtggtgtaagtggctgtaaaaagtatacttagaaaatttttgttagctttaaagcctctgagcctaaaacattgtatatacatgtttttatcacaatgtactccaaagattatgtactctcttacagaaacctccccagtggtattccatctctttaattctctttcctgacctatgtttgtctgttctgtgacacctactctgcttgggtatcctcttataattcttaactgtgtcataaaatcagctaatgcagggacaatgttcatgtacttagttcatggtagattctttttggaggagaggggtatccattatagttgattctttttttgtttgtttttttttttttttttttgagacaggatctcactttgttgcccaggctggagtgcagtggtgccatctcagcttacttcatcttcatccttgacctcctgggctcaggtgatctcccacttcagcctcccgagtagctgagactacaggcgcgtgccaccatgccgggctaattttgtatttttagtgaagatagggttttgctatgttgccaaggctggtctcaaactcctgagttcaagtgatcagcccacctcagccttccaaggtgctgggattacagacacaagccactacacccagcccatcatggtagattctttttttttttgaaatagagtctcactcttgtccctcaggctggagtgcagtgccacgatctcagctcactgcaatctccgcctccctggttcacgtgattctcctgcctcagcctcctgagtagctggattacaggcgctcaccaccatgcctggctaatttttgtatttttagtagaggtggggcttcaccatgttagccaggctggtctcgagctcttgactttaggtgatcgatccgcctgcctcggcctcccaaagtgctgagattacaggcgtgagccaccgcacctggcctcatggtagattcttaatgccttttatgttgtacacttattagcattctaagtaacatcattttaatggctaatgagctgccataatcaatatttatagatatcatggtttaaaatcttaccatgcttccaagtaagatttgagggctagagataaaggatctggaatgatatccttttcttacaaactctgcaactcagagtagaggggaaggtattggaaggtggagagaaaggtggccaaagtacttagaaatcaattttaaattatgaggaaaagaaccagaatattctgctctccagctctacctcaaccacttattatacctaacagttaaagaagatatagtagccagaaaatattttaaattgtgctaagctgattatgtattgaaacttttgatggcaagttgcagcttctcttagccgtggtttatttaggggattcttagacaaagagttactttccatttctaataaaaagatttttatgttaagtgatttgagtactgtcagactgttagaacaataaacattctttgtggagctttatgaaaggagtaaagtattgtaatggcactactgtcaatctgcaaatttaaagcatatgcgtgtgtatagtgtttaatgtcatgatgtctagttgctgttatagctaatcactctgactggaagagtttattaatatatgtatcactcatgtgttagagaatttagacttattaaacattcattttcatgttttttatagttttccaagtaatacttcaagctttgaagaaacagcttagttttgttcttttataatataggtggaagccgggcacggtggctcacgcctgtaatcccagcactttgggaggccgaggcgggcggatcacgaggtcaggagatcgagaccatcccggctaaaaaaaaacggtgaaaccccgtctctactaaaaatacaaaaaattagccgggcgtagtggcgggcgcctgtagtcccagctactcgggaggctgaggcaggagaatggcgtgaacccaggaggcggagcttgcagtgagccgagatcccgccactgcactccagcctgggcgacagagcgagactccgtctcaaaaaaaaaaaaaaaaaaaaaaataataataataatataggtggaaactgttttatatatatatatataaagagaggtagagagagagacagggtcttgcttgttggccaggttggtattgaactcctggcttcaagcaatcatcctgcttcagcctcccaaagtcctgggattacaggcacgaaccatcgtgcccggccaaaactgtttcatatgactattcttagaggtttattaagttatttattgtagagagcaactcagtcttcaattacagtttttatttagaatcttacctttctttagcatagaaaaactttagctgattttatcagatttctaaattatgaaggaatactttccttgctgaataattgagaattaattgacttttctgtattattgaggaacttcaactactcagaatataatcagaagctaattaaggaagtagaaaagaactaaacagcgaagagttgaataaataacaagtctatatactttttctttttttgaggtagagtctcactctgtcgccgaggctggagtgcagtgcgtggtatcagctcactgcaacctccgctttcatgtgattcttgtgcctcagcctcccaagtagctgggactacaggcatgcaccaccatgcccggctaatttttgtatttttagtagagacgaggttttaccatattgggcaggctagtcgtgatctcctgacctcaagtgattcacccacctcggcatcccaacatgctgggattacaggtgtgagccaccgtgcctggcccaagtctatgtacttttgagttaccaagtttttagagatgaaatactgtcttctcatgatctgcatcttgtttagcataactctaccaaagtcaggttattgcttcagttgattattgctatgtaaaaaccctaaaagttggtgaccgaaaacagttacaattaaacattcacttcattacagttctacagtttggtcaggtcttgaagtcatggcttgtctctgttccacttgatatctgtggggccacttgactgggactggaggatttatttttgagataactcggtcatatggctggctgccagctgggatatcagatggagatgtagatcaggtcctcagttctccttcatggggagagttagacttctcacagaataacggtgacaggatcgcaagagagaatgtctttatgaacaaatgttccaagaggacaggccccaattcacaaatgtttgatcaaaggcagtcacatggccaagccaatgtgagagaggatacaaaaagatatttaaatattgagtgtcatggtttgttgtaggctaccaaagtagctactactactgcagtgttccttctcattctatagcaaagtagcctttctggaggacaactcgaagacttaacatttatagtctttggcctagtaatttcacctttagggtttattctaaggaaaatatttaaactccctggatctgtatcaaggcttcatttagttttcatccattgcattttgcctagagttagatagctggttaatgcaggaatccagattaaagccagattttctagttccagaactgtgtgcttcatcattgtactatacagcctctcacccagggatgtctgtatataatcatgttaatgatatgagaaactgataatatatttaataaaaataagatttgtatatataaaaatctaaaaggctatatactgaaatggagtatctacaagtcaatatgtatgttttttaattgtaaggatatcttttataagtctaccatgcaaactcaatatattcacatgtatatgttttgttttgttttgtttttttgagacagagcctcactctgttgcccaggctagagtgcagtggtgcaattttggctcaccgcaacctccgcctcttgggttcaagcgattctcctgcctcagcctccgagtagctggaactacaggcacatgcctccacgcctggctaatttttatgcttttggtagaaacgggttttgccatattggccaggctggtcttgaactcctgacctcaggtgatccacccgcctcggcctcccaaagtgctgggattacaggcgtgagccactgcacccagctgtcacatgtatatgttatatatatatatatatgttttttatatattttaattttgccttgattactcaaatactggtctccaccctttcattcaaacatcaaagagctgtgtgataaattgcggctgtaaatgctacatgtaatgaatcttggaagagtattccgctctcccctccccaccccctctttacactgtaaatataatgtaaatataacccttgaggaggatgtcttgagatccctgtagtccatagctgcctgatgcaccatatgtagaagcttagaaaatacgagtacttactgaatagagcttcttaaccaatattctttaactggcttccacatcacagttttacttataatgactttacactccattctcacagtattattccaaatcactacccttaaagaggtaaaatattatcgcccatatctgtcccagctaagctaaaccagaattacttggtgattgtacaaattcccaagttcctaccctctttcacatttattaactctagggcagcagttattcgctctttcagccaggctggagtgcactggaacaaccttggctcactgcaacctccgcctcccgggctcaagcgattctcccacctcagcctcccgagtagctgggattacaggcgtgtgccaccatgcccggctaatttttgtatttttagtagagacagggtttcaccgtgttggccaggctggtctcgaactcctagggcagcagttcttgaccctggatgcacttgagaatcatttgaaaatactgattttcagattccaccctagatcagttgcatgagattctctagttggcgtcacttgagtgtgtttcttaggattggacaagttgggaagacaccagaaaatagttttgcattttaaagattgtccaaaaaaggtgttagactattaatagacagttttatttcagcataagcctgtaggattatgtaaatcttcatgaattgttatgaatgaattttcctttaaaatagaattattaatgcacagtttcattagagattactcattgaaaaccttgtgtgagctctccaatgagtcttgttgctaattcacaaatgaagaatatggacaatgtaggaaaagtatctggaattccttggtttatgcatttaagctagtctagataatttattctctactgttttggaaattataccataaaggatacttcttttaaaataaggaggaattgtatcactggaaggcatgtccttattttttaaagaaagaaactaaatacgttggcttagtgacaatctacatttcaaaggttctctggactaaaagcttattcttcatttaaatgacttcttctcagccttattaagagttcatctaggttataaaccatatctccagttattcatgctgttccagattgggtaaaacaggtatcaaaagtactgaagggtgaagcaatagcttaagcacttctcagtttatcttttatctctagatgtagatatttggagaaatgcagctgtttaatgagaactgtagtggggcatccatttacatctcttaggattggttgaatagagtatggcctattgaatatacttttgatgttgttgccagtctcttttcaaatgtacacgtgacactatctgaagaaatactagaaacacctagtaaacatttttctaatatctattgttaagctatattcaggtgatcacattttgaggcttggttttctgcttggctatcagtgataatcaggtaacatatagggtatctgtgagctgctgactttaataggtcagcctgtgtaagtgtataagacctacctttttggagaccaataatgtggtagtttcctgtgcttagacttgaagggagcacttgttttagacctctataccatggtttgagaaatcttttccttagtatgtaatatccatttgcattcctgatgatcttaccctgtgtgattagtaatactttttgtggaaaatggctggtttctcttttataaaaatagtagtttaagagtatccggcatacacatatctcttttaacattttattgctttgcagttttgttcctggtatattagaacaaatagacaacaacaaaataacattgaacaattcaggtttttagtcttgttcttttctagttctttgaatgtcccaggatcttgtaattatttcatcactttttcataagccaagcaaaatatattctcatcttgcaaatgaaaagcaagatacccagcagcttgagcattaccccgaatttctccagaagagtacaaatatccaagtagactataaacccttgtttaattctgtttattaaatcaacaaattgaaaacattctgtacttaatacatcggtatattcacactgtatttggcagggagtggggctttccttcagtaaagcaatctctcctaatggttaaagttagataaataacttcacctaaaaatgtgaattctctaagaagcagagtttattttgtggtctgatagttctgtaagttcgaattagctaggcaaattctaaatggcaataaattttattatgaagggctggttcaggaaaaaggaattaaaaggtggggaaaagataactattggaggaatctgacctctccttaccaagtgacccagtaatgggacaaactgacattatgtgccttccgatggaaagcatcaacactcctgccatttaggaacattactgccaacaatgcaaaacaaagctggtcatgaggaaacagacaaacccaaatgtagaatgttgctctgaactctttattgtcagtgtcttgaatgacaacaagacagggggcgactcttctagattaaaggtgactaaagaaacaaccagagggctgagtgcagtggctcatgccagtaatctcagcactttgggaggttgaggcgggtggatcacgaggtcaggagttcaagaccagcctggccaacatggtgaaaccccgtctctactaaagatacaaaaaattagccgggcgtggtggcgcgtgcctgtaatcccagctactcggaaggctgaggcaggaggcggaggttgcagtgagccgacatcgcgccattgcactccagcctgagtgacaagggagactgtgtctcaaaaaaaaaaaaaacaccaccagaggtgggaggatccctccagcccaagtgcctgtagcgcgctaggatgttgcctctgtgctccacccttggcaacacagggagaccctctttttttgcctgtcttctttgataatgttggtgatctattttatagttttccaaagaaatgttactaagtagtggtaacaaattaactagcatttggcaaataacaattaacaaaggcatgttttgagtgtggaataacatagttttatggactcagtggattccaggaaaccaacttaacttttttgagatgcaggtaattacagttctctgctcttttaatgttagtttgggccctgacataagctttaagtgactgttaatattgggtttctaatatagaacccttgagagctatccagattatttgagcctctgtctttgcttcagatttatgatgaaacgtgatttgcagaacttttgaactccatgaacaaaattgaagtctaaagtagtccagggttactcaaactcagaatcttcagcatttactagtatatacctatacaaatagatgaaggctgtggcttactttttggttcttgccctatgctgtactttacttttgcttgtctcccatcttacctgtctgtgatcactgtgcccacatcggctgatctattgttatttcccacaaataacatatttcttgtatttcctacaaatattatttcatacagatggttgtatttaacacttttacctgttaagaaataaaatgaacagtagctaggaagaaaattgtggcttccactttatactcagcctgatactaagcaacttctcttaaaattagggggaaaatatgaatattagagtgagagaatactaaatcttgctgtttaaatttcaaaagttttagtcatcttaaagtaagttaacaatatttaagcctgatttacatttaatttcagaattcagcattctttctgggtaaatctagagcatttaaagtggcatccaagataaaacctttaagggatttttgctgtaatttgcctcagtagtctgactcttgtccatacatttcaaagcagataaacctaggaatcaactagagccatctgttcttaattctacaccttaatgctacatgcagctcatctgtggcttctacttctgtagtaacttctctgttctattttttctgttcatagctatcatttttctattcaaacatatttattaactcctgatgctcacaggtagtcaccttagccccatatttagagtgcaatttaaacttttcagttttatttcccatcattccctatgctttagaatattcaagaattatatactaaatatacactgtacttgtttcttctctgcatttagctcacactattttcaccattttcagctgtcttatagtatggctagctctgtgttaaaagagtcctggctgaggccattgcactcgcgccattttaccctagcatgggcgacaagagcgaaactctgtctcaaaaacaaacaaaacgaaaaagagtcctgactggccgtacgcagtggctcacacctcatattccagcactttgggaggctgaggtggaaggatcccttgagcccaggagttcaagaccagcctgagcaacttagggagaccctgtctctaaaggaaggaaggggagggagggagggggagagggaggggaagcagagagactgaggaaaggaaagaaaaggaggggaaagaatgaatgaatccgggccaaatcaattgtcaattcttccgtgcttttcatattatacaaatggtattatgctatataatatactgttctgaaactttttttttttttttttttttgaggtggagtctcgctctgtcgcccaggctggagtgcagtggcatgatctcacctcactgcaacctccgcctcccgggttcaagcgattatcctgccatagcctccggagtagcaggaattacaggctcgtgccacctcacccggctaatgtttgtatttttagtagagatggggtttcactgtattggccaggctggtcttgaactcctgacctcaagtgatccacccgcctcagcctcccaaagtgctgggattataggcataagccaccgcacccagcctgaaactttttacatgtcatacattctagacagcttttctgattaacctatggctgagttatattttgtaaaaagctgtgtaatataagcttgtaatgtaagatttattgtttctggtcttttttggggtttttttttgtgtctattacaatgctaaaatatttttgtatgtgtggaaatatttgtaggattaattcccattgaaattgttcattcaaaagttatgtgtatttaatagagtaatggataatgtattcaccaaaatgccccccttttttttgagaccgtctccctctgtcacccaggctgaaatacagtgagtgatgtgatcacagctcatgcagcctcagcctcgaaggctgaagccatcctgacaccttatcttcccactacaggcatgtgccaccatacccagctaatttttttttttttaaacagagtttcgctcttgttgcccag

SEQ ID NO: 401 - DNA, 16045 bp, Homo sapiens
  source 1..16045: mol_type = other DNA
atcgtccgagccccacctccctcctcttcgcccccgcacgccgaaaacaggggcctctcacgtgacccctgcgcgctcccgcgggggagcgtagtctcggaggcggcgccgcaggggattgaggggttgactgagcgttgcgagccttagctttctcccgaacgccagcgctgaggacacgatgtcgcggctctcccgctcactgctttgggccgccacctgcctgggcgtgctctgcgtgctgtccgcggacaagaacacgacccagcacccgaacgtgacgactttagcgcccatctccaacgtaacctcggcgccggtgacgtccctcccgctggtcaccactccggcaccaggtgggcgcgggccctgtgggcttcccgccctcccctgcccagccgagccgcactgcctcctcgccgtgcgggcggggcccgggttcgggccacggtcgggcgggcgggccgcgctcggggtgcggcggcgactccggcaacatggcggccagcctggagtccactcgtggccgggccgggtggggagcgcgctggggggaagcggacgcgcggttcccagtggctgcggggctggggcccccctcgaagtgttgcaagtcgaggtgccttttaaaagtgcatcgtaattcctagcctcacttggggtcggaaatggggacgtggcttccttccgcgggggcagcggtggggttgaggatggggccgggcgtcgcgcctctgaggttggcggtggggccgagctgcctctccctgccactggttgttcaccctcccggcgcctctctccggaggtagccttctccggaagtccgggaaagagaaacttaaagacggtaatgctcgttcgtgtctcagacttgagtctgagaaggtcgcttgagatttaattacattggttttgcagataggaatagaatgtagctgacgtttgagcacgtagttagtgaaaacttcacacttcaaagtatgcgaaaaggaagaaaagtacccatgtatgtaccgggtgttttgcgtacgtatcctaaggctaaactggaaggtaggtagtgaaacctaggaggtagatgcagagacggagatgagtaaactctcctgacattgtatgtttattcttttttcaattgtttttaaaattttcttaactatgtcctgtgctcagatagcgtatgtttagtaggtcgtggaacgggggtttgtgcccaggtctgtgggttttctaaaacccgatcaggagcgtgtcttttgttatgtgcagtcgcatagggctggttaaggcatacatacattttaaagcagaaattgccatataccgtgacaacacaaaagagagaaggaagataagtttgaggtaataagcgggagaaacactagaggtttaaaacctgcagtctcgtatgattggttattctagttaacattagttaaggagtaatgtttacgtagttaacattggcttcttgaccgaagaatgccgaagtgtaatgatttttatcacggcattcatattctacaaattctcctctagttttagtattttataaaagtttaataaagtatatagtaaacttaatgttttgtttttagtttaaggaagatgtaatggtaacatttcaaaacgagggaagtaaattgcagtataatactgggaattctaaccgcactattttaagatgatagagcagaatatgtttgtctcagtcttaatttgacagtttcctttcagaattgtagtgtgtgtgtaagagaaggttggaagtatcaaattaatttgtctttgtgtaattgaagtgcgtgcaaaggaggtatgtattttctggaaatcataagtggatgtagtgtggtctgaaaggtagcaagtttagttcattgtaaagaacatttcagacatttcactttgctacacccgtcaagcacaaaggtttttaaacagcatgttttatctatacaaacttcagaaaatttatttttactttatgaacccttccccaccccaccgtacatgtcccagtctttaataagtactaatgatgaagtattgaaagcagtgcctctgcagaactattttttaggcaggagcaaagcaaacgagaatgtttggaggcatctagtttctaggaaaatgaatggagcccaattcttttttttcttttattttgctgctttttctcactggaaaatagagcccaattttatagtccgttcttctccagaaattgaattatggtgatgagtacttgtttctggattgtttggcctaggatgaactattgacaaataccttgttaacctgaattgtatgcacttgaatatgggcttttagatgttgtctccagttgtggaggatcctgtcgagagtggatcatttatgaatcgagaatccctgggaaattatctttgtttgcagcagaatgggcatcatcagtgcttgggttcaacctgttaaactactactgttactactaaaaatctcagggttttatctgatgtttgggggtagtggttttcctatgtgtagtgttggtattatatcaaagcctttttctcgatatttttatgtattaaggatgctttgaaatgcctaaatccttagtggctgtgggtgtcttccaatagttgtcctgtgaaaaaggattggttagacagataccatcaggcactgtactgagagtgaccactagcttgtttttctaatgcgtttacttacagctttgtaatgattggaatttcttagtaaaccagtataaagttttatcatttatctgaattagtaattttgatgctgtatgtaatgcttattgttcaaaaagataagtaatacagattcaaataagatactaataaaatcattgatttcatgcatctctccccccaactccccagaaacctgtgaaggtcgaaacagctgcgtttcctgttttaatgttagcgttgttaatactacctgcttttggatagaatgtaaaggtaagaaactttggggatgcaaaactgttttgttatagcattttaaaatacagtaattcttgaacacttgaaagttatgtaggacatttaggatattgtgcactatttattttgcaaatccagtactcctttaaagtgccagttgcctcgcactccccctgaaaatctctttttgtctcccatcctccctttagattccttaagacttgataattaaagctcagtcgtttgttttttatgagatggagtctcctgtgttacccaggttggtcttgaaatcctaggctcaagcaatcctccaaccttggcctccctagtagccaagactacagatgcgtgcttcctcacctggctttttttaaagcctgttctaaggattgagagtactttaatacactggaattagctgtgagtgaaggttgtgttgaaaactgtgtcctgcaacatgaaatataaagagaccttatgaaactgttggatgcttaggtgtagagaagaaagaggtagggagagttgacttcctgtgcttttgttaatacaagaggtagagcgctaaagggacgtacattgaaattcaataagattcttattagaaccatattactgcatacattattttaattgttttttaatgtaaagtggttgcacttatcagtaaaacaatctagttgttttggcggttttttttttaagtaaaaacaaaccataagtttttttatttggtaaaaattttaatagttctagaaattatatcactacataaatttcaaaaagctctttaaggtattaactaaattgggccaaattaacttttttgttatagaagtgtctcttttttttaggtcataaaatgggatttaagggcgtactctttcccctttatatgggagtatgtaagagttggtgaattttggagatggaatgctctactttaagatttgttgggaaaggttctccccttactcttgttccaagtctacctatccaggaaagttgttttagaaagtatagaagactaaagcagtgagatttggaatagagtttctacagtgttatggggtgcctcatctgtttactaacctcttaatacagaccctgaccacttcaacttactgtctccgcctttttttttttccctgagacagagttctgtatttttggtagaggcagggtctcaccatattggtcaggctgatctcgaactcctgacctcaggtgatcttcccaccctggcctcccaaagtgctgagattataggcgtgagccacctgcccactttttagatgatggctgcctttcttgattgtacagtagtcttcccacaattctgagatctaagtgttgcagatttattttttcagtatattaatgtggatttttaatggataaaagttagaaggatcctgcgtaatctctaagtcagtgggaaaaggagaatgacagggtttggtctgtgggtttaactttaggtcaaaacacctaaagtggttccccctgcccacttctaaagtgtttgggtttgatttcatagagcttagtagcagagtcaaagataatacaaatgggtggttgatgctgtttgtctcttttcccctgccccccaacagatgagagctattgttcacataactcaacagttagtgattgtcaagtggggaacacgacagacttctgttccggtaagtattcatattggctgcttggaagctgaccgcagagaggtgaggaagatcattgcctcagaaagccttgtttcagtgctttgtttgaagcattgccataattctcatcttgttagaattggaatatgaatagtatattcatattgattgattaaaggatgatatttgaagcttggtttagtgatttagctatagtgtggatgctgtaagtgtggatgcgttgtctgcccccacacttttttttttttttttaaacttttctaggaattcatcacagtttagccgctatgtttgcatcttgcaggtctgggaaacctcattctggcacttttggtgttgcgatactggggattgttgattgataaatttattctgcagcatagttggtgctgtggttaaatgagcttttctatacccatccattttctgtattttaatctgagtaacttgattaatttttaacctttactattcgtccagcaaaacgttaaaattctacttgaagctgctgatttttccaatgagattgtaaatcagtgggaaaggcatattcctaatttgatgcatagataataattgaataggaaaaagatttttgtgcagtgtgtctaaccttgaaagactacctttgactctttaattttggtaggggttgccccatcccaatgtgaattttgtaactgaacatttcattagtattagatcagttttacttcacacagggtgcataatatagttaggtggtacacgaacaaactttttttgagacagtctctttgttgcccaggctggagtgcagtggcacaatcataactcattgccacctcatattcctgggcttaagcaatccttctgcctcagcctccccagaagctgggattacaggtgcatgccaccatagctggctaatttaaaaatttttttgtagagatggtgtctcactatgttgcccaggctggtcttgaactcctgggcttaagcagtcttcccactttggcttcccagagtgctggaattacatgcttgagctactggacctggctgaaacattttaagtaattactttaatatgtgttagataaactaataactgtcagacctgtggttttgtaatattgcttagagacaagattaatgaagatttcattagtattagaacgtttttgaaaactgatttaaaggaaaactgtatttgtactgctgcatatttgatgatgtaccagttagaattagtttcagctatgaaggacataaacccccaaattacaatggcttaagcagtggactgatttacttttctctcatgtaaaggaagtctggactagagttcagctctgcaaccattagggactgaggcttctttaggtttttactctttcacctctcaaaaatggctttgaccctactgtccaaggtgggtccttatgttccagccatcacattgattattttcctgccagcaggatgaagaagggaatgaaagaggcttgtatcttactttaaggatgcttcctagaggttatgcgtgatggcctggaagcactggagactaggaaatgtcttttcaggaggaagggaggtgttgataaaaattggtgattctatttctaaagaagagactggtatttgggggcaactgtcagtctcttccacaggtagtatttaagtgttgtaaaaattgtgaaaagtactcaaatgattgcaggtcaggaactagcgttatagattgtgatattttaaatagctttgatgtatatggtttttcttttttctttttttaatagtttccacggccactccagtgccaacagccaattctacaggtaattcaagatgactgttttcttccttttccttcagtatttttaagctttcttgatggattagttttaaataattatgtaaaagttgttagtataattttaaagatgagtaaaaacttaaaagtcttggaccacagcaattaacgttaatctctaccttttgtgacagtgacacatagctccagtgttttatagtcggtgaatgtgagcagatttgctgaggctgtgtacattgagtctataaagtactttttatagatttagtggaaatcttgggaaatatagaagcctaaagcaaattataattctcatcatccagagcaaccaaaatgttttcagtgattaatttcttctagtcttttttatgtgtatctaaataaatacactttttatgaaattgtacgataacgttcatgcacctttgtatttctttttttcttttctttttttttttttggaagcgaagtcttgctctgccgctcaggctggagtgcagtggtacgatctcggttcactgcaaccttcccctcccaagttcaagcgattctcctgcctcagcctcctgagtcgctgggattacaggcacctgccatcatgcccaactaatttttgtttttttagtagagtcacggtttcaccacattggccaggctggtcttgaaatcctgacttaaagtgatccgcctacctcagactcccaaagagccgggattacaggtgtgagccaccgagcccagcctgtattttctctcttaatgtaagcattatggtatacactttacccatcctgctcttgattagagaattaggccgtctctcattctccatgcagtgaacatcttacatggaattgcatttgtatttatctctgataggtttgagtcaaacagaatttctaggtcagagggtatgattattttaaggctctccagaaagatttattattttcattcccatcaacctggaaagtttttaccgtgccctcaacagcatggataagaactccttaaaatttactaacttgagaggaagagtaaatattaaatacttaacattttaccaatattaaatgcgtctattccaagacaagtactagggtaaatggtagggttaagccagcattttgtctactgtaggaacaatgaaagatctcagtgagcacagcgtattgggaaatttgtaagaaggaatgtgtattgggtgggatgcagatgtggtgatagcttggtagtgaaactgcactggaaaacttggagagagcctctgaagtggagcagcgggtcagcacatgcggaggagatgtgaagtagtacggtgagttcaaagagtgtcccatcctgtacaaggtgagaaggagttaagctggtccatcaccagttgctcaccaggtgagcagaattgggaaacacctttgtatgccttgctggtagacttagatgttatcctgaaagattttaaagtttataggtcatatgatcagacttgcattttaataaaacaacttattctggcattgtggagagtagattggaacgatgccagaaggaactcaggagattagatagcctgttacaataattctagagaacagatagaggtgggctgcagatgtttgcaaataagtttaggaagtagaaggggtaggacttcatgactgagaggaggagaggtagagtgatagggagaaggggaggaattttcaccaaagtaagcaagaaagaggaagagcagtctattgatggttgggcctgtcatttgggattttagtttaagatacctagaatccatttaagtgggatctgttcagtattcaggaaactgcaagtcaggcaagagctcttggctaaaaatataaataggcataggcagtagtagaggcactggaggagcatatagaaagaagggatggggcttgaagaccagactctaggaaacagtaatgtctaagggctaggaagaagacgggaggaaatagggatgggggtagggtagtaaaaaagcccagagaagtatgtgcaagaaactaacagtatgtggttgtgggcgtagtttttcaaaggaagaagtagtcaaatgctgtaacaaggacaactcatcttgaaacacttacgcagtggtgtgtggagctggcttggaccagcttttgctagccagttattgtgtagtagctcttcccagcccatgttcagtgataccatgttggtaacttgaaactggttaccatggaaatagtcatgccatggaagtctgcaaatgatacaaaacttattttgagctgatgattatatggtgatgtggtcgtaaatatttaacactcattagaagacattgactaagtaggatgttgaaggttgctgaaaccagaggtgtttggagaaaagtaattttcagaaggttggttatgaaaagaaaatggggtgcagggagtgggggaacaatttattcagaactgttgttcatttcttgagaactgggttcactcttgatgtagttctctgcagctttctccaccctgggtcctcctgtgaattgccatgagtcttttgtgctatagctctctttggtgctgtaaagggggaaagcagcaagggcttatctgcagaaaatgcatcagttgactgacactagttgaagaacaaacctttaggcggtttcttttccgggcatgtgtaccgtctgccgaagagagcaagtgagaagtgaaggggtagttaaacaatgcaaagagaatctaatttatatagaagggtgtataatgaggttaattataatggccctccttcagtacaaataatagaatagccaaaatatgtcagatacagtggaaaatgttcatatgaagtggaagatgaactgtattaagcaattgtaatacaattttagctcttgttatatacatgcctagaaaaatggcaagaagtaacctgttactctgatgggactaattcagtattttttttggcattttctagattttcttaccactaatagcaacttttataacttatgattattattatttttttttaacctttcctaatgaatctttttttttcagtaaaagaaacagtaggtcaacagaggtatattccctaagtggtgcttttattttgaaaatattgtcaatgcaatacttttttcaaaatcgaaaataaaatattttgcctacttattaaaaagaaatagtttttaccttgttctgaggctgggtaatgagaaccaaattgcaaatttgcagaatttttttcctaacattgtcaaacaattggtaatagtgttttgagattgaacagaatttgatgtgtttaatttgtaaagtgtatttttttgtggttacacagaagcagtaaaaaccttgacagaaataatgagctttaacataaccacagcctctaatctaagaattctgtgtaaggaccagtcttaccagagataaggtcaaatattttcctgtaagattttctcagcatggagagttgagagaactgtttaatcaagagcaggatggatggaagtatgtacaacaatgcttgaagtaagagggaaaaaagaaagcaaatgggtctgaacatatccatcagtattatttgtatatcacctattagcttctaagtagtatcaatattaataaaagaagtcttaagctctctgtgactcatggtcatgtgaaaattagaataccttagtttcctaggattcagtcaaccttgggattatgggtagtcagcctgttacgagagtcctggtctttaaagatctacttttagcaacaattcaggtatttagcaatatctgaaaactgtcaagccctgctcttttagtgtatatttactgttaaagcacagaacttcctcttttatattagtagaatttgggaggatgctgattcctattgaggtttttgttcgattgtttgaaagtctaatgcagtgaaaagattactcatttctgtgcttcatcaacagttatttggcaccctttccctgtctttcgtgggttaagcatatcactttgaagtctgttcagttatgtactttaaacagaagtaacatttgttttccaaattctctttagccttcaaacccttttttctgaaatagtacaaaaatgaatgtttgcatagcaccttacatttttataaaaatataaatctcatatgattaatcttcctcatctttccccagatcatccctagcggcccaccagcataagcatatcctcatattgaagcccttgcactctgaagcctgacttacctaatgatttcctgagacaaaataagctctcttagctagtgactcctatagtgcactttccaaaaatttgaaccctacccttaggacaacctcttaatgaaacctttctcaaatgctccagcaaactttgaatttatttggtagccatttggatgttagaaaaaatgttaatttgtagaaactatattcacatccttcctttctgaaagccttggtcagacttctattagtattcatactaccaatagaaacttaataggtgatatactggctggacgaggtgagtcatgcttataatcccagcactttgggaggccaaggcggcagatcacttgaggtcaggagttcaagatgagcctggtcaacatggtgaaaccctgtctctcctaaaaataaaaaattagctgggtgtggtggcacatgcctgtaatcccagctacacaggaggctgagggaggagaatcgtttgaacctgggaggcggaggttgcagtgagctgagaatgcaccattgcactccagtctgggtgacagagcgagactccatctcaaaaaaaaaaaaagagtgctttagtccctaaaatgattttacattcaaactaatccttctcagagtgtacatttctttagcagtatcatcagctattaggttggtgcaaaagtaattgcagttcttgcctttagtaatggcaactcaaatagtattttggcctcatgcagtgtggtggactagagcttacttaaccttgggctcttagaatcttacgttggggaactgtgggcccagggcccctgttcttataaagctttattggaacataccatgcccattcgtctgcatgttgactttggctgcttttgcatcacacagtgcccaaagagtaaaatatttgctttcaacccatttaagaaaagtttgccaactcctgaagtgaagaagataggcaaatctcaatacccttgtaagagagaacttacgactttaatagtttttgtcttaggagaaagattatgaagaacctatagtttcctcacctaaatgttcttgcccttggcagtgagcaagataagagttttcgcaaattttatccagatgtatacatagattttatacaagatagatacatagatattaacaattttatgattgcttattgttttaaaatacacttaaatcctagtattcttgggtgcatagctatgttagtgaaccattaactgaaatttggcttttggtctctaaaaaattgaaagcatgttgaagttggcaggattattttttaaagctgttagataactgggaagctagaaatttaaggttttttaaaaagacattttgttttcattccagctaaacccacagttcagccctccccttctacaacttccaagacagttactacatcaggtaattgaggctttttagattagcaatgatgcaggatgtgtgcacgatgttgccctttacaatttctgccatcattttccagctttcttcgttaatggttatggaactgaaattcttctcttactcttaggggggatcaaggtagtgctttgttaacacaataatgatagctttgctgagattcctcttctcatttttaaatgtgtaatcacatttgacgtgacactttagaattaagtaataatgtttttccaaacatttcagtacaacttgtatgtaaaatctaatttgtaacttctgattaccgttagggattggttgtgtgctgtatgagagagcatggcgatttgagggaagataatatatccgtccttttcactgagaaaggtctaaaaagccagaatcactaccagatgtgcacctcactttcttaaccatttcttaacattgctcagtaatgtgaaaattagcttgttattaaatgatgatttgacataatctaatttaattcatagttaggttacgccacaggatactgtaggtacacaggttaggaatcctttcctccctccatatttttaaaaaactgatgctaatgaatcttctacctgctttttgtgatttctttttcttcatgcttatgccacctttttctcagtttcagtgaagccattctgtcttcacgagaaggaatacaaaacagttgtcattaaagttaccaacttgtacagccaccagaaccagtgttctttgataactgttacttttttcttagattattttaaatggaaatcgctttttctgtttcctcttgaaacattttactgcctgaaaagaattcagatatttgttttttccttattacttgataatactttctcatgtgaaatttgttggcaggatatgcctttaaaaacagttattttacttgttgaaattataaattgcatattattaagattatttttgtaacatgaaaaattgcaaccaaatattttaccttatactagtaaattcaaaagtcatgtgaattctcagcactattgacgtttacactcacaattaactaaaagtacatagtctgaagaaattgttgcatattttagaagtgtttgatacattcccagggcacaatttatgtactaggagaatttttcccattgtttttatatttgtactagtacagtagcattgaccactttgtatccttgggtggaatgaaaaatgggatatggttgtcttcctcaattagggataaattctagctgtaaagacttgaggaaatactttatagaatttaacacatggcaaaatagaggctcaggtgcatctttaaattacaatagaggaccatgaaacttaggattgttgtttcttttgtcttatctaacaggtacaacaaataacactgtgactccaacctcacaacctgtgcgaaagtctacctttgatgcagccagtttcattggaggaattgtcctggtcttgggtgtgcaggctgtaattttctttctttataaattctgcaaatctaaagaacgaaattaccacactctgtaaacagacccattgaattaataaggactggtgattcatttgtgtaactcactgaagccaaaatactatcttttaagatgtcccacatggaagacgctattccaggatctttaaatttccatggatgcatataggatgtttgggagcatcatccgtgaagaaaaaatcaattaaatcattgtgttcaacaggaatatttaaaatattctgcatgaatcctgtggctgtcttattttaaatagctgctgctgtgggattatattttttttccttaacatgccaaatataactttctgaaagtgatggaaaatgttgtcttgtgcagacaacatcatggctcttggcagtttaaatttagtaattttaatttagtgaacagaattgagaagaacgtgccaaatgagaatcaattaggtggatttttggctgtcatttcaaaagtggaataaatttattaatttagtagtactaaatggtatccttagattaaaattttgtgcttgataacagctgttttttctacattagaaataagatgccacacaaggaactacattccagatttaaagaaatgaaaggataccattagtgtgtataacagattattgttcatacttgtaaagcatcttatgtcattgagaatataaagaacagtgccttagaagacagtgaaaggtaagctctagcttaatgtctatgatttgttctttgacattaaggaaggtaaggattggtcagaggatgtaacttgatgtgagcagtagtaaacctgttttagatatcatactgttaatattttattgaaaatttatttcagagcggagaaacttaagctaaagtctgttatacagaattgaaagccttcgtatcttgaacctcccaacatttttcttatggctgttgaaaagtatagagctaaattgatttaattacactttcctttgtactttaaaaaaaagtatgctagcactattgtaccttgaaaggatttccaccagactgtcttgagtagtgacttctttggtgaggcaagaaggatatacattattttagaatcatttactatttaaatgagacaatcatattattttagaatcatttattttaaatgagacaatcattttaagttttaagataacagaagtgaccaatgtaatttcacaacacctaaggattttttggttgatcaggttactgtagatttttactgattgtcctggatgaatagactgtgctttttctttttctctcccttccttcttggtttcccatagtataataagcatgcatactttaacttctatagttttctcctttagagggtcgtcttcagttttagaggtttacttctcccttgcctttgactcattggactagtgcagaggctttaagtagtttaaaatgggcttttgcttttctaggtcattaacgttttttatttagtttctttagccaatagtggctgagtttcgcacttgattttcaatattttatagtaagaaatgacaaactgctttgtttcatttcataaacaaactctgcatttagataactattaaaggttgttaagatgaagatttactgtttctttgttactcgttggtacagctgtttgttttacttgcacatttgtacatatacttaatgttttcaagtgccttaattgtttaaaatctctggcttcaaagtttcttggggaaaggtcggtttacctcacattttttgtttccattagtaatattctaggtacctcacaaaatgtattatggtgccatggctgttagtttttagtgagtgctgtaggattaattcgaaaataggcagaattccattcctcccaaggtggcaaaaattagctatactgatgtaattgtcatttacctgggtatgaattccctgacacacattcatgtcaacatatgtagcaaattttgtgaaaacataacaatttgaagcttctgtaattttgagcactgctctaacaacaagcataatataaaattagttagattttgcaagtctacaaatgagctcttgcaacagaactcacagcctttttacttttttcccctaactttagcaatgtagtatcttgagccattaatttttgggtttttttaaaatccagaaggtatatagaaaccttttcagatttttcatctgatttgttcttgcagatgttcttctatcaaataccttattttaccttacagatatttgttgcacaggcagatactgctgtatttagacatttctatttcagttcattaaaaactgcaaaaccaatctgtatcatgtaccaaactgacttaaaataaatctacatgtttattgaatta

SEQ ID NO: 402 - DNA, 15094 bp, Homo sapiens
  source 1..15094: mol_type = other DNA
aagtttccgagtccattccgggagcgggagcccatcttgctggctgccgaggccctcgctggaggaggagggtcagaactcgggtgcagccaatcgagggcaacgctgctacttatcagagcagaatgggctgtagtttagtgaaataggaaagctgcaaaacactgtggagtgctcccgtgtaaataaaaagaggaaaaaagtttctcaagtcgccgctgcacgacgtctggccggcgctggagcgggggtctgcgctctcccgagcggccgcgcgctggactttattgtgccgcaaccagccccagttcccattgtttgtgtttttttcaaaatatggcaaaggttcaggtgaacaatgtagtggtgctggataacccttctcctttctacaacccgttccagttcgagatcaccttcgagtgcatcgaggacctgtctgaaggtgagtgcggcgcccgtgcgcccgggctgtcagttgcgggctgcagacgttgaaagtttcccgggccgggcctcgcgctgggcggctgtgttcggcgcctggcggccgcgggctgctctgcggagggaaacttgaagttgatggacgacggccgccgaggcgcgcgcggctttccgccgcagcccaggcgcctgccgggctcaacttgcgaggaacttgtttgagcggaggagcggaggtagccatgttgtcagctttgtctgcgggcgggcagctcggagacccgcactcgctcccgctgcgccgcctgaggtcgcgccgggctggctccgcgccgccaacagcctccgcgaccctccgggcccgagcagggaggctgggaagggagaggctgtgcgtgtggtcgcgccggcgagttcggagcggagccatcttaccccgagtcgagaattgggccagcgaccccggcgcacggcgcctcctcttgccccgccgcccgcctgcccccggcgaaaggcaggcaggcactctcgagagctcacggtggagtcgccgcactctccgggctggccatgcctggccgcttcggggaggagagcgaggctgtcctcgcgctgatttctggcttcctcgaccaaccagcgggggaggcgggcgcaggctcggcccctccgcgccgcgggctgggcgccggcgctccccgggggccgtgggtcctgttcggccggtcctcctcggccggcgcccgggatgcgccgggatgctggcgcgcaggctccccaaccaacgtggactcctttcccctaatgacgaaaagctaatttcaggaagagaaatagagctgaggtaggaagttacatttaacctaaaagcagaaataagatacttaaataatttccaggacttaatctctgccttataaatagtctgaaggaagactttcttcaagaccgtgttgaaatctaaaataactccacatccaaatacagaacacaccctaaacataaaacacaaacgtaggctaggaaattaaggtcaactcctcatgtcagtccaagaattcttggtattttttctacatatattttaaggtcttaaaaatacgtatttttaatatctttagtaataaatatttagaaagctaaaacgacaattatctttgctttaattatcttttactaaagtaattcagtgcttcatttgccagttttgaaggggaaatagtttaacttcatcgatgagggacatactttgaactagaagtatatgtaaaaaatgcattgaagatgatttaggtaatcgtggcatgtaaaacttttcattttaaaaactagtttttaatctctaaaatgtatatatcatatgtaaggttaattttaattataaaacaatatatattcattgtaataaacttttagaaagttgtacaggcatatataaagttaacagttctctgtactcagtgccttgccctatctcctttcggtaatcacaattattactttaacatgtgcccccgtttttttttttttttttaaacctatatagagcataaatgcacatacatatatagggcaaattttgaaagatgattcatttattaaaataatttcaaataggccattgataacactaaggggtatttttcttattactctgaagtcatttgattactctcctatgatactactattaatataagcattgcagctaccaggcccatttttcacacccaacagtaattttttttttattgccaactgcatataaaaatagacaaaagaaaaaccattgatcggtccattccaacttataccacactgtttttcagatataccaccagaagttcttcaaattacaggtatttctcaagtgttgccttccattttaggagtcagctctgaacaaagaagatagatgactcaggatgtcgttacagggcttttacattgcatagatgaaaccagccattcataaagccaaaacgttccatttttaactgggatccattcagaacccagctgaatcacatcagggatttacagtactggtgtcaaaaacatacttatttccaatggtatatttcacttcctaggcaccattactgagcatttatttagtattttaaaaaatattttaagctgagtcatactgaagctgcaaaggaatctttcaaaaaggtgccatgcctgtatactccacctagaggctatgtggattaaggaaatttttacttagcaaaggcttctaataggttccatacttttatattacagttcttttaaaaattctgttcttaaaattaaactatagaatttttttttttttaaatgagacagtgttgctctggcactcaggctggatggagtacagtggtgcaaacacagctgctccctgcagcctcaacctgggcttaagcaatcctcccaccttagcctcctgaatagctgggaccatagtcgatgtgccaccacattgggctaattttttaattttttgtagagacggagttttgccatgttgcccaagctggtctcgaacccctgggctcaagcagtcctcccacccctgcctcccatagtgttgtgattatagtgagcccactgcacccagcccaaactatagaatattttgaaaagaattttcttaataagttattttgcctcaagtctcaaagcagagtttggccaccgtttttcatactttcatcagtagccccaaacgttcactttcctttaagagctgccctgtagctttgcttcagaaaaagccttgaggaatatctggtcttaagataatttggttctttctaatatagggcttatatcaagggttaagacagcctgagaccctggctggatgtgcttgatggtcaccaagactgtacaagttttgattgaccatcctgccattcttaaatttatatatatatatatcttaattacagctactgtcaattgaatacttataatataccagaattgagcatggtgcttcatactttccaacttcagcttgttctaattccaaagcctacatactttccactagaccacaggtcttcccaagtagtgtaattagctaaaaattctcttgatgacttccctcattcactcactctttcaccacaaatgtaaatactttcaggctgggtaaatcatttaatcatgattactgtgattaaataaaagttaactttaaaataaatgaacaaatttcttcacctgagaacttatgtaaaacatctgaccttacccttcctccctcaaatacagggggcagaggaattaaatgaaagctgggttaaaaaaaaaaacaacaaaaaaactgatgccaatgtataaaagggtattgagcatgtaaaactcagcaactgtagcaagcatcccataaacataaaaatcaatgtacaagtgttccctgagttgcagcctgttcttgttaaggctagattctctctccatctcctctgctctcacttcccctgcaaataaattcccttattccactgctaatttcagagctagaaagaatttatcttcccagttaggttttcagaagaagcccggggtttgtagttacagaggcatagcttggattctgattctttgatgtacaaattatgaatttgtgtagattacttaacctctcagagtctcaagttatttgcataatggggataatttgatctacatgatgaagctgttgaggtttaaacaataggtatgaagtagaactaatgcccagtatatagtaggtattttctaaaataggtttataaattatggctatgttcctatgccagtccacaaatgcgaatttataccacttaggatcaagggcattatatgtagtgatacaattatatatgaaattaaaattcatgaaaacctttatgtaataattttttttttttttttttggagacaatctcgttccattgcccaggctggagtgcagtggcgcgatctcggctcactgcaacctccgcctccagggttcaggcgattcttgtgcctcagcctcccgagtagctgggaccacaggcatgtgccacccctaatttttgtacttttagtagagatggggtttcaccatgtttgccaggctggtctcgaactcctgacctcaagccatccagccaccttagcctcccacaatgctgggattacaggcgtgagccactgcgcccagccactctatgtgataattcttagtcttatcctcacttggctagtttagtacctttcacatcactttcttaaaacagtttcttcacttggcttttgggtcacctacctcatttgccacttgttttgtaacttaatttgtcctcttatctttggagggctcaaatctcactccctagagcaagcccatgtatttttatggctttacatatcattgacaggttccaaatttttatcctgcctattcagtatctctgcttagaagcagacatctcaaatatgtctaaaatgaactcctgattgctcccctaccccacatcacctccctgcaaaagtggctcctgctgctttcatcttcaggattttatccagaatataactgttgcacagccccatggccacacgaggtccatgccaccataatttcttgcctcaattattgaaatattgtttcttcccttgtcctcttacactctatattgaacacagcaatcaaagcattccttttaaaatgaaagttggctcctgttactgctctgctcaaaacccttcgatggcttcccatgccacgcagtgtgaaagccagagtccttatgatggccttcaaaaccgcatgatctggctgttcccctcatcctcaatcatagggtttggtgctttcctccttcctttcattctgctccagccctagcctccttgctttttcttgccaagtgtgccctacccctgggcctttgtatttgctgttccctctggcgagatacttatattgcctacttcctctctatctccatcaacagatgatctcaggagatgtcagatgcagcaccctgcatctggaagtgtgctggaagctggaaatagaaatggtttagttctaggacagagccatgacataataggtcctcagaaaatgattgctgacttaataagagaaaataaaaaaggagctttcagttgattgtagtttacaatacaatataaataagcagtacgttactatttctattatcaatttagggaacaaaaatatctacagttacacaaaaatggccacacatggtggcactaactagattgtcatgagtgacccagaaactcaccctttgggagtgcttgtgtaacagtgtgttgaatgcaagaggcaggccacacagtgcaaaatacccaaagaagatgaagaggtctctcagagatggtttgtattacaaagttatcttcttcctcagctaaacaggagactcctccaaagagttctactcatctctgggttcacttcacagaacacattgtaaaacatgctcagtaaaatccgctatattgaattacatataacgccttgaattgcacctgaatgtcttttcctcctgcctatctccactgtgtatactctattgtatcacgtggtgtaaagatcttggtttcctctgcccaatttaaagaatgtatgacacaggggggtgccgtaagggaaaaaccctaccattgttcgttgacagttgatgagctgaagccacttacttctgagccatgagggaggttttactaataatttttctactttggagctctgtgattatttggatctctgcagcgtagtatagggctgcccttccaaagtgtgttgagaagggccttaaaagatgatatacaaaaaaagggggattccatagccaaataaatttgggaagtgctggattaatgttactggtgttctttactgaaggatatctcagaaaacttactgtgccagcatgctttatgaatcctcaagacaaggtttacagcatttcccaagtgtttggctatgttatcttgtttgtgaggcactgtccaggaactagtgtttcacaaaagagtattttgagaaactctgatcaaagtgtgaactctggtaggaactttataaggagcatttcactgcctttctggattgctatgagaagccaattttaaagccagtaagtggctaagtggacattaaaagggtctttgatgtcatctggtaatgtaattactgaatatgaaataatgctttggttttttaaccctagacttggaatggaaaattatctatgtgggctctgcagaaagtgaagaatacgatcaagttttagactctgttttagtgggtcctgttcccgcaggaaggcatatgtttgtatttcaggtaagattaatcttggtaaatgtgtatgccaaatatgtttcgaagtagactatattatctattatcttataacccttatccctttccttttgggttaaagaactgcttctgctgcattcactttaaatctgtttccatcatgttttaggcagtctctgtgtcacagaggaactcttacttcctggttttatatgctgagagatgttaatgtgacgtttactttagagagatgaacaacctacagtaaattttatactgtatcatggcacacagggtggtgaatttggggctcttcctgtgaatagcacctcagtatcagacttccaaggtggctgtctagcaacccaaaacatggattcaaaatatctaaaactaactggcattgttagtaatatgcatcttcagtttatggtttcagccactggaactgatggtgatgtaacaaaaacaactttatttcagcataatcagtagttgagctaggttaacagatacgtttagtggatagagatgtgtggtcttgggtcattggaatgacattccagagtttactaaagcatcttataatctacattatcttataagaggactacttttgcaaatttactaccccactaggtatttgtgaagagaatttctagtaataaaaattttgttcttagataccactgagagtatttggatctataccaaggcttcagacattgtcttctatattcaaaagtgttatttcttttaatccatgttaaattgctatatggaaccattcagttattcctcaattatgcatgcttatttataagggagatgtttgtaatagaccaaagagtaactagccataggttttttaaaactactattaatttctgttacaagtatttcaacccagcaatgtcccatcagttaagtggaactcactgaaaagacttaatccagaaagaaaatctaactcttcctatgcctgacctctgttttctcacttcacagatgggaccaatttaaatgaataccattggtcaaataatcccatcagaaactggcaaagaatcacttagacacatgccatctctagagctgctacctttccctcccctgtcctaaatacagaatttagaatcttggtttcctagccttagtacttttgattaaaaagcaacaaataatttactgtatctaaagaaatagctaagaaaagctcaaatatactaatcaaatatatgaattaaaagtgctgttaatcaaagttgtgtgagtgcataaccatgtaaaagacatgggtaacagaatgccctgttctgtagaaggaagcactgcagttatagatataggtcaaatcccgacacctctgtattagccatgtgtggctttacctctctaacctcctcccttagtcattccagtcttctataaaatgtggataatattctatctcattaaaatgttatggggaataaaacagtataatcagtcactcataaagagtgccctattcctaaaattagaactacatttttattctcttaacttcttgaaattgttatataaaaaagcaggacttgctctgacccacaggcctaaggaacccatactttactgataattcatgatacagtaaaagaaacctgggttgacaggtactgataatacttttttttttttttttttggctactataagaacttacaaataaatgccttgttattgaaacaaacccttgaaaatcttttgtgtttgttattaagcatactcctaagcttttggctgaaagtgctgtagcaaaaaaaatgtattcaaaagtatttcctgctggtgatcttcacgtagttttaccttggtgtcagtgtacatgttgccaaaaagaacagaggaggtacaatgtatattcagcctaaaggttttacagaattcaccattatcaacagaaagagactaaattacagcttttgttttgtattttaaaactactatagtaatctcttggtctgccatgattttgcctctctaaatagttaaacatgtctttcttctgagtgagtcaaaggctagcaggaagatgtccagacatctgcctagtattgccagctagagtcaaaacaaagatctctgctcattacttctgcatcctaaattatttgaaaggcctgtaagcttctctacttaaatttgctcaaactgaatctttttcaaattgtaaaatgctttttaaaagatgttttatatttacaacagattttaaaacagaaacatgcctagaaccaatttactgaagggaaccaatttactgaagggaaggggaagagttctcatagcagtactgaactattatatatttcccatctccacccacttcaggtatattagaatccgtttgggtacactgaaagtaatctaacccctctgtgcaggggtgtgtagaatctctaagacaaacagcatattctccaggacaaggctggctgtcccctatcctggtgtcttgccaagagatcataaaccccttcagggcaggaactgatttacaaatgaattccaaaatactaagtgctcagagctgagccacacgagattataaagatgaactggatgggactcctgccctggataaagcatagcatctagaagagaagactgaaaaataaacatgtttagatcacagggcatacgttcttagataatttgtgacaagaaatatcagcacataaaaaaggaatctattgattctaccttctgagttagaaagggcgtcactgagaatacactcgatgtaagctccaaaaaagattaaaagatgaatttttcaggatgtgagcgaaggacctttcaggccaagggaacagtatgttagaagcacagggggtgaagtatttcttttttaaatttgtttttgtagagatggggtttcgccatgtggcccaggataatctcaaattcctgggctcaagtgatccacccaccttagcctcccaaagtgctaggattacaggcgtgagccaccgtgctcagagcgtgaaaagattatcaccacgttttaaagaacctgtgtgattcatatctctagaacaatggtggagttaaaggaggtatgaatggagatattggctggagacaaactgagaagggccttgtcaatgaagttaaagaactgagattttatcccttagaaaagggaatactcttctgagggttttaataatctgaggttttaaaaccaaagagaaagaacatatctgtgttaatgctggtagcagtgcaaatgataggctagagctggggagatcagttagaaaattctaagcaatattccagataggagatgacatgaattcagcctccagaaatgaaaaaaatgttgagactgactagatgtaggagataagggagtgaagctgactgaggtttttagcctaggacactaggtagcgattttatgcctttttgtatcatctacctgtgttaggcatacagtaaacaacagtcttcaattttcacaagctaaggcattggctaaagtgctcatctaggcccaggaatattccttggtgccctggcaacaggtaagctaatttgctgggacttgatccatttaccacccagaatggctgcctcagatgcctcagccatcactgcctgtgttccccagtctggctccttccatccggtcgtctcattactacctgcaccctaccacggatggggccctgcccttcgctcatgctcttagtctagtctaactcagtttactttctgcattcctcaaggttcaccttacaatagcttgatttaaaacaaggtctttgacatctgcctaaagcaatccttaccttcactggtttccacattatgtgtggtttaaagagcatactatattgtagagtctagcaaagtaactattcataatagaggattattaatattttttgaaaatctgctatgtagctatttccatctcattttcagttttgttttgttttgtttgagacggagtctcactctgtcgccaggctggagtgcagtagtgcgatctcagctcactgcaacttccacctcctcggttcaagtgattctcctgcctcagcctcccaagtagctgggactacaggcacccgccaccatgcccagctaatttttgtgtttttaatagagatggggtttcatcatgttggccaggatggtctcaatctcttgacctcatgatccacccaccttggcctcccaaagtgctgggattacaagtgtaagcaaccacacccaacctcattttcagttttatactaatttactattagaatacctgtgggggtggttgagtgggtatgagaatataagtatcctgggttgaagagggaaactggtataataaacatttgtggccaacagtctatgaggagatcatttaatacttactaatttaggtctgaaaattatgactgaaaaggttaaaatcaattgctgactataaaggttttataatgaatagtgtataatcctttcatgaaccaccatgcagtgtagccagaatttcttccttttacaagtgtagtcatgctttcaagtatcaagggtccttacatatattgtggcaaaacatgaactgtcttttccagcttattataagtcagtcagaaatgagcattttccttcccagtatgatttccaagtttttcttgttgcatcctcaactgatggttctaggtaactgaaactccagtcttgcctgccactaacagccttttgtgtgtgtgtgtttcttttctttttaatttattctaggctgatgcacctaatccaggactcattccagatgcagatgcagtaggcgtaactgttgtgctaattacttgtacctatcgaggacaagaatttattagagttggctattatgtaaataatgaatatactgagacagaattaagggaaaatccaccagtaaaaccagacttttctaaggtaatgttcttactattcctttttaactacttttactatgcaatttttaaagcagttgctattgcaatttcatagtatactattaaaatggctttgagataaaataaatatgaggtccttatgccaactgggcaaactaattattgttccattaccatggatgacttcaaaccctaccttcagatgagtcattagtaattaatgtaggcagacaccttgagcatttctggtttagaaaaatgaaagtacctcttttttttctgagatggtttcctgctctgttgctcaggctggagcgcagtggcatgatctcggctcactgcaacctctgcctcctaggttcaagcgattctcctgtctcagcctcccaagtagctgggactacaggtgtataccaacacgcccagataatttttgtatttttagtagaggtggagtttcaccatgttggccagggtagtctccaactcctgacctcaagtgatctgcctaccttgacctcccaaagtgctgggattacaggtgtgagccaccacgcccagagaaagtacttcttgtaagacaggcctttgtttatggctttctttatagcatttcccatattgattattcccatcatgattctgttcatttcaacctttaggacaaacaaatgcatttttgttgtactaattattcaatgatgatatttttgtgtgtaactcttcccaaaattatgaaagttttatgtttgtttttcctatgaatacggttatctcaaaacacctatacgctttatctgctattcttagaagttaaactaacagtcttaaatatttctggtactgaaaacagcttaaattctgagtgagaagctgaaatctaggattcagcattcttaaagatacttagtattttctgatttttcactgggaactataacagtttggtaactggtgattttgtgagagtgcagagtaaatgaagttgaaccatgcaagaaaaattacatgacaatagaatagaatgttctcatgttctttctgataataaggccggactatttttcacccttgttgtaccttccattgatccaatttgttatccctgaagcaccttatatagcacaaaagaaacaggactgtttctaagaatgagccatctttaaaaggtgtaggaaaccattaataataagttgtatttgacaatttttcattttcctttgaaaacataccaatctaaacaacatagtagcttgttaaataaagcatcttctgaagcattcattttcaaaaatgaggagattctttcttttagaaaacagaagtataggagttaaatagttaaaaagccagatgaatcccctcagattctccgtatcttgtttctgttaatctaaaataacttctttgctacagccctagtcgttacatcttattagttatatttaaggtacttaacttgaattatacctttgtatatgaacttagccctttaggagtactaacatgaaccattttattaagcttctatttgtatatggtgatttaactttcttagtgtttaccatttgtatgtttcctttttcctctagcttcaaaggaatattttggcatctaatcccagggtcacaagattccacattaattgggaagataacacagaaaaactggaagatgcagagagcagtaatccaaatctacagtcacttctttcaacagatgcattaccttcagcatcaaagggatggtccacatcagaaaactcactaaatgtcatgttagaatcccacatggactgcatgtgaccacctaccatccctttagtacaaattaagctattaaaaatacacagaactatttccctgaaattccgtaagtacatagtcaaaacacaatgtgaagaatttgtttaaaaacatcctgtagaaagtttataagaaaaccagtatttgaacaaattgtggaatataaatacaactatttttaagtaatttttttctctaatgtgttattttatttgttctgaaactaatctgattaaagcatatatattattttcttctcctttatatgtaatgaaagcacttataaagaaacaggaatcattagaccaggttgtaaagatgtcttggcctcccagacagtctttggaccactattttactggcctttgaaagaacaaagtttacttcaactaaaatgtttcttcctgtgaagacatatggtatcattttaatttaaggggcagatttccattcttttttggcatgtccttaaaaagaggatttgaaatcaactatatgctaccaagaactttaggatccaattttccaagccaccgtgaagcctcttatggctactattatagttcatgagatgttggacagcatttggtttgtttggtaagagaagaacaaatatggctaattgttaataaggtcccctggctatggtttttgttcttataacagagtttagaatatcagagcatttcttgaatcatacatcattattgtccagtgaattcaagaccaaatacaatatcgggagaaaatacaaactccctgtgtttaagaataggggattacaatggctcaaattggttcatttgatttctaaaaataccatgacctttaaaaattcttttaatagatcatgttattggcagtatttatataaaaaccatggatttagaaaggtatatttagctttattataatagatacgttactattttggaaatatatatattttcacacctgtagtactcttccccatttcctctgacactcatgcagaatgagatcaggcatatttgtggttgacatactctagatagcttttccaacaaatctttgaaaagcaatcttggaaaggaattcattaactaaatggggtaaaaggtttctttttctttgagagttaagtccttcctcaaaaaattttcttatgctccataaaattgaggtagaatattttcattattcttgcagctaagcaagacagccatatgatgcaggttatgcagtgccttcatatctaaaacttttatactgcactttttaaagcttttatgttgaggaaaggaaaagggcatttgtctaaacatggattctgagttgtatatatttcctatcattctaaaaaagtgaatttgtgaagcaaagttttgccagatgttaaactttgaatttaatataccagattattaaaatattgtccattaactagttcatagattttaaaagtaaaatacttctgactgttaaaactatataaagaaaatctcatttgtctaattgcaattaaaagaaaaatgttaaaatattaaaatgaaaataaaagcattactttccaacaa

SEQ ID NO: 403 - DNA, 13082 bp, Homo sapiens
  source 1..13082: mol_type = other DNA
gttaggagggagagcagagcgcgcgcgtaaatcctagagaggcgggctaagctggactggggggagggtccgtcttccggaaagtctggattcccggacgagccgagttgctgctcaccgaactcccgttcgagagatgatcgaagaaagtcggctaccatttgtacccatcaaagatctccagatggaagccagcgctgaatttgggctgagattaggacttgcaggaggccggtccagaagacggcggaaggaatcttggcgggcgcacgcatgcgtgatagaccctccacacgtgtggccgggccgcggcctccccgtgctcggaggtcccgcccccggccgtagcatctttccggacgtggggagccggtaagctggaagggggctgggcttcgcggctcggccccgcctcggcagcctccaattgggcgcggacgagggcgcccccacccactgccctcctattggtgcgcgcatgcaagcgacgcgtctcattggaccgcgcggatttaggcaccaaattcaaagattttaaaagtaccagctggcgccttttaagagatacaggtctgtgaagcaggcaggttgctcagctgcccccggagcggttcctccacctgaggcagactccacgtcggctggcatgagccggcgcccctgcagctgcgccctacggccaccccgctgctcctgcagcgccagccccagcgcagtgacagccgccgggcgccctcgaccctcggatagtgagtgaggggagcggtcgcgaggggggcgcgcacgccaggaggggtgcacggggagggtcgcagcctgagaccctgacccgacgtccctcggagcctggacgcgcggccatgccacacgcccggcctcgggcggcggcagcggttcctgggtccgggaggagggcggctgggtgtcggggggaagccagaagagccagatgtgcaggggcgggatggcgggccgcggggtcccgccacccacgccgaccgtggactccagccccgggaggtgcgggtcgtggcatcccagggcgccctttttcctcctcggaagacccacctaccccaccctgcttgaataggcgccaaatgcccctcccctcccccaccccggggcccccggcggtgacagggctgcgagcgagaagcccccagggcctggccaggtgcctcaccttctccccctgcgccccttttctacatctgccccgcaccctcacagccaaaggcagtttccccgatttttcgcggtcccagccttgctggcgggcgcgggagatcgcgctcgcggttatctcccgcctcctccgcgtgtcccgcgccctgaggggcagccccaccgatccctcaggagttccagggtctccctccccactcccgccaaatggagagacacccccccaactcattggaccaaactcaactgggacatccaaacaaaaacgttactttttcccaattttttctccctttgcccgttaacccagtctcagggcctggagtggaaagggaagactttaaaaaaagcaatttttactacgaaccttgaatttgtccatagtattaagatgattttgtaagaatcgaagaattggtgactttttcccgataactcatgaagaattagatagtcctttatttcaaagcttgcagagaatggaatgcactcaaatgcttatttttatcctctttgttgctacctctaaataaaatctatatgcacttatttttacctgagaaataacccaaaatgaaaaaatttagcaattcggcattgtactattttgtaatgactctattattaaaaaagaactctagaaaaaaatacttaattttaattttaatagattaaatatatttctagaagatcctggatcgtcagtctaccatcgaaattctgaagcttgatggccttatgagggttttttttttttcttttttgataactctaattgtctttactaccttgctcctcagaaagaaatgactgcctgttggaattttttccccagtttacaggtttgaggagatgaaattaaaaatacatatatgttacttccaagtagttttcaaaggaggcttttgtaaaattttctcttaaagattactttatggtcacaagcattgggcctcttaaattcttaaggaatagccatgcctaacgttgaccacatggtcgttatctgtaggtattagagactggaacttaattatttaacagaagagttacaaagatttttaaggactgcagccttatttatgatatttgatatggaggatcaggtctatattgaaaagttaaatgtaagatcaaacattgtaaaatttacttttctctatatgactgggctgggagttggtaaatgagaagtttaaacaatgccatgtatgagtcttattagtgtctgcacttgggggaaaaataggaataggacattccaagttcacaaagctagtcaaaaggctaagcaaggattttcattcaaacttggatctgattcttaaatctatacattctaatggaaaagtatgtgttactctgaaatatatacttctttgtgaaatgtgttttactactttcaaatgttaatgattgtcaatgtaaggaatatgaagggatttggcttatgtgattaaaaatagattgtattgactagacccttgtgatagggactttgccttgcatttagtcctgtttcattgtcttactcccattttatggatgaggaaagtgaggttttaagagttaacttcttcagttttccatactcagtaaatagcactgtataccttcgatactcaagacttaaaccccagggtgtttttttactctccttttcttcatatccagatctagtagattagcagcaagttgactttacccttctaaataacagaccttgaatttatgcagttattttcatttccactacaatccttctagtctgggtttcccacactctacttctgtcataaacacttctaactattctctctgcttctacttaccttcctgcaattcattctccacaattgccaatgatcttttaaaaatgtaaaccaaatttctccacttttgacccagcctaccccacaaatctgcagatcattctacttcttcaactataattttcaataacctcccccaactcagccctacagatatttctcttccttgaacactcacatttttccttgcttcctgtgtttcccaccatctggaactcctccaccagatttccataaggtgttcagatctcagaatgtcagctttgctgaaagatcatccctaattaatatctttctctctccctaccctgtcactgaatggatgttggataaataagtgaaatggttcaactgaactcttagccctcatctgtttcattcaagaggttatgaagccatataatgttttctgtctttctggataataattatatgaatacttcacatatttcccaaatttggcctggtcattggaaaacacttagctagttaaaaggaatggatttaaccttttgcaaacagttgcttcagcttccatttttataaaatatgatgctattctatttcttctgcagtattgttatggaaatgaaaaatacattaatttcatattttaaaattaaatctacaaccaacatccagatttcactctcatttaatacctttttccaaaaaaaaggaaaccacagtgcttggagaaatgactgattctagggctgaaacggaaattataagatgcacttagagcatcttgtagtcccagaaagtaagggatgttcaaaacacaaaatgatttaagtatgtgaaatggacaccaatgtcaactgcaagagctcacaatagcaaaagctggaacaatttgagcaatacagtaaatagtattggattataacccaaagtctatgagtttatactgatataaatgattggtagtatgaataaataggagattaatggacaaatctgctgtaaagaagaattccaaatgatttataaatttactccccactcctttaagtgtgaggtgtacatagtgacttccttccaaaaagtttcaaatggaaaaagaacaaaaaggagtaactttacatttggagcaagctcagaaatactacctcagccaagtaatcaaggctaacaacagttcaaatcatagcaccttacctctggtctaaaaacccacagccccagactaaggctgagaaaaacttgacaaatcctaattgtggaacaggctacaaaataaccagtatttctcagagttgtcaaggtaattataaacaaggaaattgtcatagtcaagaggagcctaaggagatatgatgactaaatgtaatgtatcctggataagacccgggaacagaaaaaagattttaggtagaaactacagcagtccacataaaatagggattttagttaataatgcaacaatattggttaatttgttgtgacatgcattactgttagtaatataagttaagcaatgggtgtacaggaattctgcactatccttgcagcttttctgtgaattcaaataagtttattaaaattcttttaaaatactaaacctttttttttcttttttctttttttttaagacagggtttccctctgtcttccaggctggaatgcagtggtatgatcacaactccctgcagcctcaacctcccgggctcaagcaattctcccgcctcagcctccctagtagttggtaccaaaggcacatgccaccatgcccagctagtttctttttttaattgttgtagagatggagtctctttatgttgcccagactggtctgaactcctgagctcaagcagtcccccaacctcagcctcccaaagtgttgggattataggcatgagccactgcaccttacctaaatactaaatctaattatccatgtgaaaatactgttgttgcaagaggaacgtggtagtcattttaactccttaagtgctaatttcgtgaggaagagtacagattctaatgttggtattagctaacaaaaaaaaatgggaaacacatttttatatcatatgtcttcattgtgtcaggcactgccatttgcttggattttgtcataagcagtaacagttatgtctggcctttaaggaaattaaagtactttttaaaatttcaatttggtagtgctttagagtagagtttgatgaggtctgagaagtcccccgccccccccccccccccaaaaaatgaagctctccatgattaatggattagaagctaaataagcaaaggaagtggaaaagattctaagcagggaaaggcatgatgtacaaagcccctgggatggaaaggtcattgttactaaggactggaaaagggccagctcacatgagaaaagaaacgtacacattttcttctttagtaccttaagtgcgcttgcaacataaattctgacttttctatcatttttataaacagtatgaatgttatttgtaagatctgtttttccagagcacctcattataatgaggaagagaaatctggctcatttaattaactgcctgtattgggcaaactaagctacacttcagtgtgctcaattgtaaaaataacaattccccatcctacctcaaaaggtttgtaagcattggaaattgcaaacttctaaacaaatataaaggatttgcatcattattagctctaattttaaggaactgtccatattcaaagaacagtgttgaatgaaagaggttctataggacaaccccccagtaactgttctaaagacagcagaaagagaatgactttgaattcctgaagtattttcaggcctttttggtttaggcagctaaacaaagcagagtgtgcccttcataagtggcttctgcttttttatcctgtcatgtaaattgtggtcatatataaatcaaacctaattctttagttgatttgaggcaaaaatagaggcaatctcttggcattttttacttttcctctgaataaaactaaaccactcagaatcatttgttctaggtttagggttaattagggagctagaatttgtatattctttgctttttatgcagctgaacccttaattttaggtttagtaggatcctggagcacatactatgtgtctttcactgtattaacattgggaatttacaagcagtttctctctacaagttactttctatgaaggtatccatttctactttgagttaaaaagttttgctctatgtaaaaaatggttaagttttatatgaacgcattaccaatatttagtgcagactaaacatactgatgctgtatacatttacttacaggataaattgttagctatatatgattggcttgtgtggggatggtagatggggcacattttaacctggcatttaagattcaggctttcttagctcatgtccccattgtttgcctactcttactctctgccttcaacaatgctaaacagttttctgaacccatctaccatattccttcccagcattgtgccgttgctcaaattgtgaatgcccttcccaggccactgttgtctgacaaaatcctaatcattttttagagttgtggttctcaactgaagaatagaggaaattttgcatctggcctttttccctgcccagtatttggcaataactggtaactggagacattgcatcttgggagtgggggctgccactggtgtctaatgggtaaaggctgcttaacatcctacaatgcacaggacagtccctgagaacaaagaggtattcactgcaaaatgtctgtagcacagggatggtgaaatcttgctttaaagctatcttaagatgctgcctgctccattgtgtcttaactgatttcttagatcccgggggttggagcagggtggtaataaaaccctgaacaagtctttcccttttttctatttatcattaatagcaagtttatcttaagttatttaaagcaattgaacagtaatttacacctgctgccctatcactcatattcttaaatctggttaattgattagagtgtcattcttatttaccaacacttacttttgattgatagcagaactattcatacttacggttctttggtaaattagtcgtggaatgtctttgttcagtgattaaagagcagtttccagcacatattagacaaggtacagggagatgtcccggtactcgagtttactatccagtaaggtagacaaacgctttgaatatattagaaggtcaccaggagcacccatcagaataaaacttggagataagagctgtgggaattcaggtagactttaatttatagatgtttaaatgtgttattagttcttttctccaagctacctatagatttcttgaatagttattttaaggcttgcaatcattgttaatagtgaaataatacacaaaatttttattatttttatcaagattattcccacccttataccttgtcctcctgtactaatcttaaccacttttgctgtcagtggcttgggttgtgcttacgtcaaagagaaccataatgtcatttcaagtccaaggaataaacactgaatctaaaagtatttgtggttactttaaggataactttgaccatagcgcctactcttttgatacatcacatttcttcatttgttccataaacacagatgtttattatatagcccctttttccactattttttactcaatcagttatagacaacagtcaggtgttacagccaggcagatccaaaagcagtctgttctgaagtgccttctcaagaataatataatatgtatgtacttataagatttaagtaatattttcacatattattgtcatatcaataattaaacttgaataacatcacagctatgtaagcaagtacatgtagacaatacctaatgctgagagattgcaaagtaatctttgtatatcccaatttaagaagtagggatgtgtggaaattttgccattaagatgtaaatgttatgttctttttataggttgtaaagaagaaagttctaccctttctgtcaaaatgaagtgtgattttaattgtaaccatgttcattccggacttaaactggtaaaacctgatgacattggaagactagtttcctacacccctgcatatttggaaggttcctgtaaagactgcattaaagactatgaaaggctgtcatgtattgggtcaccgattgtgagccctaggattgtacaacttgaaactgaaagcaagcgcttgcataacaaggaaaatcaacatgtgcaacagacacttaatagtacaaatgaaatagaagcactagagaccagtagactttatgaagacagtggctattcctcattttctctacaaagtggcctcagtgaacatgaagaaggtagcctcctggaggagaatttcggtgacagtctacaatcctgcctgctacaaatacaaagcccagaccaatatcccaacaaaaacttgctgccagttcttcattttgaaaaagtggtttgttcaacattaaaaaagaatgcaaaacgaaatcctaaagtagatcgggagatgctgaaggaaattatagccagaggaaattttagactgcagaatataattggcagaaaaatgggcctagaatgtgtagatattctcagcgaactctttcgaaggggactcagacatgtcttagcaactattttagcacaactcagtgacatggacttaatcaagtaagtactgttttgaatatacatattagcataatacactgaacattgctgttagtggctcagtaccaccagctcatgcaaaggctgttgtacaggttgagtgtccctcatctgaaatgcttagtaccagaaggatttcagatgtttttcaaattttggaatatttgtattataccctacaggttaaacagttgaacatccctaatccaaaatccgcaagtgctccaatgtgcatttcctttgagcatcatgtcagcattcaaaagttttcagatttttggattagagatgctcaacctgttgtagataaccttacaatgttgtttaattgcggtaatgacttgctggtgttttgctacctatgtgccactaagatgaaagaaaacttgaattatgcatttaacctagtcatttcaaattttatattcatgctattacaaaactatttctgttggattaggatccttgttccttttagttttgaaatttctaatatgtaagttacatctttggggcttaactgtaaaacagcctagttccagtctacatgtctaataggcattatgacttgtcacaccagaaagtatgaagtaatttttgttctttctaagccatttttggtgctagggctctcctagatttgacagtgatgaaaatataaagatccacaaatagagatttgtgacttttttttttttttgagacagggtttcactccagtcacccaggctggagcgcaatggtgcaatcttggcttactgcaacctccacctcccaggctctgtttatgacaatttcttagaaacctggtgctaaccaccatttctttctcaatctaccaaggaaaatcacttagtcagataactttgagaattaaggtgattatgcaggctagaattagataggacttaactggagttgtttttttttttttggctttttgaaaaattatctagaggtactctttgcaagtgtgagtttacactggtctttatgaaacagagctaaagcaaaacagatataaacagcttctttttttttaattttttttggggacggagtctcgccctgtcaccaggttggagtgcagtggcacgatctcagctcactgcaacctctgcctcccgggctcaagtgattcttctgcctcctgagtagctgggactacaggcgtgtgccaccacgcccagctaatttttgtatttttagtagacacagggtttcaccatgttggccaggagggtatctcgatatcttgacctcgtgatctgcctgcttcagccttccaaagtgctgggattacaggcatgagcctaaacagcttcttgagggacagtcaaatcagtaccacagattctactttttctgttaacatagtgagtttctaaagttgatttctaatagcagtgtgcctagagtactttgaaatttgtctattacttttaccagatagctaacatggtatcatatatacagtgggggctactatttgatgtttgcagatattgtgaaaaaatactgtacaaagcagtggttcttaagcctcaatgcactcagaattacttaatgaggagggagctttttaaaaatacagagccctgagcttcattttagaccagttaaaaccgccaggcaattgtaatgtggtcaggtttgagaagcactaataatataaaatatctttttgcactgctgatgtttttctactgtattcatcttagctctttgtgatgctttaattatttcatttatggtgatttacttttccagtgtgtctaaagtgagcacaacttggaagaagatcctagaagatgataagggggcattccagttgtacagtaaagcaatacaaagagttaccgtaagtgtttgcagatgatgtttttagttaaaaatgcactgttagtgctcttctagaaatagaaaagaaaagaggtaatctggaaacccttctttacagtcataaagtatttcagccttatactggaacttagaaaccacattcaaaaataaagaaatctcaactcaacatttatttcttggattcttcctagaaatagaatgtctaaagtaacaaagggaaaattactcatttctcagatagagtcgaccatttagtcaatcttagttgccagttgtgtgtatgtgtattttataacatctggaaaatttggaaaagctgttttactttttaggtattaagtaccatatagactgcatctaaagtgatttcccatagtatttggttcacagtttctgtctataagttaggcttgatatgtgtgagtatttaggttttgctttgtttaagtacgtgcaggtaaattgcatgtagggataagtctcttacctaatcttgtttgtcatttcttatatgtacaaacataaaaatgtctcattgaggatacaggaaataatttctaaattctattaaaacttttttttaaattaggaaaacaacaataaattttcacctcatgcttcaaccagagaatatgttatgttcagaaccccactggcttctgttcagaaatcagcagcccagacttctctcaaaaaagatgctcaaaccaagttatccaatcaaggtgatcagaaaggttctacttatagtcgacacaatgaattctctgaggtaattttttgtctaatcataaatcttaaaacataagagatttagagtaagaaatgtaaaagaactttcaaggtcaaaatgtaactttgctctagataataactaatttattctctgacattaagaaacctgatattaatgatcatttaaatttaattatagtataattagaactattagggatttcattagtgtcctcttcatttcgctctcaatgtggaaaacaaaagaaacatgaaattaggaaagtacgtagaaatgtatttctatgaatattaggtactgcttggcattgtttgaaagttcagtgattttgagttctaatttagaaacactgaagaaataatgaaaaacctagatttcttataaaattactcagtactacattttgcattttccgcttttaagaaccgaggaagagagttaagtggaaaaaggcaagctttctgaacttgaaggccttctattataccttcagatcagtgaatgatgtgtgctaaaatttctactcaaatgtagataactttgcaagcttaatttagataacttaccaaaattatagaatattttctgattcatgttgatcagtaaatataaatcctacataataaaactattcttaaattttatgccataatgactaatgcaacatacagatttattcaaaaagcatttattgagcatctatcagataatgcatagataaagggcaatagttagggcagtagttatcgtatgtgtgacagtgatatttcatacatgaattggggaaggtgcaagggtgtccttggttttattaactaaagtacatgtaattcttgctgaaatttgttaatgggttttttttttctttttaggttgccaagacattgaaaaagaacgaaagcctcaaagcctgtattcgctgtaattcacctgcaaaatatgattgctatttacaacgggcaacctgcaaacgagaaggctgtggatttgattattgtacgaagtgtctctgtaattatcatactactaaagactgttcagatggcaagctcctcaaagccagttgtaaaataggtcccctgcctggtacaaagaaaagcaaaaagaatttacgaagattgtgatctcttattaaatcaattgttactgatcatgaatgttagttagaaaatgttaggttttaacttaaaaaaaattgtattgtgattttcaattttatgttgaaatcggtgtagtatcctgaggtttttttccccccagaagataaagaggatagacaacctcttaaaatatttttacaatttaatgagaaaaagtttaaaattctcaatacaaatcaaacaatttaaatattttaagaaaaaaggaaaagtagatagtgatactgagggtaaaaaaaaattgattcaattttatggtaaaggaaacccatgcaattttacctagacagtcttaaatatgtctggttttccatctgttagcatttcagacattttatgttcctcttactcaattgataccaacagaaatatcaacttctggagtctattaaatgtgttgtcacctttctaaagctttttttcattgtgtgtatttcccaagaaagtatcctttgtaaaaacttgcttgttttccttatttctgaaatctgttttaatatttttgtatacatgtaaatatttctgtattttttatatgtcaaagaatatgtctcttgtatgtacatataaaaataaattttgctcaataaaattgtaagctta

SEQ ID NO: 404 - DNA, 27334 bp, Homo sapiens
  source 1..27334: mol_type = other DNA
gtgtatgggtgaaggaggcagcagtgtggccggagaggagagctgggctgggagcacaggaaggtccccaggactctgtggtcatcagtaagagagggcccacgtgtatatgctggtgaacagaaatgtcaaccttttcaaagtctgacatttaagagaaaaaactgtggctgttggtttgtggaacagacagctccttctttattggtaagttttttttttgtcttggaacttagaaaatattgtatttcttttgtctcaataattgttttatgctttggaggtaatagagtattacaaaagtttatgttatcaagtcatgcattgcgaatacttatttatttaggctactttagtcatcccaaaaagaaagaagagatgctgacctttgttgagtctattatgtgacatgctctattctagagactttggtatgtgttattttatgtaattctgaagacaatcctggcaggtaggtgtggggctattttaaagagttagggcggtaaagtcacacagccagaagatggccatggagggttgggaggcagatttttctgatcctagtctgtgttctttctatctcacaaagacattccataccatctgcaagtcgcttttgactagcactcgagaaagaagtatggggacattggaaacgctctaatagaccacaaccacctttgaaagagcagtcatctctatgagccataactataaggaagaaatgcagatcccacagaccaaaatggaacatgtctcccaaacttctcaccctgggggctgtggctgctgcagaatggggggtgctggtggatctaacatgaatgaggctcggtggaggggctggctttgtgcagggaggttgggatgaacaagggcagcaggcggcatcacaggtgagaaggacatcccaggagggaggaaagagccacagcgtgctgacgaaggtgggatggggtgaggtgggggagacacagagaagcccagagccagcctcgtggaatacacagatgtgtctggaacgtgtgtctctggatacactgatgggtctgcttcaagagaattcttgatgctgcaatgcatcagaaggagttctagtgatagcattgtctcccaagtgaaagtgataaaccagtgacaatcagtttcactgtgttgtgggtgaatgcatttatgtcatttaacaatactgcgattccatttgtataacaatctcggatgcacttgttgtaattttgcattatgtcttctctaattaaacatctgaaccctctgaggcctgacttacctggagctctcttatctaataatatcaacctctaaggcagcctgagaaagaggaaatgaacccaaagagactctgcaccaaaatagataccacgaagcctgtacccaaacttggtgtgtttttctcccaggggagaccctcaggtgcacattcagatacactggctcttattttaggcacagttctgataagggggggctgtttggtttcccagcccagagcttattggaagcagcacattcagtgggaatgtcacctgctggagtcaggcacgctggaagtgatgaggaatggcagacagccaggtgcagtcaagaggtgggctggaagaaccccaaaacacagagagggcaactcagtagacctcacatgggcccatttaatgcggaagcagatactgtagttccaagtattggaaggatctcagtgtggaatttggtgtgctgctgcagatgagaaagcacacgtccccagcggctccacgaatggggcccaggcagggttggacgacgcccagctcccctggagacagccagaaatctcatcacatgtcttagcaatattttcacccatcagatcccaagttttaaatgtttaaaatgattagttgaaaattaatttggaataggcttccccaagaccaaaatgttggttggacattgctgtgttgctgagtaaaatacagtaaatatgcagcgcatccttcagcgttcagatgactgcgttagagaggatggggcatctaggcaagacatgcattcctctttactttttaaagcactcctattttggggggtagaatgagaagatggatagatgaagaaagggaaaatggaacaaagaaaggaaaaagggcagggcaaggaagaggttccaggataaaatagacatgagatcttatgagcagagatcgttagggcagggtgggtggaccaggtcacacaaccgtgacagacacggctctgggctctgacaaccgcatcgcagcagacaggatcaagatgcaaagcagggcccttcggcagccggcgcatgacctagagctgggtgtaggaggactctccggcagcttctgcctctccctcctcaccttcccttgatcgggcttatgtcatgaggacgtcatcctccctgtgctgtccccacctcctgccacacaagctgcctgaaatcctaggggctggtggagatggtggtttgatgggttataaatcacgtgacttagctgagacggtctagctccctcctgctcccaggtggtcttctgagcagtggtagacctcgagaggagttcagaatcacaggaccgcaggacccagccctggtctatccacccagaacctacatttgaaccccaaggagaggcaattcataatcacagtgcacttggaaacccttcttccaggcataggaaaccccagtccagaggcatcacttcatatttcggaggggttactgccattgagtggcctaaatttcaaaccctggcacggagatgagcagggcccccttctctatgcagagccccctggccgaggcctgctgtgacggctgctgtaaccagcctgtggctctgacgtcaccgtgcacacgtcaccctttttcatttctgtagcagtttataagtcagtgaggctgttcccggcagacagaaatggaaattagcactctgaatctgggtcaccgagcagtgctgtaaatcccaggggaggccccgtccttagctctgcatccagtgaggacctgaggtgaggatgtcttcacagatccaagggaggaggttttagacacataaatctgtgtgattatccaatggcaagatcatttgataggagatccccaacctaaaaagaatgtggctttcagatctctttctggtagacaaacagatgttttagtaaatcaaaaaatcagccttgtgagtgtaattaaatgactacgtaataaaatcagtcattttcctttggtctttttgtcagaatgagtcttcaggttctgtaaagaatctgtctcctccgacatacatcgccaagacagcggcgggctaatgggggctgtgctgcccactcctcagacactggatgggggtctcactggtccaccccgcagttggctgctgggtcagagagtgtgccagccagaccccagcgcccagcgccctctagatgttgcagaagggcgagagaggctttctgtggtcctcattctgtgagcagacctgtcctttctggcagtcaattatgcctttgcggaatatgattgggagatttttaagtaagtcagaggaaaactgattctgctggaagtcggttttagagctgctgagagctatttcattcatcataaaaatcttgttggttcaacaatacctctttttccacattcctggtgtttaagcagggtgccttgtccaaaaacctagtgtcttttccccattttctgtatctgacttgaagcaaaatagtattgtccactgttctggaaactaacacagaaagaaattgtgactatggcagcactcacacaacagtttatctggaaacgtctagaaggtgttatttttccagcagtgaaaattagtgatatccataatagtcactataattagtccttttgcttttcttagaaattctgtttcattatgcaaccaacttattttgttattaaatgaaagtacaaagagaattttttaataattacatttcttatatttctacctccttatacaaacaccattatgattttcatgtctcttctcatacttgtgtcagtttctcacttttattgctaaaattttgcaaaactgaggctgtatctataatgtcatggtcagggttggaagtttaaatttgagacctcaaagaagatttttcaaaggggatgctatgaaaagctccccattttcctcctagttcaaagatccgcaggcgttataaagcgaatgactactggttaggtggaattcatttctgaagccgtggctgccgccaggagggagcacaccagcaggcgtggatgggcgttattgttgtgtcttctttcttgaaaagctccagggtccaactgcaagaagagatcacgagagagaatgcggaactcctggctctgtctctggagaacattccagaggttgtgctggagccagaaggagcgctttcttatgctgctgtctccttcccgaactctccagagcctctggagtctttcaccggggcctccccgccctcgctccctcttgggaattctctctctccagcacccccgacgctttctgttttagatcaaattgacctttctggcttgacaccctttccagcacaggaggcagctgggcctttctctgaggccctcctctcagcccacagcgcggcagatccctgcggggaaatgtgtcctcccttctcccagcccaagccacctcctcccacctgcatggcttttggccaaagttttccttttgcttcaactgagagtagagctgctctttctccctgcaggcacccttcacatactgacggcagccgccccctcggccttccgctgcaccccgcccctcatttccagtggccctcttgctttctcaggtgtcagggcttcccgcctatgccaccccctagcagagaggcacccaggggtaccctaaccattgcagaggagaagggcgaccgcctcccagtcccggacgcctgcacatccgttaggcccagagtggctgctcttcctgctgtggcagcactgtcctgattttagcacagacgtttctactttccgggaagtctctggaaaactgggagggttggccccctaatcctgggagtccaacaggaagagccaggaagataatgctgcaggagatgacccgtcccgtgggtgagggttccctcccctcccgcggtgggtggagggtgagtcctgtcgtcctcctgtggcgggagagctgtccatcatccatcactgattcctctccacttctgcgctgttcctgagggctgagcacaaagcctccttagaaaaccagagttcagggtgcttagatggaaagtgtccaagaatactgctgcgtctgcgaccacctcagcctctttatccctccccaccaccgtccccgcatccctccctaccaccgtccccgtccccgcatccctccctaccacagcctctgcatcctgcctaccacagctgcatcttatgtcagaagagtgttcgagggatctgggctgagggaatggaaggtgttacctgcttgttttcagttaaggaaataacctgtctcctgggtttgctgcttaccggaactctattttctttttttttttctttttttttttttttttttgagacggagtttcgctctgtcgcccaggctggagcgcagtggcacgatctcgactcactgcaagctccgcctcccgggttcacgccattctcctgcctcagcctcccgagtagctgggactacaggcgcgcgccaccacgcccggctaatttttgtatttttagtagagatggggtttcaccgtgtcagccaggatggtctcgatctcctgacctcgtgatccgcccgtctcagcctcccaaagtgctgggattacaggcgtgagccaccgcgcccggcctctattttcttttttgagtctccctgtcagtccttaatgttttccacccctgtggtctctattccctcaatgtattcttccttcttaaaccctttagttaagctctcacttggacattcttaaagaaattttgtctcaaagagcactgagaacagtagtgatgaaacgcgcaggtcgcttttcagtgctcaaattcttcactctgcaggtttcctataagcacttttctgttttttttttttttttttctttaaagacactgtactaatattttaggacctatcctctggccacttctgaagtgtcacttttccagcttcagtctgtccttctgctttgtaaacatgagcccaacatcccagcagttccatcggcgtctctgggtttaattacaacctctccatgcaagaccgttcctgcatctcttgctaagccccctctttatgactcaatagtggtaacttccacccccatctctaccaccacgacaacaatcataattacaaagctgccactgtgcacctaatgctgtgtgaggcatgaactttgtcttcgatcttcacatgaatcatttacaaatctaaaatcctcgtgtattgattaggagacagacatctagaggttaacttgaaaagtgactttcgattcttgacatgagtctaaagtcatgtcaagaatctccaagaattttcagttacacgagacatcaatctcttcacattccaggtacttcaatgacatccattttcttccctcttagaccggtttctataactgttcttctacgtagaaataaattagtaaataaaaagtaagctttcagtttgatttccctatttctgtcccgatgtaaaatttggcatcatcttgattccccttttgcttgttccttactgatattttccaaaacatctccccacatcattttctcttcacatgtatcccagaaaggtatgaacttttggatcagatgacatggttttgagattggctcttcaacttattggtgtatgaacttgaggaagttgcgtttttcctctgagtttcagttttctcatctgtcacttgaggaggactatgacaaccccagggcccctgggcctttagtgaggattaatgaaaatgaatgggtgaaatggcgagggtcagccccacatgctggacgcccttggtcccggctcccttctctactctgtgatgtcaggcagggctgccgccaggaggagggtgcacctgccctgtgacctgctcttctccctaccgtaaactcgctccctgtccctccacggcccacagacgtctgtgtctttgtattgctgccagccttccggtcctgcagccaccctccccagctccccactgagggctggtgcccccacctgtccttactgctctccacctcggtgcctttctgcctccccacccaggctcatgctgtttgtccccaaattgccttcctccccctgcctacctggtcagatctgagtcgccttcctggctgagtcccagcctttcacgaagagcctgaagtccaggatgctggaggtggaggagctcctctgtgctccctcctgtgaactggacgctcgcagtggcatttcttcactgatccgtcacacgtaggctctctgcatatcacatgtggcttgtattgtcatgtatttaggcctcaactttccaactatatgagttcccaaaaggtgggaagtaaatggcatacttttaactatttctgtagcttgtgtgctgtacatagtaactatctgaaaaaatgattcgtatctgaaaaataatttataacaggtgttctcctggctatttgggagagtaattttcaggccagctactttatggggtagaataacacagagtgactccccatgcccaaatgtattagcatatacagtgagcattgaaggatacaccatttgacatcttcgtaaactccaaaattcaaggtgtcagcacagcttgtacttcctcctataaaatgtgtttttgtccctactagagaatttgctgatgtaatttgttaagtagccttttttaacttttttatgaagaaaaagatatagatccaaaccacataacacagatccaagcactgctgggctcggtagtctatgtttttgcaatgggtgtgagcctgtggctgcctgccagctgtcattgttgtaggtttcttcttcctgtccctccactctcagcacctgtgctaactctaggctttcctggggagggttttgtaaaaaccaacaaatgacgcttttattttaatttgttttgttttttaaaaacatgttcattacttcagaagttttgtgcgcacaatgagagtagaaaactgccccagttatctaccaccttgagtcatggtggctttaacagtgatttatttacaatctcttgtggctctgggggtcaactgggctcggctgagtgcttctcagttggggcctccactgcaggtaccatcagagagtgggtgggagccatgtcatccgaaggctcgattgggctgggggactcccacatgtggccggcaggtggtgcactgctgctgcctggtatctcagcaagaattcccaaccagctcaccatattgacttcctcaaagtttatacagagtgttactttaggggttaacaaagcatttactatcttttcaactttgctgataatttcaaaagatgactgacacccagatgaccaatgtccacaaagtggtgtgccatggcctccagtgtgtgtgctatggcctccagtgtgtgcagagcctgtttgtgaattaaaggcaatcacaaggagaaacggtcatggtgacccattctgagctgtacacagtgtcctctgtaggattgtagccagaggcagatggctttcctagaaatgcctcaatgttgagttttaaagcaactccttatgactgttatctgaatttaccaaactgtccctggcttttcttaggaatgaacttctgatgttgctgtggaattttctgcctggaaacttattgttatgaaacatgtgactgtaagccacattcctcgccttttatgcacctcacagtgtctatgcaaatgaacagtgtgattttaaatttgaggaagtttcaataagagtgagatctaagaggatctttaatataggggcatttttagagagctaaaaaccaaataggtctcagctttctcagggtgacatataatttagatttgacttggaactacagaaggaatatggggcaaaggacatgagaaacattgcagaggtcagtgccatatggagcttccacctcagctctcgaagtaaaggcaaccagcccaggctgggagccagtcagcagcagggtctcaatctccatccactaccttcccctctggggcagggagggtgttgcagggaggaggccactcttggagacctccagatccctgcctctgtgcagtctaacagaaggggcccccacagtggccatgaatctctttgttctgcaaggaagggggtgtcattgggcctcctgggtccctcagcatctgcgtggccacacaacgcggttttgttcaacacgttacatttctgcttaattaatgttcatttttggtccccagcaaagtccaatctgtttttcgttttctttcttttctttccaggcaggcattgccagggctaatcatctataaaagggcttactttcttaccttcacgctaagcaagaccatccaagggcagtgttagagggcacctgagaacgcaggaggggtgtgttacctggtggcctgtttcttcctcctatgggcagcccttctacaggaagcagaagcctcaggggcgatggtagaaatgaggaggaggggatggagctgaggtagcaggggaggggtcgtaagagcagaggggagggtcttgctttgttcgccatccaataatcagcaggtttcgggttggggtgaactactggggaggagcgccccagggcttctctcagatggaggagggacaggtcacccagagtgaaggaagttgtgagctctgttagaggaaaacagccaggacttagtcaggagaggctttgtttggaaggattgttgtaaggcagggagaggaatgatggcagcaagaggaccccgtgaccataggtctgcaagcacttcaaacagaaaaggcccttcttttatccagtaagggggagccactggggccagcagagtctttggaggggaccctggacaaacccgggaaaatggccagtggggttgagcaggacacaggtcctgctgtgtctagctggttccccagagagatgataaggggtgcgctccagcttctcaggctcactcaggcgtgaggacgtggagctcagggctctgcaggaaggagcgacccaggtgaggtgtggtcaagatagagcagagctgggcagcgggcagtggagcctcgtgggcagcctgggggtggggaggcacagtgcactgggaagtggagaaagtgtgagtccatcaggctggctgagaattgatcacgaacctattgtctgtaaaacttttgttatttcctgagacgtggttcacagcaacccaggtgcgaacagccttgtgattctagggttcttttctattttttaagcacttgcatctacaaataaatttctgagtgacttgtcgtcagctgctttccttgatatgtctaaagacagggcagtgacccgcatcgtcacccagagattctgtctctgtgccacatgaagattaggtgcccgcttttgattgaggagctcctctgttgctctcaaagtatcttgtaataatagctgagatgcatggagaaccacctctccttcaggcgctgctcctcggcttccgtggacgggcatggctatttctcggaaccctctgaggttagagctgtcatggtctttcttctgaaagaggaaaccgaggcttgctggggctcagtggcccttctgtggctgcacagctttcggggtggggccaggactgactgactccacacaaaagtgctcccggcccatgtctttaactcacacggcctcttgcaaacgttcccaaatcttcccagtcggcttgcagagactccttgctcccaggagataaccaggtaaaggagtatgaaagtttgggtacaaactcattgctgcaaattgaaaaccatgcaaaggctgtcttcctctggggagttcaatgcctctctttttcttatcactttaccattggttggactttgattccagggatcctacgattactcaataccctacaggatatacatggttaaccatttgcatttgggcaaataggcgttacttttcaataggaagtggcaatccagaacttgcttttgggcaattctagtagctcaccgcttttttcttaatgactgctagaagctgcatcttattgacagatggtcatcacattggtgagctggagtcatcagattgtggggcccggagtgaggctgaagggagtggatcagagcactgcctgaggtgagcatgccaaggcccctgagacttttctttcaaaaatgtaacttctttgatcccctagtctgacaggaatgggactgttttactcattaatcttccagaatgctggcatattgaccatgtttatgcttaacgacacagacttcctttcctgaaagcattgactttatggttttaggaagcccacttttcctctaagtgtatagtaagggatttcatactcgctccctgcactggagcttcggtgatggtctgggtacttgctcctcatacaggagatatcctcagggcatcagtctggagaggaatgtgattctttatttgatcaaatacactgaaagattttggaaaacaaaaaaattaagctaagaaatattttggaggcagtaagtcatttatgcaatgaaggctgatgagtgggcatcccggacagcctaagattgagcaggaaggagcttgtgagggggagttaagagaaattgacaaggtggaaatttcaacaagtctcagttgcaaagctctcatgagggctgccaatgccactgtgattatgaaggcagtatcttatgaccagaaaataatacacaatgatattaaagggagccaggctaggtgcagtggctcatacctgtaatctcagcactttgggagaccaagctgggtgtatcagctgaggtcaggagttcgagaccagcctggccaacatggtaaaatcccgtctctactaaaaatacaaaaattagccaggcattgtggcatgtgcctgtaatcccagctacttgggaggctgaggcaggagaatcactggaacttgggaggcggaggttgcagtgagccgagatcacgctactgcactccagccggagatcagctccaaagtccacttagcagcaggacatagatattgtagagatcagctttataaagaaaaacaaaaatgcaaggccataactaaagctattctttaaatggttaaagatgtaatttctgcaaataaaacagaaaacataaaagcaaacttccaaagaaattaaaggaactgaaaaaaaaaaaaaaccaacccacagaagcttaataaacaaatcaccgggggaaaacaaaaaaaaaatcaaacctcctggtctcctccttagccactctcattcaaaagcagaaggaagccagcctagagtttcagctccactgatgcttatctaaaaaggtataaaatatggtgggcccatgattcaaataaacttagagaacataaatgtattgaacacctaccattacagtatgcaaaactctgatatcaataagatgttttaaaataaatatattatttaagatcttgtgggaattctatggcatttcactaagacctgctggtggcaaggtgaattagaacggcgagtaagagacagtaatgggagtctcaccagtactcacagtcctagatgagctacactcgctatctgtaaaatgggtatgatgtctaccttaaagggttttgtgaggttaaaagagataaacagctgtaaaccagtgattctaatgcctagcaggtaactagaacttaatttacagcatatgcgcgcacacacacacacacacatatgcgtgcatatatacatacacacacgtccatatgtacacacacacagttatacacatactgcacacacatgcatgcatacacacatgtatgtatacatgcaggcaccaatatacacccatgcacacacatgcaaatacacacatacacatgtatacacacatgtgcacacctatatacacacatgcatacacatgcatatacacatacatgatataaacaggtgtatatatgcaggcatatgcacactgcacacatgcacacatgcctagacacatacatacacacacaccgacatatgcacacacacacacatactcttatttagttcttgctccttgttttgcagggccactactatttatgaaagtaagcacaaatttaaaactgtctgacaattgtaacacattgttaagctagttattaaatgtttttaaattacaagtccacacagtttttattaccagtaatattttcataactattactaatgttttccccatattgaattttcttggacagagtctgtccttggccaaagggatgatcaatggcagtcggtctgttgcttggtccccccaacccctgctcttcttggggagccccccacccacagctctcaccggccttccctctttgctaccaccacagagccagccagtattggtctccctgagagtgtgtgctgtggctacccacctcttctggggccatttgcctgtgattagaggactcccaatgccctcaagtccaaaaacatggttttctctaaggtagaggcaccgttgaaggccggggggagatgagtgtggctgtgtttggagaactgaacacggccttaaatcctatagtgagggcagcccctccctctttcttctggttctgctttttagcagaatgtataattaggtgttcttttcatttctaaatgaattagccaattaattattactttctgagatactctattgcatattgtacctaataaaagttgtactaggaagccacattactttattgcaataaaaattgcaaaaaaaattgaacattttaaatgctatgtaagaaatattattctggaattaagtttttattaaagtaacagttttaaacatgtgtgataacaagatctttgaaatgttaaaattgaaattcagaggctaagttattacttaccatgtgcatatatttaatcttcatgagatcctagtacatttgcatttcatttaaaagagtagggtggtggcttgtagtcccagctactctagaggctgagatggtaggatagcttgaggccaggagtttgaggctgcagtgtgctattatcgtgcctgtgaatggccactgcactatagcctgggcaacatagcaagaccccatctctaaaaaaaggtagtttatttatatgatttcaagcctaaaatacatactgaagtatagcttatcattatttgcctctaagtaagggaagaaaaagccattaaaaatatcttttaatacgagtttatttctaagtctaacgtatgtccacaaagagaagagaatcaatcagacgtgaggcctgcacaacttttgtttcatgcatttgctaggggaatggaggcacttcaagtcagaggctggtgtggggaccagcacaccgtctaaagattcctcctgtgtttgccttggtggcaccccttgccacattccctgggtcaggcaatgccagccctggggggcctgtgagctgctgcagtcaggtggtgggtgcatgtagccatcttcttgtcttccctctgctgttgcctcgaatagggattggcccctaggagctgctcagacctgtctttggatgaatgaatgaagagtcctctaggttagtgatattctttggctgtgtccccatccaaatctcatcttgaattgcagttcccataatccccacgtgtggtgggagggaccaggtggagataattgaatcatggggcagtatcctgttctcgtgatagtgagtgagttctcacgggatctgatggttttacagggggcttccctcttcgctgggcactcattcttctccttcctgccatcatgtgaagaaggatgtgtttgcttccccttctgacatgattgtcagtttcctgaggcctccccagccatgctgaactgagtcaattaaacctctttcctttataaattactcagtctcaagtatgtctttattagcagtgtgagaacggactaatacagtcaacttattgatcatatggtttatataatcatacatctataattatatagattatatagtcagattatatgatttatatcatcatataaataaactaccttttttaaagagatgaggtcttgctatgttgcccaggctggagtgccgtggccattcacagacacgataatcacacactgcagcttggaactcctggcctcaaaaatttcccaaagtgtttccaaagaacaggaactgaaaaggttctgtgagtgagaaggtttgggaaatagtgagttattccagcagggctctgaagggccactgataaacaagctctaataggaataaactagggaaggatgtagttagcatcttattaatgtcttaatatactagccacagagaaatcatttcccacccctgtctgtctccctcccttctttttacccagagcatctcttggaactcacttttagatgctggatgcatgaattccctaagaagaaacagctcctaaattgaagtatgcattagaataatacagagattgtgttaatgcaaggatttgaatcttcaaagcagacatccataggatctatagatcttacctaatgtcaaactttactaatgattcaataacaaaaacactaggcagagagatgcatcccatgttggctgggctgttctcaaactcctggcctcaagtgatccacccacctcagcctcccaaggttctgcgattacaggtgtgagccactgtgcccagctattctgtgcttttagataggggttcccaggcttctttccactagtaagtactatttgcatgtttacaaggagatctggtcctcgcccaatccagtcatgggcagagttcagttctttgtgactgtaggactgagatcctcatattcacgttggctgtcagcagagggcctttttagcttctcagggcaaccacatggctcggcttgtggccccctcttctgtctgcaactccagcaacaatacattgaatctctcacctttgaatcttttcttctcccgtctccagggagaaggactcttcacctctagggactcgtgattgcagtgggtccaactagataatccagcatgatctctgcttacctccaggcccttagatctttgacttcattgcatatgcaaaatcccttttgctgtgtaaggcaacacgtacacaggttctggtgcctgtgtcagggcctgggcagggggccatgattccgctaaccacaagcgtgacatggggccatgattctgccgacaagtgctgtcccctgtgtccggtgcctccgcgctctatctattattgggttggaaagccttagtgaccacggtggagagtacccagaggtgagcagagctggctggctttccagctggctggatgtctgcgcccacatagtactgattaactagcctcttggtgagattactagcaaataaaattcttaagatttttgctgctgctgcactttcatcttatatctgtgtagttgcttatttatttttgtatttttattttttatttttgagacggagtcttgctctgtcacccaggctggagtgcagtggcacaatctcagctctctgcaaactctgtctcccaggttcaagtgattctcttgcttcagcctcttgagtagctgggattacagatgtgtgccaccacacccagctaatttttttatatttttggtagagacaaggtttcaccatgttggccatgctggtctcaaactcctgacctcaagtgatccgcctgccttggcctcccaaagtgctgggattacaggtgtgagccaatgcacgcggcctgcttatttaaagctatgtggagaagcttctattttccctactgaattttacaacattagatttacccattgcttgattctgtccagaatatttgtacattgattctgtcatccaatatattaattatctttttaggcttcttgacatcttcagatctaatgaacttgcctcctctctttttgcccctctcatcaatagaagcaatgggcaggacacagctgaaggccgaaatcagtgcagtgtccatagggccttgtgccagcctgccagcaaagtggtgtcacagagccaattgtccagacacctagcaagccacctaattgtacttgcacctggatcatggttcctcttcttgattgcttataagtttcagattttatcgtaagtgttcaatgtctgtaacacctccctgatctgcagtttattgactgttaccaccaaggcttggaaatcagtgtgacatgactgagtgttaccaaacccacgctgacccccaagggcccaccacttccgttccagacgctcctgcacttgcttcataatgccctcaacaccctgctgagaaccaacagccaacattttacctcattcggaggcattatcttctttctctctgcaaatgggttttgagcttccttacaccagctctatgctcctggacttcacaggcaccattcgctggagtcaggcaaattcactgcaacattccctgaatatttttgaaatgctttttttaaaaaagagtagagaggtgccaaacaggaatcaagaaattctgctttctcttgtcttcagaacatgtgataaagctcagtcaatgagatatgccttcctggtgaaggagatactcaggggatgagacatgatgagtctctcatttggtgtcatgccatagtgtgcccgccctacagggtaccccgggtcctgtgagaggctaacattcaggtggggggtgacaatgagttactgagacagcaacaatcgacactttacttgaggcagctgaatattggaaaagaagcctcttaactgcaaaaccgaattgagtcaaatgacatttctaaagtgtgtcattagatgactttttcttagagcccctgaaactcctcctccaaagaacagtgtgtcctacagaagctctagaagtattcctctgcccacttgtttgggaaatatctaaattccaaagacaagaaaattacactttaagaatcagttgagctgaatgtattttacatgtgatttaatgacatcaaagtgagatctggtgagaatggtggtcatagggaccacgtgtgagataggaagtgctgaacctcaaagagacagtgtgagatgtgttgcaggtggctgctttgcaagggtaggttcactggttcaccaagaactggacacagggctcagcacatttccctgcatctctcatctgccactcgtagataacagggtgtcttattctcagttcattaaagaaggaacagaaatatctactaaaaaacttcttagtgtcttcacatcaacattttcttaatagaaaatctgcagcctgtttctccaaggagctggtgactgctgcctgagatctgagatgatagagcaagttgtgaacaggattctttacacgttgaggtgatacccacgccaatctgtcaccaaaacagtttccttaaaacaattcacacagtttttcctgtgaaaacagtggcttggggaaggccgaatcattttcaatgactgtggctggcatacaggtgaacctgacaaccaccgtttttatggagaatcctgattcttaaccacagtgacattaaatttgtcattatctagaattgtacattgtttatacctaacacgtgcaaaacaccatcctaagagacatggaatttatcaattttggttcattgacttattctgacatgagaataaatgaaaggaaattaaagtagtgtcttatgaacaggacggagtaggccagcttctcatagctctgccgggaacttcctgccctgtggcctgtgtatctggttccctctgggcctccttctctcagggaccccaccctctgggcccccctccctccgggactcctccctctgggaccaccctccctctggaccccctccctttgggacccctccttctgggacccccatccctctggaccccttctctctgggccccctcccaactccttctgccgacagggatccatcacacaggcgccccagtgctggccttctgttcaccaagagttactcactttctggggtgcatctcgtgatgactgctagcatggaaccgttatataattacttgtttacctggcagccttttgaagctcaagtacgcgttgagtcatcgctgcacttcagtgcctctcctccgtagacagttcataaacatttgttgaactgagttcaacttaaattcagaaaatactgtgtgtcacggtgcagttaaacaaatgcttaccttaaatgggggcccgttgggcatcgagtgcacggcgtgccgggccgtccctccctttttggcccccgctgctcttcccatcgtcatcaactcagcctccacgtgatggggaggtcactccctcccatccggtcccagccccactcacctgggaacccgtgccgctggccccaccttggcctagcatccgtccaaccctgcagcgaccgctccccacagcccctgctcccttgttctccagagccgcgcccctgctgcaggcctccccctcgctgtccccaagcccctgccttccacccacactgcccactccttcccaccgtccccgcctctgtccttatggagtcctcaaaagctcttcttgccccagaacctcccattacccctcagtgctcagcggcagatccttgctgtgactgtttatggcactaagtgtctgttccaacacatttgcgcggaagagtacgcaggtacttttaaattaactttattgaggctaatttatatgcaataaatgtcaccgattgaagggtacaattcaacaggtcttgacaagggcacccagccatgtgccacccccacaatcaggatagaggacatttctgccaccacaaaagccccttgtgtcgcccaaccccagccaatcccttcttcccgtcctgatgacaatccctgatttcattcctgccactgttattttgccttttctagaaatgttaggggtggaatggtgcagtgcatggtctcttctgcctggatttcttaccgagcgaaggttttgagtcacccccgttggagcatgcattagtcgcccgttccttttcatggttgagtagtatatgctgttgcatggatacacttcaactcgggtatctgctcaccagttcacagacatttgggtctttttcagtttgggacggttaagaataaacctgctgggaatgttccagtgttaatcctcccatgtctcttgggtagacatgtaggagtcggttgcaggttcccatggtggatgcatgttcagctgtgcaagaaaggaccccactgtctccttggagtggctgtgtgatcttgcagtcccaccaacaaagtgtgagagccccagatgcaccatgtcctctcccagcttccagccccctgtttaatcttagtccttccagtgggatctctgtgtgtgtgtctgtgtgtgtgtgtgtatgtgtgtgtgtgttttggacggagtctctctctgtcacccaggctggactgcagtggcgtaatctcagctcattgcaacctccgcctcccgggttcaactgattctcctgcctcagccccccaagtagctgggattacaggagcacgccatcacgcctggctaatttttgtatttttagtaaagatggggtttcaccatgttggccaggatggtctcgaactcctggacttaagtggtccgtctgcctcggcctcccaaattgctgggattacaggcctgagccactgttcccagccttcattgtggttttaatttgcattttcctcatgattaatggcattgagcgtcttttttgtgtgtgtatttgccatccatgtattttccttggtgaattgcctgttcacatttccccctgtttcttattgtttatgtttttgatagggagttgtaaaaattatttgtatattctggatataacctattatcagatataagctttaacatacttttttctattcaatatatatatgtttcactttcttgagtgtctttcaaagagcagaagttttacattttgtacaatcaagtacaatttatcaatttttttacagttcattctttttgcaatttatataagaagcttctttttccagggtcacaaagattttctcccatttttccttctagatgttttatgctttagctctcacatttagatttataactcatttgagttaccttttgcaaatggtgtgaggtaagcagtaaggatcgactttttgttcatgtcattccaggaccatttactgaagactgttcttttcccattgagttaccttggcacctaagttaaaaatcagtccgccatctatatgtggatctatgtctggcctctgttctgttccagtgatttatgtaactgtcctttcagaaatccaacaccgtcatggttagtgtagttccttgtcagctctgagactgggtagtgtgagtcctccattttttttttatctttttcaaaattgttttggctattttaatttccttgaatttctataaaaattttggaattgacttgtcaatttctcaaaaaaaaaaccctaccataattttgatttagtttatgttgtatctacagatcgatttggggagaaattatatcttgaaattgaatctttgataaatttgaacatgaaatgtcattgaaaattgaacatgataaatttctccattaatttaggtcttatttaatttttgccaacaatgttttgtagtttttagcatataaatctcacataaattttgttagagctatccataagtattttacattttatgatacaattgtatatataattattgatactattatatatgatatatgtgtgtatatatatatatatatatatatatatatatatatatagttttaacatccaaatggtaattccaattggtgtattttattttacatattgtatatttcacctcccatgccctccacccctgccatgctctgcagcttagaaagagtgtgtatcatttctcactgtatttgttctcctcctgccaggatccataatcctgtgatgcctagtgccgaggtctgaaaatggttgttacattttgtaggtttttctagttgtttaatgcagcagggtgcctttggtctctgttgatccaccgtggctggaagctgaagtttagcagtggtgttctgattgctgtgcttcttctgattgatacgattacctcgtcacatgcttttgcaacacaggggtctataccacgcttcttctgcatactctaaagcactcaactgtatacctgctgggattacaaaagtgcagaggtgactccataccttcctccagctttttaggcccaaagcagtgactgaggggcagtgaagaaccgatctctaagttgtgactccaggcatcagggaaggaatggggtggagtaaataatgaaatgagaatcaaaattatgtaagaaataggtttggaaaataattcagggtgaactttgtgttacatgggcttcctctccaaaaggtcagtatccacgtggactcgtaagtgaggactgatatgacacagtgtgggggcgaggagggcagttccactttctctgcctgtgcacctggggctgcacttccctagctgctcccgcttggcatggccaggcccacgtggtgcgagagcagggaaaagaggaggaagatgggcgattggctgggaagcacatccaacgtcaatatcagagcgtttcaggccatggattttactgggggacgtccagggcgtgttaataaacaggatgatggacaatgctggaaagaaggagtgagcctgagaatagcgaagggtttttctttctttttaagtttgcttcagatggtggatttcaaagcccttcgtcctcaggcgctccacaaccgctccagctcttcccggtctcctgctaaacttcttcagcctggacccatgcaccgccactgctggcgttcccagcacacggtatactccattgtttcctgacaatccagttgattcggccaggctggttgctcagctgtttcacaaacatacagggctcatgactcaggactgctcttcagcctgagacgagctggtcacctgaaggagatggcggttctctgtcaatcattggcccatagcctcaccattctccaagaaccctgatcagagcctcctcctccaggaagtctttcctaactgtgccagcctccacctttcctctggcatttggatttctgatgattaggatgcctctgccacagcagattcatgcttgtgacctggaatgtctactggaaaggtctgcggctgtggagaagcaggtgcattcctctccagcgccttcccaggctggagcagcttgttcagtgtgtcttgagaacagcactcatagtcaaactttaaattctactggagattctcacatgcccacaggggtgatcatcactgacatatattgtgaacgatttaaagcccgggactatgaattatacattttctatgcgctttcacacttctatagattttgttcagtaaaatcttgttgaatgtttttaaattttgcgtaaagatttttgtgcagatcaaaacttgtggatttctgagagcaccttatttaaccaatagatcaagggttggcaaattatagcctctagccaacggaccccggcgaggcctgttcagttatgtaattgtagatgctttcaagctccaaaggcagatttgaggagctgtgacagagaccatatggcctgaaaagccctaaaatatttactatctggccctttacagaaagaggttgctgatgcctattctcaatgaatatttgtatgtaaaatagtgtgctgtgcactctgttcacacgagatggaatgctggtaacttaactgtctggctctccaggaatacctgtgttaactgtagtgcattttgccttctttccttcttagagtcacctctactttcctgctaccgctgcctgtgagctgaaggggctgaaccatacactcctttttctacaaccagcttgcattttttctgcccacaatgagcggggtaagatttttatttttggcaaggggtataatttgggttcactgtggctacttgaacactacactgcagctaactctatctttgtttcctttccaggaatcaatgaatttcagcgatgttttcgactccagtgaagattattttgtgtcagtcaatacttcatattactcagttgattctgagatgttactgtgctccttgcaggaggtcaggcagttctccaggctatttgtaccgattgcctactccttgatctgtgtctttggcctcctggggaatattctggtggtgatcacctttgctttttataagaaggccaggtctatgacagacgtctatctcttgaacatggccattgcagacatcctctttgttcttactctcccattctgggcagtgagtcatgccaccggtgcgtgggttttcagcaatgccacgtgcaagttgctaaaaggcatctatgccatcaactttaactgcgggatgctgctcctgacttgcattagcatggaccggtacatcgccattgtacaggcgactaagtcattccggctccgatccagaacactaccgcgcagcaaaatcatctgccttgttgtgtgggggctgtcagtcatcatctccagctcaacttttgtcttcaaccaaaaatacaacacccaaggcagcgatgtctgtgaacccaagtaccagactgtctcggagcccatcaggtggaagctgctgatgttggggcttgagctactctttggtttctttatccctttgatgttcatgatattttgttacacgttcattgtcaaaaccttggtgcaagctcagaattctaaaaggcacaaagccatccgtgtaatcatagctgtggtgcttgtgtttctggcttgtcagattcctcataacatggtcctgcttgtgacggctgcaaatttgggtaaaatgaaccgatcctgccagagcgaaaagctaattggctatacgaaaactgtcacagaagtcctggctttcctgcactgctgcctgaaccctgtgctctacgcttttattgggcagaagttcagaaactactttctgaagatcttgaaggacctgtggtgtgtgagaaggaagtacaagtcctcaggcttctcctgtgccgggaggtactcagaaaacatttctcggcagaccagtgagaccgcagataacgacaatgcgtcgtccttcactatgtgatagaaagctgagtctccctaaggcatgtgtgaaacatactcatagatgttatgcaaaaaaaagtctatggccaggtatgcatggaaaatgtgggaattaagcaaaatcaagcaagcctctctcctgcgggacttaacgtgctcatgggctgtgtgatctcttcagggtggggtggtctctgataggtagcattttccagcactttgcaaggaatgttttgtagctctagggtatatatccgcctggcatttcacaaaacagcctttgggaaatgctgaattaaagtgaattgttgacaaatgtaaacattttcagaaatattcatgaagcggtcacagatcacagtgtcttttggttacagcacaaaatgatggcagtggtttgaaaaactaaaacagaaaaaaaaatggaagccaacacatcactcattttaggcaaatgtttaaacatttttatctatcagaatgtttattgttgctggttataagcagcaggattggccggctagtgtttcctctcatttccctttgatacagtcaacaagcctgaccctgtaaaatggaggtggaaagacaagctcaagtgttcacaacctggaagtgcttcgggaagaaggggacaatggcagaacaggtgttggtgacaattgtcaccaattggataaagcagctcaggttgtagtgggccattaggaaactgtcggtttgctttgatttccctgggagctgttctctgtcgtgagtgtctcttgtctaaacgtccattaagctgagagtgctatgaagacaggatctagaataatcttgctcacagctgtgctctgagtgcctagcggagttccagcaaacaaaatggactcaagagagatttgattaatgaatcgtaatgaagttggggtttattgtacagtttaaaatgttagatgtttttaattttttaaataaatggaatactttttttttttttttaaagaaagcaactttactgagacaatgtagaaagaagttttgttccgtttctttaatgtggttgaagagcaatgtgtggctgaagacttttgttatgaggagctgcagattagctaggggacagctggaattatgctggcttctgataattattttaaaggggtctgaaatttgtgatggaatcagattttaacagctctcttcaatgacatagaaagttcatggaactcatgtttttaaagggctatgtaaatatatgaacattagaaaaatagcaacttgtgttacaaaaatacaaacacatgttaggaaggtactgtcatgggctaggcatggtggctcacacctgtaatcccagcattttgggaagctaagatgggtggatcacttgaggtcaggagtttgagaccagcctggccaacatggcgaaacccctctctactaaaaatacaaaaatttgccaggcgtggtggcgggtgcctgtaatcccagctacttgggaggctgaggcaagagaatcgcttgaacccaggaggcagaggttgcagtgagccgagatcgtgccattgcactccagcctgggtgacaaagcgagactccatctcaaaaaaaaaaaaaaaaaaaaaggaaagaactgtcatgtaaacataccaacatgtttaaacctgacaatggtgttatttgaaactttatattgttcttgtaagctttaactatatctctctttaaaatgcaaaataatgtcttaagattcaaagtctgtatttttaaagcatggctttggctttgcaaaataaaaaatgtgttttgtacatgaa

SEQ ID NO: 405 - DNA, 32744 bp, Homo sapiens
  source 1..32744: mol_type = other DNA
gggctgcgccgggttccgtgtgtctatgtcaatgtgtctgtccttcactcctccattgtctgccgccactgctgctgctgctgctgctgccgctgctgctgcacgaatcgccgcagcccccagccttgcgcgtcgtcgctacctcctcggacaggtgagaagcagcccaggtgaggcaaggggcgccgtgagggttgcgagagtagcgactgccgccccgccggggtttccatcgggcaggagctggcggggaggaagcatgtgcctcctggggcggcttcctgcctcgcggtggagaagcccccgctccacctcatcatcacggcgcgtacggggtatcagtgccctgggatgaagacctccgactcgcaacgtttggccgcctcgggagaccctgggaccgcgggcgggcgggcgggggccagccacgcggtgggaagtggcgggtgcacatggtctcgtgcgtggcaccgccagatgcggctcccggggaggctggggccggggctctgggctaggtaggggtcgcaaggacagcgccccattactagcgagtcagtgagaacagactcgggagaaggtagtttttacgctggtgatcctcgccctccccactacttgtcatctctttggcctctgtggaagctgtagaagaaaacctgatcgcccaatgttgcttgttaaagatgtttggaaacaatttacacttgcactaatacttcgtttatgagagacagcctgtgggagggggaaggaagggcttctttgctctgctagagttctcggttctctttgtaactcagatcttgagatttatggaaatagggagtggagggtggggaggttggagagggcggagattaaattggtgttgctgcctatatatagccttagattagcctcttaatccaaccttcattcaactgtaatatgtagcctggagcttcgaccataggtagatgggggtaaatacaagtgtgtatttcagaataagatttgcttgctaaaatgcgggaatcagtcatttctccagggtgcagatttatatttacatcatcaatgaaagtttctttggaaattagtgtttatgttttactgttgtttccctacagagtagtattgatgtttctctcaatatgtgtgtcaaagagacgtgtatgtgtcaaagagaaatatttgagtaattatgtaggtggtttttgttaagcatccccaggaccactgtttcttctcatagcgccatacgaaaagcgaaatgcattttcctctggccttaggcatttattttgcgtgaagctttcactaacatctgaaatctcctggaatatgtttatcattatttcctgcctttagcaaaaatctttcctaaactccagctgtttttcccccctaaagcttcagcattaaagactgggacagatctgagccagaacatcttacatgaaaatggtttgaaattattcatctcagtgtataacaaagatacttttgttggatgatgctttaataatgatgtggctgttcaagcaagtagtaaggctcctgagagtgaccaatcttttgtaatgctgttagttcagagttacaattgatttataacatagtatcatgcggaagaaacccacaaacctaaaaaaacagttgagtggtaacctcctggaacatgtgatttagcatcttaccagcagatgcatacacataattgggtacttcattgctagtatttccatctcttgtgccaaatctgggccatggttacttgaaggtcacacctgtttgtctcactggggttgtcagttcctcgaggatagcagcttactatctattttcttgatgccttatgacacttggttggtatttagtgctctctgaatacatgaccagtgaatttagagacaataacgttgaaagagaatctaacatctacctagaaatgcaaataaatcatgttcagtttacatttctagaaacagattcataatgggtactgttcattagatggattgattacattagtagttttgtatggtgtaaatatttaatgtagggataagattagataatgagcatattaaaacagattcacatcaaagaagttttattgataataagatagctacttcatattgagtatttagtctgtgctagatattctaccagatgctttgcatagaattattctagtgttatgacaacccaggaatgagccaatattatacccactttgcaaataagaggacagaaagtaagggaaataatttgcccacaatcccatattaggaagtgtcaagtcagaattggaataatgatttctgaaatgtttgaaatgttgtatgtgtcctctcatatctaccactctagagctattgcaatgcatcttaagtagcctgcttctctctcacctgtctccatctagctaattcagggaactaccagttcaataaacattgagcacccatcattctttgaatggctctctgctggccacagaatagagggctgggtctggcctggaaggttccaatccatccatggtctcagcaggcatttccagtcatctgggccctcccacacactgggctctaaggtcaccactctgcttgttccccaacctgccggtaatttccacccctttgttcctgcttttctcctcctctgaatgatttcccttcccttttcactgaatctcctctccagatctgatgaactattcaactttccagacacaatttaaacaaaacctcttttcttcagcttttgtgttcatctctccctctctatccagtaagggaaatatacatgctagtaaatacatttattcatgtctcttggcaagggttataagtaaaatctttgtacatggaggatattgatatgcaacatggctactggtatcattgctggcagcctttaattctctcttcttatggattctagcgacccctcttttaccgcccccctaaattgacatcattgcttcttcatctgaatctccatgaaaatacctaaaacaagcactttctcatcgcattctattatagttattattaatctgtttggtcccttctcattctacagtatacattaactaggtcaaatttatctttgtttctcaggtttaacccagtgtcttgcacctagtgtatgctcagtacaagctgagttgaattcagtttgatttctaagttattttaggtggatttgttttcctacttgactaatccttcctggcaatgtgaggtgaggtggcactaagcacgcacaatcataaccagaggcagaaagtctttaaatgttttggatctcaagcttcttgacattctgatgaatgctatcaaccaagaaaaattgttcttgtgcacatgttacaaatttggcatgccattcttagatttccccattaaagaccctgatttccagctctctacattaggagaatgctgcctttttgttgcatttttgagtattacatctttcagggtactgtttgtcttgacatttgactttttttccttagacttaggtatctttattgactggatatttgataataagaaattttgatttttttaagttggaagtagattacggttatatttttaaaagattacttatcttttagagataggaacagaattatttcagaactggatgagaagacagctgagatttgctttaatataattctgtgacagaaaggaagagagactgaatgagaatataaatgagataaaattgactatgttaacagttgaagatgggtgatgagtatattcacttgattatactgttctctctacttttggatatatttgagattttccataatgaagtttttaaaaagaaaatttggaagtattacagcctctaagaaatcttttttttttaaacacaacataagaaagtaatataaatacaaatgttcttttttctatacttggagtttcgcttatgtgattattcatttaagtgttaaaacagttacacctaaatctgcaaagaactgtcttgtgaacaatgcgtttccataaacatttgacatcacattttaacttctccaaaaagtaaaaggttggtggcattactcagtgcttgtagaacaaattgatgaatatcttactggtagttaatcttcatcttttttgaaaagaaaattctgaagaaggggtacagatacatttagtttaactgagaaaatcaagaggtgaatgaagtggagatactgatgttcttctgtgcgtcataatccaactcagaaggcattccaaaaaaaaagagtaccaaaactgtttcgagcaatgtcagcactgataggataagtattagtctaggaaaatcaggagcaggcccaggacagggtgtgactggtaggttcttactcagtgtttgcttagctgaatacttaatctgacacctactttctaatttgtgcaattttttaaactgattttttgatctttacaattttttattgtgttttagatatattaaatgtcctttataacatgtcatcctagactttgggattttacaagaatatttaattaatatgaaatccaccaatcttagcaggtcataaacaagaatacttttcattcttaactcactcatttctgtgtattgaggccatggcgctctttagcaagtatcttttgggcagttaggtgccgagtggaatgatttgccccgttctaaatttggcgtgtattaagtgaagagtgccaaaattgttcaggtagtcatatttgtaaactatctattttgaaaataaagatttgaataactcattgaatgaaccattctttaaggttaaatgccaaaaagataatgttctcattattctttcttgatttttagcaataggtgtttccattgatgttttttaagtttattcaaaaattaaaggaaaaaagtataatgacaaaaagaaagaataatgccctgtattaatatttaagatagtataatcctttggctatctttaattccattctgaaaatattaatattttagtaggaaaacaataacttaagatgtagaattattttttgtgtcagatgtagcattatattttctttttacatctcaacttatttttatgctagatgagaactttaaaaaatataacaggtgtactgttatttttgaggacttctaaataaatctcaagaaaagccctggggcagagatgaataataagggataataacgtttagcactgtagagaatatatcataagctactattggatgatattctactgtcatcctttttatatatccacacagaagactttaatggttttcaaactaacctggatttatggtcatttctaagaagaaaaaagaaatgttatatgtttttctcagtgaacaaggtaattgaatgggactattataaacaggaaagagaacccctagttgtcggtgcagaggaaactgctggctggaggaaaaggatgcggtgttagtatttgggagtgtgaagattgtgtttgtgttagagttgagcttctgcaggaaacaatttaaaaactgtatcctatagtgctagaaattatggtgccataaattttctaatattcgtatgtccctaagaggcaatattgttaaattctctctctaaagataaatgccttttcccccccaccgcttaatagaactctatggagaactctttggtattttggaagtaacatatgctaattcaatttatccaagtgctgaactcaactttaaattaatatttatgcgctactccatcttattccaaactataaaatttatgaggcaaataatgaaaaagctgtcttcgagaatcatataaataattctctaagacattgcaacagctttagttggctccttggaaaatgcactgagtggagacagtggatcaggttctggccccaactcttccatgtacataagctccagatgggcagggatcgttctgctttgatctccactgtcttaccaatgctagaatggaattcctgacctcagccaagtggtttgacatctcagtgccttatctgaaggttagcttagggactgggcttacatccatggttttcaaagtattccattccgcgtggatgccacttgtaagttacaaagtaaaaaaacacgcacttaattattaaaacgttaataaacacaactgcatctcgaatgcatcatatgttgtctttaaacatactggagacaatcagtgcttgctaacttgttctgcccgattgtgcaatacttggaacaaagctccacctgctagaaagtgacctccatgaaatttgcctgatttagtgcttgctgcatccctattgactagtaccagacctggtatatttggcaaacaaataaatgaatgattctctgtaggtttaaacctttttcttttgagacggagtttcgctgttgttgcccagtctggagtgcgatggtgtgatctcggctgactggctgactgtaacctctgtctcctgggttcaagtgattctcctgcctcagcctaccgagtagctgggattacaggcgcctgccaccatgcctggctaatttttgtatttttagtacagacggggtttcaccatgttggccaggctggtttcgaacacctgacctcaggtgattcgcccgccttggcttcccaaagtgctgggattacaggcatgagccaccatacctggcttaaacctttttaaaatgtatgattcagagagcttgtagctctgtactagttcttttttatttcctttaattcaattttgtatggtccacttctgtaaagttgtgttggggaatccagtcccatgtcatcagcgtgccctagactaggcttggcatttctatccagttcatgctctcattatgtaataagcatgcatatggaaagtaactttgtgtgtgtgtgtgtgtgtgtgtagcccttcaaataaagcttcacctgctagacaggcttgggcaggtccccttctgggaggatgggagtttcttggttgagagaactagtaagtgagccaatatttggactcatgcccaccaccacctttgagcttcctgaaggtccactattacgatttttaagcaattgctccaaaacagaattctctcactgtctaccagtctaggccttacttttctttttatttcttttttttctgaagattttattttcctcttttccatgattaaaaatcctctgaagagaggcaaacacttcaacactcttttactttaataacttgtcttctgacttcccactggagtaatagtcaccaacactcccatcagttttgtgtctgtcttaaactaacttgctctctggcattgccactccacttcttgctgattttcatctcctggttctcctcacctcagttagcaaggccagtgttgtgtgtgctgtccatagctcctttcctctaggtggaaagtaaatctcatataaaatcatctttctcctctactatgtaaagctcaacatgtatttaggtatcttccagtgaaaaagcacttttctggaggaaggaacattggagatgagaatactcattaataataaatattacttttgtcttcagtggaggtgaaaatctcgaatgcataggcattttctaaaaggttacataggatgatgttaaagggtttaaattattatcatctccatggagtggggctaggatataaggtcaagagtgaaagattgggaagagcactacccttctgtactgtgttggggttttttgtttgtttgattttgttttgtttttgccatcagtgtgttattactttaaagttttaaatcactagttaaaataatatagagactggctgggcatggtgactcatgcctgtaatcccatcgctttgggtggccaaggtgggcagatcacttgaggccaggagttcgagaccagcctggccaacatggcaaaaccccatctctacaaaaaaaaaaaaaaaaaaaaaaaaaaaatacaaaaattaattacttgggagactgaggcacgagaatccaagggaggcagagtttgcagtgagctgagattgtgccactacactccagcctgggtgacagagtaagactctgtctcaaaaagtaataataataatatagagaccatcttgcttttttctaagcttaaaattataatattattaacaaatttcaaggacatttccttctctataagagtttctgcttttcctaaagtgatgcaatggaacagatgacttttaaaataaagattcagagaatatcactgaatcaagttatataactccaagtccaaatgcaaatcatttttaaattgtattttagcataatatgagaaaagatggtagaatttaattttaatttttttctgtatataaccccccccccccaaaaaaaaacggatgatatttatttatttatgagacggagtcttgctctgtcagccaggctgtgatacagtggcatgatcttggctcactgcaacctctgcctccagggttcaagtgattctcatgcctcagcctcccaagtagctggggttacaggcgtgcaacaccatgcctggctaattgttttttttttttttagtggatacacggtttcaccatgttgcccaggcttgtctcaaactcctgacctcaggtgatccgcctgcctcagcctcccaaagtgctgggattacaggcataagccaccgtgcccagcctgtatactatactgtgtttaagtgtgaacagtggtcattactgaaagttagactgatagattttttctaatttttccttaaatattctataatatacatgatgagctgaccttataatcagtgatttttaaaggttacctctcactttcaaataaagatgctgttgtttctcagcttaatcacctacttttttgcttctgttcagtattttgtcataaaaacctggttggacacaccagatagcttcaaagtggccacctacttttttcaatggattagactctgaatgatctctggcgactttctaaaattaaatcctctatcaaacaaggaaatttctcatcattgagtatagtcaaaagaatgatctgtagactccagaggaaattctaaaaaaagtttcataaatctattaattaaaaggggttttgtttaatggaagcattattagttcatagtttttctttattgaaggaagaaattactttgatgggtaaatgctggaaaatgtttttttaaattacttaagttactatgtaacatttttgtttttaactgacatatagtaatttttcatatgtggggtacagtgtggtgtttccatatacatatacattgtgtaataattaaatcagggtgattagcatattcattacattgaacactcatcatttctttctggtaagaacaatcaaaatcctttcttctagctcttttgtagtatatgatacattattgttaactataataactctattgtgcaatagaacactagagcttattcttcctaactgtaactctgtacctgttcaccaatctttccccatccccacctcactcctattctcctgtctccaggaaactactattctactctctacttctgtgataccaacttttttagattctacatgagtgagatcatatgatatttgcctcccaaagtgctgggattacagatcggagccaccatgccatgccctaaaatacatatggcttcctgtgtttgccattgctccagggttctatgtgtacataatcagttttatttcttaatcatttgagagtaggttgcatacactttctgcctttatctcttatttcttcagtatttattctgtaaaaataagatacttttcttacagaaccacagtgcaaaaaaaaattcagtaaattttaacatagataccataattttatctttatactccaacttcttaggttgtctcaatagtcatatatatgtgtgtgtgtgtgtatgtatatatacatatatatgtgtgtatatatataaatgactatatatatatatacataaatattttttcccagtacagcattcagtccaggaatgtgtattgcatttagcaatgcacctttaattctcctggaacagttcttcaacctttgttttggaaagacgttatcattgatgaagaatacagaccagttactttggagaatgtccctagatatacatctgtttcctcatgattagctattcaggtcatgtgtttttgtctggggtaccacatgagcaatatgtccttctaagtgtaaaacatctggagttgtagtgattgtatgttgtcctttggttaaggtatggtcttgtttttccaatatgtagttatatttttaaaaaaatttatgtgaagatgcttggaggctatgtaagtatcctgttgatcatcaagcactccccagcgcgcgcgcgcacacacacacacacacacacacacacacacacacacacacaagtaggtttagcatacattgattactcttgcatgaatcagttttttatttaattgttgcaaaatggtgattttctaattcaatgtttcattctctgtttattagttgacattctactgaaggaaaatctttcacttacttccctttccttgtgtactgaaaaatttgttttctttaaaatgaagctaaaagttatgagcatggacctatgggtttgtatttttttgaatgggttattagctattatccttagttatttgggtcctcaaattgccctgggctaggccagtggaattgtcctcaagatggctcttatgttgttttgatctagcttgatttttttttagacacttttgaatttgccaacacaagacatcccaggatcatagtgaatctcccctgctccagccttggagtcagccatttatccaagaaactttggtttctctcagtagggaatgatagttagatcctgtggcacatatctttttatgcaaaaatgttattattgctcgtgactctttgagaattggtttgaacttcaaaagaggttaaaacgttttcacttaagtatatacaattttctaattatagaaaggatatgcatttattttacagaaaatatagacaagtataggtaagaagaataagaggtgccttgaacccactactcatgttgaccaccattggacgtaaatgtattttacatagccaagatcacatcatgtatatagaatattgcattttgctgtatctacatagcatgtcattgttttctcaaagtcatagaaattaacatttttaagtcacacattgtatattaaaatttctcttttctttcttgtttttgtttccattgatgcaatatcctaaagtagaaaaagtttgtctgctggtgttgagcttctttttctgctctctttaaaacccatattcttgcctatcctctgcccttccactaaattgcataagatgtaaaattaccaatttcagaaataaattgttagtatcagagactgggaaacatgtattttgtacattctaactgtacttttggtttgagatatgactatctagtgataaacttttttttttctaaaatttgacaccagtatttggcaaatacgagtaagtagttcaataaaatatgtgcttagttgccactggtatgttcagatctgggtgcaaaattttcagcccttgagagcagggaccacctctggctttgctcaccattgtttcctctctacagtagggtttctcaacctcagcacttcactgacatttcagacctaagggtcttaacgtatcgagagcagaagttttagggcattttgttaaagtaccctgaaacattatatttgagggacgggttttctaaaagccaaagtatgctacaatgtgggtagtgtatatgtgtttgtgtcttcagagtgttgaaagacctaagaatgacatcagtaaaattagaccatctggaagattgaatgagctggctagcccttgggggaagggcagggcctgggagataacccatctggggaaagtgcaagggcccagaggaaggaatgcacatgccttaagggacctcttagaaaagtagaattgcagtaactagagaccaggaagtgattcctagaatgaaaggattttaggaattaatttatacttcttaaaagtttttgaaaatagcttcactgagataaagtaagtgacattgtgtagttgccttaatttgtttctacatggatatttaaaatgtaatttttgtaatatttttatttttatttaaaaggaaattttaaaaacaagcattcaagcatttacaacttaggtcttctaattagtttaaggtgtaaagtagttttggaagtattataataaaatgaaaactttctcatggtgcctttatgttttctgaaaggagatttgcattaacagctctaagggaaaaataaggtcaaatgctcttttttctaatataaaaatattgctgtcggccaggcgcagtggcttatgcctgtaatcccagcactttgggaggccggggtgggcagatcatgaggtcaggagattgagatcagcctgtccaacatagtgaaaccccgtctgtactaaaaatacaaaaattagccgggcatggtggcgtgcaactgtaatcccagctacttgggaggctgaggcaggagaatcacttgaacccaggaggtggaggttgtagtgagccaagatcgcaccactgcactccagcctgggcaacagagcaagaatccgtctcagaaaaatgtatatatatatatatatttatatgttgctgtcatttccctattcctttcattcttatcctgaataatataaaagaataaaaataacttaaaaaaaaaaagcattaaacaggatcaggtgaggaatcccagcaatttgggaggctgaggcaggaggactgcttgagctcaagagttcgagaccagcctgggcaacatggcgaaactcttaaaaactaaaaaaaaacaataaaaaaagtatattctcctcaaaaatgtatatattttccagtgaagaactttaatggtggactctttacttgtgccaactatctaccttataaagagttattaaagcccaaataactcgtgtcatgttttgaattttaattttttttcaattattataaatactacaactttcatagtatttgttagtaattaagctttttgtactggctgagtgattttgagtaggcagaggctgttacaaaatcatgataaggatattaaacaagctaatgttatttcaggcaacaaattgtatagtgttattataggcatatagttagtttgttgcttagagtgtcaataatttaaacttttagaaccaacttaattattttttgtttctttggagagaatgataatacaatgttatcaacccaaaagattcctagattcctttattttctgtaaaggattttatgttacttgttcttttaattttagcattaatggaaaggaaaatgttgtatagttatgggtaatttttaaagtttattttaatagtagataattttactcatttaaaatatagaataaaaggtaattcttgaaacttgttattaaatacaaagtacttcatgagaacactgcagtgaagtgtctcaattttattgagttttgtgtgttgttattatatctttatgaaacgttttatactttgggaatgatattgttgccctataatttttgtttttatttttttatttttttttttattatactttaagttctagggtacatgtgcacaacgtgcaggtttgttacatatgtatacaggtgccatgttggtgtgctgcacccattaactcgtcattaacattaggtatatctcccaatgctatcccttccccctcccccaccccacaacaggccccttcctgtgtccacgtgttctcattgttcagttcccacctatgagtgagaacatgcggtgtttggttttttgtccttcagatagtttgctgagaatgatggtttccagcttcatccatgtccctacaaaggacatgaactcatccttttttatgttgttgccctataatttttagactccaaagtcttttttccaccttgggcaacatggggaaaccctgtctctatcaaaatatataaaaaattagccgggcctggtagtgtgcctgtagtcctagctacttgggaggatcttttgagcccacgtggtcggggctgcagtgagcagatatcacacccctgcattttagcctgggtgacagagcgagactccatatttaaaaaaaaaaaaaaaaaggtctttttttcctaaagtcttaaacagtattgactgcacacagagtgttactttggaatgtggtaatttttcttttttcctcactctagccacctggctttgaaatttgtgcagactactcttcgagctactttatttgaaaaatattaattaaaaatttctattctttagatgtatttttatctttgtatcaaatttaagtgttttgggacataagaattgcacagcctaacataagtaaccattagccacactgtttaaatttagttaatggaaataaaataaaattaaacatttatttgtctagtcactagccgcatttcaagggatcagtagtggctactatattagatagtgctgatagagaacgtttccatcatcacagacacttctattggatacaatgcgctagaataggagttcacaaaggacctcctgggggtccaatctggtccaccacttgttgtgttaatatgaagttttactggaatacagccatgaccatttgtctgcatattgtccatggctgctttcacactgtaacagcagaattgagtggttggaacagaaaccttatatccctcagagagagtaaaatatttttcttttatttctttacaaaaaatgttgtgttccctgctttagagtatatatgctcataaagttgtttgaataacatatgcatagcacatgttagtaatatagcatgttacgtaaggcaggttatcatagttcaaagatgagtcataccagagcagtcaaaaatagaatctaagaccaaagtgctggataattagacaggagcagtcattcccttgtagggacaactagaaggtaagtcctctggtagatcagtttctttccaaaatggagagaactaaagaagagtcccaggtaagactgatcagtctacatcgaaggtgctaatccacttaaggtgggctgggtaactggaaggattagtgcacagttgctatgagatgcatctgtgccagtgtggctcattgtcacacctgggcccagagtctcattgcaagttaagggaccgaatttgaaaaagatgctaggacagttagaagattaacagactgaggtaggtaacagaaataaatgtaataggttagacctaaaaacctttcaatttacacttaaaataggaatttatgcaaaagtgttcgattcattaatatagtatcaagtttctaaatatttgattgattggatcattttagtattcttatcgccttcttttaccttgtggagtatccaagaaatgtagtctcttaggtgacatgtgaaatacttaagtccattttgtttaccatttcacatacaattttaatattattttaaaccatggaactgttccattttggtagaatatgtgtgtattttgtgtgtggcttatagtttttaaaacagaagccaaattgtcatgatgcataggttgtaccaccatggggatttgtctctgaggatactgttaaacttttatttttttaaacttaagtatttttagttattagatttgaaaatacattgtagggcagtgtactaacagcctttgacattggcctaatagaactgtctttgttatcttcctaggttgaagcgagcagtttcttattcaaagtgtccttgcttctcttaggccagggcttttataagggcttagtgagtaccttataaaggctgacccttactggagcagattatagtgtagcatgaagagctaaatttagagggaagtggggcctctgctccaaatagtaacagctaaaggatagacactcttggagagcagaatatctttatttagtctgtcaccaccagtgggtgagtttttgtttgtttgtgttaattttgggtgttataccaaagtctttgcatacatttttatgtttacatgttatcatgtgtttctccacatggaatgtatcgagggtatgaaaagtaagcccacatacctgggttataaagaaacaaacttttatgcttagaaaggaagtaagtataaaagctaaacatttgaaaatagagtaattctttcatatgctgtgtttggtggtacttctccattaacagaaaaaagaaaaacaaggtgcaaagagttaattagggaattccatgagtttgtgttctaaaccccaaaacaaaacttttaggaaggactcacactttagaatttttgaaattacaaattaaaaaccatttttagcctggcacagtggtgtgcgcctgtaatcctagttactcaagaggctgagatgagagaattgcttgagtccaggagtttgaagtcaccctggtcaacatagtaacaccctcatctctaaggaggtagagagagagaaaaaaggaaggaaggaaggagagagaaagaaaaagaaaggacggaaagaaagaagaaaaacatctttggcagagaagtctgctggagagatttctgtccagttgagctacattctttttgcatcttggtacaagacccaacacccaaattcttgacacatatttttctttgctaacacaaatatattttgtataatatttgtgtttgggagatatggagacaataatatgtatatcatcatcacttttgcaacaataaagtattggctgattcagagtgaatctgtttataatgccagcaggaaagtttctgaatgaaacttttgcagtgaatataaatgatgcattagaagctctattttcaacatccatcaaatgaaatgggaattcattgattaagtttatagcatttgtaatgatttcgatatgttgctgttgcccccatacacataagcaatcaattactttattcttacactggtctgtgtttctactgtttgaactattacattgtgttgcaaatgtttgaattttatccttcctagtgagtttctcgagggcatggattctggcttaataacctttgtatccccaagcgtgatgtattaagttcattttactttatagggttggcaaaaattatttctcaagccatgtaattactttttttgttttatgtgacttttgattagtttctcttctaaaataatgattaacttgacgttttcaataataaacagattttttattatgtgaagctacaagtttctcttttatgtgtaagaaggaaaatttggtacataaataattttttcatgttcttaaggattttttaaaaaaaacttttgggagtaattaaattacttgaataatgtaaattttttattgtttgatggtataagtaattaaggaaatctagacatttccaagtgaatatctaaaagctttggaaggtaattaaataatttgcttgaataatgcatgttatattgaatgtttggacttcataattgaagcaatctagacatattttcagtttataatatttaagtcagcaagcatattctcagtttttaagaagtcttgtggagcaggccttacattttttcaaagataatatattgcaatttttaaattgtgtattaaatccagtaaaatagtataaagtactcaaatccctgtccattaaggtaaaccaaaaagataaaaaatctattaacagtttcttgtagccttcttaaattgttattgcatagaaaaccatatattctatacaccctccttttaaccaagtactttacattcttttattcagcttgcttttttccactatcaatatcccttgagcatctttccataacagtccagcaacttatttgaaaagtatttattatatgtttatactttgctcaatataaaagatacagaatggaggagctaaaggagctctatggaataaaaacctacaaggttcctgtcctagtggaggttacactcatggagggtatagaccccagacaaagagataataataaaatggcaggcactgctaaagaaaaacaaagccaagtaaggagagctagtgacaacaggccactttggtggagatggtcagagaagacctccattttcagggaggcatttgaatgattgcaaggagatagccatgtggacagctggggacgatctttcctgaaagagaggcaggaacagagcctcagaagccagaccttatctggcctattggaagaacaacaaagagatcaatgtgactggaactcaatgagcgatgagacgagatgtgtattgaacatacatataccgtcagaaaggtagccaggatcagaaatgtggtacagttagatctaattcttgctttcataaagcttcgtggtgttccacttggtgcctaaattataacttatttgaggacatttcatgttccattttttatgtatacaacaatgctgcaactaaatccttttacatatacaagtatatttgcattcttgtgtgaatatagctacaggataaattcctggtagagtactgctggaccaaggttatgcccatgtaaatgtttatagtaaatactcaccaaaattttcctcaaagtatttcatggagtttaacctttacatcaaagttggtgtctgtggttgtttttcctatgtcctttgccaacactgagtattagtaaactttaaaatttttgctagtccaagttaaaattagatctcatttttaaaagtgtatttatgccgggcgccgtggctcacgcctgtaatcccaacagtttgtgaggccaaggtgggtggatcacaaggtctggagttcaagacctggccaccatggtgaaaccccgtctctactaaaaatacaaaaattagctgggcgtggtggctcacgcttgtagtcccagctactcaggaggctgaggcaggataatcacttgaacccgggatgcagaggttgcagtgagctgagatcacaccactgcactcccacctgggcgacagcgagactctgtctcaattgaaaaaaaaaaagaggcatattcagtaatgagtgaggttgaacatatgttcaaccaaacttattggccatatgttttccatataaactgcttatctgaaatacataatctttattttctttgttttcagaaattttatgaataagcatcagaagccagtgctaacaggccagcggttcaaaactcggaaaaggggtaggttgtgtgtgtgtgtgtgtgtgtgtttaaagttgtaaccaaaatataagattggagaagaatctgaatgatccctgtttcccccagcctcactgattctactcatttgagctctgagtgtagaatctgaagtgctttagtgaaaccatagaactgccagttacttgttggacaagttatttaatttgcctgtgctacttgttttcatctacagaatgggatagatatctctgttcaggttgtcttaggaggttatgaaggcaattgataaattttactggttttgacattagcattgtatttggtttttgctttctttgtcgttttatgaaaacgttgatggcaaagatgataaaatgaaaagtaaattaggaagtgagatattgaagagttttttaatttttcagaaatgaagaagtcaaaataaatctactgccctaaattccccttaaaaaccatattttcaagtgtcttcaattgtggtaagagtagttatagacccattttgatgatgactggtaaaatttctatttgtgtgagtgactgtttttttataatgttcatcttagcattctttttgtgtaaataatattttatatatttttttagagacagggtcttgcactgtcacccaggttggagtgcagtggtgtgatgatagctcactgcatcctcaaacacctgggctcaagtggtcctttcacctcagcctcccaagtagctgggactataggtgcacaccaccacacctggctacgttttaaaaaaatttttttgtagagacagggtctcaaactcctggcctcaagcagtcctcctcccttggcctcccaaagtgctgagattgtggatgtgagccactgcacctggcctgtataaaagacttttatttatttatttatttatttatttatttagagacggagtcttgctccgtcgtcaggctggagtgcagtggcgccatctcggctcactgcaacctcctcctcccaggttcaagcgattctcctgcctcagcctcccaagtagctgggattacaggcaaccgccatcatacccagctaatttttgtattttaagtacagacggggtttcaccatattggccaggctggtctcgatctcctgaccttgtgatccgcctatttatttattattaattaattagtggcttatttatttttgaaatagggtcttgctctgacacctaggctggaatacagtggtgccatgacagctactgcagactcaacctcctgggctccagtgctcctcccacctcagccacccaaggagccacttttgtgtggagacaaggtcttgctatgttgttgaagctgggttcaagcgatgttcatgtcttagcctcccagagtgatgggattacaggcatgagccactacaccaagccaagaatattttaaacatgattttatatttagtcagttttgcataattatatagaggtcctcttggatgtaagaatagctgaactggggccaggcgtggtggctcatgcctgtaatcccaacactttgggaggccgaggcgagtggatcacctaaggttggtagtttgagaccagcctgaccaacatggagaaacccagtctctactaaaagtacaaaattagccaggcgtggtggcgcatgcctgtaatcccagctattctggaggctgaggcaaggagaatcgcttgaacccaggattgggaggtcagtgagccgacattgcaccactgcactgcagcctgggcaacgagtgaagctccatctcaaaaaaaaaaaaacaaaaaaaaaaacgctgaactggaactcaatagggaaactttttcaaagaggaaacatgatgtgagtgattaaattaaataaagttgaagggaattactgaaaaatatttaaggaagtatgtataaaggtaaaagatgttggagcagaatcacatgtaatgatcttgcaggactaaattatctctttaataactgactttatatgcctttggcagtcagtgctaagcagcctgtgttctcttgcagtgctgtctccatttaagtaacaagtctagtcacgtagacggaaaagaaattgcaatataatagatcatttggatcagaagagtttgtaagagtcactaggaagcagtaagactgaatttaactgtgtgctatctgctgggaagcttcatgttcaaagtaaaatataaaaattaaaaaaaattcaagtgaccggaaaatagttactttgtacagtttttctgttttgcactctcccttttctatttttttcatttctggcctatccgcatgagaagaataagtacaagtatagcctgagccacttctctatttagtcctcatcttactcttacaaattgtgccccactacattgccccttgccatctggaagcagatatcaaacacaaagtgctaaccagaattcattgtcttattgtttaaagcagtcttggaaaaaaggacatggatgattttaaaaggatttatcagtaatgaccaatatagttcagaaacctaattacagtgaaggtattgtggagcctagtaatgtgataatagctaatatatgcccagctatgaggcacagaaacgttggctattgcctgccgctgggggatcgtgttaatctcagagctggatctccacctcaagcatctttattagtgtgacgctaattcactggaactgagctcaagagagggcctcagaatgtgttgcacaacagcagacgtgagtcagcgagtaaactggcccttacgtttgtcttcagttaagaaccagaaagttttctctccttcagaaccggtttgcctctgaatcacttggtggtcaagattgtgctgttggagtgctcagggagagccactgagaaatatatattatttgccagttgatctagattcatataactcatatctcttggggattgaagcaacacttgagccattttgtgccaaactcctgatgggggaataaaaattgagtcaacttcattttctgctcttcttagtagtgaaacgcctcctgatgatttctcatccttaacttttctttgctattatgaaggggctgacatcaaataagtgattagcaattttgtagagctggggaaaattactactgaggatatttcaaggtccttgtgataggctgttttctgaagataggtcttcactttgaaacatttcctagcaaagccagtgctcctgcatgccaagttagtatgacaatgtatttcttattgcattgtcgttactgcttagcattaaaatacaaacgtcatggcaggacacattatataatagaactctaatcagattctcttttcctttatgaaacacatctcacttatgatatattctccaaagtaattatgttttttcctgtgacttgtgaaaatctgaaaagatgaaaatttctcccatgagcaattggattatgctttgctaaatgaaacatttaataatcaaactgttctttctgtacatttttagaaaaattggattacaattagtgaaaacaagagagagaaaaaaaggccaaactgcaggcattcagcatgaccatgtgctcaggtttctccctgagactttagctctgtaaataatgttttttgtttttgttgttggagacagtctcactctgtcatctaggctggagttcagtggcgcaatctcagctcactgcagcctctccctcccagattcaagtgattcttgtgcctcaacctcccgagtagctgggattacaggcgtgcaccaccacacccagctaagttttgtattttttagtaaacctgaagtttcatcatgttgctcaggttcgtctcagaacgcctgggctcaagtgatccatctaccttggcctcccaaagtgctgggattacaggcgtgagccaccatgcccagccatgtaatattggttttaaatcacttttagctttatagtaagtggtgttaataactaaatgagcaaacctttaaatcttgaaatatatgtgcaaatatgagtatgtgtatatatataattagaaaatacatttgattttacaggaaaaaagaaaatatgtgatttttaaaattcattgctacatctcagtgacatccagaaagggatgtaggttctgctattatatcacttcactaatgtgtttttaaccagttactgtagttcccacagtaagcaagttaggtaatgtatacgcatatttgagtgtcagaattaggcccatttcttctctatgtcagtacaagggctatgatgactaactcttgagtatcacaattatgattcaccagcacagtttaaattggagaccctaattatatccttctcacttcaaggcagacttgaactgccaaatggaaatccaaggaggcaatggcatattttcattcgaattttgttagtatttctgctagactgtcctctaataaaatgcaaactacatttactgtactttcagatgaaaaagactctttagttccaaagttgtcttgtttctcaagttttcattagtgttcttgccattttcttatatgggaattttctagtccttttgatggtcactttgttttagcagctgggagcttttttcagcctgcaaaacaattattagtcctttcggtccatcataagtttttaagatttccaagctgtaagtaatcattttgacctaccacccttattgctcactgttgaaatatccttggctgtagtatgctatcttcctttttctgtttgctggtaattcttttggaatgggaggatgaagatctttttacaaacaagtttttaagttgtgtcttacattgaaaacaaagtcctctgcattgattcttggcataatctgggtttttcctcatttatccatttacatttcccaatgcctccatttgtaattttcaaatcatcaaaatctgttctaccacctgaatcaacatccaaccatgtggtagggcctttgtgggaatgactttatttgattttggaaactggtcacaagacttaatataacagcatgtagttgttttatttccacctttctcatattataggaaagaaaatatcttttttcaacaaggaaggagaattgcctgttggctagaccctgagtgggaggtgaagttttctgtgcttttcagtgggttccttttgtgtagaaacccagttatcccctcctcccactccacctaatgtattcctctagaattcctatgcgttttcctccccctctacacaacaagaccctaattatattttttctgcagtcaccatttgcatgttcttgactgcataatgttttgcttacagcatcaaaaggactttttatctcttgttcatgatgaatattgtcccagttaatttatgtgtgtctttatggtatctcacgctgcgtgactctgactggtactgggaatgccattcttctctggttctcatgcttatgtgactagtgttaaccacttacaacccagcccttctgttagaccacttacaagcagtacaaactaggcagttgctatatggttttaaaatgtagtttttaattttatcaaagttatgcatgcacatagtatggctagttcttgattttttctgttggagatagtagatatgccttttctactatggaaaatgatgattcagctctctttcattgcttgcttccccccatccccatacttcctgtccttctctattctttcattgtatcatatagtttcagctacaccaatgtttagggtttatatttttgtgacattgtacatgctattcacagctgaactatgatatgactgcatttttaaaaaataacgttattttgttatctcttgatttaataaatgtaattatctcttgagttggggggccttagttttctgtgccttaaaactagcccaccctaacctttccctttgttgtacgaatctcttaatacaaaacacttaaggaaaagcttgaaatgtcctttcaccattatccacaagagtactattgcctgtcttgttttttccctcttgcctgggatctcatgacttactcttcagttattatccatttttgaggccttgggtgtttcagtatatgtatgttcgtattgctcttacccttgattagtagtttggctgggccaggcacagtggctcatgcctgtaatccgagtactttgggaggccaaggcaggtggatcttttgaggccaagagtttgagaccagcctatgcaacatggcaagatcctgtctgtactgaaaatacaaaagctagctgggtgtggtggcatgtacctgtagtcccagctacttgggaagctgaagcaggaaaatcacatgaacccaggaggcagaggttatggtgagccaagattgcgccactgccctccagcctgggtgacagagtgagaccctgtttcaaaaaaaaaaaaaaaaatcggaacactaacaagaattctaggctggaaatacttttccataagaattttgaagaaatgtcttctgtgtctggtatttctgttgagcaatttagttgcttgataagttttacataccacttgtttttttatcaccccggaaacttcagataattgctttgttcccagtattctgaaatctcacagtaatcaatgtactttgtgtgaatccactttcagtctttgtgctgggttcccagacagccatgtacttggaaacaatctttcatttctgggagatttattgagatttttcaaaaaatttcctttcctttgttttctcattctgtctattcgatgtatttttttggatatttgacaggtctgccctttttctcttctttttgctactattttctaggtctttgaccttttttctattttctgaaagataatcttaggtttctcttaatgcttccattgagttttttacttttcctatcatattttttatttccaagaactctttatttatgaaatatttttatagtattctcttccctccatccctcccacttctgttgcagtatctttcacctttctctctagagagatctgtgatacaattttttcttttgaagttttgggttcatcctttgctcctctctcctcacatccagacttattctccatgggtttggaaaaaaagggtgatgtcctttgagttgaactacagaccctttacctttaatccactcattcttttccaccaaatctgacatgtggtttgtcatcttcacttcttatcaacagtatatgatccctgctttgttcaagacctggctccaagtcgaccttccacaaggttttgctagagtctaaaccaaaactctttccaaacccaaacttccagtcaccacaccaaactacttctgcagactcatgtgtccatttcactgtgacagctcatttatgcttttcatgtgtgcctttgtgattgctctgtgtttgtcttatccactttctttttttttttgaaacggagtctcgctctgtcacccaggctggagtgcaatggcgcgatcttggctcactgcaagctccgcctcccgggttcaagtgattctcctgcttcagcctcccgagtagctgggactaacaggggcccgccaccacccctggctaattttttgtatttttagtagagacggggtttcaccacgttagccaggatggtctcaatcttctgacctcgtgatccgcccgcctcggcctcccaaagtgctgggattacaggcgtgagccaccacgcccggccttgtcttatccactttctaaggaaaaaaagctacataatatctatatccctgtcagtcctctgaagccccacaaaatcaaaaccatttttataatgataccaagatattcacgtctttcacacattctctcatacttttacagtggagttttctagagtttaaagatgtgtgatattgcagtaaattgaatgcagtggatatgaaaattgatctgtctgccattaagccaggcattaaagagaatttgcaagagtataaaacagtactatccttctcactaatttttttttgttaaataaatactataaaatgttttgttttaatttcttaaaataaatatccatagattgaacctccataaacaaaaactccctttggaatgctttggagttaggattccaaagagtttttgggttaggatccaaaactttggaattagggttccaaagtttagaatcctaatcctttgtaattaggattccagagtctttttccaaaggatactttggaatcctaattccaaatgtacattttaagtgtcaagaggtcatgagaccaaaaagtttagcacatctgtcctgaagctgtagatatacatatatggctcattacatctattaaatatttaagtactctgcaataagttattattattatttttaatttttttgagacagcgtttcactcttgtctcccaggctggggtgcaatggcactgtctctgctcaccgcaacctccacctcctgggttcaagtgattctcctgcctcagcctcccagtagctgggattacaggcacccaccaccatgcccagctaattttttatatttttaatagagacggagtttcattgttttggcgaggctggtctcgaattcctgacctctggtgatccacctgccttggcctcccaaagtgctgggattacaggcgtgagccaccgcgcccggcctacagtaacttattttaaaagagacatcccttcttattcccctatgccatctttatttgtttgtttatatttgtatattctcgtacattctttggcgatgctctgtggatttttttttcctatcttagataaaatagaattaaagttttgattgttatactctcagtatttatttatttatttgactgttattttgaattgttttattttagatgaaaaagagaaattcgaacccacagtcttcagggatacacttgtccaggggcttaatgaggctggtgatgaccttgaagctgtagccaaatttctggactctacaggctcaagattagattatcgtcgctatgcagacacactcttcgatatcctggtggctggcagtatgcttggtaaaccatgcattatcgcttcttgtagtatatttatatatttttaattctgttgaagtatttccttataagatagagtctttataagtttatgtttattagagttaataaaaatacaaatggaagcctataattttacctggtttaggatttggaatggtattaatgcagatgtgaaatgattattggttaatagaagcatagaatggaggactttggttgacgttacaacaaagttggccactttgcttctcctaaaagccgcctttctcatatgtccctaatctttcagtgtttttggtggggccataaaaggggtaatttctgcaaaatactataacttagtgtataaatttccaaggtttaattaatgccatttcatccataaataaagcatataagaaatatagtttaaacctggtttttgaaaaatcatttaaattttaagtaagtagaaaaattaaagatagaagattagaaattgttaaagataggtgaaaacaaaataaaagctataccttatagaacagaggcatcaggaaagtaggcttcaaatgctatttaagtttattaagtagatgattctaatatttattaagtataatagccacccatttttcctctcatagtcattcttagatctgagttcttatcgttagttcctgtcgtagctgtaaatcactagaaacggtcaaatttcctaggccaggaattttcagtttgcaaatgtgtgcaagtgttttagttgttaaaaagacttaagcggggagggcaggtatttgtctacctgctatgcaaagaacatgcaacataatgaaagattgccttgcccaaagtgccatcattgcctttccttgagaaaacactgcttaagccagcctaccttggctttgaaaaagaatgtgcatacattcctccatcttgaggtggaactgcccgtaaattcctttttctctgagctcttatttcaagcaatctgtttggtacatggccccattgactactaggccttctgtcattctgccttgctagttttcaccacatactgaattagttttgttgttcttattgtttatgaagagcttacattatgactgtaaataattcaagtctaagtataacagctatctatattgagctcaaatcccattacccgggaaaaatcattgttaacattttggttacttcccttctggaaatctctttagcagccgggcgtggtggctcacgcctgtaatcccaacactttgggaggctgaggcgggcggatcacctgaggtcaggagttcgagaccagcttggccaacatggtgaaaccccgtgtctataaaaaaatacaaaatttaacaggatgtggtggcggctgcctgtaatcccagctactagagatgctgaggcaggagaatcacttgaacctagaaggcagaggttacagtgagctgagatcgagcctctgcaccccaacctgggtgacagagcgagattctctctcgaaaagaaaaaagaaatctctttacctcataaaattttgagactgggtgacattatgcaaatacgatattctgcatgctgatttgtatttattcagcaatatgttgctgccttgcacacccatcagtgttatactggatgattctaaaaagaattaaagccaaacggatgttaaagaatatttaggggctgggcacggtggctcacacctgtaatcccagcactttgggaagccaaggcaggcagatcacctgagatcgggagttcgagaccagcctgaccaacgtggagaaaccctgtctctactaaaaataccaaattagctgggcatagtggtgggtgcctgtaatcccagctactcagggggctgaggcaggagaatctcttgaatccaggaagtggaggttgcagtgagccgagatcacaccattgcgatcttcaaaaggaacattatatttaatattttatcaaaaattatgagttcctatttacatacacctttaacaatgttagctacctaatttcatcagttctctagatctctgtcaattaggtaagggatgagtattttcattttaaaactttaatagtggagttgaatatttcctaatatattattgacttctagtatttcgttaattatgatatatttttatcagagtgatcttcagcgagttttggttcttgccaaagtcacatgactgtagtagtcacttatatggacccttttcagactgagtgacctctaggcagcactgttggcccttttgtcattcttgaactcttttattttcttcccttacacgagaccacttagacctccttctacctctctgcatgccacttcttacattactcctggcttccatcgttaaccacctccccatataaaattatctgtataatttgtgttgagtttcttaaagtttcctttaccatgatcagcagatttatctctgtagcccagatttctttttttttttttttttggcagttgcaagatttaatggagtgaaaacagagctcccatacaaagggaggggacccaaagagggtagccattgctggcttgaatgcctgggtttatatcccagtcattatccttcccactgtgctctcaggcaatagatgattggctatttctttgcctcctgtttttgcctaattagcattttagtgagctctctttactacctgattggtcgggtgtgagctaagttgcaaaccccatgtttaaaggtggatgtggtcaccttcccagctaggcttagggattcttagtcaccctaggaaatccagctagtcctgtctcttagtaccccctctcaacaggaaaacctaagtgctgttggcgaggttggccaacgaccgctctaacttcttcctgctgaattgaggtgtagtaggggttgtgtagttgagatttcctcgggaggggtgccttcaatgtcattaacattggagcatgggctagcaggccggtccaggggtccacggtagatcttattcatggactgcatctggggctccatttgaagaacatttttagttttacagcttcgattctggaagagacaaacttaacaaggaggttaaagatacagggattgaaatgtatggcctgcagtgcaggggattatttctttggcacacttcacaggccctgactatctgcttgatagttttgaaaaggcctggtccagtaaataataatttgggcgtctgggtgctatcaatgcctaagtgaaaggtttggtgaagggttttaagtaatttccattggttagtgcagcccagatttcacttcttcactgcatgtctatacattcaagaagaacatagggccaaacgttttggtataagctatgcaacaccagatgtctactgagtccggacatgtgacgtaaggactgaagccagctaggtgcattcttcttacataaatgctttgtttaattattatgtagaaattttcctgacactcacaatttaccttcttccattgttctttttttttttttttttttttttttaatgctgtcgcccaggctggagtgttggctcactgcaacttccgcctcctggaatcaggcaattatctcgagtagccgggattacaggcgtgtgccggcacacccagctaattttgtaattttagtagggatggggtttccaccatgttggctaggctggtctcgaactcctgacctcaggtgatctgtcccaaagtgctgggattacaagcatgggccaccacgcccggccccattgttcttaaaatagcagctatcttggtctttcaatattacccttcgtatagtaaatacaataaatgtattaagttcacttctaccttgagaaaaacagcagtcactccaaaaacgttagaaatggcaaacaatactttgtcctaatatcagcaaaaattttaatgcaagatgtagcaatattattaatatgtaataagtgttttctttcattaaacaatgtaactttaaaaaacatacctctcaaaagtctgtagtttcaatatcaaacttttcagttttataatttctatcaaaagcaatagcaataattagcccagagtttttagaagatcattatctaagtttgttccatatcaggggaaccagcccccaatatttcaacgtgggttcttttctgttttccctaagtgttggccggtgtgagaaatagagaaagagtacaaaagtaagaaattttacagctgggtctcggggggtgacatcacgtgtcggcctgagctgcaaaaccagcaagtttttattagcgatt

SEQ ID NO: 406 - DNA, 10857 bp, Homo sapiens
  source 1..10857: mol_type = other DNA
agtgggggggaaggttctagaaaagcggcggcagcggctctagcggcagtagcagcagcgccgggtcccgtgcggaggtgctcctcgcagagttgtttctcgagcagcggcagttctcactacagcgccaggacgagtccggttcgtgttcgtccgcggagatctctctcatctcgctcggctgcgggaaatcgggctgaagcgactgagtccgcgatggaggtaacgggtttgaaatcaatgagttattgaaaagggcatggcgaggccgttggcgcctcagtggaagtcggccagccgcctccgtgggagagaggcaggaaatcggaccaattcagtagcagtggggcttaaggtttatgaacggggtcttgagcggaggcctgagcgtacaaacagcttccccaccctcagcctcccggcgccatttcccttcactgggggtgggggatggggagctttcacatggcggacgctgccccgctggggtgaaagtggggcgcggaggcgggaattcttattccctttctaaagcacgctgcttcgggggccacggcgtctcctcggcgagcgtttcggcgggcagcaggtcctcgtgagcgaggctgcggagcttcccctccccctctctcccgggaaccggatttggcggccgccattttcatggctcgccttcctctcagcgttttccttataactcttttattttcttagtgtgctttctctatcaagaagtagaagtggttaactatttttttttcttctcgggctgttttcatatcgtttcgaggtggatttggagtgttttgtgagcttggatctttagagtcctgcgcacctcattaaaggcgctcagccttcccctcgatgaaatggcgccattgcgttcggaagccacaccgaagagcggggagggggggtgctccgggtttgcgggcccggtttcagagaagatatcaccacccagggcgtcgggccgggttcaatgcgagccgtaggacaaagaaaccattttatgtttttcctgtcttttttttcctttgagtaacggttttatctgggtctgcagtcagtaaaacgacagatgaaccgcggcaaaataaacataaattggaagccatcggccacgaggggcagggacgaaggtggttttctgggcgggggagggatattcgcgtcagaatcctttactgttcttaaggattccgtttaagttgtagagctgactcattttaagtaatgttgttactgagaagtttaacccttacgggacagatccatggacctttatagatgattacgaggaaagtgaaataacgattttgtccttagttatacttcgattaaaacatggcttcagaggctccttcctgtaatgcgtatggattgatgtgcaaaactgttttgggcctgggccgctctgtatttgaactttgttacttttctcattttgtttgcaatcttggttgaacattacattgataagcataaggtctcaagcgaagggggtctacctggttattttctttgaccctaagcacgtttataaaataacattgtttaaaatcgatagtggacatcgggtaagtttggataaattgtgaggtaagtaatgagtttttgctttttgttagtgatttgtaaaacttgttataaatgtacattatccgtaatttcagtttagagataacctatgtgctgacgacaattaagaataaaaactagctgaaaaaatgaaaataactatcgtgacaagtaaccatttcaaaagactgctttgtgtctcataggagctagtttgatcatttcagttaattttttctttaatttttacgagtcatgaaaactacaggaaaaaaatctgaactgggttttaccactactttttaggagttgggagcatgcgaatggagggagagctccgtagaactgggatgagagcagcaattaatgctgcttgctaggaacaaaaaataattgattgaaaattacgtgtgactttttagtttgcattatgcgtttgtagcagttggtcctggatatcactttctctcgtttgaggttttttaacctagttaacttttaagacaggtttccttaacattcataagtgcccagaatacagctgtgtagtacagcatataaagatttcagctctgaggtttttcctattgacttggaaaattgttttgtgcctgtcgcttgccacatggccaatcaagtaagcttcagctttcagtaattgttatcttagagattatgccacgtgaatgtattttattgtacatatggttaagctgagtaattcatattctgtattgtcatatatcaaatatagacatgtccaccaaaaattaaactttttaagcttcgagtgctgctggtcataaaaattaatttgtcctggttataagagtaatttttaaggttatttctaatgcatatctttaaatattttcgtaactgagagtcatatggagaaacttagtgtttgttgtaaaaagttgtgtttttttggctgagatacttagaatcaccaccagagggggcagttaagggaaaataaatgatacttttcagatattgaatagtgaaataaaaactttgggtcataagtaatgaaccaagagttattttctgatgtttaaaaatagaaatttgcgtttttaggttgtagggttgaaatttttggtaaagattctttaataatcctttgataatcacggtctacatttgtttatttttccttagaaagttttttttttaattaataatttaagataatttaatgttgagtaaatttatatcaagcattaatgactttgaaacttgtgtagatcagctgaggcaattttttggtgtaacacaactaatatgcagtttaacatatggtttaaatttgatgtaagttttttttttccccccagaaaactttagaaactgttcctttggagaggaaaaaggtactctgccagcaggtcacctcatatttaagaatttaatttcctgcatacaaagaggaaaatgtaaataaaaattgaaatggtattttcctttgcagagagaaaaggaacagttccgtaagctctttattggtggcttaagctttgaaaccacagaagaaagtttgaggaactactacgaacaatggggaaagcttacagactgtgtggtatgtaaattactgaattgttactggatattagtcttttagctgtatgttaagtgaatcatggaggaaataactatcagcatagtaaaaaattctattatgacttcacttataagctataatgagattaaatgctaaagtttaccctttggtttgaaaggtaatgagggatcctgcaagcaaaagatcaagaggatttggttttgtaactttttcatccatggctgaggttgatgctgccatggctgcaagacctcattcaattgatgggagagtagttgagccaaaacgtgctgtagcaagagaggtaagcaaacaatgactgtcttgtgcattaacatgaagaacgctgccctgctgaaaatcagaaactatttctgaatttagttttaactcaagattttttctcttattaaaggtgtgttgggtttctggaccattttcttaagctagcttatttttcaaaagctaggtccctaaaagctattttatatctggtagttttaaggtggatacaagcgaagtatggtactacggttgggtgctttgaattatgcttgtgtttttttctgtttggatgacttttaccccaccactattttaggaatctggaaaaccaggggctcatgtaactgtgaagaagctgtttgttggcggaattaaagaagatactgaggaacatcaccttagagattactttgaggaatatggaaaaattgataccattgagataattactgataggcagtctggaaagaaaagaggctttggctttgttacttttgatgaccatgatcctgtggataaaatcgtatgtaagtgtctaaccacaaatgtactgtttttttccagtgtattcaattttgtgtatgttaacatctgtaactttattgaaaggtaaacttttgaagctgcttaatattgttgatttaatttaaaaggagtctgaatttttcattccagtgcagaaataccataccatcaatggtcataatgcagaagtaagaaaggctttgtctagacaagaaatgcaggaagttcagagttctaggagtggaagaggaggtaattttaattctgtttcttctttatttttgttcatatataagggcttgcttctaactggggcatttattgtaggcaactttggctttggggattcacgtggtggcggtggaaatttcggaccaggaccaggaagtaactttagaggaggatctggtgagtttcaagttctacgtgtttaaaggatgagtgtgcttttattttaaatatgattaggttttcattagtagaatcaagaaatccaacctaagtcaattttcctaagacttcaaatagattgtatcctggcaagctcttgtgatttggccagacaagaagttaatagagttgtattaataacagttgtatttatctggattaataatgtaacatgaagtgtcatccgaaaagctttgacccccatcaagtgtcattcttacgtataaataggatggaatctctaagattgagacttgttaagagtccaaaatttaggcggtagatttaattatatgctttcatgttttgtgggtaaactggtagcactggtgtgtccttttctgcggttcttaattattgtgctgaggtagtaagagaactgaaaatgaatattagcaataatgctgaacagtttatagtaaacgtaatctttttttggcccctaacagatggatatggcagtggacgtggatttggggatggctataatgggtatggaggaggacctggaggtcagttttcctctacgttttggtttgtttatgtgactaatacttaactatatcgtatatttacttcatttatattttgagtttttaaacattttatattagtgtctataaatggcttgggtgatagtggtccagttatttctaagtagttttgccatcttagctgttatagcctaaggaatagagtgccattttaaatgaaaatgtaaagataaccatcagagtatctcatcttttctcaagcaaaatgattggatctagatatatctttgtacgtgcttctctggaaaagtacagaatactggatttaacagagtaaaacctaagggggtggtatatgtaggaaaaaatatgaaatatgtctaaacccgtaactagatgggaagcatcccaggataactttcaaaaagcgtaacctacggaaatgttccaaaatgtttagtgtgctcctggctgcagataaggttgtgaactaccattaaacatgaagtgtgatatatcattggcgtacagaaaaggctgatacacactgacagattttgtaacaagggacatttaaaactgagctggtaatagacttgatttctggtgttgccactcaataggcatgactaaatagtgtatctcactgttctactttttataattaaaattttagaggaagctgagttcttgtatttaactacaagttagagactcagcccacaagctttttttttttttttaatatggtttcttttttttttttttttttgagacggagccttgctctgtcacccaggctggagtgtagtggcgcgtctctgctcactgcaatctctgccttcccggtccaagtgattctcctgcctcagcctcctgagtagctgggattaccggcgtgcaccaccacgcccagctaattttagtatttttagtagagacggggtttccccatgttggtcaggctggtcttgaactcctgacctcgtgaactgcccaccttggcctcccaaaaacgctggggttacaggcgtgagcaaccatgcccagccttttttttttttttatttttgttttgcagtatgtgaaagtgtaaatttttgtttatgtccgcacttctatttacagtaaagaacatactgtgtggagtgttgggtctgttttttttctttgaaatggggtctggctttgttgctcagactggagtgcagtggtgtgatcttggcttactgcaatcttagtctcaagccatcctcccacctcagcctcctgggtagctggaactacggggtgtgccaccatgaccggctaattttgtgtttttttgtagaggtgtgggggttttgctgtgttgccctggctggtcttgaattcctgggctcaagcaatccacccgcctcaacttcccgtactgctgggattacaggtgtgagctgctgcgcccagccaagaacattgtttcgttttttgagagggagtctctctctgtcgcccaggctggagtgcagtggtgtgatctcagctcactgcaacctctgcctcccgggttcacgccattctcctgcctcagcctccagagtagctagtactacaggttgctgccaccatgtccggctaatgttttgtatttttagtagagatggggtttcaccgtgttagccagggtggtctcaatctcttgacctcgtgatccgtccgcctcggccttcccaaagtgctgggattacaggcatgagccactgtgcccaaccgagaacattgttttaagatatgtaattcgtagagagacataatagaaactttatcttttgggccagtaggaggaagtgctcttttactttccctctagcccacactactagtctagcctcacagtccttacccacaatatacatgaagtatttcaagatacttaagatttttagttttgagggaaagctgtggaattacaggtatttaactgtgtgcacatggtgttatccatttggctgagtaaccccagccaccaaatgtttaccaaggatagttattcagtccttgaagctattttagaggaatttcattaaatatttcacatggaaacttggaaagctggaaatggatgtgaggagacagttcaaaatggtattgaaaatattaagtgattacttaaaggcttattttataataggtggcaattttggaggtagccccggttatggaggaggaagaggaggatatggtggtggaggacctggatatggcaaccagggtgggggctacggaggtggttatgacaactatggaggaggtaataaattcacctgcaacctttatgtgggaatttggaattaatgtctttgtaacacttgatcttttgtttccatgtttgtcactagatgcccataaaatttgtggataagtgtttgcttttatttgtttttatgggagctttgtcctaagtccttggtttaatgtttgtattgttctgagtattccaattttttaataggaaattatggaagtggaaattacaatgattttggaaattataaccagcaaccttctaactacggtccaatgaagagtggaaactttggtggtagcaggaacatggggggaccatatggtggaggtaatttataaaaattgaggttattcagatttttgtgattaaaggattagccttttgtgacttaaagggaagataacatactaagtagtttgtactgtgggcagtgctccatgtacggtcttagtgaaaataaagaaattttgcataaatctccacagaagtactcagcaagcagttatgacatcaaattgggattagggatgttggaggtgggggtgttcagtagtttaatttctggtggggactcataaacagctaaatacagttgcaacccacattgcaagtggtatacattggaatgagggtctttgaagttaaatccttaaaccatgattcaaaccattgcttagcttatttttgaggtttttagctaggagtaaactagctttgtcttgggcttgatgtacttttaaaaaaatcccttactcagtccaaatgaggatgagagggtgaaaggaccctttatttaaaagaatagggtcagccacgaaataaaaatgtctatgaacccgagtaatttatctcctgagtaattctgctaactggctgcaaaggattaggatctgcttgtttaaaagactggatggatataaaatagaatcaactgtagtgttaggctgatcatgggaaatcaaagtaagtttgttttctcttgctgttccaacaattataggaaactatggtccaggaggcagtggaggaagtgggggttatggtgggaggagccgatactgagcttcttcctatttgccatgggtaagtagcttttgagttttacaattattattatcttgggagacatagctgcaggagtaaaagctttttaggatcatgttatctttccttaaaatctggttagatggataatttcataacctattttttttttactctttacttctgttgaaacaggcttcactgtataaataggagaggatgagagcccagaggtaacagaacagcttcaggttatcgaaataacaatgttaaggaaactcttatctcagtcatgcataaatatgcagtgatatggcagaagacaccagagcagatgcagagagccattttgtgaatggattggattatttaataacattaccttactgtggaggaaggattgtaaaaaaaaatgcctttgagacagtttcttagctttttaattgttgtttctttctagtggtctttgtaagagtgtagaagcattccttctttgataatgttaaatttgtaagtttcaggtgacatgtgaaaccttttttaagatttttctcaaagttttgaaaagctattagccaggatcatggtgtaataagacataacgtttttcctttaaaaaaatttaagtgcgtgtgtagagttaagaagctgttgtacatttatgatttaataaaataattctaaaggaaattgtgtaattatagactttttattttaaataagttaaggagtgggtagtataattaaggtccgttgcaaagctgttgttatatttgtataagataaatgctggtcagatgtaagtgtgttgtctgcaattcatcaggattaaattatgtagataacttaagggatatctctgcaaggagaaacacctttttagatcttttagatgctgcttcttcaatgcaaggaaaggaaataaccccagcgaggtactcttcagggacacaggtctagtacaagagaactcttgacggctactaagttcagccagtcttaaaaaactgtgctgtttctacaaaactttaactacagtagtttataaggatgccaacgaaagctgagggtgtagagcaaaatagttctaagcttcagttaaacttctttaggtaagatcttatttacttttcctttcttaattttcctccctaaaagataaactaatactcttaaatggtctttcagtatagtggttcttacgtagtttaacatagctataaattgagtttaacaatttataaactcaagagaataatttttataaaccctgttttccaatctgtcatttacttaaattattttggttgtttttccctttttttccttcttttcccaccccctccccctccatgtgaagatttgggtgcttaacatatcatttttttccctgccggaattttagcattgatatgaaccatggacaagtatattctgctgccacaaagactgtaaagtgcttcatttcaacagctgaggcaagccaagtgatcattaataaagcttttcttggttccttcagtggtgttggtagtaaaatggtaggtaaaagttaggctgcaagttcaataaatcatgagatttcccatcgttacacccttgtgtattcacatttcttggatcaaacattttgagtgaactaggggtttttattaaagacatttgttgtatttatggttgtaactgtacatgcttatcaggatgagactgaaagaaggtagggcaaaaatggttgaatctattttcagatagtagttcatacttgagtgaagtgtcttgtctgcattatgaagcctggtatgtatccagtactaaataggtgggttaaatgtggtaattctagttcagtgtcttaccctgaagagaaagttgtaggttggctgttgaaattcattccttagatatgatcagtttgattgcccggctttattgcctttacaggaatgtgatactcagggcttactctatacaccaatgagtcttctttgatcctaagaccaccactgaagttgtttaggttcttttggacaaacatgataaacttcttcagatactttttttttcctttggcaggaaggtgtcttgctgcaggtaactaatgaagaagtggtcaaccacagagtcttcaagaaataagaaattctgtaccatctgaaagtagttcttgttggtgccttcatttaaaaagcactctttaaaataaaagggaaatgttttctgataaaacaaacatttagttgaggttcttgatataaaacaattacaaaatgagtgttgtttgtaaaacagtaacatcaaattggctagagagataaatgtatcatgttttaaattaggttttgtgagtagacagattacaattctattttaaatataaagtttataaaataaatactttttgtatccaaatacttggtgtaatgtttacacataaaatgtgtgaatcttgttctataaatatttggttgtctaaaagatcaccatcccctaaatttttaaaagcagtttcacaaagctatgcatattttaatattaacaggtaaatgagaagagcattgtggacattattggctgtccccaataaaatgctgttcatt

SEQ ID NO: 407 - DNA, 32744 bp, Homo sapiens
  source 1..32744: mol_type = other DNA
cggcaacagaagactatgatgaattcgaatgggacacatttgcttctgtggagttacgattcaaactgaatgtccaatataggaaggcaacatatacaacaagcaaaagtgattttagaaataacagaacgcgggagaaaattcacacacggaaaatgatacggataacaaaagcaggtaactcacagaaatgcggctagaaaagaggcctctgctggagcgagagcaaatagaatcagagggcattagaactgaaaagctcctaggagctttcagtgaacaaaacttcatagccaaaaaagcacacgactgggccaggagttcagagacagtcttggtgctcaggggtttgcagccctagccgtgtggtcactcccttgcttctctggctatttccttatctataaaatgagtgggctagtttaggccgactgagacgcagacagggatacggtactgtccatggacctctgagctgccctttccacatcgctggtgagttacttaaacctcctgtgtgtttccccctttcgtatgtcaaaataataacataaaatcagaatgtaaatccagacgcattgttttgctgcgattaagttgaacgaaaatagcaaggacgaagtaaggagagagccagcctacccgcgggatgaggcgtcccgcggcggagtgggctgggggcgtgtcgtcgcggaggggagcggcgaaccaggcaggaggcggaagagaccgccccgtgggcggaagtgacgcaaggcctactgtcggctgggaggggaggtgtagccggtctttgggggtaggcggtagtggcggaagaggttcggcggctgatggcggatcaggatcggaagcctgcgtaactttctcccttgatccgggagtctttccactgggtaaggcgcctccccggtccaccccagcgccttgtgcggggcggcctccagctgcatctcttttagggctcgtgctacacccttcagcccctgtactgtaggggcctggccggtctcgggagaggtctctgtggtgacgaggctttccttcccgaagacaaaccttcctttccagactgcgattgtgacgggggtgtgggcgactcggatcagctgtggagttttggaatggcaacgggtggccgccccacgcggtgggaggcccgtgggacaggccttcgcgatttgggggaggcgtgtgggacgggggccctttggctggggacgagtgacgctggcgacccccgaaggaaaagcttctggtgtccaaggctaaactctggggtgactgttttgagggcagtgtgggttttaccggcgcagtaagctgagaaaacacgtaggtcgcgtccgagaaggacgctggggtttgcctttgcggagagaaacccagctgttttggtttgagtcgccggtggcgaagggggcggagactccctgcgccgcctacttttgagggccgcgggcggagttggcggttctggctgatggcctgcttcacctggaatccattccccaccccgccccgttcgcaaggtgtggactagtcccgaccgacttgcactcctggcttagggaatctgtggctagagtttagcgtgcgcgcgcgcgcgtacaccttattagtaaaaaattgagcttagcgtgcgtctgtgtgggtgtgtgtacacaccttattggtaaaagttttgttagaaaacactggcatttgactttagacatacacagtgttagatttccggtttcacacagtggttatgaattgctattatgttaggctttagatgggaaaataaatcttgatttttcagctgtctgcattctgctaatgttaaaatttctacgagctgtgcacgaacaattaatagttacaagtttggtgctcaattcctaaaggatttaaagagatcatttgaatagaaactaaaagtgggtcgatcgtcctcaaagtgcttttcgggtttagggaaggagcttaggacagcctttctctttcgttctgttcctttcaagggtaaacttgaaggattgtttgatgatgccgacttctaataaggttttatttatttttcaaactgattgttcaacttcaaagaacattgtagtttttgttttctagtcatcacgttctttttttttttttttccttgagatggagtcttgctctgtctcccaggctggagtgcagtggcgcgatcgcggctcattgcaacctccgcctcccaggttcaagcgattctcctgcctcagcctcctgagtacctgggattacaggcgcgcaccaccacactgaaggggtgggttgcccctccacacctgtgggtgtttctcgttaggtggaatgagagacttggaaaagaaaaagacacaaagtacagagaaagaaataaggggatccggggaaccagcgttcagcatatggaggatcccgccagcctctgagttcccttagtatttattgatcatttgtgggtgtttctccgagagggggctatgtcagggtcacaagacaatagtggggagagggtcagcagacaaacacgtgaacaaaggtctttgcatcatagacaaggtaaagaatcaagtgctgtgcttttagatatgcatacacataaacatctcaatgctttacaaagcagtattgctgcccacatgtcccacctccagccctaaggcggtttttccctatctcagtagatggaacgtacaatcgggttttatactgagacattccatgcccagggacgggcaggagacagatgccttcctcttgtctcaactgcaagaggcatgccttcctcttatactaatcctcctcagcacagaccctttacggatgtcgggctgggggatggtcaggtctttcccttcccacgaggccatatttcagactatcacatggggagaaaccttggacaatacctggctttcctaggcagaggtccctgcaggcttccacagtttttgtgtccctgggtacttgagattagggagtggtgatgactcttaaggagcatgctgccttcaagcatctgtttaacagagcacatcttgcacaacccttaatccgtttaaccgtgagtttgacacagcacatgtttcagagagcacggggttggtggtaaggtcatagattaacagaatctcaaggcagaataatttttcttagtacagaacaaaatggagtctcctatgtctacttctttctacacagacacagtaacagtctgatctctcttgcttttccccacacatacccggcaaatttttgtatttttagtagagacgaggtttctccatgttggtcaggctagtgtcgaactcctgacctcttgatccgcctgcctcggccttccaaagtgctgggattacaggtgtgagccaccgcacccagcccatcacgttcttaaattgtagaccgctgtttatagttctcactgcagccatgtttgtagaattaaccagcaaataccttttccataacaaaagtaaaattttggaattcaaagtttcaacctttttaataatgttaaaataatcatgaaagatcctaatgatgctccttgtatacttcttttggggactttgttgtattcttttggaatggatatgttaaatctgggctttatgcatttctgtctttttaaagcttattttgtcccaaataaacctttagaagaagataaaaatgtcctctaccctaatatgtgtgggccaatatcatagcattttagaaaccaacttataaaaatctaaaaagtaaataaaagtggtgcgggtgatacctgggcggaatgtcttggcactcaggtgtaaaggattctggaaatagggatgtctgcaagggtgcaaattaatagactggggcttttgctgttgcctcctagaaaaattgctgattacattttttgggagcagaggtctgttgagagttgttagtctttctttttttgagccacagtgtgaataattggaaactatttgaatgctggacattttttcctttcatatgtttgtgtgtcctatcggattaaagtttggagataattctaaaggttttttagctgaagatgtgaaaaactttcagtaactctatcaaccattacctgaattacaacacttctaagggtacaaagcgttcatattctaaaatgcagtgtttctgctacagtgggtcatatgtggagtgttactaatctgtttcatttctttatttgctttggttttactattacagaaattttcaaacatacacaaaggagaatgaacagtaaaatgaaccgacactttactaatcttgttttattaccccctctaacattaattttttcccctggagtttttaaagcaaatcttagacatcaagacatttcacttacagttagtttagtatctttatttttttttttttttttttttttttttttttttttttttttttttttttgagacggagtctcgctctgtcgcccaggtcggactgcggactgcagtggcgcaatctcggctcactgcaagctccgcttcccgggttcacgccattctcctgcctcagcctcccgagtagctgggactacaggcgcccgccaccgcgcccggctaattttttgtatttttagtagagacggggtttcaccttgttagccaggatggtctcgatctcctgacctcatgatccacccgcctcggcctcccaaagtgctgggattacaggcgtgagccaccgcgcccggcctagtatctttattttttatttttatttattttttatttttgagacggagtctcgctgtcacccaggctggagtgcaatggcgtgatctcagctcactgcaggctccgccccccagggttcacgccattctcctgcctcagcctcccgagtagctgggactacaggcgcctgccacctcgcccggctaattttttgtatttttagtagagatgggttttcaccgtgttagccaggatggtctcgatctcctgaactcgtgatccgcccgcctcggcctcccaaagtgctgggattacaggcgtgagccaccgcacccggcctagtttagtatctttaaatgataaagactagaaaaacacagaatcaccataattatattatcacacataacaaaattaccttatttttgaattctaattgttaggactggcaaattatatttagtatttatctaaattaaaaagcttaatttggcttcatatgtttaatgtacagaagttcttactatggtctatttttcagtaagttcactaaggcttacatttttgggctaaagtaaaacaagtattgggaaccactggaaaaatactaccacaaaagtcaaatctgctttgggcttgaaaaagttacaagaggagtaagtaaagataacattgaaatgcttccctgcccccaccccatgtttattttagctgtatacataactgagtgcccactatatattatttatcttttttatagacattaatgcattcgcaaaataataaaattggaatttagaccaaagactttataatatacagtttacagcataacacacataaagaaattctagaggcattggaacttggggaagtgtagtaggaaacctggaagagggcactgtagccagcatgtataagcatttctgattttgtttcccagccaaatgtgtctggccccttaattgttgactggacgtttcatacttatccttggcttgcctacttactatactcctgtttgtagaggtgcactttagagaaggggaatcagaatttgacatggtaaagctgcttgcttctactttcctttttgtgtagggagtgtacttctctccaactgagaggaggtttgtactttttctcaggatgttagtgaagctacacttcccaggcattaccacaaggtgatgcagtgactttgcatattatttctccactcccgtgcgaccttgacattctcagtgaattccaacatttttgtaagcttgcctaagtctgttatctgtaggaggagtgaaccagaggaactatgtgggaattagaaattttattatttaaaatgggttgataatgacataattatatttgattgcattcatccatgtaaactttttaaatgattagtagctatattgtaatttaataagagtaaaaaatgacaaggtactggaatgacttttgtaaaatatttctataattatagcaatgaaattttaaaaagattggagtgttggagagagattaatgaaggccattaataggataatcacaaattattttacttttcagacttgtaaccattgtgaatactatattttaaagtgaaatactagtgttttctattagaaaatgtgaaattcaggggagggtttaaaaatggaatttcttgttaatagggctatttaaaacaatagaaataatacatttatatatacttgtaaaaattcaaacaataaattgatgtaaaatttaaggtccttaagtcttctttttacacacatcccttataagactattaactctatagtgtatacttcttgagttccttttgatgcatttgtaaacatatacaaatacatatatgtatacctatgtgctattttgtacctcaaaaacttcagtgaactaaaagtataaggttggattgtgggtttttaaaaaactgttataattgaggttaacagaagttgaaacacttttgccttgttttataaaaaaaatagttacagctttgttggtttaatttattttaggaaatgatatgttaaattttaagaaaaaagtattatccttaatcagcttttgattaaaaacatgggacgtttattctaagctagtttatttccttcttactgaatatctttcttaaaggaagcgtgactattcactcacttcatagaaaaatattattctcttaattcagttttggtagttgtatctaatagatgttggttctgttgatttagctatagtttcttttgttggtgtcttgtaaccagtagtgagttttttttttttcttttttttttaaagaactggaattggtgtttttttttttttcctttgtgaagccagtgacttgagataatcattaatgacttcattagtatcatgacctccctgggagcccaaattagctcagacaactcaaagaaacaaaataataaaactcttcagttattttaggcagagttctccagtgtttgtaaatgctacctgttcatttttctgatggctttaggttaccaggtagagagtattcatagttaagtctttccatgaaatatggttgctggtagcaaagtccctttattagtgcagaggtaaagggggattgctactgaatatactctttatcttggaatgcttgcaaacctcaggtagggagaggctgacaactagcctgatactctacagtggtttccaggttcatgattgacagtctctttttgggatatccattatattcagtaaagcaggactttggccataacagaagcagaggggacacaagaagaaagttgatattttttaaagtgcttattattacaaaactttaaaaatttgccttagtatttcaaacaggtcagcaaaagaaacagttgtaaaagcacactgttttagatcttagcaataagccttcttactaatggctaaaatatgagtagagccttactgctgtgcttgctctgtagaaacttcattgatttgtgaagtaaattagattaatttggttagcaaaaaccttgccccagttttccccattattacagagatgcctgttttaatgactcaagcaagtgcagtcaggacagtcatagtttcttatgtgtattgtagaattagtgattgtacggagcctgtgacaaactctacagattgcttttttgggtaaatcctcatttgtttctgttttctcaaaagtagagcacaaaatagggaaaacatttggatcttgcagtttttataatctgctttcaccattcatctgctatccagtgcttggtgtttactaagccagtgagcgttcatgaatctctaagagattttcaacagtgtgtattttattaacactacacttttatttttatttttaaatataagtttattttaatcagtaaacatgtggaaagggtacgtgaatactagaagttgaggtaggatcattgattggacctatgatgaaatgataggtttgttataggtggagaagaacaaataggctgagccatttcaagtagaccagctaagattttacatggtttgagagatttgaacaagcttgtaacagaagcccaagaagacaggctgggtctgggatctgtggaaatgagtgagaggtagaagttgttggatagtggttctcttttctggttgcatacaggattgagattacttggggcgatgtaggggcagggctatgtatattcgtatacacacccacagacacacatgcacacactcccaggccccaatcccagaaagttgttgtcatctattttttttttttaaaggcccctaatgattctaatgtgtaaccagggttgagaaatgctggtccaggggattagaagggcaggaatgtaggcacagagatgttagcgtcaggtttagttataggaccccaaaacctagggagaggggaagagatgaatgggatgggctaggttagggaggagaatgatgaagcccaagggttctacataggaaggaaatgttaattgacccatagccagtaaaatactgacttttaactgttcttgtttctgtttcttagtgtttgttactaggagccagcaggtttatattggcagcgtgtgcacaaaaacacctctggttcatttgcttttgatttaaatagaagcagagggctaggctttccaggagagttaatttttggttttggttttttaacttttaaatgcccatataactttctgagccaaatgggttttagttatttttccagtttgtctgtatttttatatttaatcaatttttaagaagttccagtatttacaaagtatatattttcttaattatgacatgcaaatattcatgaaacttatattaaatattatgtattttctgaaggcataagtttattcttagttggtataatttaacttgtatgaattacttgtttcagattcacaatgacatcctttcaagaagtcccattgcagacttccaactttgcccatgtcatctttcaaaatgtggccaagagttaccttcctaatgcacacctggaatgtcattacaccttaactccatatattcatccacatccaaaagattgggttggtatattcaaggtaagaaagctttctgaatatgttctccatgtaaacacttaaaattttcttttaaaacagattgataagtagcttttacttgccttaactctgcattaagactcatttttgtaaacatcaccatgaaatatttaacagtggggagtagataaaatggatgttgggaactccatttcaccagattttcctctccctgatcagaaagtttaccttcacttaaggacttgtgaaaattttttcagaatcttcttttcctattttctccattcattacctgcaataaaaaaagatctttttctttgggttcttatattatttaccattttttccagtcatttgaaattaattttatacagcttgacagccatgttattatcccttctactgtcctgcatggcttaaatattgctcagattgtattacacagttttaagagtattctgtttgtattacacagttttaaagtattctgtttaacatgactgaatagtaaactctttgatggcaggagttctagttcttatattttaccagtgattttgtataatactttcttgaaaatgaaggtgatcattacagtggtacacctcactgtgcaggactttttctggcaattttaactcttcaaaatgtagtggaaaaccaaaacataagaatgtcctctgagcagtcaaaataatgtcacgaatgtccaaacagtaaaacacattcacttttctcctgtgttattctgtagtcttcctcagaatcagtttgttttattttagttaagatttttatgggcttgaaattttgattgtctaatctgtataaagttaaacaacaaggaagaaagaaatgaatagctgctagaaattaggcacattgaaagtgtctagaagtaaaagtccagcctgacgggaaggcagaaaaacatttggacaaaacaattttggcatttaatgacttagttcctttctttgaattcctcatttcttgatgtttctgaatacaacacaatagttatttactgtttactttttgtgtcagttttttaggcttgtcaaatcccaaaatggagaaacattcattgtaacaattttatgaaattaggagtagtttttaaattttatttcttattttttgagacagggtcttattctatcactcaggctggagtgcagtggtgggatagtggcttactgcaacctgacctcctgggctcaagtgatcctttccccgcagccttccaaatagctgggattatagacacaacaccacgcctggctaatttttaaaattttttgtagagacagggtctcactatgttgcctaggctggttttaacttcctaggcttaagtgatcctcctgtcccagcctcccaaagtgctgggattacaggtgtgagccaccgcacctggcctcagtagtagtttcgattttatgggagatactggtatcaagttaaagatactgattgagaactgatgttttctgtagtaacagagcagagaggaagaaaacagaaatgtgactgaggaaaaagaagggcatttccagcaggaaaatggtacaggttgaacatcctaaatctgaaaatctaaaatctgaaatgctttaaaatccaaaactttttgaatgctgacatgatgtgcaaaggaaatgcttattggaacattttatgttttggatttgggatgcccaaccagtaggtataatgcaaatactccaaaatctgacagatttagaaatccaaagcacttctggtctcaagcatttcggataagggatactgaatctgtataagcagaggcttagaggtaggaatgttcatgagaatgagtaagtcagtttaactagagcataagcttcagttagggaagttgtgggagatgagattggagataagtttcattctgtctatggacgaccttcagtgttagagagtttatggacttttttctgaaggacagtgggaagtctttgtatatgtataggttgtttgaaaaagtatgtttcaggaagatgaattattacctttttcctgcagactacttgtttatttcttatattttttcatttttttaaagccaaaagactgtgactttcccttcaaatccaaacaatcagttctaaccattttactgcttacatatttctaaatccttaatatcactagttcatgccttccatattttttaccaagactattgcaataggtcagctgttttacccactttcattcttgtcctctaacctttgttttttaactgctctatataagctgtaaaatggaaacctgaacatgtctttctgttgtttgaaactcttcattggttcttcatcatctgtagaataatgccaagaccaaataacctagagccatacagggctcctgtataagattttatttccagcttcagttttggtcattcctgctgctgcctttttgctttggtaatgctaaactatacttctttcattgtgcactttaaggattgtaagttttctctcagcaaaaaagaaaaaaaaatcttctgtttaataccctttccatcctttttgccagcataaaactttaaaactcaataggaagttcaggcatgtagtaaagatttcaggtaatacaggaaggctcaaggaagaaaataatcatgcttaacacttttacctactgttaactattgttaacatattggtatatagctacatgtaataaaattacaaataattatacacatgcataatgtgtgtataataaatatatacacacatactactgatgcatcatagtgtgtgtatatattcgttgaaccagtttcttactattggaatttacattgttgctaaatgcttatcattaatacttaataaagatctctacctatctttattttgtctacttatttcataaggtaagttcttggaagtagaatcaccatgtttatggcattgtttgtttttaagcactttatgtgtactgcaaattgccctctagagtgattttgatagacaccatattgacaagcaggcaggaagagagtgcctgggtagcaattgtaagggaggaggaatgaagatgggaaagtagtatgcttgagaaagtgttaaggaatttgatttgcctgggacagctatcaattaaaaatttattattattatttttttagagactgggttttgccatgttgcccgggctggtctcgaactcctgggctcaagcgatccacccgcctcagcctaaataagtgctgggattgcaggcgtgaaccaccatgcccagctacagataccagttttagaagatgaatgggaaaagttagtttggatcatgttgtagattgttttaatatttgagggatagtttttaagtaaggagtaataaagtttagaagtgaagcttaatcttatagtgctgagtaagataaattggaattcgaaaggaatggaggtaaagagaacgtttagactatcctaattttctatgtgagataatgaaagcctaaagtggagaaggaagtaagttgtgtgtaataatccataagtagaattcataggatatgtcaacagtcaattgaattagaactggcactcattctatggcatctcagtaaggaggagcaaggtcatatgttaaaagttggggagggcttgagtatagataattggtcttgctactgtggaataatgtcatagggaatcggagtggcttaaccagaagattactaagcagcaattttatgactttttccagagagattcagcatctggagttgtgtcaagagtgccagaagtggctgtcattcaaattgggtgttggaaaagggtgggaatgggaagggaagttaagaggacaaaggatactatggtggttttgagtacattattgaaatgattgactgatagtgaagtccaggttgggtagggaaatgagtgaagccaaacaagggatatagactgggttggaggtttttgttccttttagttttttcactccctctgaagtattgattgattagttttaattataatgaaaataaacatttaacatgttgggaattttatacattcacctctcatctgagcattatactccctgttttacagatgagggaactgaggttcagagaataaagtgacttgttcaaagttatccattatacgttggagctgagatttgaaccttatgtaaattggcattcaataattattctctggttgtttggttaagtgagagatctgattattcaaaattaacaacagagttgctaataagttcagcatggattttctttagtgacagaattgaagtaaaattacagggaaagatttagaactgcacctgatgcaggctgggcacagtggctcacgcctgtaatcccagcactttgggaggctgaagtgggcagatcacttcaggtcaggagtttgagaccagtctggccaaaatggcgaaaccctgtctctactaaaaatataaaaattagccgggtgtggtggtgcatgctggtagtcccagctactcaggaggctgagacatgagtatcgcttgaacccaggaggtggaggttgcagtgagcagagattgtaccactgcactccagcctgggcgacagagcgagactccgtctcaaataaaaaaataaaaagaactgcacctgatgccatatctttattattaaaccaacgttaattgcagtaaaatactatatgttacattatatttgagttttgttccgttttgtgtttatgaatttgatttggtcttagttgtataagtacataagcatgaggaattggtgtatgtttagatttatgcttagtacaaattaaattaccttacagttaaagatccccagtggatgcctgaaattacaggtagtactgaactctatttacactgtacttttctgatacagtcatacctatgataaagtttaatttataaattaggcacagtaagagttaacaacaataactaaaaatagaacaattgtaacatgaaattgttatattacctgatacccagcctgcatcattagcaactctgttgctaattttgaataatcagatctttcacttaaccaaacagccggagtaaaagttatgtgaatgtggtttctctcactctcaaaatattaaaatatcttattgtactatactcacttattttggggtcttggttgaccttaggtaactaaaaccacacaaagtgaaaccttagataaaggatgactactgtagtaatgttaaaggtccatgagtttttgttttttaaactttagagtcttagaattctcacatctctgagatactgttctaattggaattctcacatctccgagatacttttctagttgaggaaactggaagtgcaaagtggtcatgtgacatgttcaaagtcacattgctaatgcataacatgtcctatactagacaaacaaaacctccctgtaaggtactgttttcactgcatcctgctgtcaagcacatcaaaaactaagttgcctgattagaaggtggatccaaacagtgattttatgcttgaatatcctgtttcaagcttttgtttctttgttccttgtttttccttttcaaatttttttcctccttcttctcttttcctgccttggtctccccttcagtcctgtctcattccactcattttctgtttttaaaaaaagtcctctggttgtaaaaaaaaattacaattataatatatataatatataaatatttataattatacttatttataattataaaattaaaatgtcctacagtcccactacccaagtatatccctacctaattaatatcaatggttagcactgttaatgttttaagtatttccttccagccttgttttattaatggaaggagactttcagtcttttttgttttttgttttcgtttttgttttttgagacagtctcgctctatcgccgaggctggagtgcagtggtgcgatcttggctcgctgcaacctctgcctcctgggttcacgccattctcctgcctcagcctcctgagtagctgggactacaggcacccgccaccacgcccggctaatttttttaaatttttttttatttttagtagagacggggtttcaccgtgttagccaggatggtctccatctcctgacctcgtgatccccccacctcagtctcccaaagtgctgggattacaggcgtaaaccaccccacctggcttgtcttttttctaatgcatatattttgaatgttgctggcatatctcatgccttttttaatgccgtgattttttcacttaatcacttacaattagttctgtaccattttatctcattgaggaatttatgctgtttatgatatttctcttttgaatcaatgttgcatactccctgtgtatatctaggcatttttgcagtcatttttttcctaaaggaacttttctagtaacatgatttttagaagctacattgtatacagaagaaggaaaatgaatgcttctacccattgtactcctaccttccccagtgatgtctgttgttgtatgtttctggattagaaaaattcataggctcatttgatacttttttgtgggcgtttttcctcacttaattatatttcttgggaatcctcctatatccatatgtaatcagctcatttattttcagtgcctttcctactccaaggcttgtctccctttattcatctccaaacatcagtcccctcttctctatttctttctttctttccaagtggtgtctcatatgctttcctcaacctaatgtttctgtctttttctcaatgtttctccaggatttattatcttgatgtttttctaggtaactttgatgttattctggtcttctgtatgttctttctcagaatttcctttatgatcaaaacttatccaacatgtttttctgaaatgttaatcctatttaaaaggaacactttgtggctttctcccttctctgtcacccttgtttaatttccattttctcatttattttgctgttgcagtagtaacaagaatgatgcccactgctgttgtaattcttcaaactaaagtatgtgacatattcattgctttagtttctctcttaacatacatacagcctccagtggtatctgtgactacaattaactggttaactagattcaggtatatctcctagaagcaatgtattttggcagttttatataactggtattttgtcccattgtccaaagtgttgccatgttctccctgccatttttcaatgtttgaaaattgctgttattaactttaagtgtaataattttctttacacttggtaatggtggactaaaagacaagatttcttgcatttcagtgtgtcctgtagcattgagcagcaagttctagcccggtgaccaggaaaataaaacagagaatcaacctttggtttggacacattatggtttattgacccttctaattagatttattattattgcagtggactcctgcataatttcctgatgttcatcttttgtgttccttccagtattatccactctagcatactttcatgtgggagcttagatataagacagttacatcccaaaggagcccattctctgtatctttccaggttgagagacttctacatttattttttatgtatgcccaacatgcccctctctaagtaacttaagaactattgtttagttttagttttccttactcaaaagcaatttgaagtgtagttctatatttctgactttttactcaggattgtatcttgcccccaacttcttggtaggctcagttctcaggctgctaacaagcacttatgtgataggcactgtgctaaatacagggatgaactcacttaatacagacacaaccttttgagactgtttttgttatcagaggagaaaatagaaatgaataacttttccaaaaccatacagctagcaaattatcttttctggtattctgacctcacaccctatgctcttagttattacaaaatactacacctataataactaccattcatggagtgtttgccatggattaggcacttcagatgctgcttttaggttcattacctaatttaattcttccaacaactgtgaaaggaaaaaaatgggctcaaacaggtgaggtaaatgacttgttcactgattcctcaggtttcatatccgtaaagagatgaatagtgtcaaatgttttttaccttgacacagaacaaagtaaattgtaagatttgtcccagcatgcagatacaccagaaactaaatttcatgaaacacttacccttaatatactccagtactttctcttctatataattacaaaataaatgccagtcatgaaccactaaattggttttatcacttcttactgggtttgtaacctgtagtttcaaccattcctttggaggctaaaggtgactaaggttcgtccagcttcagtattctgttgtctacaatcaggccaatcagaatcatagaacatggataatctaaccttgtggctgatgcataaatttttgtaatattcctagcaaatggatatctagtacctgttttaaacatctccaattttcaatatttaacatggtatttagtccatctggaaaatacagattgaggtatgtatatattcatgttgtaagtagaaaatgtgttagcattaggtgagacatgggtggtctgtttgtgcatatataaacatcttggtgctaaaggtctttttacaaaatttgccaattggctgcaggcaagacttgccaaagatgagagattagtgaatttagtggatttagggggaggcagatgtctaagtaaaacaaataaaacacttacattggaggtataaattaagttttttgaattttgatatatgtgaaaattcttcagaggtgaatttgtaatgcatgtctaatattttaaatattaattttctttagtctataactccctcagttgttggatctgctagacattcagtatgtgccacctttgaaaataatactctgtggtcaataaaaaataaataacaagtatttaaaaactcactgtgtttagtgaaattaaattttaatcaaaacacatttttatatttgatcatatggatagttagattatccttgagaaattggatagcaaattgcattttaatatagtagaaactctactattcaatttatgtagatttttatagcattaggctgtagtttaatttagaaataatttgacatgcttgttaaaatactcatgatttgtaaacatattaaatgtatattttaactgtaaaatacaataaataaacagtatgctgtatgagcctaatattaaactatttgcttataaatccgccttttttgttatttccctttaggttggatggagtactgctcgtgattattacacgtttttatggtcccctatgcctgaacattatgtggaaggatcaacagtcaattgtgtactagcattccaaggtaaggactgaaaactgcagaactcaatgaaactagatgtcttattgccattaaagatgttgtactccattgtaatgatttgttcaggtatctccagggtaccaaagttgaattagttagtgtctttacttagcaaaagccctaagaatgtaactgtctggtgtaggccacatgatattttatgtagacatttaaaagttattggttgttgtcttaactttcactgaagagtgggtttctttttaggtactaatttttggagatttttttttttcaagtgagaaaacaatacaatagtaataacagatattagaataatgtaacaaaaaagaggtgaggaaaatagtccagatgcaaaccacaaacatgattaacagaacttatagttatttgaattctgtcatgtgtaagttcctttattataaaatgataaagtaatataaaattcatttttgtgttagcttggcattatttacaaaatttaaaaaatactcttattcaggtaattctgacatatgctacaatatgggtgaacactgaggatgttatgataagttaaataagccaatcacaaaaagaaaaatactgcataattccgctatatgaggtacttagagtagggatagacacagaaagtagaatggtggtctgcagggcattcaggttccctcaagggaggaatggggagttattgtttaatgagggtagagagtttcagttttaaaagatgagaacaattttggagataatggtggtggtggttgcacaacaatatgaatgtgcttaacattgaactatacactttaaaatgcttgagatagtaaattttatgtgttttttagcacaacttaaaaacttgaaaaaaaaataacacttattcagagatctatcacagaatttgctgcagagtaattttgtattataattgtactgactttaggattgtattaaagtgaattcttacccttgtatatgtcatagatttcttttggtctggtgaagtttatggactctgtctcagaataatattttaatgtatataaaataagacataaaattgcaaagaaaaccaattatattgaaataattaaaatatcacagtaacaaatttttgatatattaatacatgtgcttcaaaatctgtgtgttaacaagatgtattttattggcagatttaatcactgccatgatttccaagtaagataacattgagatacctgtaacaattgtaatgtggtattaacatataagtaattcctgttagtgacaaaaatcacaaatactgatagtaatcaaagtacatgctaaaattttagttagatgttagtaaaaataaaaatataatgtttttctccattaaagttgatggatgacctgaattttctgtatcctttaaccccaagttgaacattccctaaaactgcctctttgctattgagaactttatttgcctttatgtttaaaaaaaaaaaattctaggactttattgctttcccctggggctggctattaataattaagactttttcctctgggtttctcatatctttaagcaatgggctctgttaagaatgttcttatgttagcagaaagaagtttacattgtatgaatcactactttaaaaaaatgtgctcaggattatgagatgaatgatttaaaataaagtttattgtctcacacattttcacatattttaatgcaattttaaaattttgtaaatcttttttttttttttttgagccggagtcacactgtgttacccaggctggagtgcaatggtgtgatctcagttcactgcaatctctgcctgctgggttcaagcgattcttgtgcctcagcctcctgagtagctggaactacaggtgctcaccaccacgcttggctgatttttgtatttttaatggagacggggttttgccatgttggccaggctggtctcaaattcctgacctcaggtgatccacccgcctcggcctcccaaagtgctgggattacaagtgtgagccaccatgcctggccctaaatctttaaaatgaaaccccaaatcatttctcccttatctgatctggtttaccatattcagaatgttaaaaattaaatttgttttaacaaactaaaagaaaaacctttaaaaaaccaaactatactaaaatatttatttaatgaaaatactttgttagcatgcaaatacttacttcagaaaggaaccaaaaaacagtttgaatttgggataaacatttctagtattatttattttagaatttttttttttttttgagacggcttcttgctctgtctcccaggctggagtgcagtggcgcgatctcggctcattgcaagctccgcctccttagttttcgccattctcctgcctcagcctcccaagtagctgggaccggaggcgcccgccaccatgcctggctaattttttttgtatttttagtagagatggggtttcaccgtgttagccagggtggtctcgatctcctgaccttgtgatccgcccgcctcggcttcccaaagtgttggaattacaggcatgagccgccgcacctggctgaaaaatttttacagtgatccctcccttgagtttcagtcagtttttgttatagtcgctaagagagagcatcagcctgttttaagggcagcataacttggagcctatgcacatagctttggtatagtgatttccaaacttaactttaatttggaatcctgcgtgctttaagacacacagaaatttatgtcccacctccagatgttgtgatttaattggtctgtggtatggcctgggttttagaattttgaaaagatcaacaggtgattctgttatgtagaagtttgggaaccagtggcatggcagacagttttcagcaaataattgttaacattatctaattgatatggtcttatctaagttaaaatgtcctgtttttttatcaggcaatatctgacttggattttggtgacatgtgcagagcagccttctaaaataactaggctcagattaatcagcttcagatagtttaattttaaaaaattaacatacttttttggagcagttttaggtttacagaaaaaattgaatgaaaagtagagttctcttgcaatcccttacaccacccttccctgctttcctttattttaacatcttgtgtgctccatttgttataattgatggaccaatattaatacactattattgtctgagttcatagtttacatcagggttcactgtgtgatgtaaattctgttgattttgatgaatgtatgaagacatatacctactgttgcagtatcataaagaacaataacttcactcccctaaaagtctcctgtgtcccaccaactcatctctccttccctcctggtaaaaccctggcaaccagtgatgttttactgtccccacagttttgccgtaaaatgtcatagagttggaatcataacgatatgtagtcttttcagattggcttcttttacttagcaacatgtggttaaaattccctcatgtcttttagtggtttgaatagctcatttcttttattactgattaatattctattgaatggatgtatcatagtttatgaatctattgaaggagatcttggttgcttccacgttttggcacttacaaataatgctgcaataaacactcttgtgcaagtttttgtgtggatgtaagttttcatttcatgtgagtaaataccagggaatgtaattaattaattgtataagagcatgttcagttttgtaggaaactgcgaaactgtcttccaaagtggcttgtaccattttatattcctacctgcaatgaatgatgagagttcctgttgctccacattttcagcagcatttgatggtgtcattgctttggattttggtggtctgtttgtttaaaaactttttttcactttattctgaattttgcatatgtttggtctaaacattaattggcaatgtgagttcatggaacttgcatatataaagaaatttccttctgttctgtgccaggaaaccagtatgcagaggataaaacttgtggtgaaatatgggcaatgatttaggtattcatagatgttttttggataaggaaatgttgtaagttatatatgtagtttatcttttaatagccttttttagataataaaatttaggtgtgtattggaaccggttttgttacatttaaaacttctttcctgaaagctgttggtttatttttagtcatttttattgtgattggtttccccttaaaaaataagttaactgccaggttaacttattttttaagtggtgactcacacctgtaatctcagctgtttgggaggttgaggcaggtggatggcttgtgaccaggagttaagagaccagtgtgggcaacatagtgagactccatctgttgaaaaaaatttattcaatttgttatagtgactattgcttttgtttattagggacttaggagtaagtttaaaagtggttaaaaagtagagaaaagcatccagtttatttctgttaatactttaaaaacatttttgggccagacatggtggctcacacttctaatgttaacattttgtgaggccaaggaggatggattgcatgagcccaggaatttgagaccagcctgggcaatttggcaaaacttcatctctacaaaaaatacccccaaaattagccaggcatggtggtgtacacctaaagtcccagctacttgagaggctgaggtggggaggatcacttgagcccaggaggctggggttgcggtgagccgagattgtaccacttcactccagacttggcgacagagtgagaacctgtctcaaaaattcatgggcactaagcctaaatgcaatatgttttacaagtttctgaaaattcaacagttcatttttattttgaattttgaaattcagaaataaaagcatctccgtgcctagaacttttttgttatataaggaagtcagggaaagcttagtcattgaatattagagttatagaagggctttcaagcataatgcaaatcactttgctcattttgtggatgagtaatgagaatcctgaaatgcaaaacccaaaacatctaacaatacctaaacgtgattgttttcctaaatgaacccttatttatttattataatcttgttgaatactaaaggcacagtctgtaaaatttgactcgaaaatttagttttcactttttcccattttattttcagtatccatctgacaagtttttccaggcagctttaaattgcagctctgaataattatgtctatctcaaatggttttgaaccatattttttagcagtttattttagtgaagtttttgttttttaaagaatcagaccttgaggccgggcacggtggctcacacctgtaatcccagcactttgggaggccggggcgggtggattacctgaggataggaattcaagaccagtcttgccaacatggtgaaaccccgtctccactaaaatacaaaagaattcgctgggcgtgatggcgtgtgcctgtaattccagctactcgggaggctgacgcaggggaattgcttgaagcagggaggtggaggttgcagtaagctgagatcaggccactgcactccagcctgggtgacagagcgagactctgtctcaaaaaaaaaaaaagaatcagaccttgaatacctagtttgtacagtttctaatgtcttgatgccagagctgattaattatgctatatatttgttttctagttaagcttttaaataagcctagtggctatttggaagttggtatgaattagtaagtttttagtagctattaggagggtggatttttaaaatctttaaaaatgtatgttgccagatacatgtctatgatatttatttaaactttgtattttgaagtaattttagatgtaaagaaaacttgcaaaagtagtacacagaatttctgtatgccctttgcccatcttcgtgtcatgtgagcatcttacatgaccatggtacatttatttaagaaaccaatagtttaacagtggtacagtactattgactaaagtacaaaccttactcagatttcaccagtgtttccattactgttctttttctgttcttagatccagtctttaattcctctttgtatttaattgtcatgttgtcttagtctccttggtttcctccttatctttcataacctttactttcttgtgaagtactgttagcattttgtggtgttgtttgttttggtagcttgtctctcatcttggttttgctcgatgttttctcatgattagattgaagttatgcatttttgggaagaatgccatagaaacagtattgtacctttctcagtacattttatcagggagtatgtgatgtccatacatcttattactggttataataatcttgattgcttgtttaagattgtgtcttctggatttctccactgtaaataaagttattatttttttcccttgtaattaatgaatattatgagggagctactttgagactgtggaaatatcttgtttctcctcatattttcagccactaattttagtatccctctgtgcatcttgcctacgattattgtggtgtttgcctaatgaagttcattacttgtatatttattagttgatcattacgttagaaagaattttcttcttctccatggaatcattaatttcttctgtgaaataaagtctaataccatattttttttgttacttaaattgtttcagctttagccatttggagcttttcaagtgggctcctgtatttttttttgacatgctccacccctctcttaattcctttttgtggactgctactttgctttaaagcgccacaagaatttctcttatcttatagattgtctgcctctcctctctgttttttttttttttttttttttttgaggcggagtctcactctgtcgctcaggctggagtgcagtggcaccatcatggttcattgcagtcttgacctcctgggctcaagcgatcctcccgcttcagcctccctagtagctgggactgcaggtacatgccatcacacctggcaaatttttgtattttttgtagtgacagggtttcaccatgttggccaggctggtctctaactccaggtgggctcaagcgaatctgcccaccttggccttccaaagtgctgggattacaggcatgagccaccgcactgggtcctaaagcttatttttaccatactgcactagcagacctcatcttttctgccttcatatagttcacatgtgcagcatattactttagttaatatctcttatttacatgtaatgaatgtcaaattggagggaagatttctctaaatgacatattcccacccccactcccagtcctcagtagacttttatattggttcttcccttgctcctcctccagcctctttcccattgtaaagtatatacttgcctgtcctaaatgagtgggttttgccctagtgaagatacaaggggaaaggatattctgggaatataagcttaaacctaagagaagaaaaaatttaactttgagtaggaaggaagaatctagttttgataatttgcgaaaggaggaaggacatatcccagattcttgtcaagaacagtgtggggaatgagacatggcaagtattgttaaattgaaataacatgaattttataataggaagtttaataattttgtttgttaacttcctcttaggatattaccttccaaatgatgatggagaattttatcagttctgttacgttacccataagggtgaaattcgtggagcaagtacacctttccagtttcgagcttcttctccagttgaagagctgcttactatggaagatgaaggaaattctgacatgttagtggtgaccacaaaagcaggccttcttgaggttggtgttcacagtgagatagtgattcattgataattttaagaacagagctcatgttggttggcattttaagaattttaaggttatgtgagagttgccacaaaaatcgaatgctttggctgggcgcagtggctcacgcctgtaatcccggcactctgggaggccgaggcaggcagatcacgatgtcaggatatcgagaccatcctggctaacacggtgtaactctgtctctactaagaatacaaaaaattagacgggcgtggtggcaggcacctgtagtcccagctactcgggaggctgaagcaggagaatggcatgaacccgggaggcagagcttgcagtgagccaagatcgtgccactgcactccagcctgggcgacagagcgagactccgtatcaaaaaaaaaaaaaaaaaaaaaaaaaaaaaaaaaaaaaaaaaaaaaatcgaatgctttttaactaaaataataaatttagagtgtctttttttgaaatgcttaaaaaaatcttttggccacaattatgctgttggttccactgtggcagagactttccctagggcctatccttattttgcgcatagtggatagtgcagtaagtaccaattgggagagtttaggtctaaagctttccttatgttcctttgcctaactttttgtggtggcgtaatcagttcattgtagaatgttaccgatttggggatgaagctgcttgggataatggtgtaaatcaataaatctaactgtaattggatgtgaactttgtttcactaccatgagcattctctttctaaagtgtggcagtgagtcaggggagcttcccagtctcttaatttagattggacatttttagaatgattcctgttgtacttctgatgaaatgaataagcctagattaaccataatttaaaaagaaaatttaaaaagctatttactccttactgtttttgtaaatagaatattgtggagtcatgatcatggctttaatataaatttactatgtagatggtctaataatgccttgtgtattaatttttagtagtcattgacagaaaaaatagagtgacattcttttctcattttaagatcacatttttcaatatctttatcctatacctaaaaaactacagtgttatatttgagttattgtgattaattgtatatagtgccctctattataataataagaaaaatagtttctcaaattggttcagtatacatttttggctaatttatattcatatttcttctattgcagctattgctttttctttatagttggatagatttttttaacatgtaaatatttaatacctttgattttacttttatttacctcaaagaactgagactggagtaaaaagacaagaggttacagatagaatacttttattagacagtcaaactaggttaggaggaactaatgattttttattgtgaattctttcatatctttccttcccctttacagaaattcctctcttatcttaaagaaatgtaacttttatagggtgactaaaacattttgtggtgcaactgcctgatgatcaaggtttttagctttgtatttgaatgccagtcaaagatgctgaaacaaacccagatcttaagaatgcagtcagtatttatattgtagctttttgaatacttattagaccaccctcatttcagggcctccaacagaaaagtgatgggcattttggcattcacatttatcttgtactttttcttcaagtagattgagacatatctcattctgtttcactccttcctactccacaaagggtactttataaagaatgtgaaaattgctgtttcttaagtaaatatttctgagattaaatgtttttttaacaaatattttggtgagtctttaaaattctcacattcattaaaatctttatctaaaactgcacaaaattattacaaatgtgagacattatctggggtcctgttgacattaaaagtgattagtgagacataattttgcaatctgtggaccttgattgtgtcctagatttaaaaaaaaactggggggatagtgagggatatttgactatggcctattggaggatataaaattattcttaatattcttagctataataatagtggtggtttaaagccaactgtccttattaggtgatgcttgctctgaagtatttaggagtgaagtgtctgcaatttcacattaaatggcttagaagaaaaaaggatacataaacttaggtatataaagagataaacatgcaagatattaataatcagtgaatttaggtgatggatgtttggatgatcattgtaaaattttaactattttgtatgcttaacatattccaaaatacaaaattgaggcaagaaatgagacatatacattcttatctaatttgaattcttctaaaaatgtctacttaagctttagtgaactcttgagaaagtatatgtgaattaaataaatcactggaaaaggtgattcttttataaagtctatgttgtgctatgtcaagatatatctttatttttaagttgccagagttttgagccagatttaatgccaaattaataatgacattaacctttatgggtgatatacttgcctggttctaattttctgttgactttattgaatgccatttattgcaaactatttcaaatcattttttaaaaatagataagatataaaaaaattcaatgattgaataaataaacttttcctggcattttgatttgatttgttggaacaggtagaagagtcattcagaaagtttgcagctattcaactttgataagagccattttagaatttaatcagtttgatttcataatcccatgaccctggaaaaccaatttggggtgtatggaggaaaaacattttaccaattaaatgtataataccacctttgttaagtcttccctgtgagtcttcattcttcctgtaagagaaatattaactttgttttactatcttatgaccatttatttagtaatcttttagaatattgaagtttatattttcctgaactattagctgttcccataagaatcaggtatattgttaatatgttgttacagtctgcatgtttgtcctaaaatttgtatttttacttatgaagagtgttttaatttagccaagtagaggccattttatatatagaaactatacatttcttggtgtcttaaggaatcagcacttttagtagtaattccatagatgaaggccttatataccatatagtaagtttgtgatagattcaaagatttcctataggtttgcattcaagaagaggtacaacttttcctcttggagtatctgattattactgtggataagaaagccctgtaattaacgggaacattaatatgccttatttttagttctgatctcaaaaatgattagcagccaacttcataatacagttctctcattttgtaatattttcttctttgctcaaccaaaagaaggtttaaatttatgattgatgaatttttctaactgaaggctaaaaaaaggctgattgatataaagtaggtagaatgtaagagttctttctgtgaatgtcttcattattttttttggaaatggaaaactaaatttgtaataacatattttaggattaagcaaaaaactaattaatctgagttttttgctttatagttgaaaattgagaaaaccatgaaagaaaaagaagaactgttaaagttaattgccgttctggaaaaagaaacagcacaacttcgagaacaagttgggagaatggaaagagaacttaaccatgagaaagaaagatgtgaccaactgcaagcagaacaaaaggttagttgtgtcttatgtaactgattgaagttgatagtatattgcctgaaacccacctttttaaagagctgaaccaattaagtaagtgaaaaccaggtactgagaaaagtagccttttagatagacgtttatacaagaacaggtcagttcctattaaccttctgccacagctgcttttatgtttgtaagatggttaaaatacttttagacttttggtaccaggcttgttgaggtagtccctgacaactatttccagatgttttacatctaattgtagaatacttgattttttttgtttagaaatacaattagaaatgataaacgctgaataaaggaaaaatgggatacataaattaaaattacttttcaaaaaagcataatttggtgaaataagatgtagtattagacaaaattttgaaatttttaatgggtgaaatgctatgttatcctaagaaacaaactagttaaaattggcagaatttcttgagctaagaaaaagagagacaggtacaatgaagcagaaaacattgtggcttcattagtgatagaaatagacttgtaagaagccaaaaacagtgaaaaaacagttatctagtcattgacttgtttatttaatattttcacaagaaaagcagtttgttctgaaacttacacagactgtgatcttatatattacagtctcatgtacagtagagccggttgggcatatttatgcccatttacagtattgagctattgtttcctgagggtggggtctgttctgttatccttttgtccaacaaggcctccagcaattgcttaataattgctaaatgaaccgctagtgcagtgattctcaaacatttgtatactccagtggagtggttatatattgcacacctgggcagagatgttatacaagtaagtcttaaattctgaaaagattttccttgctttgttctatttgtttgaggattgctcttttgagttagagggtaaacataatgtcaagtactatgtacatttacaaatctccttataaatgtgaagtcttcaattctgtcttttctatcgttagcctttttagttaaaaatatgcaagtatttcccagttttactcctggggaacacttagtgtcctgcagcagactataggagtaggattttccatttggttaaggaactacttttttcatttgaacctttgaagcaggtataccaagtattaaaatatagtaaaatctcataatatgtgccctcgatgactattaggacattcagcaatttttttttttttttttttttttttttttttttactcatttgttgtaattctcttgctgctttgtgtagttattactctctttttctccattcttcacatatttttctcatgatttatacctggatttggtagttttccaaagtttaatgtcaatcttttttttttttttcactgtattacaagccagagggatcaaggtgagatagatgactcatgaaaaaggcccatttcaccatgtcctaagcccatgagatcaagaatatcctgaaatgtgggctttgaggttttgactctgattactttgaaatccaaggaaggaatggatgattgtgagaataggaatggcggaatgataggccttcatttgtgtgaaattacatatatatatacacacacacacatcgggccatttctctggtccatttgagtagtagctaagatttaaacagtctcagattctctgtgctctccaggtgataaaggggttaaggactacagacaagactaaagtggtagactgaggtcaggggattaatgaagcaaaacttgtaggacattgtggccttggtgctcagaagaggtcttcagcagaagtttttatgccaactcttaaatcttgatgacagtcacgaatcttggaggagactgcttctctgctgccattcttgcattggggcatattctctgggaagcacttgaaagtgattttttaaatgatattccatattatagaaaaaaattgacaaaggacctggaatggtacttgatgcatgggaagttctctctaaatgtaagtagctattattattttactgtttttcataataggaaccagagaatcatcaaggaaggactacaatataaagtgtcatccaacaggactggaaattcatagcatttccctcagattctaaaagtataatggatacataatgtaaccaaaaaaaccctctaagttataagacatatgtggtgacaattgtttatttctggggataaaacgtgttggccaggagaga

SEQ ID NO: 408 - DNA, 8220 bp, Homo sapiens
  source 1..8220: mol_type = other DNA
cttcccgccagtcccctaaccctgaggctgccgcgcggcggtcactgcgccggggtagtgggccccagtgttgcgctctctggccgttccttacactctgcttcaggctccagtgcaggggcgtagtgggatatggccaactcgggctgcaaggacgtcacgggtccagatgaggagagttttctgtactttgcctacggcagcaacctgctgacagagaggatccacctccgaaacccctcggcggcgttcttctgtgtggcccgcctgcaggtgagtgccccctcccgcgctacccacgccggggccgggatgcccagaaggcgcttcctcgggggcacacgtggccgatcgggccaggaatgcagttcttcttgatgagggtactaggacgcggcttccgcctcctgggcgggtccacctcctccgctgcgcccactgcccggccctgcccgggccacggtgccctctcgggctgcctggagctttccccctcctggcctttgcaccggctgctcggtctgcaccgatttggcctctcgtccactaacttaacagattgcatacagttggtacttctggagagtcttctctgacccgtgtctgggaattggttgccttctgttctgtacataacctttgttacagcacttctcacctggcattgtgaaaatccgtttacctgcctttcgctcctcatctaagaggtcctgaaagctgggaccatgtcttatttgtaataatgctgtgttcagttaggtcaaggggctgcatgaactataaccagtgttggtaaatcattgctcttcagcccagtccattcattcatttagtacatattcttccggcacttaacactaagggtataaacatgattgagtaaagtggctgtttcgaggaactctcagtctgtaggacagaggtgcaatagattatgttcaaaacctttttgacagcgtcgaatgagacaaacatgatctctgctaacatcgtgagttcttagttgcaagcaacagaaactggctgatttaagcaaaaaaaaaaaaaaaaaaaaaaaaaagaatgtgttgaaaggctattggagagctcacagaatgaccaggaaggcaggagtacaaagctgacaaaacggacaagcataaagggaggcacagcaactgtaatacagtgggcatcacacaacagaaccagcccacggagcctcttccacgccactgctgaacttggtaaacgtggatgctgtattgtccaccaccccctgccctggacactgcctgcctctgtacatccctgcagttcctgaaacccaaatgtgtcagcctctctggagtccctgctgtcttgggcactagcttctaattgaaagccccagaatgtcccgattggctaagttttggccacgtacccatgccgtgattttaagcaaaactgagagaaccagcttctggcctttgaagcctcaaaaatgggagtcaggctctgatactccctattcccaaactcgtaaggtagggaatttcccaactgtaggaagggagtccaaatgcttacagtcagggcaaggggaagagatattaaacaagggattattcagttacaggtatatggtccatcttaaaaaggaggcatgcaaagtgcaatggggcgtatgaccagggtacctgacctaaccaggatgctcaggaaagccctgcctgaaaatgtgacttttaagttgagacctgaatgattgtagaggtggggagcacacaaaacagggaacagcatcttctgcaaaggacctgaagaaagaggaagctggatctttcagtcagtgtggctggagtttagtaaggggaatgtggcatgaagactggagatatgtggaagggccacatcttccaggaccacagaagccaaataagacacactgcagaactaaagcacatgaaagatagatttctatctccaaaagcccattctggtcacatggaaaatagatttgaaggagggaagagtgaatgtggagagttcaagaagtttttgcagcaatttatgccaaagataatgaatggcatcttgaactagggtggtggcagggcagggtggatggatttgagaactaatttggagataacattgttaaagcatagtgattgagtgtgaagagaataccaaagatgactcaggtttttggcaccaggtagatgcaggtgatgtttgcagagaaaagaggaaaatccggcttgggaggagaaaattttaagttcagtttgaacattttgaatttgaaatgcttgctaaacagtcaagtgaacagaataatattagcaaacatttattaagtacttactgtgtgctaggccctgttctaagcacttctgaagctcagaagagagatctggtctgggtttaaagatgatcagaatatttgaagccattggaggggatgagaatgtcttgagcaaattgccaaatgaatagagaaaatggcctagaccatgggtgtccaaccttttggcttccttgggccacactggaagaagaaaaattgtcttgggccacacataaaatacactaaaactaatgatagctgatgagctaaaacaaaaacaaaaacaaaaaaaaggcccatgcataatttttgtgatgtccgccaccacaggtaagcaaaaaagttcttgcatccaaagggttggacacccatggcctagactgagccttgagcaactccaacatttaaaaatcaggtaatggaggaggagttggcaaaggggattgagatcaaggaacagcctgaaaatcaggaaagaggcagatcaggagaaggtggttacctatgttccgctgagaagtggaacaagatgaggaatgaaaatagtttattggatttagcaatacacaaccagttagtgtgaattgtaacttttatcacatctcctggtgtcctgccagggacatgtggtcctagaagaacatctcttatgctgaataaaggtactggtcactccaaccaccccaattcctgagatgtctgacaagtttttctagaaaatataagtgacagggataaaatataaacctgaaaaggatcctagaattatcgtttagttcaactttttaaatttatctataaggaaactaagctctggaaagatggaaagaaatcttcctagaccaaataagccacataaggattctgtattttatttgttttgtttttgtttattttttagtttgttttttcatgtaaggatttttaatcttccccaggactctatcccctgattgcccacctctgtgaggaaagaagttaaactagaaacctaatttcattacttattagttccaagaccttaggaagattgcttaatctttctaacccacagtgtttattgctgtaaaatgggtataagaaagttgttagcaaaataaaacggaatggtccataattatatattagccaatagcactgtgtacaaaatgatccacccgccacggcctcccagaatgttgggattacagacgtaagcccctgcacctggcccccaaaacacactcttttatccatgtctttgggcatgctcgtcccctgcttaaatggccttcccatttgcagttagtgttaggtgctcttatgattattgtagataaattagtataattcgtgagtattagtgttcataagtacacaaatcattcatcctcaaatgccaggtccctcagggcaaatttggtgatatatgttggtaggatactctacagacataaaaggagagagaatattataacccacatgtagccatcacccagcttgtctctaagtaaaaatttatgtgtatgtaagaagactgggaagtaatttgcaaaaatgaaaacaattgtgttcaggcattggggttatgggattttttttccttaaactttttgtttttgttaagatgtctatacatattcagtgtatgtttcatttttaaagaaaaatatttaaaaaacgtaatccttgggatctgggtcctgtctgtttaactttatattttccacagcttcttatgcatagaaggaactcagtttattgactgttttaattgcatggagttcaaggtaaatcctttttattttgatgagggaaatttggattcaagtggatattgatcatatcactttgatttcctttgtaggattttaagcttgactttggcaattcccaaggcaaaacaagtcaaacttggcatggagggatagccaccatttttcagagtcctggcgatgaagtgtggggagtagtatggaaaatgaacaaaagcaatttaaattctctggatgagtaggtggcttctaattataagttaaacagtaattaattcagaaagcagattgtatgtgaggatgtgtacctgtgtgttagtttttcaaaaccacatactacagacatattcattatacttttagagtcaacataaaaggcatgataatgtgagtttgctaaaaggtctagaaaggctatattttctgataaagatttggggggatgtttgtaatctcttatgtaaaagatggaagcccttatttttcattctattgtctttcataatttttctttatagtttcatactgtgaaaaggcatgaagatttctgtaattgttacatatttttgttgattttgaaagtacttgaattcagtttttaaagaacaattatttaagatggcaggtgaatcagtaaataagtaatactttgtaaaagcatctgaggacatgttagaaatgctttgatactttttatgactagagctctcagagttgtgtggcagagcatttcatacaaagaaaagttgcagaaaagagtaggccttgagaagagagggttatctgacatgctcgatactttacctcacttgtgaaggagaaagagccatcctctctacctttgttctaggtggatattctcttgctgtcagaacaccatccatttttgtagcccaaagaacaatgtttccatagtataaagttgaaaaaaaaaacaaactatattgaagcctctttaaagacaagataaatacagagagttatgttaggagtataacaagtaatattatgtctcaggccttctaattgaaatgctaagctaagcttacttttttttttttgtaacggagtctcgctcttgttgcccaggctagagtgcaatggcgtgatctcggctcaccccaacctctgcctcccgggttccagtgattctcccgcctcagcctcccgagtagctgggattacaggcatgcaccaccatgtcggactaattttttgtgtgttttttttttagtagagacaaggtttctccatgttggtcaggctggcctcgaactcctgacctcagatgatccacccacctcggcctcccaaagtgctaggattacaggtgtgagccactgcacccggcctttttttttttctttttgagatggagtcttgctgtctcccagcctggattgccacagtgcaatctcggctcactgcaacctccacctcccgggttcaagtgattctctagcctcagcctattgagtagctgggactataggcgcccaccaccacgcccggctaatttttgtattttagtggagatggcgtttcaccatgttggccaggctggtcttgaactcctgacctcaagtgatccacctcagcctcccaaagtgctgggattacagatgtgagccaccgtacccagcctaaatgctaagcttacttttgatgtggtaaatttatatattctctatcccaaatacatagggagcaagtatgttcagatgtagttaaatgtttaatcccatacaccatcttgactattataaaaagaccttacccagtgagctaaattggctaggtcaaatgtggttaaaatttggctgttctggtttcaggcaagaaggggttaaaagtggaatgtatgttgtaatagaagttaaagttgcaactcaagaaggaaaagaaataacctgtcgaagttatctgatgacaaattacgaaagtgctcccccatccccacagtataaaaaggtaagctatttacagactggtggtgattactttttaaatttcactgagagaaactaaagaatatattgtttttaaaagactttaggcccaacgtggtggctcatgcctgtaatgccaccactttggaaggctggggcgggcagatcacctgaagttaggagtttgagaccagcctagccaacgtggtgaaacctcatctctactaaaaatacaaaactaggaggccgtggtggcgagcacctgtaatcccagctacttggaaggctgaggcataagaattgcttgaacccaggaggtggaggttgcagtgagctgagatcaggccaccacactccagcctgggtgatagtgagacactctcaaaaaaatttctaaaaaagaaataaaaggttttgtatgttttaaattccatgtaaacatttattttaataaaaatgtttttaaatataaaaatgatagttatttacctaatgtacagattcaaaaatattatgtgtaatgatagaattatgtttttaaaactatttattaaaaaaatttttagaaatatatgtgagtcagaattctagacatgtattttctccctttctttttttctttctctctttctttctttcttttgcctggcaataaatttttgcttcatttttatgatgtagacatgtattaaagtaggaaagaatatttatgagtgtattttaatagatttagtctctctctctttctctttctatatatatatacatatatgtatatatatgtatatgtgtgtgtgtatctatatatatatatatatgcttttgtaatgtttttctccccgtaacacagtattttatgaataccaagattcatttttataggggaaaaaaacatactttctactgctgaaatgtttttcatccctaggtggagaaagaaacgtcacactgcctttcagaatcagggaaatcacccttgcaagcacaagacaagaatgtgggatagagaccccaaaattcctgttcagaacctaagcttagctctctgttggcaggcccaatcaggtcatggcacctgtaataggtaatctggttcctaggcctcgtttggaattttttagtatgaaacctagagaaattagcctggtatagattatgaaagtaccgctaaacacagttgccatttattcccccatgtccaattcagagcaagggtaacctctggcgttgtaaccgaaactgctctctgtaaactttaaattttttttgaagaatggtattttttttcttaaaaggtcatataaattttatatagatatgtttgtcttaatattaaaatatttaaaatcatatattgagaaagttgatattccatgaggatgcttcatttggctttgaaaactccatacacattcatgctcagtgtgagaggaatgatggtattctattttatataattgtttattctagagttatctgaaagctaatacttcatactttgagaaggcaaataaagctgtggtatggtacgttaaattatattcctaactgaaagggtttttttgtctgtttgttttaaccatttccagattatttgcatgggtgcaaaagaaaatggtttgccgctggagtatcaagagaagttaaaagcaatagaaccaaatgactatacaggaaaggtctcagaagaaattgaagacatcatcaaaaagggggaaacacaaactctttagaacataacagaatatatctaagggtattctatgtgctaatataaaatatttttaacacttgagaacagggatctgggggatctccacgtttgatccattttcagcagtgctctgaaggagtatcttacttgggtgattccttgtttttagactataaaaagaaactgggataggagttagacaatttaaaaggggtgtatgagggcctgaaatatgtgacaaatgaatgtgagtaccccttctgtgaacactgaaagctattctcttgaattgatcttaagtgtctccttgctctggtaaaagatagatttgtagctcacttgatgatggtgctggtgaattgctctgctctgtctgagatttttaaaaatcagcttaatgagagtaatctgcagacaattgataataacattttgaaaattggaaagatggtatactgtttttagaggaataaacgtatttgtggttta

SEQ ID NO: 409 - DNA, 32744 bp, Homo sapiens
  source 1..32744: mol_type = other DNA
ccagcgcgcatgctcgcggctcggcgctgaaattcaaatttgaacggctgcagaggccgagtccgtcactggaagccgagaggagaggacagctggttgtgggagagttcccccgcctcagactcctggttttttccaggagacacactgagctgagactcacttttctcttcctgaatttgaaccaccgtttccatcgtctcgtagtccgacgcctggggcgatggatccgtttacggaggtgagtgagtttgcgggtgcagccagccatgacccaccgctctaggcccccacccaccttcctctgtcaacctctgggcgaacccccaccgggcggagggcgcgtgtgtgcgcgcgtgcgcagtgtgtgcgggccggggtcgccgcggctgcggcctgctgtggttggtgggttcctctgagattttgttgtttcggtcctacagataaaactcagggaggaaggctttgagtctgtcctaaaaggctgttgcgagaggtctttcagcccccgtttttaccatgtccctctgcagtcctggcgcagcaagagtgaggcgcaggcctgcggaacgggtcctgctggaagcagctggaatgccctgcagggcggggtccggggccggtgactcagtgcggctgccgccgggaaaggcagtaggatgtgtgatttgcggagttcacgcagcccgcaggggagatgctaatgaaatgacagcaaaacgttaaaataagcaggtgctagaaaccactgcattcgttcataaaaagccagtagttccttgagatcccattgttcagctaactaacgaagaagttcatacccgggactgaccattttaattgaaacaatgcaagtgtaccgagcaaaactatcagctcacgattttagagcaaagaaataaacttttcggtgtttctggggcatatcattacagtacttatttcatcttttgttcctttgagattgcatatgggttacatggttattgtgtcgatttctctagttttagcttttgtggagaatgtgcgttgtcacattcaggagtgttttgttgccagttgtccactctcttttattccaggacagttcctctttctttaggctgttgtgcaaatttcaaactgttagtttttgagtgttgcaaagtggacctaaaactgtttacactgattcaaaaacttaaatgctgtgaagagtggtaattctttcggggagatgtaattataattctataagttatgtatgagatattaattacagatttcagcaattagagtttacttatattcaagcatgacataatctatttttctgtttcaaattcttaatcatcttgggacaaatacatcaatttttttcaccttccttaaaggttctaatagaaaaatctagagcctatttttgtattagccttaaaatagggctggtcatgcaccaagtatctttcacttacactgaggtcgaaaagcgtgtatttattttatctaaactagaatacgattccttaaaacattagccctatgtgtcttcctaagtaacagacaggaacaaagcatttttaagttggctgaaaattgcacttcattttacttaaaaatgtcattctgaaggtagtacaaatctcaactgaaagaaactttacctgtttagatcgttttaggatgtgctcagaaatatgtatggtttatattatgaaaagttagatcacttgcagttggaaaaacagcttagacgtcttttccttaataggtaatgaatgaactacttgaattgattccaactcttgggtgcttaattatagcattcataacatttgcacagtgaaatgagctactggtacagttgtctatcaactgaaagtcagtataaaatgactctctcaaccagggtttcctctcagaaccatggtacacaggaaaattgagagactattttctcaattctcccaaggataattcaatgccaccctacaaacataggaaataagtctatcatattaacgccagcgtattagggcttaattattttggtaactccagttgagaaaggttacaatcatggtaaactctcttttcctcaaacaagactgttctgcattggtcttcctccctgtggtcgctgatactgttctggcactctttttttttttaagacggagtctcgcagtgtcgcccaggtgacaaaaccataaactcactactcataacgtcaagagtttgaagctctactcacaggtgatagtcatcccagtacaagaatactacaaagaaacccagagtgaagtgtaccaatccagaactttctttataaaaaccttaaaagagaaaaagctataattaaaatacttcacagaagcatattttattgtagacgctttagatccttttatgtctgcaggctgcatataaataagtatgcaaataaacatgccactaccatttttagtggaatttctcttattttccagaattaaatgaagttccctggggaagagctgctagagcatattgaaaataataagaagttaatttatattgagtctactgtgttaaagaaggcaaggaaattagtaaaatctcctagaaaaatttgtcagagatgactttggggtgtatgtggcaaaagttgttcagggactataagcttcagttacctgagattcatacatgtgggctatcctacttcttgaatatgttattgcagtggtttttttttttttttaatgcctacactgtttgagaaaggtgtgatatttcaaggaatataccttgtatttaaaagagttttaaaattcctgatatactattataaggaacggctacttacatttattgagctattgagtttatatatttaagatatataatttcttttaatttaataacctttggtgtttatagctttacttcacagattagggatctttttttgtgtatctatttaatttttttttaatctgggaatttttgaatctaatgtaagcaatagaacattcatatacgtttgaatgacaaaatcacattcttttgttgtgacctactgctcatggtaactgaagctgtactgactcacaaatgttctaactgaccagaatggaatgtgggcatgtccacgaatgaatataattaggctagtgttgtatctgggaagtgagagatatagcaattgaaaaattacaaatttattaatttagaaaggagacattatttcttttttcttttttcgtttttttttttgagtcagagtctcgttctcgcccagactggagctcaatggtgcgatcttggctcggtgtcacttctgcctcccaggttcaagtgattcacctgcctcagcctcccaagtagctgggactacaggcatgcaccaccataactggctaatttttgtatttttagtagagatggggtttcaccgtgtttgccaagctggtctcaaattcctagcctcaagtgatccgcctgccttggcctcccaaagtgctggaattacaagcatgagccactgtgcccagcagagactttcttataaaggcttacagcctacagtgtggccatcctgacaggctgggaaacatatttaatagcttcgggcagagactggaaacaggcacttcaagagaggagaagctggaacagggatttatgcctaaagggttagccaggtatacatattcaacaggttataggcagagctatgagtatttacaaaggggtcctgatgggtgggtactgaacaaacgtgcagttacatgcatcccatgttcactttgggatgaagacttaacgtggaaatacattacagttgggccctatatgtcaaaaggtgaggtggggacatgaaggcattcaagtgagcagcctctgtaaactggccagaatcagttcatggttggtggtcttcttactgagatagatttattgaaatcaatctcttgtccaattaaagctgtagctgtagcttgtggagcaggagggttagtcagtgtctgatggaagatgagctgcaattgttttaatatttattgcttatctcaaggtcagtgcttgttcagctactagagtaaaagaaaaactttggcagttagaagatagtttattttttaagtgtagggagtttgtgacttaacccttgcctggcatggccttaggtcctagttatttgtttacagacagggtctcactctgttacccaggctggagtgcagtagcgatcacagctcactgcagccttgaactcctgggctgaagtaatccttttgcttcagccaccccaccccccaggtagctgggactacagatgtgccccaccatgcctggctaacttttgtatgttttgcagagacaggatcttgctttgttgcctaggcttgatcctgtttataatttgatatcttattgctacaaagagtcttctgtcagtcttatgatctctatttaacattaatgctcatcagttattgtgtttaaacagcaaaaggaggggtataacaaggtgcatgcggcctcctgttccatcatggctgagaactcggtttttaaggtttctctggggtccccttcatcaagaggggatctgttcagttggttgggaggattagtattttatttttagttctcatattgtatcatggggggaaattatcggacatatatggatttgtgaaacaatatgcttattcttgaatttgttgaaggacttttatttagcgggtgaaggtcttgtattttggaagccatttggttcataaattattttttcagtgattagagcatttcaatttagtgtcacttttttcaatgaactttaaattagaaatcattcttaagaagagtagagagtgtgccttctttcaaatttagctcatatttcttttacatactcagatttttaaaaaattgttactgtattttaaggaattaaaaagagtcaaatggaatttaatttttcagcctgcactaactactgtatctgagtatgcaaggcagtaataataatctgcatacctcctttagttgtgtgcatttgaaagaaaatgaattgttttacagggtcttgtgtttgagctttactaaaattgacttaaaaataggaacatcagttgatttggagtagaaaggagtattcatgactttatggaatggctaagatttcaatttaaaaccattttattatatgttaatatttagttaaataaaacataagattattttgtttttctttcctcttaggaagtgttttatgttttcaaaggactaatatgttatttatctcttgctgcttaccaccaccccagattttagtggctctattagttttgctgctgtaacaagttatcacaaatttagtggcctaaaataacatattcattattttacagttctttagagacagggtctcactctgaaatctgaaatggattttactgtgttaaaatcaacatgtcagtggaattgtgtttcttctggaggctgtaggggagaatctgtttcctaacttttcttgtttctaaaggccatctgtatttcttggcttgtcctgttcccccatcttcaaagccaaaaatcacattactctgacctctgcttccatggtcatattttccctgactctgatcttcctgcctctgtgttttccatcataaggacctttgtgattatgttgggcctgaccagataattcaggattatctccatctaaagattcttaatcacatcagtaaagtctcttttgctctgtaaggcaacatattcagaggtttagggtattaggacaaaaaatctttgagggaccattattttgcctaccatagtggcttaaaacaatactcttatttctcatgattcagtgggtcaacaatttgtattgtgctcagccgggctgttcttctgcttgtctctgcagtggtcatgcaggaatcttcagtgatctggcagattatctggagctggatggtctaaggtggccttattcatatgtttggtagttgatactgaccatcacctgggccatgtgtctcctctagtagacttaacctgggcatgttcacttagtggcagagagagagagagaccccaaactgtaaaatctcttgatgcctaaaagtctcacaatatcacttgtaccatattttattggtcaaagcagatcacaaggccagcccagattcaagggtgaagaaatagattctgtcttttgatgaaagcagaaaaaatttgtggccgttaaaaatcttatataactaactttacatattttattccttctgtaatattcctgtaatagttatgacattggggtactcatttagtgaatcttgacataattgcttaggatttcacttttgaaatgtgtttaactgtcatcctgtatggcaattggtgattttagaagatactgcaattttatgaacctttgattaaacttgtgttttaacactgatatatttatttatgtagaaactgctggagcgaacccgtgccaggcgagagaatcttcagagaaaaatggctgagaggcccacagcagctccaaggtctatgactcatgctaagcgagctagacagccactttcagaagcaagtaaccagcagcccctctctggtggtgaaggtaaaagactttgtggggaaaaataacatttactttttttttcttttgaaggagacaagccccaaacatttcattagcatatagaagaaccaagctctttgggagacaaatgtaacagcctctgggggaaataacagccttctattctatttcagagttattatattaggcctagaacctatagggttggaacggtttcttctaaaaaatattttaaattaattgattgaactttattttcttcattctgaagttatccttaaaacctcaagggaagaaaaataaaggagtagggtaacatttatacttacagtagtgtgtagtttttttatcccaggggtggcagaacagctggccactgagtttgggtggtgtctccggtaccagcaaggcaatggaaggcacactgcccatgcttgacatttaatgaacccttttcactctctatttgctgaaccaactctctaaagtttaggttgttaatctccagaagtggtggaattaaacacaagcacacacacacatacacacaaacaaaaactcacctgtagtcttactctttcctcaatcctaggattgattcccagccagcatcagacagcctccttagtcttttcctggagtgtagaatagtctggagataataatcttccttagtacgactgtaaaatactgtaatacaactgtaaaataaaatatagaaaaaattacagagggcaaaaccaatgtttttttaaaaaaaaagaaagcagagaagtgtacatggggctagctcagttattttggaagctaatcatagaacaagaattagttttcatacgtttatccattttgaagggagagtgaaggaaatacattacatattatatggtattcagccaggaaaataggggcctgaccctagtccaggatcttcgttttcactgtgagatgggtttgtactattgagtgctatgtatttgaaaccagtgttacctaaacttctttaggtagaagttcaaaactacatttcgatgtttaggtagaagttcacatttactgttttagataattgtaaactagaagaattctgtatttccagatggtattgcatgttaaagcaggaacactttcaaaaattattagatgtgttcatagaaaatagatcgataagtgagttataaaacattagaaagtttcaaaaataaaaaaaggaaaagaaaagaaaaaagagccaagtgtagtggctcacgcctgtaatcccaacactttgagagactgaggtgggcagattgcttgagctcagaagttggagaccaccttgggcaacatagcaaaaccctgtctctacaaaaaatacaaaaattagctgggcatggtggcacatctgtagtgccagctacacaggaggctgaggtgggaggatcgcttgagcccaggaagttgaggctacagtgagctgagattgcaccactgcattccatcctgggtgacagagtgaggccctatctcaaaaaaagaaaaaaagagacataaaagtggagtggggaaaaaatagattagaaagtttcatgatgtatatttacttaggttgatgtcaacgaggcaatcatgatttatccctgatactactttggtcactgccagaacatttgtttaggcagttgatgaaactgacctcatatgaaatgtaccttctttgaaaatattaattttccaggagatatattgaaactcatagttagaaataatatgccttatggttctgatagattttttttttttaattttagggctttttcagttattttataggtgttcatagaagcttgaaatatgaaatgttaaatatttgtactggtgaatttgtttggtattgaccagataattcagtcactttttctgtctcctgtcgtaatcctaaacctcaagccaattgcccttctaaccatgcttattagttattttccatgaaagaatgtttcaaaaacagaaaacctggtttctacacttggctcagctgtgtgactttaggcgggcaactgaatttctctaggcttgatttttcttatctgaagatgaggtgattaggctgtataatccttaaaatctgttagaatgctttcttattctgtgtgtatgcactttttatttactattgtcttaacactatataaagtgttatgcatatattttgaaaatatgatttaaatatctttatttttatttttccataagttattggggtagaggtggtatttggttacatgagtaagttcttcagtggtgatttgtgagattttggtgcacacatcacccgagcagtatacactgcaccatatttgtagtcttttatccctcgccccccttccgctcttccccccaagtccccagagtccattgcatccttcttatgcctttccatccccacagcttagctctaaatatcttttcattaaggtttttataatataaattgtgtctgcttgaaaagatctttcatatcagatttctaagttgctgaaagagaatggggttttacatacttctggttgtaactaaaatcatttaaaagaatagggaggggtgatgttttattaatttgttgagtatctaccctcaagtttttcatgtgagaaattacaaatttgaatgtcttttttcatcgtttttaatgtagagaaatcttgtacaaaaccatcgccatcaaaaaaacgctgttctgacaacactgaagtagaagtttctaacttggaaaataaacaaccagttgagtcgacatctgcaaaatcttgttctccaagtcctgtgtctcctcaggtgcagccacaagcagcagataccatcagtgattctgttgctgtcccggcatcactgctgggcatgaggagagggctgaactcaagattggaagcaactgcagcctcctcagttaaaacacgtatgcaaaaacttgcagagcaacggcgccgttgggataatgatgatatgacaggtatgaattgtatagatggtatggcccatacatctgttccaataagattcagtttggtatgttgaacattttatcagttaactcatgaaaaataaatgcttttgttttatctatatgttgagtatcctttgcttgcatatggtttgtctaccagtagtataagttggttatgtttagactgaagtagatcacgatgtggttcttggactagttcatagaaacctgatcttataactgtattaccttaatatctgcaatgaaaaacacttgagaacaaactatacgtgttgttagcattgctgaccctcagctccatgttaaagaaatcctatttcatggattcaaaaattaaataaacttgagggactaaggtatgcaatgctgttcagtaggggagaaataaaatgtcaaaaaacataaattgagcagctgcaaagtatattattacacacagtgctagaaatgaatgaagtggcttgatccttacctttcatgagcctataatcggaaggggaacctgagaagtaaagcaacagttatgcaacagggttatttatggtatgatcaatttcacttatcgcctgccttgttacaaaaaaaaaaagctttgagatgacttataaaaatatctgtattttgaaaccagaaaaatgaagtcaaggtgaagagaaaatacgggaagggaaaacaaagaagtgaaaagtaaagtcattttattaaatgcagactgtaaagtcttccttttgctagaggcctatgcgaagacatgaaacagttatcagttacatgactaacaagctaaaagcagaaccatctttggcactaagacttgcaatttggcagtaagagctgagagaactttctttcatgtgtccttaaatatgactttgtgggagccgataaacctataaggtttcttaaggcaggcagatgtcctggctccaagctcagtaaaagcatttcttttttcttttctttttttttgagacagagtctcactctgttacccagtctggagtgcagcagcacagtcttggctcattgcgacttccgcctctcaggttcaagcgattctcatgcctcagcctcccaagtagctgggatgacaggtgtgtgccaccatgcccagctaattttttttgtatcttttggtagagatggagttgcaccatgttggccaggctggtctcgaactcctgacctcaagtgatcacccgccttggcctcccaagtgttaggattacagtaatgagccaccgcatccagcagtagaagcatttctaaagtgagctagcatagtgcaggtagaccccacggtgcttgcagacagctcagtggctactgggcctcacccaaggaagcattccttaggtggttctcagcctggctgattgtatcagaatcacatagaccataggattagaatttcagaaatgtggtggagctcaaagatgtgcttttgtcttattttttttaaagctctttaggtaattctgatgcatagccagaattgagatcaagtgatctgaagaatggggcttggatggttgacagatattttagactggattaaaccagatggactacatatatttcaggcagtcttccatacatatcagttcttttaactgaaatgttgataagaattaggcagcagagagtttaagattatgttttctggaagtgatgataataatctcaagagcaaacagtatgtaaaatgctaggtattgcaaatattttttattctaatataaatttttttattctaatagcgtttaattcttataatcttgagatatataccacttttatcttcattttatagaagaaggaaactgggttcatagaggctaataaacctgtccacagttagccagctcaaattcaaatcccaatggtttgactttagagctcttaactcctgtgacctgcctgatgatttttttgtttttgtttttttgagacagagtctcactgtgctgcccaggctggagtgcagtggcgcaatctcggctcactgcaacctccgcctcccaggttcaagcagttctcctgcctcagcctcccgagtggctgggattacaggcacatgccatcacacccagctaatttttgtatttttagtagagatgaggtttcaccatgttgtccaagctggtcttgaactcctgacctcaggtgatccgcctgccgcggcctcccaaagtgctgggattatagacgtgagccacctcggcaggccacctgatgttttttggcacatagcatagtctatggtgtcaattaatacctatttattttagcagtggtgaggtaagaggtaggactcgactccagatgcgggacttggacactggacaagatagagaaataacaacaacaacaaacaaataaattaaaaaaaaattgaggactagctaaaacagggcctgggggaagcagctttccagtgacatgcccaccagtgtgccatgtcaattcatcattgccatggcaacacccaggagttaccacccctttccatggcaatgacccaaaagttactatcccttccctagatatttctacataagctgccccttaatgtgcatgcaattaagagtaggtataaatatgattgtaaaactgccctgaactgctactctctgcctatggagtagccctgctctgcacagggaatcaacagagctgtaacattgcctcttcaataaagctatttttttttttttttttgaggtggagtcttgctgtgtttcccaggctggagtgcagtggcacaatcttggcccactgcaacttctgccttccaggttcaagcaattctcctgcctcagcctcctgagtagcagggattacaggcacacgccaccacacccagctaattttttgtatttttagtagagacaagatttcaccatgttggccaggctggtctcaaactcctgacctcaggtgatccacccgcctcggcctcccaaaatactgggattacaggtgtgagccaccgtgtcctgcctgcacctaggttataatactagccttctaactggtcttcctgcttcagacctctgccctgtccagtccctcctcaattttcacaccagcgcgatttttctaaaacacttgcctgcttctgctttaaactctcccaggacctccccatcacctcctgattaaattccaatctggacctgctctttttcaaacgtatctctctattttgacacattcagaatggaaaaaaaatgtaactcttgcttttctactgcttgctttaaacaccagaataggatctacttatacacacactctgctcatgttacttacctctgctttctatacatttttgtttttctgactagattatctccattctctgaagccagttgtccttcagagtccagcttaaggagtctctccctcctccagaaaagcctccctgaccaccactttacctgcaataccctttatatacttctgttattttccctagaataaacactgtcctatcagcagatgacagttttattgtcatattttaggaatgggcttaataagacctctagctcttgtaactatactctgtggtgcatgcctgtaatcccagctacttgggaggctgaggcaggagaatgtcttgaacccgggaggcggaggttgcagtgagccgagatcgcgccattacattccagcctgggcaacaagagcgaaactctttctcaaaaaatataatataatataatataatctaggtgcaaagagtgaaggcctgtggaaatgaagaggagaagctggatttgagagatacaggagacaaactctaagacctaacgactggatggtggagggagaagggaggaagaggtcagattcctggcctcagtgactgggtagttagtgatgtcttttcctaagatgaggaggaatatgttcggggcaatttcaacttcacatatgttatttgggatatctgtgggagagccaaatggaggtatttggtagttgcaagactgtgaaggataagccaggaaggatagtagagaatgatgtcacaaatagaaagggagtgatatattttagagatgtcaagaaatacaaagcctgcaaagtgtgtactggcatctagtgacaatggcaaaaccaacttcagggcagtggtataggcagaaggtcagttgagtgagttaagtggtgcgtgaatattgtgcagggaaagaggggcggtagttaaagaggatgtatatcaatgaggggatgtttattttttttgagacagggccttgcctcattgctcaggctggagtgcagtggtaatgctctcagctcgctgcaacctcctccacctcccaggctctagcgatcctcccacctcagtgacccgagtagctgggactataggcgcatcaccaagcccagctaagttttgcattttttgtagatgttgcatttttcgtaggttttgccgtgttgcccaggttggtcttgaagtcctgagctcaagcaatccacccgccttggcctcccaaagtggtgggattacaggcatgagcccaccgctccttgccgggatgtttgtttgtttgtttgtttatgagagggagtcttgctctgtcaccgaggctggagtgcagtggcacgatctcggctcactgcaacctccgcctcctgggttcaagctattcccctgcctcagcctcccgaatagctgagtttgcaggcgcccgtcaccgtgcccggctaatctttgtattttagtagagacagggtttcaccatgtcacttaggctggtctcgaactcctgacctcaaatgatctgcctgcctcggcctcccaaagtgctgggattacaggcacgggccctttgcaccttgccagtatgtttatttctaaggtgagagagacttgagcatccagtagtctccccacttatccgctgggtatatgttccacgaccaccagtggatgtctgaaacctcagacagtaccgaacccaattgccatcattcacaccatctttctgtgcatcttccacctggaaatgtaatgccttttccatcttaactaagcacttacacacactgtggccataactttcatagtttgaggtacgacagcaaaactccatgaatttcttttatcttcctcacaatttcatggaagaagattcatttttaccatagatcttagcaacctcagcgtattattttctttccttatttagttgagaactttcaccttttgacttcaagaaagcactttatggcttctcttaggcatatctgaattgccagcaccactgctactgctcttgtgctttggggacatcattagggcaaataaaggctacttgaacacaagcactgcatactccagtagtcgatctgataaccaagacggctataaagtgattatggggcgggtggcatatacagtgtggatatgctggacaaagattcatatcctggtcagatggtgcaagattcataatgctactcagaacggtgtgcagtttaaaaccatatatgaattgtttatttctggaattttccatgtaatatttttagacaacagttgactgctgataaggaaactgggaaagtgaaactgaagatagggcgtgggctactgtatggtcatataccacatattgacgttttgatcagtggtggactgcatatacaatggtagtctcattataatgtatttttactgtactttttctatatttagatgtttgcttaccattgtgttacagttgcctgcaatattcagtagagtaacatgctgtacaggtttttagcctaggagcaacaggttttaccacatatcctaactatatagtaggctacaccatttttgtggatgtgtgctctgtgatatacagatgtacacataacaaaatcacctcatgatgcatttctcagaatgtatccccattgttaaacaactcatgactgtgcttatgtgcagacaagagtttgtagagaaggagagggcttatttcgagcaagatccctgagaaggttttggaggggcagaattgaaaattcagcagaagtagaagctttggacaggagggattcctctttccttgattgaatttgtggagtaggaagtgctatgaaccttggcttccctatatacatgccctagggaaggcctagaatcttcgtcagttaaatatcactatttgggatttctctccaaatgaagtaactatgcagaaaaacatttggttgtttttgatttgatctaaccctatgctatccaatacagaagacactagccatatgtggatgtttaagttaattaaaatgaaataacatgtagtttattagctgctctagccacatttcaagtgctcattagtcacaagtggctaatggttactgtattgaacaatcaaacattctgttgtacagcaatggtctaatccatttttaaaacaaaaagtttctgtgagatacataatcttaaattgtgcaatgttatatataccaccattaattcattctaaaaatataacctatcttattcatgatccattgaaaaatggaaaaaatagatctaatagtttttttttaatttcggatttaatatcatttgatttaaaaagatattgtcaaatttaaataacttggaagtttcatgcatgctagaacttttcactggttcttaaacctattaatctcatttaaaaattcagcatagagtgatcctggtattatacgtaagcattactcttaaacatggtttttaactcttttctgaaaacattttcagatgacattcctgaaagctcactcttctcaccaatgccatcagaggaaaaggctgcttcccctcccagacctctgctttcaaatgcctcggcaactccagttggcagaaggggccgtctggccaatcttgctgcaactatttgctcctgggaagatgatgtaaatcactcatttgcaaaacaaaacagtgtacaagaacagcctggtaccgcttgtttatccaaattttcctctgcaagtggagcatctgctaggatcaatagcagcagtgttaagcaggaagctacattctgttcccaaagggatggcgatgcctctttgaataaagccctatcctcaagtgctgatgatgcgtctttggttaatgcctcaatttccagctctgtggtaagtcagtatcattttggtctttggaagccttttcttttttcgttatgagtggtataatacatctgtgtgtatgtgcaggtggatgggtggatatatgttttataatagatgcatagtgagtttatatgtatttgtaagatatcggtttcttagaaagtgaaaatcgttaagttgggtacccatcccaagatcaattagcagttgacagctgaagttatactaatttgatgcaaatccagagtctataatggaatgatagagcctcttcttagtcattaaggagagcactgaaaattaagtcctctgttataatgctttaaatatatatatgagaaatttatataaatttatcaaatatttctgaaaagatatataacaaaatagtagctatagttgcctccaggaaggcaaattgccaaacagggtgtgatactttcactgtatatccttttgaaatgtttgaaacttttactttgtgcatgtgttacctcaacagttttcaaaaaacaatcttaaataaaaaggaaaaataatttcgtgtttctgaccattgtcttttagtgtagagctaggctttagaattagacctgcattgaatcccagctgtactacataattagaagtttggctttggacaaggtgcttaatattgcagggctttatttttctatgtgtaaaataggaaaaaaaggttatttggagggctaaataagagtcataaagcacttagcatagtacctggctatgtataagtagttaatctattaactatgaagtacatgatactattttgttaaatttttattgacttaattaaaatgtaatttggtctaatatagttaaaaatttgataaaggtactagtgcaataatatgaataaaactttttttttaaataaagagtgatcatactgctaatacttcattacccatgagtatattatgcagactaacccacatattatgatttaaatcatagcattttttaagttggttttttttcccaaatctttcaaatttgtttgatctattagagagcaaaatcatttcattttcataaatcttacataaaggctatcaagtaaataggacttgaattgttttgttataggactatttttagatattgtgaatgttgtttaccctaagtgttttcatgtttcagaaagctacttctccagtgaaatctactacatctatcactgatgctaaaagttgtgagggacaaaatcctgagctacttccaaaaactcctattagtcctctgaaaacgggggtatcgaaaccaattgtgaagtcaactttatcccagacagttccatccaagggagaattaagtagagaaatttgtctgcaatctcaatctaaagacaaatctacgacaccaggttacgtatttataaaaaatttagttattgctgattatattcaggatatctattctcagcattttaaatattcaattgtgaatggtacagcaatgatttgccagggccaatgcctgaatgttccaaatgagacctcagctttagttgattcaatgaatatttattaacgtagactagcctacttactggttaaaggacttaatatgttacattttaacagtttaaacatgctttttccaggatgatcatgctagattttttttctatattttttgattcagacaaagcatgtttaactggaaatcacattttaggggcataatggagaaacattcttgtagccaagtgtgcagagcagtgcttctcaatcttgagtatgaaggcacctctaatagcagagggaagtgaatgtgcatgcaaatgactccacttctaattttatttatttactaaattgataaatgatagaaatttttgaaaaaattgctgtttattgataaataatagatgtatatatttcgggagtacatttgataacttaatacatttatataattcgtaaagatcaaatcagtgtaacgaggatatccatcaccttaaatacttgtctttatgctagaaacatttgaattcttctcttgtagctattttgaagtatacaatagattattgtaaactatagtcaccctactgatctatcaaacactgggtcttttttcttctgccaaactgtatatttgtactcattaatcaacctctcttcatcccccagttatatttatctgtgtgtatattgtgtgtgagcatttacatataaaacaaaatttcttaccatcgtaaactgatactccaggaaatgccatatttatcttgtggtgatttataccttctggcacacttccacgtactgttaattgagaaacacaggactaaaatatatggtaattgagtttattctgaactgtattcattttcattggaaagacttttaattctaaggtttaactttttgaaaatacaacctctgcagaaactatagttcatcataaaggggcagtaaacagaaatgagagtggggaagcggttatggggtaggtagaaatctgcaatttccagttgagccagaatgagaattggaaacaatagcaagatccccagatggaataggactagttagtcccaattttctaaagacttaagcttagataagaggcattctttttaattgttcttggctactggatatacccagaatcacatttccagggtttcagagatatttattttagatacttcattgtattcttaatggactctagtttggaatatggcctgaagtagtaataagtgataggtgaagtcctcaaattatggccgtggctcaaattctgccctttgcttgtttttgcaaataaagttttattggagcacagccacacccatttacttacatattctctgtggttgctttcattctgtaatgcagagcagaatagttgtgacagaggccatatggcccacaaagctcaaaatatttagtgcctggccctttataggaaaatatatgctaatctttgatatagataagcctatttttttataatacaaccttagaatcctcttaatgggagtgatataggcccaatttgccctactttaaatttacttcatactatttcaatgagtgctgtggggttttttgttttgttttgtttgctgttttttgtttttgagacagggtctcactttgtcacccaggatggagtgcagtgagtggcatgatctcagcttactgcagcctcgacctcccagattcaagagatcctcctgcctcagcccaccaagtagctgggactataggcatgccactacaagtggttaattttagtattttttatagagatgggattcctccatgttgcccgggctggtctcgaactcctgagctcaagagatccacccgcctcggccacccagagtactagggttacaggtgtgagccactgcaccccgctgaatactattttaagacactgtaaagtcaaggtgtccttttgataaaatgaataattcctaattttccttctgaaggaaaaaaaggcaaaattcctttattttcacgttaggcttcctaaaagcagggtaaaataaattgactatagatatatgtaagttgttggaagttaccatggccagcacacttcgtgatgaaggtagatttattaatatacatacagtcaatttctaattatttaaattctggttgttcagtttgagagttttctaagccctactgccctctcctcattctaccttttcaaaatttttttttttttttaaataactaaattctatgagtaggttttagggcatgtacttaaatagaatagtaaactttttaaaattttgaagtatttttatagtctactttgtgaatgaatattcctgatagaatcaaagcattttgaagctgtaatgtagtttagaactttttccatagaaatcgtaataattttttattttgaatagcctccaaaaatgtgtgtgttttctgtaggaggaacaggaattaagcctttcctggaacgctttggagagcgttgtcaagaacatagcaaagaaagtccagctcgtagcacaccccacagaacccccattattactccaaatacaaaggccatccaagaaagattattcaagcaagacacatcttcatctactacccatttagcacaacagctcaagcaggtatggtgtactgcatttaacattattcatcacatggtctctgcatagaacctagaaatcaaaatgggttctgatgccagtctttttgactgagataagtagcatcttggttttctgtatcactaatttcagacaagattgggcacattcagggtggtatggccgtagacagtatcactcatctcaaattagaaatattgtcctgaattccatgtgtattatgaactttttaaactgaaaactgtttaaactttttaaacagtttaaaactgcaaacaaggaaaattttagtagtgtttggatgttaaacatgctaccggctcttgtgtaaaatacagcttttgatgggtttaggaacgtcaaaaagaactagcatgtcttcgtggccgatttgacaagggcaatatatggagtgcagaaaaaggcggaaactcaaaaagcaaacaactagaaaccaaacaggtaatgtaaacaagaaatataaaaacgaacttggtccccaaatagttgggatctaatttgtagttctgtattggcaaataattctttacacatttttcttttccaattaactctgtcacttttcgtttataaatcccttaaatgtgtgtaccaactcttgcttttcttgtgatatttttctatttcagtggaactcttcaccatattcattgatgaccttaaaatcaaattttacaaaaattattttcatcattcatttgatttcagagtctacttaatattccacttagatggtggttctaaaatatttcgagagtctacttttctcaatgatgactgtatacctttccccagataccatgtctttagactatctgggatcctttcagtcaccacatacctcccacattgctctttattccggtcaaagttcattaatcagccttcaacaaaatctctacaatgtaagctgtgttctgtttaatttacatgtctacaaagtactgtgttaggatatgtttttaagctaatagaattatatttacagtggggactaatagaaagtaaaataacagtaaatttaatcagtattctttgagaaagatctacttgattgatttgttttttatcagttcacttgcttaacaaatcacatttcccagagttctgatctcaacctttttttctcagttgctctggaacatctcttccctgtccacatacctagattccgataatcactgaaatgctgatgatgctcagctccgttgtgctgatatctctcctgagctctaggtgtggttggctagcaaagcctgctatgctttgctgtagtatcttccccttgtagtctctgtcttctcttgttggtttgctctataccttgtcatctaaaacaatctggaagttcttccttgacttcttcctcttgtttactgtgtcttcccttctgcttgcccctagcacacatatgcataaacacacacgtgcagtgataagttttctaaatctgtcacccacctgcctcgtcttccatattttcctctgctattaccgaagttactgctgtagctttgtactgaacatcctgcttctagtctcgctaccctccagtccaccttatcagttgctgccagagaaatatatatatatatatatatattttttttttttttttttgacatggagtttcactcttattgcccaggctggagtgcaatggcacgatcttggcttactgcaacctccacctcccggcttcaagcgattctcctgcctcagcctcctaagtagctgggattacaggcatgcgccaccacacttggctaattttgtatttttagtagagatggagtttctccatgttggtcaggctggtctcgaactcgtgacctcaggtgatccgcccgcctcagcctctcaaagtgcagggattacaggtgtgagccaccacacccagccgagaaatatttttaaaagacgcatattcatgtattcacttgcttaaaatcttgaagtgctcctcatagtcatcatcagaaaaaatgcgtaaactgcttggcttgacatatagaatgattcctcacctggctcctccccactgctcctccacaggtatgcttcagtcctgccatgcaggctatttgcagtttctcaaatatacccatgtttttatatctctctgcctttgccttctgttctctgccaggaatatttccctggtgagctcctacttcattaagaataggtcaaactttaatcccctctaggaattcttccttttctcaaagtgtcccactttttttcacccatgtcatcctgtgtatacctcaactagaatatttatcttcctgtgaatgttgtaagtttgcattccaccactgcctatgggagtcttctccacctctgtgtccttagtgcctggctcagactaggggctcaacaaacttgtatttgaaggaagaaatgcgtttgctgatccttcccatcagcatataacaagctattatctgccatctgaaaaaaaaaacaactcttgcaacccattcccctccttttctttgcctccatgtcatgcagactcttctacaagttattcctacttgctgctttcaggtttcccccttctctttagaattctatctgcttaagctttgccaccactccttccacgactcagtatcctaatcacgtttgtcagtgatcttcacctactaatcaattttcagttgattagtagcatttgacattgtcgatcactcttctgttgggagcgccttctttacttggttgccagtgtatcatattctcatggctttctgccagtgtctctagaaagtatagagcagggttcttaaactattttgtactaaataattcccaataaacctgtgaaattcctcccagaaagttgcacatatgcatgtaaacaaaattctgaacacagtaacagtgcagagcactcatctgtggtctccacagactaagcagccaaagagctaggaggaaaatgtagttgaaggcagtgtctttaaagtcaaggggctcggcgtggtggctcccgcctgtaatcccagcactttaggagactgaggcaggtggatcacttgaagtcaggagtttgagaccaacctggccaacatggtgaaaccctatctgtactaaaaatacaaaaaaaattagccaggcctggtggcgggtgcctgtaatctcagctactcaggaggctgaggcgggagaatctcttgaacctgggagtcggaggttgcagtgagccgagatcgcaccactgcactccagtctgggcaatggagtgagactccgtctcaaaaaaaaaaaaggaaataaagtcaagggaagaaagaaaactttcgagaaggaaggcatggttggtattgttacgtttcaaatgtgggttaagccaaatctactgggttttgaagcaagaagtttgctgtaacgtggcaagagcagtgttagtgaagaggtgagggtggcgtgcaggtggtgctgtgtcgaggagggaacgggcaagaggagcagagccagtgagtgcaggcatttcttagtttggtcctaatggaggtgataaaggaggtagtggctagaagagatgaagaaaagtatgatttgtatgtgttttgtcctttctgagacctaagtcaatttgtgtgatgggataaggggtgataattgatgggatgaggtgagaatggatgaactccgcacagtgaagggaacagaactgatgaggacaatctcctgtgtgacgaaaaggaaggaggaaagtagcatgtaggggtgatggtagtcttagagttaggatagcaaaaactgatggactttcttctgaaagctcctgttttattcatccttaggaaagggaaggtgacaggggaaatactgtatggaggaaagaagagagagctgactcagacataggaagaatagggggtagtattgaggcttagatgagatatgagaccgtagattttatagtggaaccatttgatcgtttactttgctttttgtgtttttaaaaaatttttatgtattttttaatccactcatctgcatgctaattacattgtttttacacaaccaaagctgcttctaacttgagagacaataaagtctggaactagacctggaacaagagtacctgggtttgtatactggctctgccagtcactaactgtgtgcaagatacttaacttttttgtgtctcagttctctcatctgtaaaatggagatactagtacctaacatagagggttattgagaagattaggtgaggcaatagatataaggtgcttagaaaggtggctggcacatattgagctctgtataagtattagctgcctttattttactcttatttgattatttctactatgacttcattcataaagtcttcttttatttctttgctgaaataatctgtacaacaatataaagtctttaaacatacaaaatagtgaatgttcctcttaaataaccttgctaatgaataaaaagactcagacgagggaatgttttcttctcttctcttctttccttaccttctgatctgttttgtccttgttttctcttgctcttaccctccgggtaactgataattaaatggaatcctgatgtgtaggagctgtcaccagatgttataggtgtgggttgagataagtgacataggggtgggtgtttttccctttgtgtggctttcactttgtttttttattgttattttattttattttattttattttattctaccaaatacccagacttcaaggagaggctttcactttgattggcttatctaaaactgagccctgatatgaattttcattctttcttgccacctcctctccaaaaaaatttttacatactgagaattaccaagaatgtgaactagcactgagggtttgtcgtgttctgaacaaggctgggcctattcacatacactatctctttggttctaaggaaacttatacagaataatatttaataataatcttgtttcatttaataacatagaaagataaaatatatagttttgagaaataaaatttacttttcattcgctttttgcaggaaactcactgtcagagcactcccctcaaaaaacaccaaggtgtttcaaaaactcagtcacttccagtaacagaaaaggtgaccgaaaaccagataccagccaaaaattctagtacagaacctaaaggtcagtgtttccagattgttcatggttagtatgtagaaactcaaatgatgtttgtgtgttgattttgtattctgtaactttgctggatttgtttgttctaacgttttttggggggaatctttagggttttctttcttttttcacttttctttgagatggattcttgccctgttgcccatgctggagtgcaatggtgtgatctcttggctcactgcaaccctcacctcccgggttcaaacgattttcctgcctcagcctcccgagtagctgggattacaggcgcctgccaccatgcccagctaatttttgtatttttagtagagatggggtttcaccatgttggccaagctgttctcaaactcctgacctcgtgatctgcttgccttggcctcccaaagtactgggattacaggggtcagccactgcgcccagcccagggttttctacatgtaagatcctgtgatctgtgaatagagataattttactccttttctaattcaggtgccttttattttcttatataattgctctggctaggactttcaatgctgtgttgaatagaagtcattaaaacaggcatctttgtcttgttcctcatcttaaaggaaaagcttttaatccttcactgttgagtgtaatgttagctgagggcttttcatatatggcctttgttacgttgtgtaccttccttctattcctagtttttgagtaattttattggcactttgtttttaaagtaaaaaacaaattgcagagtagtggtatgtatggtatgatcacaaaacaaaacaaaatgatatgtaaatatgcacaccttgggggaaactggaaaaacaaacaataacctggtaatattgctgtcccatttctctctcggtgggggaaaagttaatgcatttatgcctagtgttccattattggaacgctaagcttatgggagttacttatgtcctcctgctcaaggttgtcaccaagaactgatttttcacaaaataaatttgcaacctccagcataaatgggttaagagaggacaggtgttcagggaggggtgtttctatacatttctgggtttggatattttaaaacgaatacatagttttataatcagaaaaaaaaaacacacacaagattccataattagaaaattataggttcttatatatattaatatggtctttcttaaacatttttaggtttcactgaatgcgaaatgacgaaatctagccctttgaaaataacattgtttttagaagaggacaaatccttaaaagtaacatcagacccaaaggttgagcagaaaattggttggtttttattctttatttattattaactttgcacatactataggaaataatatattgatagaagcacatattcaaattgagagtatctctgctttttaaattaaatcagaatacactgtagcttctaccaagatgtggtactgttaacagttactgctagctcacaggcacctgtgaaagtgtggttaagaccctcactgactttgacagggataggaaagttgctgccctcccacgctctgtactggtagaggggtgtttcagggaaaaactctctgggattatgttttcctctgttttcataccaccacaacaatcatcaacacagaagacttttgtgaccagttcaattcaattcaattctgacactagctacatggaagtagtgtcagatcccacaggttggggactcagtccccaagactgcctcctctccttcagataccagttgcaagtgcaagtccaggcctctcaaacttcctttttttttttttttttttttttgagacagtctcactctgtcgcccagactagagtgcagtggcacgatcttggctcactgcaacctccacctcccaggttcaagcgattcttctgcctcagcctcctgagtagctgggactacaggcgctgcccccacacccagctaatttttgtatttttagtagagagggggtttcaccatattggccaggctggtctggaactcctgacctcgtgatctgcctgccttggcctcccaaagtgctgggattacaggcgtgagccaccatacctggcccagggctctcaaacttctaaccgaccagcttcaagctgaggtttctgtgaccccctctttagcttggattaattggctcacagaactctgggaaatacttacgtttactgctttattttaaaggatatgggtgaggtatacggaaaggggcatggagcttccattgccttccctggggcgccaccctccaggaacctccacgtgttcagttatccagaagctccctgaacccagttctcttgggtttcagtggaagcttcataaagtcagcattccctcccccagggtatgaggctggatcctctctggtgaggggtgaggtgggtgtgggggtcgtcttaagaaccacaatgagaaagataggagaagattagagtcctgccgtggggcaggtgaaaggatggcaggagagttctgtttcctgtgaggcctaatgcacccaacattataacgaaagacagtaactagggatacagcagttatgagctaggaactgtggacgaaaaccagtatatatcataataccacaaggtgttagcagcccctgaaggttattatcgaaccctgccctaagtgacattaatattttcctattattgactgctgtgtgaaagggtagctctcaacgatagaaaaagtcatttgagagaatattttttgaaagtctgaagtctttggctattattctacatttgagttcttaatgcttttacttaaacccaaggtattgaatcagttttgatagacccaatattcatttctttttctttttcttttttcttttttttttttgtctcagacagagtttcactcttgtcccccaggctagagcgcaatggcacaatctgggctcactgcaacctctgcctcctgggttcaagtgattctcctgcctcagcctcctgagtagctgggattacaggcacctatcaccacgcctggctaattttttttgtatttttagtagagactgggctttgccatgttggccagacttgtcttgaactcctgacctcagttgatctgcccaccttggcctcccaaagtgctgggattaccaatattcatttcttagaaagtgttattgaagctgaagattttcttggtttcatttattagtagtattttcttatttttctttttaggaggtgcttttttttaaggcattttttcctatttagtaagaatatgaatattaaattttctttgttatgcctttaattcttaaatatctgagtcacagtgtccacctattgaaatatttttcagaagtgatacgtgaaattgagatgagtgtggatgatgatgatatcaatagttcgaaagtaattaatgacctcttcagtgatgtcctagaggaaggtgaactagatatggagaagagccaagaggagatggatcaagcattagcagaaagcagcgaagaacaggaagatgcactgaatatctcctcaatgtctttacttgcaccattggcacaaacagttggtgtggtaagtccagaggtaagaaaaggctaactaaacaggcccaggacataagtaaactaagtagtattcgtatctcccctttcttttgttgacagatggacatttggctcagtagccaagggaattttgcagacctgttgtctgttctcttaaaagaaaccttaaaactcttgagtggtttccttttgaccttagatgaaatccaaagagtaacatggcttaaaaggccaggcatttgggctcagcttttgactctgccatttgctgactgtttattggtcaggttatttaagctctctatgccaccatttcctcttatgttaaacgaggttattaataatacctatatagtggagttgatgtgaacattgttgtattagtatatcggtagttagctccaaacacatgtaactaacatttagttacagctaactgctgttattagctttcaccctcaattgaataactgcagctctggggattgattcaactagaattttttttttgaagtataagtttcagctgtctttgtagttttatttattcttttatgtgttaggaacttagtttgctttgtttttatgatgaatcaatcagcttactggatttttttcttaatattaatggagaattcattgattttcacagaataaaatgaattatcatttaggatcaatgttaatatctgatgcgttttcccacagagtttagtgtccacacctagactggaattgaaagacaccagcagaagtgatgaaagtccaaaaccaggaaaattccaaagaactcgtgtccctcgagctgaatctggtgatagccttggttctgaagatcgtgatcttctttacaggtaagaacatttctggaaggcattcactcactaagggtcatggtttagattgacataagtcgtgttataatttgtaattataatgttattaataactcatctgtataaaagtttggaataacttttgttagcctctctttcaccaaatgagagttccattctgttgtgaaatgttctgctgacatgttcaatatcagtgtcaaattctgctgatatgttcaataaaggatagtgctcagtgtgttgctggatttctaatagagtgtaacttacctcttgaagcattgatgcatatagatctcaaagattcaaagaaacagaacgtccatcaataaagcaggtgattgttcggaaggaagatgttacttcaaaactggatgaaaaaaataatgcctttccttgtcaagttaatatcaaacagaaaatgcaggtatgtacttttgtggaaaggggctttggaatgtttcttgcactaggctgtgagctctgtgaggacaaagggcccagccttacttatctctgaaccctgagtggccagaatagtgtctgatgcatagaagctcagtaaatcacatttgaattcagtttatttttggaaaggtactctttttgaaaacttggaaactcatttgatattgctgaaatatttatttttaaacaagtttttcataaatatccttaaagtataactattaattggataatgatgtagtgggaaatttgttatgctcttcaaggttttttcatgctaaggaagctttttttttttgagacagcattttgctctttgttgcccaagttagattgtaatggcgcaatcttggctgactgcaacctctgcctcccgggttcaagcaattctcctgcctcagcctcccaagtagctgagattacaggcatgcaccaccacacctggctaatttttatatttttagtagagatggggtttcactatgttggtcaggctagtctcaaactcttgaactcaggtgacccacccacctcagcctcccaaagtgctaggattacaggcatgagccaccatgcctggcttttaaaaaaaatattttaattataaaaaaaaatagagatggagtctcactatgttttctaggctgatctcacactcctgggctcaaatgattcttgtgccttggactcccaaagtgctgggattacgggtgtgagccaccatgcctggccctaaggaagcatattaaaaaaaaacagtgtaattgtaatttaaataaaatgaatcagatactttctaaatttctacgttgttggatgtaaccccaattttaactttaataagtatgaattggaagttttttcataaggaataatatttatagcttaattattgtaacatgctaaatgtttttggtgcatagtcgagaaacttgagcagtgaaactaacattttgactttcatctggaaattctagaaactatccaatcaagttagttagaattaaaatttaaagtgaaaatgatgatttaaaatgtgtatattttttctcctctcattggttttcctaggaactcaataacgaaataaatatgcaacagacagtgatctatcaagctagccaggctcttaactgctgtgttgatgaagaacatggaaaagggtccctagaagaagctgaagcagaaagacttcttctaattgcaagtaagtgtgatgcacctgaaagagttccaacaaatttctaaccagggaaaactcattttgatatttagaaatctttaagtttagagaaagggcttttcctagtcatctgttccagtggatctattttttgttcttgtttttataaggtttaagaactctatgtaaaacaaattgtagtttgcatgaaaggtagaagcaaccgaaaggcatttgaagaaatgcagttgtgcagattgaatgaatgaatggatgaatgaatgaatctctatatatacacatgtacacatacattctctctctctctctctctctctcccttccttcccttatcaataaatagctaaaacaacttctgtgaattttgctgtgtgcgtatatgtggtgatgatggggcattttggggtggacagatgataccacacatgaaaactagccgaaagttgatgtattaaattataaggacttggtaaatgagcaaccaaggttttccccaaccacctaccatgttttataaagatagtgttactgatttcgtcttcgctgttacgtacagtt

SEQ ID NO: 410 - DNA, 12304 bp, Homo sapiens
  source 1..12304: mol_type = other DNA
gcgggcgccggacgacctgtggcccaatggcggcggcgcgcgggcacgctgggggccggccagacgggccgacttttccagaagacccggatagttcctcccggccacgccgcgccggctctgggcactcagcatcgtttccttttcctccgctggagcagctatggcggcggtgaagaccctgaaccccaaggccgaggtggcccgagcgcaggcggcgctggcggtcaacatcagcgcagcgcggggtctgcaggacgtgctaaggaccaacctggggcccaagggcaccatgaagatgtaaggcggggctgaaccggagggccgggcgggcaccgcgcgccgccgcgctcctggcgggcccgggaccgcggactggagcccgccgcctcggggctgcgcagccgtccttctcggcgtcctccggggtcggtcctgtgtccctcctaagccccaccgtcccggccatttcttcccgcatcgatgcagtctccgcggagaacaaagcggctctagagcgcggcgttccccgccctctggggcttccaggcaccctgaggactcggcacaatctctgcggggacggggtgggcactacacctgtcctccatcctgctggacataactagccccacatccctggctccctaaaatctgggaaaagcccgttttctaatgggacttttagttatcgttgaaaaagtcatagtctggttcatttctgtcctttaaacaggctcgtttctggcgctggagacatcaaacttactaaagacggcaatgtgctgcttcacgaaatggtgagaggtgctctgggctaggtcagaaaggtcttgattttccgtagaatgttttctttgtagaaagatttgcagtgtccattttcaaggtaggagaacattcagaagtggcgtgtaatcagtaatagtcctgagtgcctggagtctgacagccctgcctttgaatccctgcttttttgccattcacagtccgggctaaagggctgtaattgtatattaaagttaattattttaaaacttgaaaaattaagagaggttgacacaatcacatgggcaaaatgcatgaggatgatttttcttttcttttctttttttttttttttaattagacgaagtctcgctctgtcgaccagcctggagtccggtggcacaatctcaactcactgcaacctctccctcccgggttcaagcgattcttctgtctcagtctcccaagtagctaggattacaggctcgcgccactacgcccagttgatttttgtatttttagtagagacaggatttcaccgtgttggccaggctggtcttgaacgcctgacttcaggcgatccccccgcatcagcctcccaaagtgctgggattaccaggcccgtgcccagctgggttttctctttttaaaacagcagtttctctgttaggtctcatctctatctccaactggaggggagataaatctgtctctttgcaagtcttagggatggagaatattagattattgaggggagtatgctttttactcatccctaaattcccaaaacttagcagttcaaatccaagaaaaggaaattatttcctgctgatttgagttcagaataatatgtagggttttgctagtggtataccatgccatcaacatccagatgaaatatctttagtaaggacttgctaacctaggaggtgtagtttttgtttttagtgggctcagtggtggcccgtgtttgaaaagtggagccacagttaaacttgacttcagaattgtttgggggctaggtgtggtggcttatgcttgtaatcgcagcactttggcaggccaaggtaggtggatcatttgaggccaggagttcacgaccagccctggccaacatggttaaaactccgactcagctaaaaatacaaaaattagccgggtgtggtcctgcacgcctgtagtcccagctgcttcagaggctgaggcaggagaatcgatcgcttaaacctgggagactgaggtttcggtgagccaagattgtgccactgcattccagtgtaggagacagagtgagggtatctccaaaacaaaacaaaaaattatttgggttttagtgtgtgagaaatacagcgtaggtagagagaagcacattgaacatttacaatttaagaaataattataaaatggacacacacaaccaccactgtagctaataaattgttgctaccacctcagaagtctcgtcccattggaacctctctccaatctccagaagtctgtttttcagttttctttgaaaaaattacaaacctacaaaaataattataatgtgtgtgccctttaggagatacctggcttattctcactagagctctacacttgccataaagaggcaaggatgtacaattatgtgttactgttaactggtagctctgtcatcttgagtaaacttctactgagcctcaagcttcctcatctgtaaagtagagataacctgggaaataaattacacatgaagacgtttcaatcattataattgcatgtgcatgatagttaatcgaagtaatttgtagccaacatttgggtagctttttcaagtagatagcactcaaagaggcccttcctgcattttgtctgtggtatatttagactgcttcatattgttttaagtgattcattctttttctacttacagcaaattcaacacccaacagcttccttaatagcaaaggtagcaacagcccaggatgatataactggtgatggtacgacttctaatgtcctaatcattggagagctgctgaaacaggcggatctctacatttctgaagtatgcacaactcttgtttctgtaatttttttttgtatataggaagtgtctgatatttatacaaattgatgtgctgttaatagtagctgaggtcatacagtagaattagggggcttaaatctgggtctttatcctggtctaaaacaaattgtgaccttggacaggttatagaacctttcttggcctgaaaataattttgtaatcaagttgcattgcctatgtgatttgcatctgtctttagtgtagattaataattgagatctaaaaatggaatgtttaggactaggcatatttgttaggaaaaaggcaaccaaaagcttatatttggataaattccacttttttagccctgactagttccaaggttaaagcaaacctcagtgaatatgaatgtattgtcagaatttcctggagaaagagaacagtctttatttttattagtaaatgatgtgagttagtttgagattacctatagaaaggatagaatagtccaggcgcagtggctcacgcccataatcccagcactttgagaggccgaggtgggcggatcacctgaggttgggagttcgagaccagtctgaccaacatggagaaaccccgtgtctactaaaaatacaaaaattagccaggcgtggtggtgcatgcctgtaatcccagctacttgggaagctgaggcaggagaattgcttgaacccaggaggtggaggttgtggtgagtcgagattgtgccattgtactccagcctgggtaacaagtgcgaaactccatctcaaaaaaaatgaaagaaaataaagataggataatgctaccatctgtgagttgttgggacacagtgttggttttgaaatgattcagagtggtttgcacagtgaacacccaagtgtgctttatagttcccttggctttgaccctgtgctagagcattcattacctgttcatctgctctgcattgaaaggaatatttgtccttttaaatgtattcagaaagccagcacattatattacctcgtgttcaaaggtatgatgatccagaacactccttcaataattacctgaactttatcatgaactatggttgcacctaattgaagatgcaagtgttaatgtgtgtttattttagggccttcatcctagaataatcactgaaggatttgaagctgcaaaggaaaaggcccttcagtttttggaagaagtcaaagtaagcagagagatggacagggaaacacttatagatgtggccagaacatctcttcgtactaaagttcatgctgaacttgcagatgtcttaacagaggtatgtattaaattttgtctatgtctggtatagtatacctatatagaaaatctctgatagtagaaacatgaatatgattaccaatttcaattacaaggtgctgtgtaggttcatttttgtggcaatgatacctaatctgtgtctctaaaaatgaggaaattaaaataatagtatacctaaccaggttataaaagtaaaattgaagctttcattaaaaggtttataaagtggagatttttttattagaaagcttccagttaccagtatttttaataaaacgaggaatgttaatgttaattaatgttaatgtttgggaattatagatggagatttcagaaatgtaaatgacttcagctgttgccttttacatataatgtattctatttgctgatagaaaaagacttaaatcagtgtagaattgtaaaatgaaactgcctactttagccttctgaaaagcaacatgtttctgctgcaaattgaatttacttaacggttatgctcctccaattgcaggctgtagtggactccattttggccattaaaaagcaagatgaacctattgatctcttcatgattgagatcatggagatgaaacataaatctgaaactgatacaaggtaggtggtagaagactgtgaaatactaatgggcatggaggctcacacctgtaatcccagcactttgggaggctgtggtgggcaaatcacctcaggtcaggagttccagaccagcctggccaacatggggaaaccccgtctctattaaaattacaaaaattaaccaggcgtgccgggcatgactgtaatcccagctactcgggaggctgaggcagcagaatagcttgaacctgggaggcggaggttgcagtgagctgagaccacaccattgcactccagcctgggtgacaagagcgaaaccccgtcccattaaaaaaaaaacaaaaacaaaaaataaactgtgtttagaaatttaggggtgctttgtacaatatagatagttggctttttttttttttgagatggagtcttgctctgtcgcccagcctggagtgtacagtggcatgatctcggctcactgcaagctctgcctcccgggttcacaccattctcctgcctcagcctcccgagtagctgggactacaggcgcccgccaccatgcccggataatttttgtatttttagtagagacggggtttcaccatgttaaccaggatgatctcgatctcctgacctcgtgatccgcccacctcggcctcccaaagtgctgggattacaggcgtgagatggcaattttaaaaatatctttggatataaaatgttatatatttacctgaagatataagttggataaactgctaggagaatattgtttttagtaatattttctcctgaaataaggtgaatgttatgtttatggttagaatgattctgaaaagtgaacaacatcagtcatttggcatttattgaattgctaggtacaaagcataatgagaagtagtagaggaatttaaaaaaatatttttttcaaagagttagttagaaaacatgtttgttttccctttggggtgtgtgtgtgtgtgtgtctgtgtggagaatggagtctccctatgttgcccaggctggttttaaattcctgggattaaggtgtcctctcacttctgcctccgtaagtgctgggattacaggtgcttggtagaaaacatgtttttaaaggacgtcatcacagtttgacagcctaccagtgagaccatctctgcagacttttctgtacagcgtaggatcttcaggtaatttaagaaataggccgggcgcagtggctcatgcctgtaatcccagcactttgggaggccaaggcgggcggatcacgagatcaggagatcgaaaccatcctggctaacacggtgaaaccccgtctctactaaaaatacaaaagaattagctgggcatggttgtgggtgcctgtagtcccagctgcttgagaggctgaggtaggagaatggtgtgaacccaggaggtggagcttgcggtgagccaagatggcaccactacactccatcctgggcaacagagcgagacttcatctcaaaaaagaaaaatgtgactgcgtgaaatatcaataccttctcatttcagtgtttaatatattaaatacccatctgaaaatcaataaccataattttgtgtgtgtttaaacagcttaatcagagggcttgttttggaccacggagcacggcatcctgatatgaagaaaagggtggaggatgcatacatcctcacttgtaacgtgtcattagagtatgagaaaacgtaagtttatagccccttaacagtgaaatggagaagcttcgtattttaggcgagttacttttttgtgaaactttgtttcccactgtaaggacaataatgctcaaattggtttgggggagctataggaaacagtctctgaagatgcataaggggcaggattggagctcagtgaactgttaaatcttaggactaatccagtttcagaagctgctttcttaatgtttccctgctttctgtaacttttttttttcttaatagagaagtgaattctggctttttttacaagagtgcagaagagagagaaaaactcgtgaaagctgaaagaaaattcattgaagatagggttaaaaaaataatagaactgaaaaggaaagtctgtggcgattcagataaaggatttgttgttattaatcaaaaggtgagaatgaaaactcaatgtataaactaaatagtacgtatcatcctttttacttttaaggtgaaagatgttgaaattaatttttatttttgttacagggaattgaccccttttccttagatgctctttcaaaagaaggcatagttgctctgcgcagagctaaaaggagaaatatggagaggtatccgagtaatttgacttttactcattttgcaagtgaattgggattatttctttttccttatactttatttttgggtttttcaactgtatagttaattggcattaactatattcacattgtgcaccccgtcagcactgtccatctctaggacttttttcatcatcacaaactgaaactgtatacccattaaatagttactccccatttctccctcccccttgccccttgtaaacattattttactttttgtttctgaattcaatatacttttttccaaagagctccccacaataaaaagctttttttaaaaattttttattattattttttgagacagtcttgctctttcgtgcagtggcatgatcttggttcattgcgactaccacttcctgggttcataggattctcagcctcccgagtagttgggattacgggtgtctgccaccatgcccactgaattgctttgtgtttttttagtagagatggggttttgccatgttagctaggctggtctcaaactcctggcctcaagtgatccacccacctcaacctcccaaagtgttgggattacaggtgtgagccaccatgcctggctaataaagagctcttgtccaccttttagatttcatttgctaacttggggagagtggtttaaatggagggttaagagaaaagactagtttttagctggttgatggcaaatggaaaggcttaaagtacattttaaaatttaattttgtgtgtaattctgaaaaattccttcctaaaaattactggtcttatctttgaaattcactggtaacgttgcttatccatctcccttaaaatgctatttcaggctgactcttgcttgtggtggggtagccctgaattcttttgacgacctaagtcctgactgcttgggacatgcaggacttgtatatgagtatacattggtaagtgtatttttttcttaaaggtaatagaaccttttagctcgtgaattatttttgtttgtttgtttgaggtggggtctcactcctgcccgggctggagtgcagtggtgtgatcacagttcactacagcctcatcttcctgggttcaagtgatcctcccgcctcaggcttctgagcaggtgggaccacagacgtgtgtgctaccatgactggctaatttttttttttcttggtaatttttgtagaaacaggttcataattgtgttgcccaggctggtcttaaactcccgggctcaggctgtccttcaccctcagcctcccaaagtgctgagattacaggcatgagccaccgtgcctggttcatgaagtctttagcagaaaaattaattgaaattcaggatcagatttttgtttatatacattttgaaggtttatgtgtagtaatgggaagccattgatggggaaaatcacatttcttttatgtgatttttcaaaaggagataatttgctttaatgtgatcaagtttgttccttattaatatgctacttgtcattctctgtaagtccctcttctctcttcactctgcacaaatcctgtttttgaaaatcatattttttctacacatagggagaagagaagtttacctttattgagaaatgtaacaaccctcgttctgtcacattattgatcaaaggaccaaataagcacacactcactcagatcaaagatgcagtgagggacggcttgagggctgtcaaaaatgctattgatgatggtaagatcctcactgtatttcaattcttttatattgttttgctggtctgaaaggcatggccgaatactgtgtttttatcagtagtttacacagccagacaccatgcaaaagcagtcttccctttagaatgactgatggtatgctaaggtttttcatagcatatcattattaaaggtgaatacaaataaatgaactaatactgatctgttgaaagctgccagtggctagtgaagccattctggttgaaccattctcctatttggtatgttagtcacttgtattttgtcatagtaaatttgtaagaaattaatggctttcatatgtatattttgttattcataattagttctgcagttttcttagcatttttccttttcccccatccaacaggctgtgtggttccaggtgctggtgccgtggaagtggcaatggcagaagccctgattaaacataagcccagtgtaaagggcagggcacagcttggagtccaagcatttgctgatgcattgctcattattcccaaggtgtgcatgcttttaacagtcaatcttccaaaagattcagctgatcaaacctttctgataatgtaggatttattcataaagtggattttggataagcaagtttgatcagttttctttctgactctagaacaggtattcctcatcatccagatatatttggtttctctgggaagcctgaatagctgacattgcagatggcaagagataacctgtagtttaatatttgcagtattaggggttatacttgagtacaaacttgctttttgcttttgttttaaactgatatcattgttttctattatataccagttttgatatataatttatgactggtgtattgctgctgggtttggggtagttgagagagttgatcagtaacttgtgtctggtattctctgaagggaacataaatgttctgtctttatgcaatgagtttttttttttttttttttttgagacagttttgttcttgtttcccaggctggagtgtaatggtgcgatctcagctcactgcagcctcagcctctcgagtagctgggattacaggcacctgccaccacacccggccaggtttttttttatttttagtagagatggggtttcaccatgttggccaggctggtctcgaactcctgacctcaggtgatccaccttccacggcctcccaaagtcctgggattacaggcgtgagccactgcaccaggccgagattttctttttcttttttcttttttttttttttttttttttttttactatcagttattagttcctgttttctcaagaattaaatttgtttactttaggttcttgctcagaactctggttttgaccttcaggaaacattagttaaaattcaagcagaacattcagaatcaggtcagcttgtgggtgtggacctgaacacaggtaagagaatgcaactgttgtagagggaaaactagatgtaatacgtgtgagttgaagccaggaaagattaaaaatgttttgctttgcaatttgacaccagtgctgttagggaactctgggttctaaaatgggataaaataggatattaataaaaaatggaatgactaggtataattaagggacgagtagacatgagtaatttggggatacaattttggagatgttgagtggtggtagatggttcagattaatgttgaaggattttcatattgcatttgccttactcagtttttaatcaagtactatgataagaaaatagatgtggtgattatattcatgggtgaaaaccagctaaagatagcaattaatgccagaaaaggggatgtagaaatctagtgaaatggtgacagccctgatcttaggttcctgtaacaaaacaacacaaattaagtacaaagtaggagataacaggtacctccatgcagtatgtgcaagacctattgtcaacattaatagaaaaggtttctggaatgagggaaatgatcagtccattttagtcagattatagttgaagtgctatacttcagtatgagtaaacagaaatgtatccagaagaagagaggggtgttcaggacttctaagtataagtcagacattcatcaaatattgtggacgggggtcatggtttagagtagaaaattgggctaacagagaagctttgaattctcatagttaatactggaggaaatgagtcatcagtgataagcaaagctgcacacaatattgttggttcttactgactgaacttattttaagatttggttgccttttaggtgagccaatggtggcagcagaagtaggcgtatgggataactattgtgtaaagaaacagcttcttcactcctggtaagtttgggaaaatgaaaactaaactgttagagaatcatacttttttcatttggtgttctctgtttagttgctcctttcccccatgaataatgtgatcagctggaagtatggaaactgaactagccctctgatgtgtagaggggaagggggaaatttaattggatgtaatgtgtgcagcttggttggaagtgggaagttgagtcgaattagggctcctaatcatctgagccatcttatttttgtccccctttcagcactgtgattgccaccaacattctcttggttgatgagatcatgcgagctggaatgtcttctctgaaaggttgaattgaagcttcctctgtatctgaatcttgaagactgcaaagtgatcctgaggattacagctgtggaatttttgtccaagcttcaaataattttgaaagaaattttcccatatgaaaaaaggagagaacactggcatctgttgaaatttggaagttctgaaattatagtatttttaaaaattgcactgaagtgtatacacataaagcaggtcttttatccagtgaacaggatgttttgctttagcagcagtgacataaaattccatgttagataagcatatgttacttaccttgttattaaatatttcttgaaaagcaaattttaatggtttaattttatgtggacgtatgttaaattatccaactaccctattgttaagcatttggttttaaaatttttatgctaatataaatgctcaagtaatttaaaatattgaaagcatccctgttggtataaatttctgagtaaatgcattggatcagttggactttgaacgcctttgaaatggctttgctaaaatgctcccgccacaaagttgtaggaaatgggaagaggagtcaactagaggcaagggagttgagagagctgcaactgtaaagggcaagaacaggcagaggtaaaaagatgatggaaggtgtggtgactaagggccacggttattgggtgaaatttgagattgtaggccaactgtattttcaagcttctgaacttaggcaaaatattcatcgcaaagtctctagcgtcatatttttctcacccaaattacgtttccacgagattatttatatatagttggtctatctctgcagtccttgaaggtgaagttgtgtgttactaggctgtgttttgggatgtcagcagtggcctgaagtgagttgtgcaataaatgttaagttgaaacctc

SEQ ID NO: 411 - DNA, 17553 bp, Homo sapiens
  source 1..17553: mol_type = other DNA
acgccatcccggccagaaaagccctggccagtggcgggcgcgacactatccgtgcggccaggcggaggtgagtgcgcggcggccggatgggcgggacgggcgtggaggacgccgagcaccgtggcgcgcgctcacgtccgcgtccccaagggctgcgctccctcaagcgcagtgcccagaactcggagccagcccggcccgggggaccctgctggccaaggaggtcgtcagtccggtcttgtcttccagacccggaggaccgaagcttccggacgacgaggaaccgcccaacatggcctcggaggtgagtgggacctcggggactccggtcctcctagcctccaaaggagagagtgggggcgccagacctgcctcgggccaccctgctgggaatcgccctccaggaagcaattttgaaaattacctaggaagcctgcacccccagccctcccgggcgcatcatctggagcccagcagtcacctttaccaggactcaccagtatccgcaggcagcccttgtggcaaacccaccaacccacactactaggggtagagtggctctgccctcacctcacagtgatgcctgcctggccaggaaaagtggctcccaagccttcagccttccaactcttccttccttcttaccacgtgtcctcctgtcaggtcccaccccacaccacatcccttctcctgctagagcaattgtccctgtttatagaataaagctcagcccctaagtgttcttgtccttgactgtggcatgtggaaagagccaggaaaaaggggacgtcgcctcgtggctccagcaaccctggtgcctggtcccttcctgtctcactggaccctgcctcttagggtcagtggctcctggcctctcctcctgaccactgagatgctggattcccaggcagaggttttccttccttgggccatagttgatttatctggcaatgggggtaataatagctgtcggcctcactctgtaaggcactagattatgaggccattgctttggacccttcaggtgagaggggctgttcgcctgatgcttgatgaagggaactccgggaagcaggaggtctgggttccaggcccttttggccttcattagctagcaattcacttcctctttctcaatgccctgcaagctcagtgccctgcaagcttctgggtcatggcaggggggtagggcctggactttggagccaaacagacttggtttctgtaccagtcacttgagccctttaaacctctttcctcatttgtgaaataggggtaatattgcccacctcataaaaggccgtaataacatatgtgaaatccctagcacagggctgagcaacagtaggtgctcaataaatggtggctaaccacaacaatactgatatttctactttgggaggccgaggcgggaggactgctgaagcccaggaattccagaccagccagggcaatgtaatgagaccctgtctctacaaaaagattttgaaaattacccaggtgtggtggcgtacacctgtagtctcacaggaggcggaggcatgaggattgcttgagcccaggagtttgagactgcagtgagcatgatctcaccactgcactccagcccaggcaacagagtgagatccagtttcaaaaaaataaaaataaaaaaacctggcaggcatggtggctcacacctgtaatcccagcactttgggaggtcgaggtgggcagatcacctgaggtcaggagtttgagaccagcctggccaacatggtgaaaccccgtctctactaaaaatgcaaaaattagctgggtgtagtggtgggtgcctgtagtcccagctattcgggaggctgaggcaggagaatcgcttgaactcgggaggcggaggttgcagtgagctgagatcgcaccactgcactccagcctgggcgacaaagcaagactccacctcaaaaaaagaaaaaaaacccacaagtcccaaaaccaaaactggtatttcccatgtacattcgaccttaactgttgctcattcaacccagcccaactcagtgccccatcccctggccctgaagagaccattctggcccagatgtgtcctggcttggagtagcaccttctgctaccacactaggcctccactctcctcagtgcccaaggggaggcacctcactctgatctccctgtggggtcctcttatgcctgccagtaaggataggagtttggttctagagcagagtggtctggcttccaacaagcccagtgttctaggtgacctcaggttgccccaggccttcctgtaggttggcactaattggtttggctgcagctccacttattaagtagttatttttattactaacaacctaggcagggtggcccaggagcccgctgggggaggcggtgccaggctcctggctgaggggcaggctggccccaattctgactggctggctccagtgatcaggaccagggccccacgtggtgctttgctggagatctaggcttggtggggcagctgtggggtaaggggcaggaccagctcaaagatggggtgggggcggaggctgcctctgcagggcagagtcctttggcagtcgggactgttgggcatagaggagtcagctcacagctcagggccagagcactggagaggtctctggggtgcatacaggaaccaggagtggagctgaagcatgtcctatcccctgccagccctcccttagtaacagctggcatttctcgagtccttcctgagcaccaggcaccgtgttatgtatgcaatttgcaaatattatctgattaaatgctcacaataaggctatcagagaggtactattattatccttatcttattattattattattattatttttaagaaggagtcttgctctgtcgcccaagctggagtacaatggcgccatctctgctcaccgcaacctctacctccaggattcaagtgattctcctgcttcagactcccaagtggctgggactacagcttcctgccaccgcgcctggctaatgtttatatttttagtacagatgaggtttcaccatgttggccaggctgatctcgaactcctgacctcaagcgatccacctgcctgggcctcccaaccctgagggtttttgtttttgtttttgttttgagacagagtcttgctctgtcgcccaggctggagtgcagtggcacgatctcagctcactgcaagctccgcctcccgggttcacgccattctcctgcctcagcctcccaagtagctgggactacaggcgcccaacacccccatgcctggctaatttttttgtgtgtgttttcagtagagacggagtttcaccatgttagccaggatggtctccatctcctgacctcgtgatctgcccacctcagcctcccaaagtgctaggattataggtgtgagccaccacgcccagcccctgaggtttaataataggtgccaggccaggtggttaatagaagtctggggcattgtagggggacagaggaggatatatgtccccattggccattgtagactcccttccacaaaaaggacgtcagtgaagtgacatgcccacctctaccccaccctcctcccagtcctgggcactagggctgctccccaggtgttctgtaccccctccccactctgtcccatgccctggcctctgccctctttcaaaacatagatgtggctggcgcctaggctcatgcctataatctcagcactttgggaagctgaggctggaggacagcttgagcccaggaattcaagaccagcctgggcaacatagtgagaccctgtctctaccaattattttattttattttattttgttcatttatttatttattttgagacagagttttgctctgtcacctaggctggagtgcagtggcgtgatcttggctcactgcaacctccgcctcccgggttcaagcgattctcctgcctcagcctcctaagtagctggaactacaggcgagtgccaccacgcctggctaatttttgtatttttagtagagaccaggtttcaccatgttgaccaggatggtctctgtctcctgacctcatgatccacccaccttagccttccaaaatgctgggattacaggcatgagccaccactcccagtcctataaaattttaaaaaaatgtctgggtgtggtggcgcatgcttgtagtcccaactattggggaggctgaggcaagaggattggttgagaccaggagtttgaggctgcagtgagctatgatggtgccaccgcactccaacctgggtaacaaagtgagaccctgtgtctaaaaaagaatttaaaggccgggtgtggtggctcacacccgtaatcccaggactttgggaggccgaggtgggcagatcacgaggtcagattaagaccatcctggctaacaaggtgaaaccacgtctctactgaaaaaaaaaaatacaaaaaattagccaggcatggtggtgggcacctgtagtcccagctactcaggaggctgaggcaggagaatggcgtgaatctgggaggtggagcttgcagtgagccaagatcctgccactgcactccagcctgggtgacaaagagagactccatctcaaaaaaaaaaaaaaaaaaaaagaattaaaaaagatttttttaatgaacaaaacaggctcggcacagtggctcatgcctgtaatcccaagcacttcgggatgccaaggtcaggggatcacctgagatcaggagttcgagaccagcctgaccaacatggtgaaaccccgtctctactaaaaatataaaactcagccaggtgtggtggcacacgcctgaaattccagctactcgggaggctgaggcaggaaaattggcttgaagccgggaggtggaggttgcagtgagccgagatcacgccactgcactccagcctaggcaacagagtgagactctatctcaaagaaaacgaacaaaacatagatgcctacataccattcctctgcccttggctcctggggagtaagggatcacccagtgacctcctagaaggccagtgacaatggggggtgtcagggtgcttttcagagccaagggagtggtaggaattgggatcttagtccagctccaagctgtgagggagagagttgcagggcacttaagcttggtggagaccctcaaggcctctttgcctgtccctgcagcaaaggttctggacaccagagccaagtccagaagccctggtggaacaggggtgaaaagcataggttctgacttcagactgctgggccgcagccctggctatcccaccccaggtgagagcaggctgctctgtgcctcagtttccccatcttcatagtggaattgtattggtgcctacccagagggttgtgtcaacaattaggatggcacctagcaccttggtcagtggtgggaaaggttccagaagttctgctgtggtcccaggggtgtctcaggccctgccatcatctccttggaggggtgccatgtggtgggaaagaaccccaacttcaaggccacacacagtggctcatgcctgtaatcctagcactttcagaggccaagatgggaggatcacctgaggtcaggagttcaagaccagcctggccaacatggtgaaaccccatctctactaatgatacaaaaattagctgggtgtggtggcacgtgcctgtaatcccagctacttgggagtctgaggcaggagaatctcttgaacctgggaggcagagtttgcagtgagctgagatggcaccactgtactccagcctggccgacaaagtgagactctgtctcaaaaaaaaaaaaaaagaacccaaacttttggtgttcagccatgttcccatgctcactcccagggtggtgactctgggaaggtctcagcctccttgtctgcccagttagaatgatctgatgcccctgctaccatcagacttgataagtttcccaaagactctttgcaagaagcactgttctggagggtggaggagagactaattgttcttgctctcctggccagagtgggaagctttggggtggccggtttgtgggtgcagtggaccccatcatggagaagttcaacgcgtccattgcctacgaccggcacctttgggaggtggatgttcaaggcagcaaagcctacagcaggggcctggagaaggcagggctcctcaccaaggccgagatggaccagatactccatggcctagacaaggtacttgccgtggcccaagccccacccaaggccccttccctgtggccccaggctcccaccaaatccctgagcaaacagtgcagtgttgcccatctgtggtttcacattgaactaattatatactcaagtgctgtttaactgtgtgccttgatgactgcctctctccatcctttaatgacccctgtggcccacatggctcatgggtaaaggtgtgctgggcctgagatgccccctcccagggtgcgcttccaggactcagctcctgggcagggacagtcagtcaccagggatagggtgggaccaaggcaggggctctcttggctgctgatgcctgctcacctgaccccggcattgctgctacccactacaggtggctgaggagtgggcccagggcaccttcaaactgaactccaatgatgaggacatccacacagccaatgagcgccgcctgaaggtacgacccctggagccccaccgctttccttgcctcccctctccaccttgcccagggccactttgagcattagcaccattctgtttacttcgccattggcagacagcatgtgagacctcaggacatgagccaggcaccctggctcatgcctataatcctagcactttgggaggctgaggtgggaggattgcttgagaccaggagttcgagaccagcctgggcaacataatgaggtcccacagctacaaaaattaaaaaaagaaaagaaaaaaagaacaggcctcagcagaaatggcgagagatttggggaggacccggagccctggggtatggaggtaggttggcagggctgatgaggaaaactgccctgcctgggttgactcctctgggggtatagaccgtgaccctgggtctcccttcacctccaggagctcattggtgcaacggcagggaagctgcacacgggacggagccggaatgaccaggtgctttagcccctccaccccctgctccgtgttgtcccaaccttgaggagcccagggggcagttagagttctgcagcggtcctggctcctcagggaagcaacacatcggcctccctgagcaccatctcctccttgcacaggtggtcacagacctcaggctgtggatgcggcagacctgctccacgctctcgggcctcctctgggagctcattaggaccatggtggatcgggcagaggcgtgagtcctacagggacacccagggggcagacagaggtgtgatggaagcctgaacaggagacctagggggcaggggtgaacagcgtgggggtgccaggccctgggggacaggggcatcccagaactccaggatcgaggcagagcagccaggagtgggccatttcctgcaggccccaatactcccatgccagtctagctcagcaggcagagaagactaacccttcgtggggctgggtgcggtggctcacgcctgtaatctcagcactttgggaggccgaggtgggtggatcacctgaggtcaggagttcgagaccagcctggccaacatgggaaaactctgtctctactaaaaatacaaaaattaggcaatgtggtggtgtgcgcctgtaatcccagctactcgggagcctgaggcagaagaactgcttgaacccgggaggaggaggttgcaatgagccgagatcgcgccattgcactccagcctgggctacagagcgagactcctgtctcaaaaaaaaagaaaaaaaaaaaagaaaactcaccatttgcagatttgaaggcaggaagctaagccaagcacagctagcttggctgtgcctggagcagccagagtcactccccacactgcctgtcccccagatcccccatcctaagcttcgcctccccatccagcccatctggcaaaagacagagccaaaggctgcctcctgctggcctcatttcaggctttggcttctgggacctggtgtctttgggactggatttgttccttgcagacctggacgaagagctgctgagaagtctccatgtgttgtcagagacccctcctcttcctcaactccctgtgacccctgttgtgcagacttgggggaaaacaagggcacaagaattgtcacccagcaggtggtgtggggctgctaggaggaacagggagtgtctgctactgagttcagggtttctttaattttttgttgttgttgtttgttgttgtttttttttttttgagacagggttttgctctgtcacctagtctggagtgtagtggcgctatctgagctaactgcaaactctgcctcctgggttcaagtgattctagtgcctcagcctcccaagtagctgagattacaggtgtgcaccaccatgtccagctaatttttgtatttttttcagtagagatgggttttgccatgttgaccaggctggtcttgaactcctgagctcaggtgatctgcccgcgtcggcctgccaaagtgctaggattacacccataagccactgcgctcagcttaatttttaaatttttaactttttaaattgtctttagagatgagatcctgctctgtcacctaggctggagtgcaatggcttggtaatagctcactgcagtctcaaactcctggactcaaatgatcctcccacctcagctttctgagtagctaggaccacaggtgtgcaccacctgtgagacagagtcttgctctgttgcccaggctggagtgcagtggcgtgatctccactcactgcaacctctgcctcccaggttcacgccattctcctgcctcagcctcccgagtagctgggagtacaggtgcccaccaccacgcccggctaattttttgtatttttagtagagacggggtttcaccatgttagccaggatggtctcaatctcccgacctcatgatccacccacctcggactctcaaagtgctgggattacaggtgtgagccaccgtgcccagccgcgaattctttaaattttttgtagaaacagggtctcactatgtggctcaggctggtctcaaactcccggccttaagtgatccttccctcttggcctcccaaagtgctgggattaaagacttgagccaccgtgcctggccttgagtacagaatttcttcatggggtgatgaaaatgttctaaaattggttgtggtgatggttgtacagtaaagtgtaaactttaaatgagtaaattgtgaatgatatctcagtaaagctggtttatttaaaacaacaggccaggtgctgtggctcacgcctgtaatcccagcactttggaaggctgaggcgggtgaatcacctgaggtcaagagttcgagaccagcctggccaacatggtgaaaccccatctctactaaaaatacacaaaattagctgggtgtgatggtgggcacctgtagtcccagctacttgggaggcaggagaatctcttggacctgggaggtggaggttgtagtgagccgagatcacgccactgcattccagcctgggcaacaagagcgaaactctttctcaaaaacaacaacaacaaaaaaacaggccaggtatggtggctcatatctgtaatcccagccctttgggaggccaaggcaggaggactgcctgaaaccaggagtttcagaccactctgggcaacatagcaagaccccatctttttttttttttttgagacggagtctcgctctgtcgcccaggctgaagtgcaatggtgcaatctcaactcactgcaagctctgcctcctgggttcatgccattctcctgcctcagccctcctgagtagctggaactacaggcgcccaccactacgcccggctaattttttgtatttttagtatagatggggtttcaccgtgttagccaggatggtctcgatctcctgaccttgtgatctgcccgcctcggcctcccaaagtgctgggattacaggcgtgagttaccgcgcctggccacaagaccccatctttacaaaaaactaaaaattagctgggcatggtggcatgtccctttagtcccagctactcaggaggctgagacaggaggatcgcttgagcccaggagatcgaggcagcagtgagctatgatcatgccactgcactccagtctgggcaacagaacgagaccttgtctctaaaaataaaaacaaaacaaaacaacaagaaaacaggaccatcactcacagcacctctgcctctgccctgcctacttgaatgaggtgcagggcatctcacctgctcagagcagcccttgaatgagccccagctatttctagggtcctcaaacgaaacctcccacggccaagtcatacccaacatgggcctcctcccctattctggcccctgctcggagatgctgagtgacagaggctggacttggggtgtttctggcaaagcctcactgcaggaagccccacagctcaggcccagtccttggttcacacggtcccacttccagcttcttttgcccttaagactgatttgtccctgggagatcaccagatccctcattcaggtggagtgctgcagcgtgacactttttccaggggtgacccaggcctgcagggttccagtgtcacaggcaggccttgcatgagcctccacccgagcttctgctcctcctctcccacagggaacgtgatgttctcttcccggggtacacccatttgcagagggcccagcccatccgctggagccactggattctgaggtgagccaggtgaggtgcaggggctgtgctagaggggaggaccccggctgccctgaccctcctgcccctggcttcccacagccacgccgtggcactgacccgagactctgagcggctgctggaggtgcggaagcggatcaatgtcctgcccctggggaggtgggtgaggctccagtgccccgagggcctggtgggggtggctgctgcatagccttagggattgacagagctgggaagtgcagagtgggacagaaaaccgccttatctgctcagcgggggactctgcatggagccccagctctcgctaaggtgacgaccaagccattgaatgtgtctgagcagggccagagccctccagcaaggctcctggcaagcccagcctgctgccctcagcctgacatgtgggaacatgtgtcaggagacaagtgtcctgcacccagggtgacttagtgcttggggacaagtgttttgtggacacttggggacaagtattctgtacccaaggagactgggccagggaagaggctaagcgccaggtggttgccctggcaaccaggacttggttctctgtgtgtgcgttcgtgtgtgtgtgtgtgtgtgtgtgtgtgtgtgtgtgtgtgtcagggctgcctgccaggagccctggtcaccatgaatccctgtccctgcagtggggccattgcaggcaatcccctgggtgtggaccgagagctgctccgagcaggtgagacgtcctgcccctcctccccagggagaatcaccctcagcacccgccaagacctgcagacacacctgaaaccagagggcaggggcctgtggctcctggtgaaaccttcattcattgcctatgggcactgaggtcatcaagttcaggggtcactcatggcagggatgcctggtactgagagactcagggctcctgcctccctcctgggactgtgcaaaagatccctccccccagctgttgccccaccctgatcaggggagggggctgggcaacctagttgggggagagggggccactccctgtcctccagcttagccctgcttcctcccacccccccagaactcaactttggggccatcactctcaacagcatggatgccactagtgagcgggactttgtgggtgagtcctggggagccagtcccctgccctgtgcctcactttagtccttcagcccagcttctctccagtttcctcccacacctccacggacaggctggttgtggtgatattgtacactgaagtataaaccttaaatgggtaaagtgggtggggcatggtggttcaccatgcccagcactggccaacatggtgaaaccccatctctactaagaatacaaaatttagctgggtgtgtggtggcaggtgcctgtaatcccagctactcaggagttctgaggccagagaatcacttgaacccaggaggcggaggctgcagtgagccaagatcacgccagtgcactccagcctgggcaacaagagcgaaactccatctcaaaaaataaaataaaataaaataaaaataaataggccaggcatggtggctcacgcccgtaatcctagcactttgggagtccgaggcaggtggatcacatgaggtcaggagtttaagaccagcctggccaacatggtgaaaccccatctctactaaaagcacaaaaattagctgggcatggtggtgcatgcctgtaatcccagctactcgggaggctaaggaaggagattcgctggaacctgggaggtagaggttgcagtgagccaagattgtgccactgtactccagcctgtgcattgggagcgagactccatctcaataaataaataaataaataaatggataaattgtatgtgagtgataactcagtaaagctggtttatttaaaacaacaacaataacaaaaaacacgctaggtgcaatggcttacgtttgtaatcctagcactttgggaggccaaagcagaaggattgcttgagcccacaagtttcagaacagcttgggcgacatagcacgaccccatctttgcgaaaaatgaaaatttagccgggtccccccaccgcctaacctcctcctgccccctgtatggtcaggctgggtggggatgggagaggcctggtgactgggaaccttttctcccagccgagttcctgttctgggcttcgctgtgcatgacccatctcagcaggatggccgaggacctcatcctctactgcaccaaggaattcagcttcgtgcagctctcagatgcctacaggtaagccctgaactgccacctccatctgccgctgccggcctctgtatcccccgccgcccgcggacgtggctgccttcctccccgtcccacccctccgccagacctggccattgcggcgctggaccagccaagggtccagccccttcagcgccagcacctctgtccccagcacgggaagcagcctgatgccccagaagaaaaaccccgacagtttggagctgatccggagcaaggctgggcgtgtgtttgggcgggtgagcaaggcagggggaggggcggggcctctgggctgatggtgggtggccaggggggcaggatcccgggtccagcccctgtgcctccctcttcccgcagtgtgccgggctcctgatgaccctcaagggacttcccagcacctacaacaaagacttacaggtgcgaggccgggggaggcctggctagtacgtgccagttctcagggctctggcacactcaggcagggccccaccccgggattgccatacatcctcccatcctgtgcacacagctccatccgtggctgcccttgaactctctgcccttcctttgttggggtattgagtgttcttcccatggaaggcagtggggatgcctcagtgggggggtggggctgtggggaccctgggtgccagggggctgctaggccctcacctcctgccatgtgcctcccaggaggacaaggaagctgtgtttgaagtgtcagacactatgagtgccgtgctccaggtggccactggcgtcatctctacgctgcaggcaagacatcacccccctgcttctcctcccctaggtcccaggcactggggtgggcatgcggggagggtggccttgggaggaggtgaggtggggctggaggacctggggcagggaaggagaggtgtgctcgctcctgctcctggggaacagggaaaggacagaaactgctgccatgcagtggaagtagatgagactcagggggcctggggcctgtcaaatggcctgaccagaactctttaaaaaaagaaaatctaaacaaaaggccaggtgcagtggctcatgcctggaatctcacactttgggaggccgaggcagatggagcacttgaggtcaggggtttgagaccagcctggccaacatggcgtaaccacgtctctactaaaaatacaaaaattagccaggcgtgatggcccacacctgtaatcccagctactcaggaggcggaggcagaagaatagcttgaacccaggagatggaagttgtagtgagccaagatcatgccgctgcactccagcctggaccacagagtaaaactccatctacaaatatataaattaaattaaattaaattaaatatctttaaaaaacattttttagagacagggtcactctctgtcgcccaggctggagtgcagtggtgcggtcgtagctcactgcagcctcaaactcttgggctcaagtgatcttcccacctcagtctccagagtagctgggactacaaacatgcgccaccacgcctggctaatttttttattttttgtagagacagggtctccctatgtttcccaggctggtctcaaattcctggccccaagccatcctcccaccttggtctcccaaggtgctgggattataggcatgagccactttgcctggctgatttcttttaaaatcaattattatgggaaatttatgtatataacagctagagaatgcataatgaaccctatgtaccgacacccagcttcaatgataatcaactcacggacatcctggctccagctgtctttacccacagctctctcccactcccttacccccttattttgaagcaaattcccatcatcacatcatttcattcctaaatagttcaggatatgtcttgaaatcagtgtttcttggctgggtgcagagcctcatgcctgtaatcccatcaatttgcgagactaaggtgggcagatcactcgaggtcaggagttcgagaccagcctggccaacatggcgaaaccccgtctttactaaaaatataaaaattagctgggtgtggtggtacacgcctgtaatcccagctactcaggaggctgaggcaggagaattgcttgaacccgggagatggagactgcagtgagcagagatcacgccactgcgctccagcctgtgtgacagtgcaagactccatctcaaaaaaaaaaaaaaaaaaaaaaggcagtgtttctggaggctagtcccccaactagcagcaccagcatcacctcagaagtcctgagaaatgtgatgtgaggccccactccagatggctgaatcagagactctgggggtgctccccagcaatttgtatttttcttagtaaattctccagtggctaggcctggtggctcatgcttgtaatcccagcactttgagaagctgaggcaggagaagcgcttgagcccaggagttcaaaaccagcctgagcaacatagcgagaccttgtctgtaaaattaaaaaaattaaattagccagtcgtgatggcgtgtacctgtggtcccagccacttaggagactgatgtgggaggatcccttgagcccaggagctcaaggatgcagagagccaggattgtgccattgcactccaacatgggcgaccctgtctcaaaaaagcccaaaacaacaacaacaaattagctaggcacggtggtgtgcatggctgtagtcccagctacttgggaggctgaggctggaagatcccttgagtccaggctgcagagggctataatggccactgcactccagcctggacaacagagcaagaccctgtctcctaaaacagaaaacaaatcctccaggaacatctgatgcatgctgaagataaggactctttgaaaacataaaggccagtaaaacatacaggccagtaagtgttcatagcacatgtaaatattatcgataattatgagaagatggttcaagttgagagtgagacagagccgagtgggtaagagagtatctgcccaaggcagggatgtcctggcagaggggcaggtcctgggcctggcagcttcagatcccagggtccccagggctcaccactcgcccacctgtgcccccagattcaccaagagaacatgggacaggctctcagccccgacatgctggccactgaccttgcctattacctggtccgcaaaggggtaagtgtgtagcagccagggggagggtgaggagatggggtgccccccccagagggtgggggagctcaggaatgggtgcaagcggcccagcctggtggctcacccctgtaatcccagcactttgggaagccgaggtgggcgggtcacttgaggccaggagttcgagaccagcctggtcaacatggtgaaaccccgtctcttttgatgtaaaaatacaacaattagctgggtgtggtggcacactcctgtaatcccagttactcgggaggctgaggcaggagaattgattgaactgggaggtggagtttgcggtgaggtgagatcgcgccactgcactccagcctgggcaacagagcgagactttgtgtcaaaaagaaaaaaaaaaaaaaaaggaagggggtgcaggcaatggaggcagatcagggcatggagaaacctgcctcagcgccatcttcctccctggcacccagatgccattccgccaggcccacgaggcctccgggaaagctgtgttcatggccgagaccaagggggtcgccctcaaccagctgtcactgcaggagctgcagaccatcaggtacggcccatccccttccccatgctgcctcctaggaagtgagcctgggtgcctggagcccagggtggcctggcgccctggcccacctcttcctctctccccagccccctgttctcgggcgacgtgatctgcgtgtgggactacgggcacagtgtggagcagtatggtgccctgggcggcactgcgcgctccagcgtcgactggcagatccgccaggtgcgggcgctactgcaggcacagcaggcctaggtcctcccacacctgccccctaataaagtgggcgcgagaggaggctgctgtgtgtttcctgccccagcctggctccctcgttgctgggctttcggggctggccagtggggacagtcagggactggagaggcagggcagggtggcctgtaatcccagcactttggaagggcaaggtgcgaggatgcttgaggccaggagtttgacacagcctgggcaacacagggagacccccatctctactcaataataaaacaaatagcctggcgtggtggcccatgcatatagtcccagctacttgtaaggctgaggtgagaggacacttgtgcccaggagtggaggctgcagtgagctatgatcacgccactgcattccagcctggataacagagtgagaacctatctctaaaaataaataaataaacgaaaaataa

SEQ ID NO: 412 - DNA, 4702 bp, Homo sapiens
  source 1..4702: mol_type = other DNA
ctgagagatcctctaccgcagtcgtttgaggaggcggaactgaagttttttcttaattatcatgtgacgggttctggatttaatggggggaaaagggcggaaaaggacaaggatccaaactggcgaatttgctgatcttcgcgtccctctccgctttccggccggcagcgctgccaggtgagtctggggctctgccctagcccgcaccgtacgccggcgctggtctcctgatgcttccgtgggctgtgcggccgaccctcaacccatcacacagccagccccaaacgcgcacacgcctgcttggctccagggcttctgtgcgcatccagcaggaaccgtgttaaactccagcatgtgctgggcttacagcccatgaaaggggagcgtcccggtggggcgccgcgagccgactgtcggtgtttgcagaagggcaagtatagtttaggagcgtcctgaagttccaggggcaaataggcccccagatgagctaagttgtaagcagaacgctgttcctttggccaaggctgttgctgcacgggcttttcaaaagcgactcattatgaagaagaataaatatgtgggctcatgaagcaaaattatctttgggatgaggcaggttcacttggtagactactggcagtggcgagagaagggaaatgggggctgatacccagccgtgggctatgtgggtggggctctatatatgtccatacaggggtaactccgaaggttttaaaaatgagtaaggaatcattaacaaatatttaactgtcttcctagtgccagaaataaccaccttaaatgggaaacattttagttgagcacatttttggagtacgcacctccccctttcttgtggagagaatagtaggaaacataacgactgctcaaattgatgaagacgtaaatgtaaaactgggatcgtatgtcatcgttgtagctcagcatacaggcgtacaatccttcaatcgtcatttaagtatcagcagtgcttccccattgagggtatttccgtgcaagaacataacagaattttgttgcatcccacattataaatcttgtaggcacaataagattgttacttgcatcctttcacctccagccctaaagcacctgtggtaagtacagccaaatgtaagaaaaaaatgaagcttgtcttatccgatagcagatggaacagttaggtttaagcaagtgtataatcataaaccgtttttcagaggttcacaaaaacggcctgatagattggaggtggggattgtgcaatttacgggatgaaatccatccatggttattaatcaacacacacccctccaaccctgcttccaaattcagtcccacatcccactctatggcagcctctggccgggaaaggaaaccaacacagaaaaatgcctccttagaagcaaaattactgcagtatgaagcctttgccaattaagtaaacaagtttaagtgccactagatgggtataagggaaaagaggtgagttaggagactaatacttaactgttgaaatagaacagatgtgtcctcttgcactgtgatagccacccactatttaaagtagtagagatgttgcacagtacatcaaagttagttctaaaatataattgagcacgctaatctagggtatttggctcaattagccagttccttcaccttttccctgttatcttcctgcatctttcctcctaccacgcatgcttttgttcctatccctagcaccttctgatctttttctctttccatcaagtatcctctctcatcttcagtgtcattccccattggcttatttctgtttatagtcataaattcttcctttcctgaaaatttcttctttcagtttcatataccctatctttcatttttctcttctccaaatgcctcaaaggaataaaatgttctcaattgtttccatttcttggtcttctgttaactccttacccagctgcatgcagtctggcttctgatttcccattctacttatcctttttccaagtggccataaaggttggtataaaaaacttaagtagaggaacatatcataaacctatatgtgaagattaaatataataaatgctatcccaagctaagttttatgcattcataatcaaaattctaggttttcaagaatcagcaaatttagcattgaaaaactgtaagggcaaaatagaaaatattctagaaaagaggccggcgtggtggctcaaacctgtaatcccaacactttgggaggctgaggtgggtggatcacttgaggtcaggagttcgagatcagcctggccaacatggtgaaaccccatctctactaaaaatacaaaaactagctgggcgtggtggcgcacacttgtaatcccagctacttgggaaacttaagtgggaggatcacttgaacccgagaggcagaggctgcagtgacctgagatcgtgccactgcactccaacctgagtgacaagagtgagactccgtctcaaaaaaaaaaaaaattctagaaaagagaacaacgagtagatactaggccttccagatattaatacattcctagagcaacactaagtcatatagtattagtgcaaaagagaaacatatagatcaatgaggcagaatagtgatataagaaatagcccccaaaatttagcatctaataatcacaaaacatcaaaagtttattaggtggtcctgattattgaatggataacaagtagcttaaaaaaatacatatatacaccaccaatcagtgagactattgttaaaaggaaaaaaactattataccaagaaagatatttgtaagaatttttatgagaaaataagtgagaatttaagaatatgtttcaaattatatgaaaatccagtgttatcagtgccttttatattatatagcccaacaacctctttacaatcttttttttttagacagtggtctcactcccatcgcccaggttggagtgcagtgtgcaacggctcactgcagcctcaacttcccgggttcaggtgattctcccacttcagcctcgcgagtagcagggaatacaggcacgtgctactgcacctaaattttttgtatttttagtagagacggggtttcgccatgttgcccagactagtcttgaactcctgggctcaagagatgcacctgccttagagtcccaaagtgttgggactgtgggtgtgagccactgcacccagccactaaaatattaattctactttatattcttgtgatttttattaaccattccctccttttattgatggattgactgattgagacagcatctcactcttttgcccaggctggagtgtagtggcatgatctcacggggcactcactgcggcctcgacctcctggactcaagcaatcctcccactttagcctctcagtagctgcgactacaaggtgcataccaccacgccttgccaatttttttattttttgtagaggcagggtttcactcttgccctggctggtctggagctcttgggctcaaatgatatgcctgccttctcctccccaaatactgggattactggcatgagccacgcacccttcccattcccttcttttaaaactctctctcttctcagcttgatacccacctttcactttttcactactttgaatgcttttttctttgtaccccttgaaattgaattaaaaattagatttgcaaatgtataggaagattaagaacatctttgaggtgcaggaataaagttgtaagtgcctggactcgagtgatagcactgaaaaggaatcacctgacattttgaatagagcttatacagtagatataataaaaattgtattttgtcatgggctgtaaggaatggtggatataatgtcaatgatcactaagttttagaggatttgaaaggaagaatagtagaatgttttcaaaattaggaagtcagttgggaaagaaccagttttgttcattaggaatggaagtgatactttttttctggtatcaaaacaatcttgactttttctccttctcttagggtatatttccttttttccgatcctgcaacagcctctttaaactgtttaaatgagaatgtccttggctcagagagtactactcacctggcttttcacactactcttcttgatcatgttggtgttgaaactggatgagaaagcaccttggaactggttcctcatattcattccagtctggatatttgatactatccttcttgtcctgctgattgtgaaaatggctgggcggtgtaagtctggctttgaccctcgacatggatcacacaatattaaaaaaaaagcctggtacctcattgcaatgttacttaaattagccttctgcctcgcactctgtgctaaactggaacagtttactaccatgaatctatcctatgtcttcattcctttatgggccttgctggctggggctttaacagaactcggatataatgtcttttttgtgagagactgacttctaagtacatcatctcctttctattgctgttcaacaagttaccattaaagtgttctgaatctgtcaagcttcaagaataccagagaactgagggaaaataccaaatgtagttttatactacttccataaaacaggattggtgaatcacggacttctagtcaacctacagcttaattattcagcatttgagttattgagatccttattatctctatgtaaataaagtttgttttggacctc

SEQ ID NO: 413 - DNA, 32744 bp, Homo sapiens
  source 1..32744: mol_type = other DNA
gggagttcagacctagatctttccagttaatcacacaacaaacttagctcatcgcaataaaaagcagctcagagccgactggctcttttaggcactgactccgaacaggattctttcacccaggcatctcctccagagggatccgccagcccgtccagcagcaccatgtgggtgaccaaactcctgccagccctgctgctgcagcatgtcctcctgcatctcctcctgctccccatcgccatcccctatgcaggttagttcccttcttcttcttcattattagtattagtatttaactctcctgctaaccttccctattccttttaacaccctctttttaccctattcccagcatcctttctgaactcagtatgtagtataggtttctaaaagctctcattatgctttttttgacattcttttttgttgttgtttgaatagcatttaaaatgataattaactttccctcaactcccctccacctccaacccaagccccgtcccacttagcctaatagttgtggattatgagatagggaggaagtgctaatactggctgaacttggctgctttggacaagtttaaagctaaagagagggtctggtctgaagaggcaagagtgatggtcagtccggcaggaagtcatccttttccagagaacaatttttcatgataatgcactactccacatcacctagtcaacatttggagccaaattacgactttgtacaggttttcattttgaggaggcagaataaactctgagtatttgcatatcataaaaatgaaagagaaagcctctttttaaagatcttattctttctgggtacggatgcctgccctttgaaactgcagtgcacggagactttgattaaagctgcagaactgcccatctctgtctcccactttctcccttggatttgccgtttggggaggagttgcttgaaagttcatattgcttggagatttagagatctcgtttgctgctctgggaagtttctcttgttatcagggcaagaggaaacatctgtattttgttgtatcattgtagaggctgaggtgccaacgggagaaggcagtgaatatcaagggtaggcgcaggggaataaaagagtgggaacaaatgcccagatggagacatggcctttttacaatataaaaaagagaactggctgtatcttttgagatggtaaatatgacatttatcagacctttgatctagtttttgatatggtacaagggttaaaaaactcaagaattttctaaatgcaaaggaaaatcattcaacccacctggttttcttttattttgtgaagtggcccgtttggaaaatgacactgtttggaaagggtcactctgaaagcatttaggtaagatttctgaagaagtgaaaaagcagtgagttcaaatcaagcaggttatcatgcttgacatgtgtcatgttaaaatcgcttcacagggtcgggtgcggtggctcacgcctgtaatcccagcactttgggaggccgaggcgggcagatcacgaggtcaggagattgagaccatcctagctaacaaggtgaaaccctgtctctactaaaaatacaaaaaattagccaggcgtggtggcaggcacctgtagtcccacctacttgggaggctgaggcaggagactctcttgaacctgggaggtgggggttgcagtgagccgagattgtgtcaccgcacttcagcctggggaacggagcaagactccatctcaagaagaagaagaaaaaaatgcttcacagatgactgctggtttaggggattttgagcttaaattgaaataatggctaatattttgagggttttcatttttaaagattaaaatgtcactgttcttaagtagaatctggttacctgaattcatctgtgctaacgcaaggggaacgcagtgtggaaaacccaaacagtagatcaaccgtaggcagtgtctatttgttttcggcatgcattatgaacttttggcaggagacatacatttgtaattatatttcactttgcctaatgtagaaatgactgtgtttcctgagtacaggcagaatgcagcccaagagtgctggcaggcaaggagagtccagttgggaattacaaatatgctgtgaataattcctgaagtggataattctaaaattgtcatcaaaggagggtgcgcctttgtttagatggccagtttgatagttttttttaataacctttaaaataaaaaatatgggtagcctcttagaacacacaaagtttgttcttttttaaatgacatttaatattgactatttagaggtttcttttgttgttactagctttgattataattatttattctatgaatttatatttgtatgtattgtaaaataacacattgttaggaaagaagtatatactgtaagttgacaaccagttatcaacagaatacactatggagatacttttttaaaagcttaagaaatattcaatataatgggcccccgccatctttgtaggagttagcctatatagaattaccctctattcactcccacctacatgggaaacaaatatccaatcctctgtaataaaagaagcattaaatgagcacctaatattcaagagtatgtgggggatgtaaagatgaacaaataagaaaggaacttaaatttgttgagcaactgatatgaaccaagtagtaaagtacatctcacttaattctaataagattggcactattggactcatttagccggttcaaagacctcagttatcttatttctttgtgagttaagggacagagctgagatttctacccaaatgtatgtgaatgaactatgtggtgttttttttttttcttttttcatttatattgaagcgagcagcagtgaaatcaactgaaatttacttaaaaaaaatcatttggccaagtgatatattttcaaaaaaccctgttagaaatactttgtactatggttgagagttcattttcagcatagagaatcaaaccaggtgaaggggttatatggtactgaagtccatatgaaaagatggatggtagaatagtcagtatcttagcacaggatcacaagtggcccaaggtacagaggttcgtaagtataaggaatgtcccaggaaggaccccacacagcaactgaaggcaagcatttgaggcagaagtattgggcatgtgatggggaatattgtctgtgagtggaaaagtaagatgaggtagaatggataggattgaaggtcatgctcaaccatgtggtctttaaaatgaatgtcatgcgagcagctgaaagtttttttgttgaaaatgtacttgattgaagttgttcttcagtgtggttgcttcagttcctgtgtggaaggaaagttgtaggcagaaacagacagtgaaggtggaggccaggatgaggcttctagaagaatgaaaccttaaataagaactggaaaggagaaggaagaaaatacctagggaggcccctcaaatcacactgaacatcacttcattttgtaaatccccttggaagagatgatgctgcagcttctcaaatatcagcatttgatttacatctgacacagtctctgtcttcttggtatctttatttgtgatattgttgccttctctaaagaaagggagatgactgccgatttgcaaaaatccatgtcttagataataacaacgaaaatttagacttctatttgaaattcttggctttggagagtttacaatctccagtctcaaccattcccttccattaattatttgtgtactttcatcttaacatcttgccacttgaatctcttcatcactaatcatgtggataggtttctcagaatatgtggagccagattcctgcttctttccacaccctgcaaatcctttccttgcatgattttcctttgaagtcaatggttagtccacacagagaagaaaatatatgaggtactgagagaaatgagtgtgaggtgccgggaccagagggagaaatgtgtctttcttcaagcaccttgatacatttgaccctactttctgtgtgtaggttttcactaggatcctaatgatttcagctctaaaacagggacttcaggttcttcaggaaatatagcttccagaatgttttcccatactgggagaagaggaaaaaggagttgtaatttaaagcacaggaaagcatgacaaatttgtagtgatctctcaccctttgatttcatttcaatattttgtttataaacttcagctaacagtcacgcacaaaaaatagtagggaaaaatctgatccaaagatatttttgagtttcttcccaaattaagcttggcttttaactgttttcagtaaaacaagcatcagttgttaatacatatggaggagaaagttgaaactattttcagcaaaggaattttattttcagatgctgtttttgaatgacttctgttttgaatttttcttttattgtataaggaattaattttatagatgtgtggattacatgatgtacaattagctccaacttcatatttttgagtaattagttactggcttagtataaatgacttaattaaaagggaaagtttctatgtcatgagaacaaaatagtgagaagagaattctggtgtctggttctgattgcccctgatagctttgtagccccagacaagcttttcatttctatttgttatctagtaaagggaaataatagatttatttgtttttcaaaatgcttttcgatctttagatgaaaggtagtgattggaaaatttgtcagcaagcaagggtagactgtttttgtgaggtacaacaaaacattaacacatttcagtaggacaattgaggagatttagaattaaatacaatcaaaaattccacggagacctctgctctccagaatcttcttcatggcttgccttcattttgcgtggcattgagaaaagaaaccagagcattgaccagagattttgtttcatttgatacattaaaatacattacacatttaatatttgtcttagactttttgatttttaggcttttccctcacacttagacatgtatactaaatagattatatatcaggccaacttcaattttatatttttagttaatataattatacacatatttaagaaatacgtgtataaaactcttctattttggtgaatagttgtttcatagatttttttcatcaattaactatcatttatttctaagaaacattcaaatttatacaggaaattataaaactattatgctatgaagcatttcaaagcaccttagaaatagtgtaataaggtcaaaggaaagagaaactcttaatggaaaaacttatctcctattaacatggttctgtgacagaaatcaaaatttgaaatgaattatgccttctttgcttggaagaatcacagtttcttcttcatgccagagattaaaggataaaatttcaaaaacaaaactaaaactttgcgtatttataacatttttaaaaatccaaattgattttcaaatatttacttaatggttacagtttaatgttaacataacttttatattttagattgagaaattgggatgttaacatttcaggtaattaaaaagtcatttgacaagtcaataagattgccagtgttgtacaaggcatttggtccatgctcaataaataacatgttgacagatttttggttgatttcattttcatgttaaaatgtcttttaaactgtatctgttgtaccatagccattctatcctgtaaggcaaagcaaaattaaaaatgaaagcatcattgcaggaattagtattgtcttttggagattgtgctttggagttttacagagattcagaaatttagaggacctcgtgttttctctaatttattgcagccttcaaattaggatggacactaattagtagcatctgctcatctcataaaccaactggagccagtggttgctgacaaacttagagtatgatggcatttttggtacctcactctgctagttgtatttccaaattttgtgcacacaaatttttactctccttttttgacacatttcaacacagattcagatcaggaatgtatttcctgctctactatccacatttcttctctactgctagctctaaaccaaattttcaggaaagtgttacatgccatatttccactacaatcttagccattcttagctacagatggcatggtcagtggttcagagtggtggtttttaagtcagcctgctgggtttccaatctgagatcttctaagtggtcaattaatttttttctatgtcttggtttctttggctgaaaaatgaatgtatccttactgcctttggtataagcatgtttgaaaagaattgacaggcagaggggcacaagcacatctatccttattacacaatagctgcactctattaaacattttgatctgcattgtgaagatgctgatcactaacagattggggctattttgggcaaattgagaatacagagaacaagtttttgaaacactaaagttatccataagattaggtcttttagaatgttttagttctgtttttcagattttcagtagaaggcttcatgctatctaggcgccttgtattttcatgaagaaaaatgatattgctgcattaaaggatgaagttttacatacatttgatttacagcatttggcttgatctcaagacaaatagttcggtgataccaagaaatagtgtccaaaagcacagaaaacatttatgcactaaaggaggagagaggggctaaaatatgaataacatgaaagactttaaagagtaggtcagaagaatttgtccactgtacagtttttagtgagacgtttctcgcctgtctttgtgttggcttatctcattaaatactataacgtatatgaggaccaattgtagaaggaaatgaaaagtttaattataaagcatgatatgatatgcttctagcactgatatttcctttcatgatgtttggaaaatatcatgttatttatttctttagtgtgaactctgtcctgatttttaaaagctccttaatttgaaagaatgtaaatgagtgactctacatgacaagttatttgtttttccttgattacaatattcctctctttctcttaactattccctacctcactctgctcctaacccctggaaatctagtatattgtcaagtaaaatcactttcttgtagatgatccttaggattttttttatatatgagccttaaaaacatttctccaatgtttatttttttaaaacattttgtatttaatagagggacaaaggaaaagaagaaatacaattcatgaattcaaaaaatcagcaaagactaccctaatcaaaatagatccagcactgaagataaaaaccaaaaaagtgaatactgcagaccaatgtgctaatagatgtactaggaataaaggacttccattcacttgcaagtaagttacttcattttcttcttagaataattttccaaatatagcatgcatgtattataatcatgtgtcttttgtgttgtagtcaatgtgatttgatcataaaattgtaagtttgactctagatttaactcactacaaacgaagacttagctctcagtttatggaaacatagcttgagtaagggagagcgcaaaaactgctaccttctaaaatccacagtggctttggttatggaatttgttttctcatctgatgagcaattgaatttgagtaactaaaatgaaattcaattggctttgggttttaaaatatctattcagagtaactttttttttccttgcaagaggaatggaggaatttttagaacagaatttgggcagcagccaaaatttacttcatctttattatatcattgcatttagggatttaaataaaaggtgttgagagaattagtttaaaaattagagagactggtgtcagcagagactgtttaaaagaagaggatagcaatggtaaagtttcaggtgaaaattgatggggcaatttaaagaggcatgaggggacttaaatggagagtttcatgtcttttgacagtccctgtgtgacctcatagggaagaattccttactacaggggtccttaaccccctacccctgccactagtctgtggcctgttaagaaacaggcctcacagcgggagtgagctgcaggccagtgagcattactgcctgagctccacctcctgttggatctgccacattagattctcataggagctgaaccccattgttaactgcacatgagtgggatctagggtgtgcgctccttatgagaatctagtgcctgatgatctgaagtggaacagtttcatcccaaaaccattccccgctccccggcccacccccacccccactccacacccttggaaaaataaaccagtccctggtgccaaaaaggttgggaactgatgccttattactttgccagtgatcccagaagataaaactctttgttttgggctaagagggtgacaatttcattcgaatcgtctcctaaactgtcagaagaagacacatttttttagttcttcattatcttacctcacttatttcccactctttcactccctattttatcttttttttttttttaacagggtcatgcataaaatcctgtacatattaaattctactcaattacatttaggtagtgacccataatgtgaccacagggtttagtaatgtcatggcaagtggtcctaatttcatcttgcctttttcagagaaataaatgttatgggcctgagaggaagagcatggtcagaaaagatctttatcaggtttaggttgaggaaagactgtctgctttccatttctagagtgaaactgccaatttccgggagatagttcctggcaagaggagtgggaattgactttgcaagtatattcctatgataattctgttttattccctgactttcctataaaagccttgctattgttagaaatagagacaactactctcaatcaacatctcagctgtgtagattcatggagatgttccagcagttgaggaggatagagttgtattttcccctctcagggctggaagggcagggaaaagggaaggagaggacacctcattgctgatttttaactttgaaaataagctctcttggacccacaagtaaggaaagtattgctaccattcaattttcacattagtcaaccgtatacttaggaaagaaaaactttccttttgttctatttactaggaactaaaatgattttactggagaagacattaataaattagtaagtgctcacatattccatatatatgagatttcatactttcctaccatattttggttgagttatatttattctccaaatttatggcaacctgtgcagaaaaccacaggtaatattatgtattagagccaagattttttggcccagaaatggtaaaatcctcctcattcacacacacacacacacacacacacacacacacacacacacacgcacgcacatagacacacatatgtatttgggattattaaatatcttagctatatagaattgaatgaacatactatgatactatgaacttagggtcttaatgaatcaaaggatgttgtttctagacatgttatataaaacataattatttaaaaacaatgaaaaataccgtaaaccacttataaaataccaaagaagtgtgcgaaaccatctgtgacgtgaatgagtgtgaggtggaacattcttaaatattgtttttccttgagaagttatcaacaatattgatttcctagagattcaaattattctttgctgggtaggaaagatgaccaagaatgcctgattctaagctcttcaggaaatagctcattcataaattcacttaataagataggaagctttcctcttttagccatggctggcaactggtactagaattgccttcctgccatcaacaaataggaaatagacaaaataagctgtggaaaagattacaactagaacgatgttaagataaagactctaaaagtcaaacctaaaagaagatgcaacttacggaatttgatggcttccacccactttatatggaggtgtaaaataatataagaaacacttttcttaaagaatttgtcattgtattggaacgagagaaagagtgaatgagatcagcaaactggaaatcctgtcacccactttacagatggaatcacttaaaaacaaatttatcatttttttgcgtatttatcattttgttatataaataggttcttttagtgaacaataacaaaaaaccaatataatacttagctataggaatagtaggggtggtatgtcttcataactttctttaagatgttatgtcaaaaagatattctctaatattactagttttctttaaattaaaaatgcttagcactttgggaggccgaggcgggtagatcacgaggtcaggagatcaagaccatactggctaacatggtgaaaccccgtctctactaaaaatacaaaaaattagcgaggcgtggtggtgggcacctgtagtcccagctactcgggaggctgaggcaggagaatggcgtgaacccgggaggcggagcttgcagtgagccgagatcacaccactgcactccagcctgggcgacagtgtgagactctgtctcaaaaacaaaaaaacaaaaaatgcttatataagcaaacctgtttaggaaatattagcttaaatagttatcctcaacaagattttcatagcttttaataaactgcaatgttttataattcaccaaaaaattacattatatgcaaaaatttccaaacacttggtttcagatcccactttttaggagaatccctagcgcattgatatatctaatgcaccttagaaaatgtcattttagaatatattttttacagttatacactttgtaaattactcctgatatctcagatataattgagatagcttaaatatctcaaatataataccattttgtacaagtgtggataaaaatattccaactttctgtgaagttacagaaaaataaagccttcagaaataatttaaatagttgtgttacatattgattttgcatgttaaaactgttatttttctacaagccttttggaataacatgagaatattccaaagagtattcaatctgatatttaaatctactcctacaaaaacttaattttgttctttcttgtttggctatcaaaatggtaggttcaaattttactcatatttttattatgtatatgtaattatgcatttgtttctatattgtccatatgcccatggacaagatgaaccatatgcccattctttaaatactgtataaatagtagtatttcttcttttcattctgatatttttttcagggcttttgtttttgataaagcaagaaaacaatgcctctggttccccttcaatagcatgtcaagtggagtgaaaaaagaatttggccatgaatttgacctctatgaaaacaaaggtaactgacttctccctaaatattgcataatgaaataaagtataatgaaatgtatgtttgtaatttcctgccagagtggtctttctcactgatttttctactatatatgagatattttatgtagtcaattcatccattaagacagttgaaactagtatcttgactatttttagtatggtactttaaggagaacattttcaaaacttttcataatcttgattcccttcctccctctgtttatttttatttttatttttttggagcatctcctagaactggcattctccatgttcattttagaaagtgctactttctttcattataaagtttaaaacactttatattacagcaaattctgagtttgctatagtattttgcatttaacaatgttggataactaaattatagtgatgattactgatgataacaaaatatggagattttggagaaatgagttgggactatgtttcatcatatacttgaaaaaaatatttaaaggaggaattgagaccatattatttgctgattgcctattctggtggtctgatattatgttcactaggtatttactttgttcaaaagcagaatcaagtaaatgaaataattgaagaatgttaaacaaccatgtcctattaaattcagatacataacctggtacaatatatagatgttttcaagttaatagggtaaatgtttaaataaaattaaaaataaatttatggtagaagtaagttaatctttatacacctcaataatactacaaatcttgaacataattcatgatctagtataacaccattcttacttcaaactgtcttctagcttgctaacaactgcatgtactattatttggtaggaatatataggttattacaatttggttgtcctatcagcagtggaaatgtttgcaaaaatatggaaactaataagcaagctacctcatgcatatgcatatataaacaaaaatccacacaattttactaagaaggacaaattaattatcttaggtaactttttgaattcaatataggttttaaaaatcatttaatttttgtttttaatattttcttaaaatggtctatatatttgagcaaatcataattgcttggctagctgagtatacagactatgttaagtacagcgactgctctctggagctatctatgcatatatacacaaaattaaaacttctcaatcatctgtttgttttggattattcagaaatgtgttattttgaaaatactagtagaagctttaggcaagaaatttcaatgttatttgaaatagtttacaagagttaattacttacaggtttgaacggaatttttttcttaaatactgcatatgttttgcatagttgcaataattttatctactttcttcaatagactacattagaaactgcatcattggtaaaggacgcagctacaagggaacagtatctatcactaagagtggcatcaaatgtcagccctggagttccatgataccacacgaacacaggtaagaacagtatgaagaaaagagatgaagcctctgtcttttttacatgttaacagtctcatattagtccttcagaataattctacaatcctaaaataacttagccaacttgctgaattgtattacggcaaggtttatatgaattcatgactgatatttagcaaatgattaattaatatgttaataaaatgtagccaaaacaatatcttaccttaatgcctcaatttgtagatctcggtatttgtgaaataataacgtaaacttcgtttaaaaggattcttcttcctgtctttgagaaagtacggcactgtgcagggggagaggttgattgtgaaaaatcagaggtagatgagaatcttactgagggctgagggttctttaaccttggtggatctcaacattggttgcacattaaaatcacctgctgcaagcccttgacgaatcttacttagaagatgacaacacagaacaattaaatcagaatctctggggagaatagggcaccagtattttttgagctcccaccatgattccaaagtgcagccaaatttgagaaccactgctaaaagctcaagcttcagattgaccagcttttccatctcacctatcgcctaaagaccaaattggataaatgtgttcattacgacagatgggtactatttaaagatgagtaaacacaatatacttaggctcgtcagactgagagttttaatcatcactgaggaaaaacatagatatctaatactgactggagtattagtcaaggcttatttcacacacaattttatcagaaaccaaagtagtttaaaacagctctccccttattagtaatgcattggagggtttactttaccatgtaccttgctgagcactgtaccttgttaatctcatttacttgtaatgagaaccacacagcgggtagttttattggttctattttacctacatgacaaaactgaagcataaaaacacttagtaagttttcagtgtcatgcacaactaggaagtgacatggccagaatataagcccagtcaccatcactctataacctgcgcttttaacaacttcagggcatgacacatttggccggtcagtagaacccatgctgtgatttgtttttgcagtggtggtgatgactgccttgttgaatccactttttattctattccattttggggacacaattctgcaagatgattcttcattaggaaacagagatgagttattgaccaacacagaaagaaaaagagtttgttgctccacactgggattaaacctatgatcttggcctaattaacactagctagtaagtgtccaagctgatcatctctacaacatttcaataacagaaaacaacaattttcaaaattagttacttacaattatgtagaaatgcctctaaaacacagtattttccttatattacaaaaacaaaaattataattggttttgtcctcttttgagagtttgcatggtgttactccctgcatagtgaagaaaacattttatttaagtagatggatctaagtttttcatgaacaaaggaatgacatttgaaatcaatcctaccctagtccaggagaatgcattagattaacctagtagaggtcttatttcaccctgagttttctatgatcgtgattctctgctggaggagtaattgtgaaatagatctctctgggaactggcttcctagtccaatcagctcttttaccaatgaacacttccttgtgatatagatgtttatggccgagaggatccagtatattaataaaatccctttttgtattcaatgagggaaacacataattttcatcaattagcagcttattggaatatctgcatgatggtttaacacttttaagtgttgactaaagattaattttacagaaaatagaaaaagaaatatgtttctgtctggaggaatgatttattgttgacccctaaattgaaatattttactagtggcttaatggaaagatgatgaaagatgatgaaattaatgtagaagcttaactagaaaatcaggtgacctgatatctacatctgtatccttcattggccacccagcattcattaatgaatcagatgatggaatagatcaagtttcctaggaacacagtgaatattaaaagaaaacaaagggagcctagcacctagaagacctagtttatatttcaaagtatatttggatgtaacccaattttaaacatttcctcacttgtctctcttaaagccttgccaacagcaaggacagagaaccaaaaatagtgtatatatgaataaatgcttattacagaatctgctgactggcacatgctttgtgtgtaatgggttctcataaacacttgttgaatgaacacacataagtgaaagagcatggctaggcttcatcccttggtcaaatatggggtgctaaagaaaagcaggggaaatacattgggacactaacaaaaaaaaacagttaatttaggtaaaagataaaatacaccacagaatgaagaaaagagatgacccagactgctctttaaccttcatgtcctagagaggtttttgatatgaattgcattcagaattgtggaaaggagcccatcttttctcttcattttgattttattaactccaatgggggaattttattcgtgttttggccatatctacttttgatttctacattattctctcttcctttctacctgtatttgtcctaataaattgttgacttattaattcactacttcctcacagcttttttttggctttacaaatccactggaaaggtatatgggtgtatcactttgtgtatttcggtgtgcatgtgtagaggggacaaaaatcctctctcaaactataaatattgagtatttgtgtattgaacatttgctataactactaggtttcttaaataatcttaatatataaaatgatatagaaaaagggaaattatagttcgtattattcatctaagtgaagagattaaaacccagggagtaaataaattgtctaaggactaaggttgtatactatttaggtgatagatatggggcaaccgtatgggttttatgattaacaaataaacttctcaccactctaccatatcaacttttccataaaagagagctatagtattctttgcttaaataaatttgattagtgcatgacttcttgaaaacatataaagcaaaagtcacatttgattctatcagaaaagtgagtaagccatggcccaaacaaaagatgcattaaaatattctggaatgatggagctaaaagtaagaaaaatgactttttaaaaaagtttactgttaggaattgtgaaattatgctgaattttagttgcattataatttttgtcagtcatacggtctgacaacctgtcttatttctatttccccatatgaggaatgctagttaagtatggatattaactattactacttagatgcattgaagttgcataatatggataatacttcactggttccctgaaaatgtttagttagtaataagtctcttacactatttgttttgtccaataatttatattttctgaagacttaactctagaatacactcatgtcaaaatgaaagaatttcattgcaaaatattgcttggtacatgacgcatacctgtatttgttttgtgtcacaacatgaaaaatgatggtttattagaagtttcattgggtaggaaacacatttgaatggtatttactaagatactaaaatccttggacttcactctaattttagtgccatttagaactcaaggtctcagtaaaagtagaaataaagcctgttaacaaaacacaagctgaatattaaaaatgtaactggattttcaaagaaatgtttactggtattacctgtagatgtatattctttattatgatcttttgtgtaaagtctggcagacaaatgcaatatctaattgttgagtccaatatcacaagcagtacaaaagtataaaaaagacttggccttttctaatgtgttaaaatactttatgctggtaataacactaagagtagggcactagaaattttaagtgaagataatgtgttgcagttactgcactcaatggcttactattataaaccaaaactgggatcactaagctccagtcagtcaaaatgatcaaaattattgaagagaataagcaattctgttctttattaggacacagtagatacagactacaaagtggagtgtgcttaataagaggtagcatttgttaagtgtcaattactctattatcccttggagcttctcaaaataaccatataaggtgtaagatgttaaaggttatggttacactcagtgcacaggtaagctaataggctgagagaagctaaattacttactggggtctcacagtaagaaagtgagctgaagtttcagcccagatttaactggattctgggctctttattcatgttacttcatgaatctgtttctcaattgtgcagaaaaaagggggctatttataagaaaagcaataaacaaacaagtaatgatctcaaataagtaatgcaagaaatagtgagatttcaaaatcagtggcagcgatttctcagttctgtcctaagtggccttgctcaatcacctgctatcttttagtggagctttgaaattatgtttcagacaacttcgattcagttctagaatgtttgactcagcaaattcacaggctcatctttctaacttgatggtgaatatggaaattcagctaaatggatgttaataaaattcaaacgttttaaggacagatgaaaatgacagaattttaaggtaaaatatatgaaggaatataagataaaggatttttctaccttcagcaaaaacatacccactaattagtaaaattaataggcaaaaaaaagttgcatgctcttatactgtaatgattatcattttaaaactagctttttgccttcgagctatcggggtaaagacctacaggaaaactactgtcgaaatcctcgaggggaagaagggggaccctggtgtttcacaagcaatccagaggtacgctacgaagtctgtgacattcctcagtgttcagaaggtaaataaacctgaatgccatgtgggccattctattccccctatgtgtagaactgtaactcacattaaaggttaacagcaacgaatcaatcataacaaatatgttgttcgtgcaaatgcaactacaaataattatttaaacatttttatacaatgtttttaaaactgttggattatcaccagattaatgcaaaataacagagcgagttatcagtttgaatttcaacactgcctgagacatccctctggggaaagtgaaagagagggtttacttacctactgtcttgagctcacatacctcaaaatctactactgtgtggcacctgaaaggagttgaatgaagcttagcctttcattagcaatgttaattctattcaaccagcacctgcttccacagaaattctgtccaaactatcatgaagtggtgtgacaagggtatatggacccagaagataatacaatataagaagggatcactggaagcttgaccccatgcacattttggtgaaaatgtgcctagaatcaaatgtgacacgtaggctggaactgagtaccattcagaataggatctgaagagatcaaagcaatggagaccaccaaactgtcttgaaggcatgtctatggaccttaagtccatgtctatgttttcagctcttctcacagcataaaagggcattgtccttacttttgcagtggaaaactgaatggctgacaagatggaagagtaaccatttcagcattgtatgtggtttcatttttcttagttatctggctactgaatagccggatttttcagttctgtcagaaactctaaatttccaaaaatctaagtgaaacatggatgaaactctgttagaaaattgttaggattttggagtatttggggagggggactactggaatgctgtccaagttttatactaagatatcttacctgtttgttattaaccaaatatttttaaaaatatttcctccataaatattcatttaatattaggttgatatttatcacataaaaagtaaaggctactgttagctaattgtcacagagaaggatttgttttctgttgttagtgaatttgaaatccttgactttatgtgctacagccagttccatctctgtttgtaaattcttactttccattccatatcatattctgttccctataacctcttcattgttttcttttcttttaaaaataataaacttttctatgatcacgttttgaacaagtctgttttgtatgaataagtctgaacgaattaatatttgtcttaaacttgcacatggaagaaaaaaaaccctacttttaggggaatctctcctattacagttttctgaggttgaaaatcattgacaaggggttttgtttgacctgaaaacgtgttttcaaaggccggtaccttggccaaactttaaacagcttactattttcgttacctgcctggttcttgtgagaatatgatttttccactacgggtttataaggaaaacattcatcaaaatatacttacttaacataggactggactgctaggcgacatagattaaaagtgctagaaaagaagtccttgaataaatcctattttcagttattcttatctcattagaatgtaactgtctagtatctttaataatttgagatcatcacacctcccttagaaaagggcattgctcgttggtattaatggcacatgatgctattggtcaccgcggcaccaaaggttgcagacatgttctttctggaaataattagtggcctggcaatagtggaataactctcctgtgggagaagggaaccaacatctgccctgtaggttaaacatattttggagactatgagttaaactgtgatattttaaattccagctaacacaagcaatgtgttagcaggattttaatgaaaaagatccaaaataagaagcattgtcaaaacattggcagagaaaaagagtgacttataaaatcaataatataaaatatacaaaataatgtgacatgatataaatttcttctaaaatacatataagggggaaacctcaaaatccagaatgcttaagttgtataatagatgggccatttctatccatggatacaaattaaatggtaagttataaaggttattttattatggctaaggtagcaactataaagtcattttgcatatttaaaattaaacaagaaaaacacccataatcaaactttagactgttcaaatgaaaaagacatatagaacagtatatattttttgaaatttttgtaattatgcttaaaacttggctatataatcacctgaaatttgtttaaaattaaaagaattgtatctgatagtcaatgattaatattattttcttataatttaaaacttgaaaatatagtcaatattccaaaagaaaacaaatattcgtctatcacatttatcaccttccagttagataagaggaataagttcaatagatctattgtgtgaatggtgactatagataataatattatattgtacatttaaaaaatgctaagagactagatgttaaatgttcttaccacaaaattgctatgtgaagtaatgcatatgttaactagtttgatttagtccactgacaatgtatatatgcttcaaaacatcatgtcgtacataatatgtagacttttattggacagttttaagaaagaaccttatagagttatacagagaaaataattagtgcttgattcaaaagttttagaaagttgaggtatgcaaaatccattttcttgctttagcgtttgcttgaaatttaaaataaaacaatcattggtcattggaacagatgtcatttctaatgattgtcaaatgatcaagtaaatatattttaattaagccataatcattattttaaaaaatacaatacatttaaaatcccacataatactgacataagtttatgtgtataattcgatactctgtgtgaagacttttaaaaacaaagattaaatggcaagttacaaagattaaatggcaactcataatttatttgacaaacttttatttatatatgttaatttgtgagactatttatattttaaacattcagttttgttgaagtaatcacctgtatggatttttctgagactgtctttaatggaataaaacaaacactaattaaaaatagattcagatactttcaaaataactcttttagtctgtatactcatatcactcctgttttatgacggagaaaaatgaaacacatttttaaagtttggttggttagtatgatgagaaagctgttaaattaatcctctgtgttttctaattcatatacagtttttgtagtattctactattattcagtccagaactgtacttagaacaaatattgaaccgatgaacagaaaccattactctgtgagtttttgtgatctatctagggcagtagttagcttgttttgttttgttttgttttgttttgttttagaggagaacttgctggagcaggtaaataatgtactgacagcaatagacagagccaaagggcactcctacatataaactgttacatcgtttatatgttcacctgtttccttgaatacatggacttggtttcacctgaactgcttgactttaagaaaaattagaagaatctgagaattcccaaagcttgaaaagtgaatatgagttaaaaatttggctttcttgagataattcttatgactaacttgatggcttgattccgtggtaaaacagccaacttttcagccattgactttggataaggtgtccaatctagttacattcccatgcactttccctgcaattcctccaatagatgagacttcaacaggagagcaagttaactgttgtaaacaaaaaagcagagggcaatgaggacaatgttgaaaagggtagggataccaactttctaaagttattgctatcagtatatcataaagtataaccagttagaatatgtaggaaataagttaaaatatataaaacaaaaaggcagtttgggataatgcaaaaaaaatactaagactatgggtcagaagatttgtgttcctggctcaggtttaacattttgtgttttaggtaagtctcttaaaacttttgtgagacttgttttcctcactgtaagaatcagatgatacttttcatgttttcatatttatttgtttgtttttgttttttgttttttgttttttagacagagtcttgctctgtcgcccaggctggagtggtgcagtggcaccatctcggctcagtgcagcctccacctcctgggttcaagcaattctcctgcctcagccttccaagtagctgggactacaggcacgcaccaccagacccaaggtggtctcaaactcctgacctcaggcaatctgcctgccttggcctcccaaagtgctaggattgcaggcttgagccactgcacctggcctataccttttatgttaaaagtatggtataaacaatcaaataatatgtaactgtaatatatttaagtatctcaattcaatcatggcatgtttaattcccaccccaacaataactttcattgctttctaaaatgtaacattattcttgctaacttttatttatttatttttaggcccacaactgcaatcataactctctcttccctttactatcaacatagtatacttatgcttctgattttatgttattttgtccctttataatttatccaactctcatctattcaagatcctagtaaaatctagtctctcttataaaactattacggccaaatacttagaacttcttttttttattttttgagacggagtctcgctctgtcgcccaggctggagtgcagtggtgccatctcggctcactgcaagctccatctcccgggttcacgccattctcctgcatcagcctcccgagtagctgggactacaggtgcccaccaccacacctgattaatttttttatatttttagtagagacggggtttcaccgtgttagccaggatggtctcgatctcctgacctcgtgatccgcccatcttggcctcccaaagtgctgggattacaggcgtgagccaccgtgcctggccagaacttttataatagatcctgttatctagaaagttgcagagcaaagtgaggtccaagtaccagcaacagcagcaatgcctgggagcttgttattagtgccccagcccagacccactgactcagaacttgcctcttaacaggatctcaaggaggtttttgcacacattcatatttgaacaagcattgatctgccacactcataatggaaagtggtcatcttatggaaccatctgtttcattcatgtagctattttttcttaaaaccattaaaatgtgtaagtcaaggaaaaatttttataatactgctcaatgtagtgattaccagaaaataattctattcaccctcgttagaaaggaatatactatcacaagctgcatttgctgaaggaggcataatagatgtaatctctttcctgagtactatacaagagtagaaattgtacatatgaatacttatcttttatgtgtgaccctagtactctattgtacatttcatccaacacgaaggaacaaataacgataaatgctgcatcattttctttgacggtatcaaaatttgtgttctttaaaaaaagagagagatacctaaatgaacctgttaagcattcaaatggaaagctgaaatgtaacattgcatcacctatgttgagcactgctatgaccctggccaacctgagcacctttattgatatgctcatggactccactcatttacagttcaggtgcttattgggtgtagtctggaaaatctcagtatcaaatgaagggaagccgagttggcctcttagctaatgtattaatataaatgaaggaaagcagatggatcaagccaagttgttgcatgtttcagaaagttaatagttaatgtccctattagattataagaatcaaggattcaaaagtgatgattctaatactataatcccaaattactacaaatactcattaggctagattccgttggataaaactaaacattgatgcctcttcccacttcagctaaagttagatgatcagtaattgcaagatacaaatgatgtgtttaaggaagtttgcctgattcataggaaagccaagcaatgatttattccacaggatgctttctgtgctacaaatcaacctgtctgtttgagaagtctcactttcagcaattgatgtgattcagttttctgtgtgacataagaggccagccagaagagaacaatgaattaacctcacaaaatcatcagtaagagcctacctaattacattagcttatacattttaaaaagagtgggaacatggagttcaatagcaggtcatcttctatcctaagccagacaggaatgtaaacctgcccagcttattcaacatggatgttcgctaacagaaaggagctgtgatttattttttaaaaatatccgtattctttgaattgcaccagatttctatatgaagccagtctcttaaatctatgtggtcttgattatgtcattaaccataaaagtatgacacaaactcaattaaactttgtatttcctgtgtatgtatttggagggcaaattgagagagaaacactattgtgctgacaaatagatactgagatctttgcattttagaccaacacgggaaaaatttccaaggatctgtcttttatttccattttctagatacctttgagacagttattgaaaaaatagatagacagcgtcgtggccctatagtaaatctgtgtgacactaagtacaaaaatcccacttaaactgtatgatgtgttctatagggagtagtttatgtcactatttatagacattaggccctaataaaaagttagaatgatgtgtaggattttttaaaaatctgtttactaaacaggtgctgttctttaaatgcaacagtggtgtttttgattttgctgtcagaaacaattaacatgccatactttaattttattagttgaatgcatgacctgcaatggggagagttatcgaggtctcatggatcatacagaatcaggcaagatttgtcagcgctgggatcatcagacaccacaccggcacaaattcttgcctgaaaggtaaaatattaatgaatcatgctttcagtgattcttttacaaactattattcactctatgacacactgctgtggaaattctctttatattatgttttcccgataggacatgaacataacatttagaactcccagaatgttcaggagttcttctgacagaatttctggccattatatttggaggaaatagtctaagggcaaaaagatttatgatgaggtacatgagaacactgactacatagccaactggtcagagtttctaaaatcagcatggtactgaacacaaaatcatcagcagggtatagagtggaagcacaaaaagaagcttctttctctctcagagcagaaacaaaacaaaaccaaagcaaaccacaggaccaattcagtaatgaccactttgacaagtcttagctgtgattagaggtattgttactaattgcaggcaaatctccttctggagcagcatcttcagagactcaggtactgcaggccacacacataacagcatgacataagtagtggtcatagggagtaaaaagtagagcaaaccattcaggttgctttgtcctggtgtgttttgaaattgcccatataaaaagccaatttggagaagtcaggcaactaatctatcttttatccccaggaataggttttgagcttaaattattacccatctccgccaaaaaaaaaaaaaaaatcatgtctacttttgcccatgtattttacatgaaacttttaaggtggaaaaaaaaggaagaagttcatttattttgattataaagaataaaaatacaaataattacacaggaaattccgtcccccacctttctttggaaattgctgttaggtgttttttctttgttctttttctctattcttttttgtttggtgttatttttaatgaaattaaaactccagcttattttccaaataaatgcttgtcttgtcgtttaagtgagagcagaagggatatggtagcaattaaaatcaagtcaccaattcaggactctgttcatttgaagggaggtggggtgtggagaaagtagtgtgatgaagtttgtctcatgatctggtgaaggtgagggcatgacctcgaagggctctatttccaaaactgagttatcattagtaacagcgctattgaaactgaactttcagtttgaactttaagccttccctagaagaggacctgttttcttaatgagcattctacatgaagtcatgtttttgtaatctgcccttaagtgggttctaagagaaagagactcgatttggaacctcagctagtggaaaggtaccacatagacctaacttattagccaggggatgatactctgtccttagtgggatatataaattagtagattcaatagtcagtgatcagcagtcctcgtaaggcaaaacatagaaaacgtcctctttccccagctaggtgtagacaacctaagtggaaagttattttgtgagctgaggggtgggtggtgtttccaggcagatttacgtgacacttttcttggtgtggtttgcagatatcccgacaagggctttgatgataattattgccgcaatcccgatggccagccgaggccatggtgctatactcttgaccctcacacccgctgggagtactgtgcaattaaaacatgcggtaagtgaaggtcaaatttattgcttccttttcctctcacagactggatctaagcaggcgattattagtgagacaggttaacaactatttaacttgatgctttaatgtgtgcaggttttaatattttaagaatgtgttacataatcctacccaatcttttgcatttttggagactgattattttgactgtgataaatatgcaaatacacacatccatagaaaacatttttacttatggcaagagcctaaacattctaatgttatcaagaaaatttaaaaaaccacagagagagaaaaagatcggaaatgtgtgcagcatcacaaagtcattaggggagtaaaagctaggaccttagttccttaccttccaatcctgtatcctttacctacctttcctccccagagacataacatgggctctcaactgatggtgaacttcttctggtgagtgacagaggctgcagtgaagaataatgagtctaatagaagtttatcacagatgtctctaatctttatagctgatccctacctctctcgctgtctttgtacccagcctgcattctgtttcgatctgtcttttagcagtccatacaatcatttttctacatgctggcccttacctagcttttctgaatttacaataaaaactattttttaacgtgttttatattgttcctttcaatctgtgaacttggtcctctcctctatggttaagtcacacattttcactgttctcttaaacaatattacataatgttttcatttctttgaatacagggctaatttttttcaactggatattaaaattctttaaaatcaatagaattgcataaatttagtaaggtataataatgttataaattggcctgataatataaagttatgtatatatggacagacatgtaaagctaaataacctacataagatcaggcaccagcacctagagtaaaatatataattaagagggcatggattgattttcatatatttcactatagcagaatgatggggaagttcctctgaacaaacctaactgaatattatccacactatggtactgccgaggtaaatctctctcaatctagacctgctaataaaaggaaatgttttggacaactcttaatactttggacaacaataaataactgaagaatctggaagcctttcagagtaaaacactgtgttccaaggaaattgaatcatgtgttttgtcctttaaaataaaagatgactcctgtgacagtgtttctctgcatagattgggttggttccactcattgctttttaaattgtattagtctttccattgttctacaccagttaggtataataaaccaactgtttcccttctgattttttgtgtgtgtatgtatgtgtggtttaggtactctttttttttttttttttttttttgagatggagtttcactcttgttgtccaagctggagtgcaatggcacaatctcagctcgccacaacttccgcctcctgggttcaagtgattctcctgcctcagcctcctgagaagctgggattacaggcatgcaccaccaaactcagctaattttgtatttttagtagagacagggtttctctatgttggtcaggctggtctcgaactcccgacctcaggtgatctgcctgcctcggcctcccaaagtgctgggattacaggcatgagccaccaggcctggccggtttaggtactcttataaattttctctggaataaaacctatacacacacacacacacacacacacacacacagacacacacacacacatacacactcacctgcatattcacccaactggcatgcacacaccaagaaatccaaatgttgccctcctcttcagttccaaaccaatctttagggtatttttaaaaagagactgagagaggcaagaaatagaatgactatgacactggctagctattaagtaggtttcttttttctcttctgtccaaaaaggagctggctagttatgcaagtaacatgctatataattccaatgtctttgttaagcagaggatagagtttatagggtgttaattctaaaaaaatgataccagaatttgtaagccaaacctatatcactcaaatttaaaaagtcttctgagctttgggaatattttggaaatattttattaaaggatagcttttagtttaaaaaatacatatatgaaagagatatagatatgactataaagagacgatacttctattaaagtggatgaaataaaattgacattctggaaaccataagagataatgttttatgaatattcttttaaatgttttggttcacatatatagtaaagcctataatgcaaaaccaaaaatttggtggtggattcaattgtgcattgattttctattgtggcataacaaattaccaaaaccttagaggctaacaacaacacacgtttattatcttatattttctgtaggtcaggagtccagccataactcaggcaggctccttgctagggtctcaaaaggtcctgatcaaggtgcctacctcacctcaggtctcatctaaaactccatgttgcatttaaagttcactagttttgacagaattcagtttcctgtggttttaaggctgcagtttaattcttctagagactgcctaactttctctgacacataaccctctctacaatatggcagtttactcctgccaacaggatagcatctctcctgctttgagcttttgacctccagactctcttttaaagagctaacctaattaggtcagtcctgcctaggttaatttcccttttaattcacttatagtcaactgattagggactttaattacatatgcaaaatctcttcatctttgttgtataatataacctaatcacaagagtagttctcattgtattcaaaagtttcatccatacccaaggggagaagattatgcagtgtgtacacaagttggtggggatctgggggaccacacatgtatttacttgtactggttgtaagagataattaattattattttttattcgtatcattaactgggccagttttctggttttctcttagtccagtccagctgaactcattctgggttttcaatgtttccaaaacaaagaataaagataatgattatgtcacttactctctagaaagttggaggggaatttctaaactcgtgttttatcatatactaactgtattagaaaatcataattaatatcatttatttaacacccacaaagaggtgctttccattgtagagttaacaatccttatttcattcttagcaaatggttgcaattaggccagtgaggaagggggtaaagagatggatggctggagcagtatggtaattcaagacaaggtacatgattgatatgggtagggtatggggtaaaaacagaaaactgaaagaagttgagaaaaattaagttgatatgaggcagatcaagtaagatccaagagtagcccattcagttgccatgagaaacactgaaaaattaagcaaagggagggatcttacctcatttgtgatctagaatagtgatctctaaactggtgtccatgagacccaggaaaacacaaagactctcttaggggcctttgggcatagattgcttaaggggctcaagttccacctcttcttctctcaggtgaattctttcccaaaggtcccttcttgagatacatgtgtttctcagaagccaggcatgtcaacacctctaccctcccacactgccgctctttcctactttacctgaattttactgtagctcattgccctggggtttaaaaaccctggggacactaaacaaaaagatctttgaaaatacattaaacatatattcatgctgtttataatttatggagtactgataattgtatctctatacactatatatgtgtatacatacgtgcatgtgtccactgtatgtgtgtatttttctcttaaaaccttaggtcacaagacatcttaaaatgtaatttcaatgaataaaaagctttcagagaagtatgatgaggtgaagaataaaagactattcaacacaaaatacaacacaggccagtaagaaataaagagtgtgattaaggcagtaagcagtgagaaaaacaaggtggggaaggatgtgaacaatatcaaaagggggaatgtacagtatataatgacaaattggttatactaggaaatgggatagggagagagaaaagcctaaaatattttaaaattattgggtagatgacatatatataagagaggcattaatttgaggagaaagatcacaggtttagttctgcttatattgagatgcaggtgcttggcatccttgttcatagcacatctaagttcattcttctccggaaagtcaaggaaagtcacaagtgaacagggatagcaaaagccttgggcatcagcaattccacccagcatgttgagaacacaaagagggttgtttgcccctttctccatagcattcattgaataaatattttctgagcagctattatatgtcaaataaacacttttctagtagctggggatacagaagtgaataaaacagaccaaggcctataacaagatagaaaattcagaatttttaacacaaaccagtaaagaaaaagatgacactgccttaatattaggatattcacatctgccagccaacgtttgaatactgctctccttttatttgttcaaaagctgaactacaaatgtgttctagtcactttgcttccaagcttctatgttacaatcaatgtatcactaaaagtaaagaattaatgttgctcattgtctgacaaatgtgtgccagggtgctctgggatgggccttttcagacttccttcacactgtatttctcaggaggggatatatacctaaatgtcatcagcccacaaatattctgtgtataaaattttaacagcgttttgggcacatggaattttaagacatcacgaatatgtaataaaattggaagtcctgcatagtgcttgaatgaagtactgatttttttatgtttttctctgattataacttcatattctgaataacagttggttctatatattagtttcctgcttttcagagacaaataataatgtttgttaaatttattgtattttttctgtaagttttaaattcaggcataaatgtgcaggtttgtcatgtaggtaaacctgtgtcatggggttttgttgcaaagattattttgtcacccaggcattaaacttagtacccattagttatttttcctgatcctctcccttctcctatccaccaccctctggtgggccccagtctattgttcccctctatgtgtccatgtgttctcatcatttagctgccactttaagtaagaacatgcagtattagtatttttatgaagtaaactccaacaggtgcctggcaatttaaaagctctcttgtgattgataccccttagaaatcacactgagtatttagatcagttcacaaacttcttggactgaagatacctttatactctttgacattattgggaagcccaaattatctgtgtggattatatgaatccatgtttttctatattagaaattaaaacagaaaattcaaaacatttattaattcatttataatagcaataaggccattggctattaataaatatattttaatggaaaatagtaaaaccagtggcattgtcaactttttacaaatttggcatttaaaaaaattttctttaatggcaccttaaatgaagacagctgggtgtcttgtatttgcttttgccatcagtctttcaggatatcacatatcatgtgccatctgaaagtttcatggtgtaaagaacaaatgatgtcttaacattactgtgaaaatagttttgatctcctggacccctgaaaggatctcaggaacctcaggtgtcccaggacgctctaagaacaacttcttgctatatatcagaacatgcaagactgatatggt

SEQ ID NO: 414 - DNA, 30163 bp, Homo sapiens
  source 1..30163: mol_type = other DNA
aatcactgctgtgcagggcaggaaagctccacacacacagcccagcaaacagcagcacgctgctgaaaaaaagactcagaggagagagataaggaaggaaagtagtgatggatctcatcccaaacttggccgtggaaacctggcttctcctggctgtcagcctgatactcctctatctgtgagtaactgttcaggctcctcttctctgtttccttggacttggggtgctaatcaggcctctctttcccttatctgttttgaatagcaaaaaggatgttcaggctggccgtggtggctcacacctgtcatcccagaactttgggatgctgagcaggtggactgcctgaggtcaggagttcaagaccagcctggctaatatggtgaaaccccatctctactaaaattacaaaaattagctgggcatggtagtgcataactgtagtcccagctacttgggtggctgaggcaggagaattgcttgaacctgggaggcggaggttgcagtgaactgagatcatgccactgcactccagcctgggtaacagagtgagattccatctcaaaaaaaaaaaaagagaaaaaaaagaaaaaaaaagattttcaaggagaagtagcttaagtgttggatgctacaaacatatagaggttatgatggatgttttgcagatctataaaggaataaataagcatctcccccattcatctttagtggaaagaagggtttagggacagcattgattgaggataatctaatagacaatggtttgtacccagcttaccaaaccagaatttggattttacatttttccctttaagttgcaggagaagagggtgaatcttctcaccagtgagatcctggcatcctagagcaggtggagagaagagtcactccctactgtgtgtactggaggcttcccgcctgtcacattttacttctaactcaatttcacagttattaagagtaaggaatcatggtcacatggaaacagaaaatacaaacctcgttttaattctttcacagaaaagttagcaattcagtgagttgtggtaacatagtttccatctactggcaatttaacatgaattggtgtggcttaaattcatcctttttaaagccagatttttttggagatagactatttccagcatgttccttctgagtgataaaagagggctattagttcagtatttgtgacaataaatgtgtataagataacctcacctttccagaataatgtcaggaatatgagtctaatgtacaaatatatatctctaggacaagactgcatatgtctttttaaaaatactttcccaagagtttattttaatacccccatttcaaatacacctgcttagcaggttatcctaaactctcagggctagaaagtaagcaagactgtgagccagtgatgatagcaaaagcatccaggtaggatcaagatgaagtgagaaaatattccttacccctcagggtagaactccaaatagatattcatgggtcctggccccctagtggaggtcacttgaaggacaaacatgttggcatctcatctgcttgaagcctggacacaagggcaccatcagtgtcactctgtgtgtggctggccatgttgtggggctgtcactacagattctggcagtcaggcagacaataccttagccttagacgatgccggtacagcccaggattcagaagctatagtgtagaccatgcccttcttaggcctatacaattacatgcaatagatgatggatttttctgttagcctcttcattgtaacaaaaagcagcattactctaccaaacagaggggagctggaaagaaactaaacagtttgccaagcacagcctctgccttgacgtggaatcatgtgaatctagacactcacctagatctttcctcgggggccaatgctgctcacacattaactcaatagtttgtcctggcctgagagatcatgtaacatgtagaaagtttagaagcagagattagtgccattgattttccatggctgtgacaacaaaggaaggaacaggagtgggaaaacccaaggccaccctggttgtggtagatggtgcacacacttccactaactattctggggcaaggatccaaatgcactattgggcctggctatgctgtctctgctgggttctccaaacacgagcctccatgctgtttcttagttgtattttaccacatattatcagagtcactggatttgtacagaatgtttggaacctatactgccttaatggctaccctttaaagaagagaaaacaaggtcttaattcaactatctggaacattttatggttacttatgtggaatactccatcttttgctatcaacaggaaggtacctggccattagaaggtgcctgcctttcagctgaaagcacatatgaggcatatggatccatttatacacaccgtacttttgaaccacattttcctaatttgcctgtctggggccaagcttgtgggactagcagattcatggttgaattgatggctggctacctcttccatcaacttttctgcttcatccagtcttccacccctcagtaacctcaaactgggaaggtcttcagatatccagaatccccagttggggaagtccatacatggcccatcaaagatgggttgcaagcaggcctgctatagggagcagcagccttgatgggttttcctacagagacagttgatgtgcagacgcaataaactgactgctttgtaattgatcaccttgaaaaaaaatgagcatgtctggctgtattagtcttttcttccattgctataaaaaaaaatctcagggtgggtaatttagaaaggaaagagatttaattggctcatggttctgcaggctctacaggaagcatagcgacttctgccgctagggtgccctcaggaaatttacaatcatggcagaaggtgaaaaagaagcaggcagatcttacatgactggagcagaagcaagagagggtggggaggaggtgccacacacttataaaccaccagatctcataaaaactcattgtcaagaggacagcacccaagggggatggtgtgaaaccatgagaaactgcctctaagatacaaccaccatctatcaggccccacttccagaattggggattacatttcaacatgagatttgggtaggggcacagattcagatcatatcactggcactgtgcttatcaggtggatatcaccagttggaaggctagattccacaagaggaggaatgtccttgttcttagttgtgattcttctgcacagtgtcattcaggaaaatatgagtcaatcatcctccccaatagctcaaatcaatcagatcctctgaccacagagactgaggtgtagctaaaaggtgctcgcacttctacgaggccaatggaagcctggagcacagttgtcaatctgtagaaataaggactctgtgactcctccaagacctctctgtgaatgacagtttaagaagggccagatcctaaaacagggtcagagcttagagtgaagggaaagcttaaaagcctctgagcaaattctaaagacagggtcaccataggctctcagtgaccccctgtgactgagtggatgcagtgatgcaaaatctcatcatcactgcagaagacaaaagaaaaattgtcactctttctacctaggatgagaatcccaaaatcagggaagagtccacttactaaaaagacatgagggaatgaagtgcctggaagaattcgttcctgaacctctcaggatcattcacatttgagaacatttatcaaatattcatcccagactggggccatgaagacttcagctgcttttagctaatcattgtaactttttggtgtctcatggtggaagcatgaaaggacctgatgaacaaatataatcattgccgtcagagttactgttattttttattgccttaatgttacctcctttgcctgatcattccagttcctcagtcagtgactcaccagcccctatatctataaagtcacaatccctgagacctgatttttgtttcactttgtagatatggaacccgtacacatggactttttaagaagcttggaattccagggcccacacctctgccttttttgggaaatgctttgtccttccgtaaggtgagtgtttttgagcttcctcttttgcttcttatgattgcaaagagcaacttagttccatcagtaaaaatgcttctcctcaagaggaaggtctgagattttatactttcagaaatagcgtgtaggcatcacccagagcgtggcaaagtttaccctggggctctcttgctaactctcaggaacctcaagtttgcctcagttggacagcccaaatgtcaagtagatccagcaatctgatgttcacaacttgatgtgcagactttgtgagcaccataaagagcatttcctttttgctccaggcaggttcccaggaaggtacagccatacttagttagtattaaaagtaggaacaggagcccctgattgtggcttgttatctgtggacatgagagtaaaactttcctctctgtagcaagagctcatgaataggcttttttcccttcctcctgcacagcttggaaactcagtttattagggagatcaagtatttaccattgggtcatttgcacctgcttgaagcctcttcaaaaaatgccaaattttgttggggaatttccatggctttaacccaggtcttactccccatgacatctgttgccactttgagacacagaacaaaagtgttctgctttacttcttttcctttgaaggctgcgtcttgtgggtgagtctgagcagggagtggatgtaactgagatgagatagtggttgtctattaacctcagatatttaagcacaatatgaattcatgggtttattttttacacaaaggcagaatcacatgcaaaatcactagaaaggggatgatttgacaaaattattgaatatttaatttcactaaatagaatgtcatatgtgcctcatggactggggactttggtcgagcctttgtgcctaaccttatctgatgctgtgttcagggcctggtccctggatggaaaattatgagcttatttccacagggccagcagcagcaggagtcagctctctggcttagacaatctgacctgcatacctgaggcttgtttctcagattctagttctcctaagtgagggctttgttgtctaattactgcccaggaatttcatattttttccctctgcaaaagcaataatttccctactttcacatgcgtccgtgtgaggagaccaccaaacaggctttgtgtgagcaataaatgtttttaatcacttgggtgcaggccaactgagtctgaaaaaggagtcagcaaggggagataggggtggggcagttttataggagtggggtaagcagtggaaagttacagttaaaggtggttatccattgtcagcagtggagggggccacaaggtgcatggtggggagatcataagactcattgtgcagagaagaatgtcaccaggttgattgatcaatcagttgggacagggcaggaacaagtcataatggaatgtcgtaagattgctcaatcagttaagacaggagctggctgtttcatttcttttgcagttttcagttgcctcaggccatctggatgtacacgtgcaggcttgggctcagaggcctgacattcctgtctttttatattaagaaaaataaaacaaaatagtggcaaagtgttggggcagcaaaaatttttggggggtggtatggagagataatggatgatgtttctcagggctgcttcaagcgggattatgggccatgtggacaccttaaagaaaattttataatgagttacaaggaataggaatttaggctgtggggagatcttggggcagaggatggtaccatggacttgttaaaagtaatatttgttgtatagaataattggtgatagtctgaatgtgtttttatattaattgagaaaccaattgaagacacaagtcccgaataacagaaggagaaaaacaggtaccagaggactaagaatagggaggagctaagacacccagttagaaagtgtccaggtgggtccaaaataagtatttgcctggctggtgagtttttggtctttatctttaagcttttttatattgtcatataccaggccagattggtttagataaaaacaacattcttcatttaaaaatatagagtactcctttttcagcagtgagtaggtcaaggcctcagcgatgttggaggacgactagggctaagaagtcaacctgggtctgaaggactgataaagtttgtgatgtatctgtaatgctagcagaaaagtcattagaaaggctacagaaagttgtgacagaagttgaaatacctgctattccagctccaagggcaatagtggaagcagaaagtcctaaccctacaagtagagggattagaggaataactcatttttgtctggttggtgtcatgagggggacaggaagttgttcagtcccatttgcaaattgaattttttcaatttgggaataagaaatactagtgtacatgtacctgtccaattagcagatagacatatgtacgtggtggagccacagaggaagcagaggccttgtgtgaggcaaaactggaaatgcaaagtgaaaagatgagagggagtgccaaaagaggtgtcttgcacccagactcttagggatttagtgagggcatcagcccttagtggtcataatggggattgatggggcaactgggtatgagaaagagcatagtgtctacaaccaaactttcattgctattcatggggttcggtataagtaaacaagaagggggaatgggaggagagtctgaagaacaaggggaaggtagccaagaatggagtgaaatacagggcaaatgtcttaagggaaatgagaagttctaggagggggctagttgcttgtaacctacatggaagaggtcatgaaatgacaacagaatagaatgggcctgtgagactggaaggagatatttttcttggtctaagaaccatcttccttgagtggggagggattgatagatggaaacttcagtgggagagtaaataggagtgactgatgagaaggagaaaaactggccatgagggacagaagtaggaatactggttgcttctttagctgtcttatcagcataattgttgccttgagcaatggggtctgaggccctttgatggcctttgcagtgaatgactccagctttttttggaagtaaagtggccttgagaagaatttttattaaagaggcattaatgatggaggacacttgcatagtgaagaaacttctttcagcccatattacagcatggtggtgcaggatatggacagcatttagagtcagtataaatattgatgtgtagtccctttgcaagagtgaggccccaagttaaggcaatgagtttggcttgctgagagatagtggaggggggcagagcagtagcctcaatgatagatgtggaagataatatagcacagcctgcctttgctggtgagtggtgattaggcctggtggaactgccatcaataaactaactgtgattcaggtgaaaaacaggaaagaaggaaatatggggaaatagagtgaatgtcagatggatcagagagatacagtcatggggataaggtgtggtatcaggaataatgtgggaggccagactgaagcccaggccaggtacaatggtaattgtgggagactcaacagagagtgggtattgctaaaggagctggggaacagaaagtatatgcatcaggtgtgaggaaggaaatatattttggaagttatgagaactgtatggagtgagttgagcatagtttgtgattttgagggcttctaaaagtattagggtggtggcagccactgcacagagacatgatgaccagcctaaaacagtaaggtcaagttgtttggacaaaaaggctacagagcacggtcccagtccttgtgtaagaattccagctgcacagccctgcactttggctgtgtgtaatgaaaagagttgggatgagtcaggaagagctagtatgggaacagcctctagagctgtcttcaaggaatggaaagaggagtgaggaaaggatttaggacttatggggtcagctaggtttccctttgtgagtttatataatggttttgttaggatggcaaaaccaggtatccaaaggcaaaagtatccaaccatgcccaggaaggaaaggagttgttttgtagaaggggttggggtttcagagatcagccagacatgatcagcagggagaccccatgtgttttcatgaagaattatgctgaggtacgtaacggatggagaagaaatttgagctttggagggggatacccgatatcctttggagagtaaatgttgaaggagcaggagggtatcttgttgaaaagactcaaaggagggactacagagtagaaggtcatcaatatattgaataatgtgggaagcagagggatgggaagaaagtaaatcatgagagagagcttggctgaagtaatgagggctgtcccagaagccttgtggcagtacagcccaggtaagctgctgggactgatgggtgtcagggtcagtttaggtaaaagcaaagagaggctgggatgtgtggtgcaggggaatagtgaaaaaagcatctttaagatcaagaatggaatagtgagttgtggagggagatattgagaacaaaagagtgtacgggttgggcaccacagggtggataggaaaacaattttgttgataaggcgcagatcctgaacaaacctgtaagacttgtctggtttttagacaggtaagatgggggaattataaggagagtttgtaggctttagaagcccatgctgtagcaggtgagtgataacaggcttcaatctccttaaagcctcttgtgggatgggatactggcgttaagctgggtaagggtgattaggctttaatgggatagtaatgggcatgtgatcagttgccagggagggagtagaggtgtcccatacctgtgggttaaggtggggggatacaagaggaagacacgaaggaggctttgggttgggaagaaggatggcaatgagatgtagctgtagtccaggaatagtcagagaagcagataatttggttaaaatatctcagcctaataagggaactggcaggtggggataactaaaaaggagtgcataaaagaatgttgcccaatttggcaccaaagttggggagttttaagaggtttagaaacctggccgtcaatacccacaacagttatgggggcaagggaagcaggcccttgaaaagaaggtagtgtggagtgggtatcccccctatcgattacacaggggatggacttaccctctgctgtaagagttacctgaagtttggcatccgtgattctccggggggcttccgaggtgatcgggtagcatcagtcttcagccactaagccaaggagatctgggaaggagtcagccaagaaacattgggtttgagctccaggaactttaggagcagtggcgatgtgagtcagacagtccaacctctaattggagcccacacagacagggcacggcttaggaggaatcccaggctgtgggccttctgaggcccagtggccaggcttttggcatttgaagcaaggtccatgaggaggttttgaaggagcccctgggagctgtggcttggatgttctgaaggttttgtatgctggagacatggtcttgggttgtcttacactggaggcaagtagctataattcagagatgcattgtcacttggccgcctcttctctattatgatacaccttgaaggtgaggctatttaagtcctgttgtggggtttgaggcctggaatccaatttttggagattttttctaatgtcaggagaggattgggtcataaaatgcatattaaggataaggcggccttctggcccctctgggtccagggctgtgaagcatctaatggtaggtgctaagtgggccatgaactgggctgggttttcatctttaccttgggtagtttcctttagcttgtcataattaacagccttgtatgctgcttttttgaaccccttgactaggcaggagaccatgtaatctcacctagctatacctggggagtccatcttgtactgccaatggggatgctcttggggaactgccctgatgccttcttgaaggtctggctcatggcactggtgggtgtcagtgtgagattgggctagggtatcaactctttcctgctcatctggggagaggggggaggtcaggatgacatttcagtcactccaggttaaatcgcaggactgagttaaatattggaattcctgtatatatttagtggggtctgatgaaaaagagcctaaacgctgactgatctgggagaggtcgatagagaaaaaggcacatgtaccttgactatgccttcagctccagccacctgactaagagaaaattgttgggcaggtggaggagggctagtctcggaatgaaactgtaaggtggagtgggtgtgaggaggggaggtgatacttctattatagggtgggggagcagaggatgaggaagaattgggacctggcttggcctggtgaggagcagcctggtggggaggggagaggtcagatgggttcatagaaaaggaggattcaaaggactcagagcttagggtggagactgaagaaagagacaggagagaaagaagaaagatttgggatgagtcacactgggagcagagactagggagagactgatgtataaaagaatgcctggatgtcaggcacctcagaccatttgcccatttttcaacaaaaatcatccaggtcttataagatcgagaaatcaaaagtgtcattttctggctatttggaaccattgtccagtttgtattgaggccaagcggtattgcagaagaaaataaggcatttaggttttaggtcaggtgttagtcaaagggggttttaggttttgaagaacacaggctaagggagaagaagagggagtggaggctggaaggttgcccatagtgaagggggcaagcccagagaaaagagaaggtagagacatggagagaggggagatggtacttgccacccagggaaggtggtgcttgccacccagggaaggtggtacttgccacccagggaaggtgatacttgtgacccaggggaggtggtacttgtgccaaggtgaatgatcaaggcaggcatccccacagtgatcagatacctctgaaatgtgggtgaataaccaggcaggtgtcctggcagtgatttagacaccaagggaagactgttcccgagtccatgactggcaccagagttttgagttcatggataaaacgtatctcctccgtctctaccagaaagggaaagaaactgaaattaaggaagggagagattgaagggtggagggatagcaagagaggttggagaagagaataaaaagaggccgcttacccgatttaaaattggtgagatgaccttgggctggctggtctgaggacccaagaggtggatctccccatggagtgagggcgaggacaggggatgggactcccgaaggagtccccctgtcccaggtctttggcaccaaatgtcatttgcgtccatgtgaagagaccaccaaacagtctttgtgtgagcaataaagctttttaatcacctgggtgcaggctgactgagtccgaaaaggagtctgcaaagggagataggggtgggtcagttttataggactggggtaagcagtggaaagttgcagttaaaggaagttatctattgtcagcagaggagggggtcacaaggtgcatggtagggagatcataagactcattgtccagaagaagaatgtcacgaggtcgatcaatcgatcagttggggcagggcagtaacaagtcataatggaacgttgtaaggttggtcaatcagttaagacaggagctggctgtttcacctatttgtagtttttggttgcctcaggccatctggatgtacccatgcaggcttgggctaagaggcctgaaacccaccactttcccatgtcaaatctttagtagatgtacccccaagatacacattcctcggaccttcttttccatagttaaaacttcacccctgaaatgtagaaacaggaaggtttttttttaagtttcagtgcaaactcggagcaagtgtcataattttctgtctccgatgtgtagaggtgacattttctcagaactttcatgttaagctggaaaactggaaagcgagtccactttgtcattctgtcactcactcattttctcactcaacaaacatgcctcacacttatctaaatctgctaggctaaaagaggtccctggtgtctgtaactttctaattctgctagaattctagagtgagctcatgaaataaatgaaaaggatgaagaacaaagagaaaaaagactgcacgttcccttctggcgctcactcacattccctcagcctcagtttctccacatgcccctagaggtgatcattcaaggatttatgagattttagagacaacacatgaaaaagcaaagagacatcagaaagacaaggagttacttagtatttatacacaaggataagacattcagtatcgacaacacttaaagaaaattcaagagtgattttaaatttcccatttcaaatacctcctctattttgtttcctttctcttatgacatctctaaataagcttcctctaactgccagcaagtctaatttcattggatttgactgttttcaaccccaattagaggcagggttaagtacacttaaaataataatgaaatattattttgtttctcctcccagggctattggacgtttgacatggaatgttataaaaagtatagaaaagtctgggggtgagtattctggaagattccattggatagacttgtttctatgatgagtttaccccactgcacagaggatagtctcagcccagagcctcttgcgatgaagctcttgccagcctaactacaaacagagaggttttctgaaagaagaagatatgtatttgggagaagagtattagaatgggaaactgtgtgccattataagctatgtgcaaattcagggaggtaaaggaagacaaagatgttccacagaaaatatgaggaggacttcatgtggattttgaaatagttctccttcactacaaagatcagtaacaagggtgatgccacaccaaggttggacaggcagttgctgggcaggtgtccttgcagaaatatttttgtgtaaggttgggttgggctttctgcaagctggtggttttgccaagtattttgtgatagttttgttatcaggcacacaagcatgagaatccactcatcatagccttctttgatttatttgtcaaggtttttaatcacacacataggcacacagacacactgacacacacacacacacgtgtcataattttggttctcacaatgttcacactcgctattgtaaaacaactttttgagatttgtcctaccaaggatcccatatgtcaccaggtgttgaggtcttcggtctaaactaggctgagaccattgtggttaccacttttctccaagctttggtggcccagggactcccagcatcacgttctgtccagtgtctgcctattcccctcttctttttttcttcccttgatgcccttttatcacatgcattgtctcagacccttcgaatatgtgctcataaatgcatggcatcatctccttcccacatcgattcactttcaattaaaagccaaaactctttcatttcaactttggatttaacatgcttttgaaagaagggttgagaaatatagagaaacagattgggaaaccatgctctgctgtttcttttttttaaactttctatgtaagtgtggaatttttcattctgttttattattaactttaagccaagactttttaatagaaggatatataaatacatctttgtctatacatttctgctgaatttgaagagatgctgaatattcttaaaccattgtgttccctggtgggctgatggactgtgattttataaggtggcctcagccaactgcagcagctgttccctgtcagaggggctagaggtttggcaagagcggtggaagaggtgcagtggtgtgttcgttcactagaagcattagggagaaggttttgcctgtttgtatttcatcttctctcatcaagtcctcagaaaccacagtgctgtctgcagggtgctgtggatctggcatggcccatacaggcaacatgactgagtagaaaggacacacagctctggatgtccttgggccccacagcaactgcccttgaaacatttagtccttgtgagcatttgatgatttacttgccttcaattttccatggacctaatactctttataaagggaaatattttaaacctatgaaacattgtggagaatggcatgggaaatacccatgtatgcaccacccagcttaacaaatgctctcctgtcatttctaaccacaatctctttgaagagctcttttgtctttcaatctctcttccctgtttggcccacattacccttcatcgtatgaagacttggatggctcctgtgtcagactcttgctgtgagttatacctaatgaactagaacttaagattactgtgtattgtacatctagaggattatgtaatgtccggatcaaagtctggcttcctgggtttggctccagctgtagcataaggctgttgatgtttaatcaactctgttttctccacacagtatttatgactgtcaacagcctatgctggctatcacagatcccgacatgatcaaaacagtgctagtgaaagaatgttattctgtcttcacaaaccggagggtaagcatccattttttgaaattaaaatactcattgattgattaaatttttattttaaaattcttatatattcatagacagttgcctaaaaactgtgcaggaaggttccatgtacacttcatcctgcccatcccccatggtaacatcttgcaatcttgcataactataaatacagtatattcacattactgcagtacaggaaattaacattgatacagttcacagagtttattcagatttcaccagttttatgtgccctcatttgtgtgggtagttttttgtttttgtttttgtttgttgtttgttgtttgtttttcggactgagtcacactctgtcacccaaatgggagtacagtggtgtggtcttggctcactgcaacctccacctccagggttcaagtgattcttctgcctccacctcccgagtagctgggactacaagttgcaccaccacgccctactaatttttgtatttttagtagagacgaggtttcaccttattggccaggctggtcttgagtgtgtgggtagttctatgcaaatttatcacatttgtagatttgtgcaatgaccagcatgatcaagatgcagacccattccatctccgtatggctccctgctactatcctacagtcacgagtgtttttctctgagagggtctttatcagggaaaactttttttattttgaggaggccaatgtattaatatttttttatggattgtgcttttggtgtcaagtctgaaagttctttgcctagccctccttcctatattgccaatttttctaaaagtcataaagtttaatgctttactaaatgtaactctactatctattttgtgttattttttgtataaggtatgagatttagatcaacgttcattttttgtggcttgtagttgtccagttgttccaaagccatttttggaaatgtgggcatattgttaaaaattaattgggcatgtttctttgcatctttcatttgctattctgtcccattgatcactgtgtttattcctccatcaacaacaaactggtgactctaatacctgtacagtaactcttagcatcatgtagagtgattcttcccacttttatggatgtatttttttagatttgttttagctcttcctggtcctctgcttttccataaaaattcagaatgagtctctcagtgtctataaataaacatgctgttattttaacaagaattgaattaaatgtatagatcaatttagggaaagtctttatcttcactatgtttggtctttcaattcatgaacatagtatgcctctccatttccttagattttctctgattgcttttagcaatttgtagttttcagcatagagatcctgtgcatgttttgttggatttacagctaaagtatttcatttttgttggagtgattgtaaatgatattatgtttttcttgtattttcagatattgattgttggtacatagaaacatgcttggcttttgtttgttgatcttgtatcatagaaccttgccgagctgacttagtatttctagaagtctttttgtatattcttgagattttatacattgacaattatgtcacttgaaaatagagacaattcttttatttcctttccaatctgtatgccttttaattctttttcccagtataatgtcaaataaatgtgttgaatttttgaattgttcctaatattaggaaggaagcatttggtctttcatcatcaagaatgatttagatgaagtgggtttttttgtagattctctttatcaaatggaggaattttctctccctagtttgctgaatttttaacataaaagagtactgtaagtactcattataaaacaaaatatggctgtggaagatgaaagagagtttcaagcatgctggcttgataggccagatccaagctggcaaaaataattatctctttcttctttttttctatccatggaataaaaaattaagaggaaagaatgttaatagaatcgcattatttcttcaaaatacgttgtgagttttaaaagtattacctaccttttttattatactttttttagggtacatgtgcacaacgtgcaggtttgttacatatgtatgcatgtgccatgttggtgtgctgtactcattaactcatcatttaacattaggtataactcctaatgctatccttcccccctctccccaccccacaacaggccccagtgtgtgatgttccccttcctgtgtccatgtgttctcattgtatatttttttaaatctaccacatcaaggcacctctttttcatgttgcccatggtttaggtgaacataaagacagagctcgtctgaggcaacatacagtccaacaaagccacctgcctctctgtctccactctctctctacactgcacgcgtgctaggtgttgatcctgtctattccagtggaagaacaggttccgtaccatgtggagaatttgcatgtaaaaggagactgggatatacaggctggagaccacatcaggtggctgggcatgtgggataaatcctattgagcatctgtcatagggcctgtcacttagtagacagtcactaaatatttgttaaatacatgatgcctgtttaacacattttctacaaccatggagacctccacaactgatgtaggacaaaatctttctgctttgaactctagcctttcgggccagtgggatttatgaaaaatgccatctctatagctgaggatgaagaatggaagagaatacgatcattgctgtctccaacattcaccagcggaaaactcaaggaggtatgaaaataacttgggttttaattagaaacttaaagaatgaatcaggtggggacaggtagaaagtaagatcagagttcctttccgaggagtagtctgctgaatttgagcttcctaaaaatagtctttttatgtacagaaaacacatcataaaattcattatacaatgtcacttattgttccatgccaggcaaagtcatgtccttctgggacttatgtctgcacatttaactatgggtggtgttgtgttttgtgcttagatggtccctatcattgcccagtatggagatgtgttggtgagaaatctgaggcgggaagcagagacaggcaagcctgtcaccttgaaacagtaagtaggagcacagccatggggttctgagctgtcatgagcccctccagctgcctgctatggagctgatactcccgctgttgggttattccagtgaccagacaaaaggagggctgtggtaatgcaacttcaatgggtctcccaagatggggcagctccgatgaggaggtggggcagctggaggaaaaggatcttctcccctgtgcacagaggtcagggtttacatatctgttaaattgtcaccttggatattctggaggactaaatacatcctttagggggaaaagtgtgattgtatcaaagttttaagcatggagtgtatgggatggtggaaggggaaggcacttggtatctgttggttggcagtgagtagggtgggaaagttataatggagaacttagaataactttgatcatttcatgttttttttctgagggtatcagtagaatactaaatattaaacattcccaccatttctttttcctccagtctcaaagagagagggtggtaaaaacgctataggtggggcaagcctattatttgctgtctacacttatgcaggaacaacaggtgtaatctgagcctgtcctgggcagacaggggatatgtggtcactcactatagaagtttccaaatcaaattttgagagttttttttaaccaggacatcatttgtcattatattttacaaaaataattctgccatcagggcaacctcagctcaccacagctggggatagtggaattttccaaagcttgagcagggagtatagagaataaggatgatatttctaggagctcaggacatggtactgttgctttgtaaagtgctgaagaggaatcggctctgggcatagagtctgtagtcaggcaatgtcacctgtcttgagccccttagaaagagtgaatttttctactcttgttctgctgaagcacagtgcttacccatcttgtatcatccacaattaacacatgctactgcagttgtctgatagtggatctctgtctttctatgactaggctccttgacctcagaggtaagtctaactcagttgagtgtctccatcacccccagcggagagccagctgtgtcactgacacctgataatcaccttctgagggagtgtgatgggagatgctccagtaaatagttctgaaagtctgtggctgtttgtctgtcttgactggacatgtggatttcctgctgcacgcatagaggaaggatggtaaagaggtgctgattttaattttccacatctttctccactcagcgtctttggggcctacagcatggatgtgatcactagcacatcatttggagtgagcatcgactctctcaacaatccacaagacccctttgtggaaaacaccaagaagcttttaagatttaatccattagatccattcgttctctcaataagtatgtggactactatttccttttctctccctctctcttaaaaataactgctttattgagatgtaaatcaccatgtaattcatccacttaaaatgtacagtttaatggtttgtagtacatttgaagatatgtacgaccatcaccattgtaaactttaaaacacttctgtcattctagaaacctcatacatgtttagctatcaaccccctgccagaaatcctgttgtcgtatataaccactagtcaactttctgcatctatagatttgcctattctggacacttcatagaaatgatattaatttttcagggtttttttaattctctagttcatgaatttgtactttagtctgtattattttctttcttctgctggcttcaggcttagtttgcccttctccgtttactgtgttgtggcatgaatgtagattattgatttgtgggtttttttcctctaaatttagacattacaactataaatttccctctgggcacttgtttgctaaataacatgacattctggcctatcacatcttaatttttgctcagctcaaaacagtttctatttgcccttttaatttctacttcaacttattggttgcttaaaagtttattgtttaacttccacgtatgtgtgagtttcccaattttcgttaccttattgattttagctttatcctatgataggtgacagagatacactgtgttatttctatctgatttcttgaagagcatgattaatttaagcagcaaattatgatttgggttatcctaagagaccctagcccaatacataaaggcaaagagattagggcattgaattttgttcctttcatcattcaaaagatgcagaaggggctgctgatctcactgctgtagtggtggtccctatgcacagaccttcccttgctcagccactggcctggaagaggggcaaaagtcatagaaggaatggcttccagttgagaacactgatgtatttcactcttctgattggtagagaaaattagaattgctccaggtaaattttgtatgttcacaatggtttcgttttctgttggttttttttttctacagaagtctttccattccttaccccaattcttgaagcattaaatatcactgtgtttccaagaaaagttataagttttctaacaaaatctgtaaaacagataaaagaaggtcgcctcaaagagacacaaaaggtaaaacgtggtggtagttataggaggatgtttagttttcataattttttagaaatatacatatgatcggtgcacttccctgtatgtttttagagaaagattttaacataaagagtacttatgtttagagcaagataattcatttggtaggaatgcagaaagtggagtttgaggaaggagatatgagaatgagtcagagagagcacttaaaatttgatatcaggcacaagaattagtatgccatgacataaatattattcagataaaaccttatcacagcacttcccttcaataaattgtcaaaggataaacattactgtttggaaatacattttattggtattatgctttctctagatcatagattggtaaagagtcatttcaagtacaaggctattattttacacattctccaacaaaaggtcctatcaggccacctgctgaagtgtagtgtgtgttacatttgagccctctgacagcctcgagtgaacagaggtcttctctgggaattgaggctgcaaggctggctaactcagctttgccttcatgagccctggagtccagccaaaagatatctgcaggtcaggggggcaagaaggggtaacccaggtgtcactgaagattgtacagatttggggaatgttgcagtatttgaaagtgctcccaccaaagctgctgacaagttctggaaatgtcaggagaataatctttgtggacattggtgatgaagaagacagaagaataaaaggcccaggacttcttcatgggtatgcagttaggaccagggaaaagaccaaaaagcaattgaacattttagccagatttgtttcaggaaaacatcctgctttccaaggatttagatggatattccttttcactggtgactcaggcaacacccatcagatttctggtctccaaggggctatattctcagaagggaggttgaggactgcacttctgattaacttctgacttcacgagtcactttctgtcaataaaatttctctttttgcttctagcaccgagtggatttccttcagctgatgattgactctcagaattcaaaagactctgagacccacaaaggtaacaaaagagtgcttctgagggctactggtggggcactcagagggaaggttttgttctgaaaatgtgcaggaagtattccaggtagatgagaatttctgccacatagcagaatgacacaggtttggatgttaaaatggtagctggaggcaacttctagaggcatgcaggcatagatagccatgttctaagcttaaagggcaaccctaaggaaaactggcatgccaggaagagtcagcagtctgtggatcacctacataagatcaaatgccagttctcagcctcctccagatccacagaattaaagtttcttcctggaaatttattaggtttctgcaaaaataattgcaatttttgtgattgctttcaatggcaaaaaccgcaattacttttgcagcaacttaatgcatctaacacctaatcaggagccatgctatccaaataagggcgattttaactggcaatttttggtgaaagtgtgttcaccaggttaatcaactatgaagttattttttcctttgcaatggataagtaactttttggaaaacctctgagactgtgtaaatatcctttgtcttcagtctttcacctaccagttttacaacccatgtacgatttttactgaagtcattgttactatgagtggcaaaatgatggccatgttcagtttcaagccaccaagatttggcaatcatgtcacaaaattcctgaatatttaatcattggttctagagagcaggagtaggctgactttggcatacagatttaaatatgtccatgtctacatctacttctgtctgtctgtctatctatctatcatctgtccatcaatcatctatttatctacttactgattatctagctatcatctctctatctatcccaatacaacttgctgtgataaaggaaatagcctactgttttagtgtttcatctagaaatcactagacacatatagctattgagcactgcacatgtggctagtgccactgatgaaaaattttaagttgtatttaagtttaattgaataaaatttgattttaaatagccacatgtcaatagtggctaccacattggacagcagagctctaaactttgagattatagtttggtttcacatcagtatcatcaggttcatggtaacagaatacaattattagatagttgaatttacccacaactgcatcacagaaatcttcactggtaaatcacagctctgttgacatttctcacactcctttcgtattggttttggtggtgagttacatggttggaacaggcactatatttatttctgtgttcccggtctctaaatgtcctaatccagtcctgatcaaacagaccagtgatgggccatcctgagcttctctcaggaaaaaaatcaagagaggggccaacttgcaatcacaagagcttataccattttaatgccattcatcagactgcaatcaatcaccactcatctagctttttgtccatcttcagttgctgtacatcctgagatagtcaattctgagacctatagcctgggtctattacctggtgcctctcaaagatataatccatacttctcaacctgggctatgcacacaaattaccacatcttgtgaaattcagacttgaatcagtagttcaatggtggggtttgagattttgcatttctgtttttgttgttgttgttgttgttttgttttgttttgagacagagttttcgctcttgttgcccaggctggagtgcaatggcatgatctcagctcaccacaacctcagcctcccagattcaagcgattattctgcctcagcctcccaagtagctgggattacaggcatgcgtcaccatgcctgggtaattttgtatttttagtagagaaggggtttctccatgttggttaggctggtcttgaactcctgacctcgggtgatccacccaccttggcctcccaaagtgatgggattacaggtgtgtgccaccatgcccagcctttgcatttctaataaggtcacagatgcttatgatccacggaccacactttgagtagcaagaggtggtctgtattccaatattggtctcttaagttccctcaaacatatctaaaggaaaggtcctttaattttccatacatctagccattaatgttgcaaattctctcaaagtttgtcaaggtatattgtagctaaaatgaattacatttttcttgggagagaagactaccccatattaatttacaataaagtacttttaggatcattcaaggagcacaccatgacactgagtatgttatgcagaaatgttctctctggaaattacccagctgtgaaggtggcagggatggcacgaggaggagcggatggtctacgttcttgaagacattgggggaaaactggattaaaatgatttgccttgttctggctctgtaagacacacatcagagtgaaaccacccccagtgagactctgaattgcttttctattttttcccctggggatttgaaggttccacttagatttcttttcatctaaactgtgatgccctacattgacctgatttacctaaaatgtcttttctctcctttcagctctgtctgatctggagctcatggcccaatcaattatctttatttttgctggctatgaaaccacgagcagtgttctctccttcattatatatgaactggccactcaccctgatgtccagcagaaagtgcagaaggaaattgatacagttttacccaataaggtgagtggacagtacatggagaaggagggaggaggtgaagccttagcaaagatgcttcctcaccacttcccaggagaatttttataaaaagcataatcatgattgtttcattcacaatatgtaggaaggctctcaaaataaaaagaaggaagcatagggaatggttgctattggcagaagtataagatctttgtaaaacagtcctctccctggttcatctgctttctgttaccacaataatgctaagtaaaaaaacatccaaaaacctccctggcatttaacaatatgcatattgctcacacgtcttgatagtgagctctgctgatattggcaggacttgctctggtctggctgtgatctgatggagcctggccctgggtgcgctgtgcaggttgactcagctctgccccacatgtgtctcatgtttcagtcaggtaaccactggtgaagaagcaagctaggaaccagggtatctgacttctgagctaaactcttaaactctataatattgcctttcaaatataacactaagtactaggtgcctatcaaccacactgttttcagacctctgccaaaacttggattctttgtgctatgaagagacatggcttttgggctggtctttgtgtggcagtgaggtgagcacaaagggatgttcttcagagattacagtccagccctgaagcaacaactaggagactgtttcagcaagtgaggacagggctgtgtggggttctatccttttcataactttgcctggcactgaaatcacatgctctgataacatccaccagaactttcttttgtcatatttgggatagaaagggactagtttttcctcaaattattgatagagattttatataatatagtgtttctctccacattttatgtatataacaaaagccctgcttttgtgtatatatgcatatatatatatatacacacacacacacatatatataatacaaatcctgctttgtaactgtttttgtttgtatatataacaaaaagagttatgaaccagaagtttggccaataatccttgtcgcacagagaatttgctttttctatctgttttcacttccttggttacagacgtgtaacctcttttttgaatggtgacaatcactttgtcatattttatttgatgctagtggtcatagcctattagtcatgtttgcttccatgagaaagaaaaaccactacatggttatgctaaggatttcagtcattggggttagagccttcccgaatgtctcctgctttcataactcctccacacatcttagtgggccattgagcacatcaaagggcatgacagttattaaaatactttatgaatgctacaatcctttgccagtatgagttgttctctggaacttctaacagttcaacagtactacatggactgagttaaaagttaattcaaaaatctcaatttatccaaatctgtttctttcttttcaggcaccacccacctatgatactgtgctacagttggagtatcttgacatggtggtgaatgaaacactcagattattcccagttgctatgagacttgagagggtctgcaaaaaagatgttgaaatcaatgggatgtttattcccaaaggggtggtggtgatgattccaagctatgttcttcatcatgacccaaagtactggagagagcctgagaagttcctccctgaaaggtaggaggcccctgggaagggagccctccctgaaccagcctggttcaagcatattctgcctctctacaggacagtctgggcttgtacaatcgtttgcttgtctttttatgtttaaaaggttttttcaaatcatgaaattgatcattgtcacactttacaaaccacagactagataaaagaaaactatagccagtcacagtcccagcaacttaagatgaaggtcctcaattatgtccttatgggtcataagtgtccaaaatgtaaggactcttttaaaaacacatgatcacaatgctattattatgtcccacaaatgaatattttttcctgaatatactcaaatcttcaggaatcaaatttgaataaaaaacatgcgtctaatcttcaaagaatttataggttagtgcaacagatagacaaagaaagcagtgatgacactgctttccatcaatacagtagcatcatatgcctgtgtaaattatctgacttaaactattctatggaggtgtgggggagaaagaaggagagatggagattagaagaaggaggagaaggaggagagaaggaggggtaagacaaggtagggaggagaaggaggagaattagaaaaacaagagacgagaggagaaggaaagtgcaaaataacaattttgaagtagtgcaagacaatttcttctccttcctcatgaccaacataagggtgacttgaggcaggaatctacttttctgtcagtcattctcatcacttatgtgccttttgtagtgtgaacacatcaccatcctgactataatttgagtgtttagaaataaatatactttgcaacagtatttatctcctctcaacaagactgaaagctcctataatgtaaggagagtagaaaggatctgtaccttacaattctcatagcaaaatatgcatagcaggatttcagtgactagcccacaaaagtatcctgtgtactgctagtagaggggtgggccctaagtaagaaaccctaacatgtaactcttagaggtattatgtctttaacttttaaaatatctaccaatatggaaccaggttcagtaaaaagaacaaggacaacatagatccttacatatacacaccctttggaagtggacccagaaactgcattggcatgaggtttgctctcgtgaacatgaaacttgctctagtcagagtccttcagaacttctccttcaaaccttgtaaagaaacacaggtcagtcaattttctgcattaataatgttttattaacaattattttaactgaatggtctatatatttaaaaaagaatacactcacttaatcttttaataatttgttctatgggccaaggaatctatttggacccatctatgatctttaagggtgcttcagttctggagttcaaaagctgtagcattaaaaacatcatgcaatgtcaatgtagactagcatgacatgattatctacagtctccttgaacttgagcaaaattaaattcagtttcaagtcaattggaaagatggggaagtattttgcacaatcatgaggtgcacttattatcttgttttgacttttgaatgatgctcttccttcccagaacttgtagaagttttctcatgacagtggctcccaaccactagctgtacattggaatcaccagggagctttaaaaattcatgatgcctggaacatctcagaaattctaaactaatttgcccagagtgtggctttaaaagctcccccattgcttctcatgtgaagccaaggtggaaaatgactaatttaaggtagttctattggatacgaaggactaccacagtccaaggccatccttactgacctcaccttccaggtgcctagctccaaccaactgggctccttttcaactcaattataactctgctaatcttctttcctttcttctcctcattctgttcttatctttcaagtcctagttcaattcccaagcccctccaaggtgtcttcttgacctagtccagggctcatttactcctctgctctgttattagttactggaggctattatcatataatttcataatttgccattaaatcattgagttttgttctctatattttctctttatctaagaatgtcttcccccctccattaacaatatcttctcattttattccatttaaaatatcccagtggtgccttgcaagtgacctcatctaactcaagcatttggtcatttggtaaatgtttaaggagtgatatgcagtcgattggtttgcatacaaatattaagttttttaatgtgaacatttagcaaatgacattcatgtatttgcatgtgtgtgtgcttgcacatgtgcacatgcatgtctgtctgcagggaaaatatattcatgccttttgaaaatttttaaataatgtgttatatttatagaaagatttggaaccttttctctgaagaagttaaagaacagatgtcattgattcatattaagcaagaccctataaatcttatttctaggtctcatgtatttattaagcaactccacaccttaagcaggctttctacatagaagaggaagaagatagagatggtttccatattattttcatattccacattatttgtggctttaggccagctatgtagctatcctgtatgtgtgctcagacaggagactcagccctgagagaaggcggtcctctggcacacctaggatggggaaggtactcccttggaagtcccaagctggcacttctggatctccatggcaattttcttgcccatcactccatggagatcagaatatcactctattgtgtcccctcaacactgaaggagtgtctcaataagaaaagttgagtcaaaacactgtaggaattgagaggttccccacttgcactacccttgtaaaccaagagaagatgttaaaaaataaaacgataatgcttcctgaaggtgtcttcccatctttacactagatgggttcaattgagaggaattactggactgtggaagttgaagactgtccacataattaaaatgtacaatagctactcaggattaccttgcaagtttcaacatacacaaaattaacttcataagatggtttaaaaagtttaccgttatacctaataatctggtttaaatttttaaaactcatccattttcgttaaaatttaaatcaaaaaagaacacgggttcccatgaatttgtctcaggtcaaacctcacacagaataggtgctccatgaatattttgttaaatgatagatgatgaatgttctcactatccaatcttcacacatcttatagagtaagtataacgaatccaagatttatagtgctgaaagtagtttttatatgtttacaaagcattattgtcagtaatttttttttactttgatgctatactttctacttttgctttatttaatgcttctcaatatgctcgtttaactgttgcagatccccctgaaattacgctttggaggacttcttctaacagaaaaacccattgttctaaaggctgagtcaagggatgagaccgtaagtggagcctgatttccctaaggacttctggtttgctcttcaagaaagctgtgccccagaacaccagagacctcaaattactttacaaatagaaccctgaaatgaagacgggcttcatccaatgtgctgcataaataatcggggattctgtacgtgcattgtgctctctcatggtctgtatagagtgttatacttggtaatatagaggagatgaccaaatcagtgctggggaagtagatttggcttctctgcttctcataggactatctccaccacccccagttagcaccattaactcctcctgagctctgataacataattaacatttctcaataatttcaaccacaatcattaataaaaataggaattattttgatggctctaacagtgacatttatatcatgtgttatatctgtagtattctatagtaagctttatattaagcaaatcaataaaaacctctttacaaaagt

SEQ ID NO: 415 - DNA, 32399 bp, Homo sapiens
  source 1..32399: mol_type = other DNA
agccggatctcagtcagtatagaactaggttaccgcacacgttggcgggggtgggagggtgtgagactggcctccacaccacgaaagatccatcccggaagtgcttactggtcgtctccatgcgccggttcctgggcgtcttagagccaaggcgcgaggctcggagtgagaggtagagctggaggggaccctaagcgccctccgcccgggacgtgagccgctgcgcccaccgggctagacccggcgccatcatgctgcttctgccaagcgccgcggacggccggggcaccgccatcacccacgctctgacctctggtaagtgcccacccaacctcggttccttctcacctcagctgcccctgcctcagtcctccgcctcggcaaccctgggctctctctacccttgaccctggcgactagccccggggccgtatggggccgtgacgagtgcctttttgctccgtgttttaaagtaatcctaccctagattagaaggaaggagggtgaggggtgccttccttttgctcctaccgttgcttcctcctctcgccgctgctgactcatggattgggctgagcatttcgggacggaaccccccagcaccccagaaaggttctcataagcatctccttgcctacggtggaaagactacgcgcagcgagcaccccacgtgcctggggtcgtacaaagctttgctactggcgctctcttaaacaactttctccctctctacgtttgctccggccttgttttttaaatgtcacaactcagacaccgctcctcatactcggtgttcaaagactgtgctgctgaaaagatccgcgtagactttgaaaggcagttattacaagtgaaacttgtcctgctgctgtaggttttagttttatggcccaggacagtcatgagtattgtaaacttaagagtcttcaggtccagtgatctacagtaattcccatagccagtcacataggcgcttgttgaatgtgattttgaacataacccatggcacgtgttgcatttatgtgtctccgtgtgcctcttacaactagagcaaaaggcttaaaaggcagtgttcttaaaagccacacacccatactacacaggtagtacctttttgacagtgttttaatcctctcctgtgtaaggtggaggaaatcttaaaataagttgttcagggattttccttttttgaattgctagtatacacatgtacagtgatttacccccacttcccaggaatagatgatacctttactacaagtttgtaatttcagagagtttctgtggtctcattcaagcttcctaggaactgaatgagataaataggtattgttcccattttacaggtgaagacatcctgattcatttcaggtcacatagccactgtcagacctagtctaaaacccagagtgtctggtttcagattgagagcttgttccactacagcttagctgcattagtaaattcccatttgctgcttggaaaattgctttcaggacaaattcttgttagtgaattcttaaaatttttaagagctatattcaagattttaataattaagacagtttgagttgtctgggtgcggtggctcacgtctataatcccagcactttgggaggccgaggcaggtggatcacctgaggtcagcagttcgagaccagcctggctaacagggtgaaaccctgtctctactaaaaatacaaaaaagtagctgggcgtggtggcgggcgcctataatcccagcaacttgggaggctgaggcagaagaatcgtttgaacccgggaggcggaggttgcagtgagccgagattgcgctattgcactacagcctggacaacaagagcaaaactccgtctcaaaaaataaaaagatagtttgagttgtttttagattttttatttttggtgaggctagctcttcgtgacaatttatcactatttattactttattaaaattatttgtctaggccgggcgcggtggctcacgcctgtaatcccagcattttggcaggccgaggtgggtggatcacgaggtcaggagatcaagaccatcctggctaatatggtgaaaccccgtctttactaaaaatgcaaaaaattagccgggggtggtggcgggtgcctgtagtcccagctactcgggaggctgaggcaggagaatcgcttgaacccgggaggcggagctttcagtgagccaagatcgcgccattgcactccagcctgggtgacagagcaagactccgtcccaaaaaaaaaaaaaaaattgtccaggtgggtgcagtggctcacgcctgtaatgccaacactttgggaggccgaggcaggcagatcacctgaggtcgggagttcgagaccaggctgaccaacatggagaaaccccatctctactaaaaatacaaaattagctgggcatggtggcgcatgcctgtaatcccagctgcttggaaggctgaggcacaagaatcacttgaacccgggaggtggagacggcattgagccgagatctcgccattgcattccagcctgggcagtaagagcaaaacttcatctcaaaaaaaaaaaaaagtaaaaaaataaataatttgtctaaaagtaaagtagtttgcaacatttcttcctgttcctcaccttactcatatccccaaaaaagtactgatttatcattgacattactgagttttttttgttttgtcagataactggaagaggttgattaaatactctttaatactaggaaaggataatttcttgctaaccctcatgtaaactggatgactgcaattattttcgtagtcggtggttttaaaagtatatgctggtatcactgttttgattttatttcctgaaaaaattaattgccttgaaacatatttattccatgcgatacactgaagcctctcttaacactttcaatcacagcctctacactctgtcaagttgaacctgtgggaagatggtttgaagcttttgttaagaggagaaacagaaatgcttctgcctcttttcaggaactggaggataagaaagagttatccgaggaatcagaagatgaagaattgcagttggaagagtttcccatgctgaaaacacttgatcccaaagactggaaggtatttaatatctgaatattttgttcagtcagatgctttgttagacatagacaattttcttatgagttttccattaataaacatgttttaagatgattcagcaagataactatgatttagcatctgtttattactaagtcttgagagcattagcactagccatgagatactgtctctgctggagaaatccaggaagagttcacagaaaagataatgtttgcaccggtcttaaaaggacaggcagcaattagtgaagcagagaagtgagaaaagtattctgggcagaaggagtaagatatacaaagacacaaaggagtaaaagaatatgtagtgcctcttgaggaattgataagtcgtatagggtacatgcggtatggtgatgagaaatctagtgtctttaaaaggacactagaccaaactctgttgtgtcctttttataccatgctaaagaaggaattaaaatttatttttgggacagtaagataccatcaaaagtttcttagctaattttagaaaagtaattcccttggcagtacaggaaattgcttgaaagggggcaagggactggaggggaagtgaatagtttactgttatagggctagtgcactaaggcagacctgtgactgaatccttgaacttactatgtggctgggttttgaggaagaggggtcagatttgccttttttggaggtagcattaacaggctttggtgaccctggctgtgtggcacaagacaaagagaagtattcagaggtccttcccagcattagcgcttgagtgacctgctagagtgtgtggtcagtaaccaatgctgggatgaggataagaatgtttgtgggaggtgctgtttgtgtccaagtttgactatgtgaagactgaggttttggtaccatagtggtgaagctgtctagtagatggttagaaattggtctatgactccaaaaagaggttacagccaaagactttttgaagtcattggcacatagtggtggttgctgtgaggaattgaatgacaacagcaagggacaaaagtataaacaaatagataatgctttagtaggtacttgtataatagttaaatgcgtatgctgtggaattggagtgcctgaattcaaatctggttctgccatttggtgcacttcgaccttgggaaagttcccagatatgtgtgtacctcatttcccttgttgctacagtgagattgttaacagctcaaaggtttaccttgaggattaataaaaggatgcttataaagcacttaagttagtacttgctgcatgataaatgccaaacaaataatggataataagagttcctatgtcattggttgtttagaggactaaataagctaaagcatatgtataaaacatttagaaaagtaagcactcagaaagtgttagctgattctcccaccacctcatccattttaaaagaaaaagacaacattggggagcatggatatttaaggggtaggaagaggaggaaaaacagcagaagatactaagaagggtgacagaagtagaaagaaaacaaagaaaaagacactttgttatttgaagaaatacttcctaaacatcaggcagcgtattcttccagaaactaagggaggagcaagagggaaaaagaggcagggtgcagtggctcatgcctgtaatcccagcactttgggaggctgaggcgggcagatcacccgaggtcaggagttcgagaccagcctgaccaacatggtgaaaccccatctctactaaaaatacaaaattagccaggcgtggtggcacatgcctgtaatcgcagctacttgggaggctgaggcaggagaatcacttcaactcaggaggtggaggttgctgtgagccgagatcatacaattgcactccagcctgggcaacaagagcaaaactctatctcaaaaaaaggggcgtgggaagagtcacctgtgtcactgcttcagaaagaggtcaatcacataacatgaaaaattattttaaaaaacactggaccgggcatggtggcacatgcttataatcccagctactcaggaggctgaaacaggagaatcgcttgaacctgggaggtggagattgcggtaagctgagatcgtgccactgcactccagcctgggcaacaagagtgaaactccatctcaaaaaaaaaaaaaaccattggatttggcaaactaaaagtttcggtgtcctcattgaaagcagtttgagtaaaatgatcgggaaggcaagagattacagtgaatgaagagtgattaggaagtgatgaagtaggatcaaagtgtaaagtactctttcaaagctgggtagtaaagaaaatgagagaagatagtaacttcaggagaaggcagagtcgggaaaagacagaactggggagtgttgagatctataagagggagaaggtctttggtatagaaagaagtagattgtatcagagtaaggtagcagagttcattcacttgttcagtttattttcattcatcaaatatggatcaaacaccatgtcagatactgttctaggtgtcaaggatactgtactgaacaagacagtattactgcttacacacagcttatattccagtgacataataagtaaacaagaacatgtagccataagttccataggatggccataagctatcaacaggtgctaagagaaaaaaggggtctttggtcaagtaagtttggaaaatgctaggttttacaggtttctgtttgtttattttttaaatctaattacaggacttctcagagcctttcttaggcctttgtgcatacaaatcatcaaggaggctgtataatagtccacatttacctcttttttaaatttattttttattttattttattttgagacggagtctcactctgttgcccaggctggagtgcagtggcgcagtcttggcccactgcaacctccgcctcccaggttcaagcaattatcttgcctcagcctcccgagtagctgggattacaggtgggcgccaccacgcccggctaatttttgtatttttagtagagacagggtttcaccatgttagccaggctggtctcaaactcctgacctcatgatccacccacctcagcctcccaaagcactgggattacaggcgtaagctggcatgcccagcctgtctcttcttttttttaaagacagggtcttggccgggtgcagtggctcacacctgtaatcccttggccctttgggaggccaaggcaggtatatcacctgaggtcaggagttcgagaccagcctgaccaacaaggtgaaaccctgtctctactaaaaatacacaaattagccaggcgtggtggtgtgcacctgtaatcccagcaacttggaaggctgaggcaggagaattgcttgaacccgggaggcggaggttgcagtgagccaagatggcaccactgcactccagcctgggcaacagagcaagactccgtctcaaaaaaataaaataaaatcttaaaatcattaaaaaaaaaaaaaaaaagacagggtcttgctctgtcgcctatcctggagtgcagtggcatgatcacagctcactgcagcctctacttactagactcaagtaatcctgctacttctgcctcctgagtagctggaactacaggtgcacaccaccacacccagctaatttttaaaaatttttttgtagagacagagatcttactttgttgcccaggctggcctcatattcctgggctcaagcaatcctccacctgggcctcccaaagtgctaggattacaggcatgaaccatggcacccagcctaatccacatttctcaaccttacctgaccatagaccctggtttatacagaacctcttactggactcctgatgaaatgtcactttgggaaatgcttattaaggtaccagaacacaagggatggaatatattggcttcatttcaaatttgactcccttttgtgttttttttccagaaccaagatcattatgcagttcttggacttggccatgtgagatacaaggctacacagagacagatcaaagcagctcgtaagtacttagttattttgaaataatcaaatatcttgtataggaacaggctggctatgctttttaaaagatatacagtatcatagtctgcagccataactacatttaacagcatgtgttatattgtcataacaagcaaaaaaccacggtctcccctgccttcagaatcagaagaaagcaatccattttacatatagactttcccattagggataagaaattaggatgggtgtgtgtgtgtggatacaaaatactcctccaatggcaagcttttaaaaaataatacttcacctctctttagaagtatagcagctgcacttagtggatactgcctttttattgttttttggtttttggttttttttttacgttattttgtaatcttaggtcacacctttgtagatatcaccctgtcttctgtccaagaaaagttgtctgatgttttattgttgttttcattgacaaggttataatttggcatgggagagggtaatgttgggaccccagtcttcatatgccttataaaacaccatcccttaatgctcctaaatgtcctatgctttgcaatcctgtggacataatttcttatacacgtgatcagttcaactgattaataaagtttagtgaaagaggtaagaggtgaaggtgatcagttttctatcttaggagaatgttctgccctccactctagagaatggatattgaggtcagagagggtaagattgtggccacatggaaaaggagcagggagtcagggcctgtcaagaagaggaagtattatatgtggaggaagatgactgaataagaatgcctgtggtaaaaattattagtcaatacttagcatagtagatgaactcaaaatcgtccccattactgcttacatttaggaaaatcacaggaaatattttttaacaaagtgaaggaatttatcagattattttaaactggatttgtttaaaggctggcatgagtctagacaaagcatatggtaatgcatgtgaatagttattccagtataaataaatgccagaaaagtccatttgccacgtacaagtgtttgcaaagttttactatacgaaagaatagcattggccgggcgtggtggctcacgcctataatcccaacactttgggaggccgagacgggttgatcacctgaggtgaggaatatgagaccagcctggccaacgtggagaaacaccgtctctactaaaaatacaaaaaaattagctgggtgtggtggtgggcacctgtattcccagctacttgggaggctgaggcaggagaattgcttgaacccaggaggcagaggttgcagtgagccgaggtcgcaccattgcgctccagcctgggcaacaagagcgacactctgtttccgaaaaaatagaatagcatacaaataccaaatatgtcttagtacagataaatttgttaattagaattgataatagaactgtgagaatagtttgtgttttaaggtgaaagaattctttctcagaagattaaaaatgtgcaataaattgtaaaagaagcattcatatgcttctgttaaatccactgtctttttttgagacagaatttcgtacttgttgcgcaggctggagtgcaatggcaccatcttggctcaccacaacctccgcctcccaggttcaagcgattctcctgcctcagcctcttgagtagctgggattagaggcatgtgccaccacgcccggctaattttgtatttttcatagagacgggatttcaccatgttggtcaggctggtctcgaactcccgacctcaggtgatccacccacatcggcctcccagaatgctgggattacaggcgtgagccaccgcacccagcctaaatccactctttttattggccttgtagaaattgatttttagccaggcacagtgggtcacacctgtaatcccaacactttggaagaccaaggcaggcagattacttgaggctggagttcaatactagcccggccaatgtggtgaaaccccatctctactaaaaatacaaaaattagccaggtgcggtggcgcatgcctgtaagcccaactacttgggaggctgaggcatgagaatcgcttgaacctgggaggcggaagttgcagtgagcgaagattgtaccactgcagtccaacctgagcaacagagtgagagagtgagactctgtctcattaaaaaaaaaaaaaagaaagaaagaaagaaaagaaattcagcttttgaatatgtattctctagccaaaaattttgcagcaccagtgtagagattgttaacaataagggtaattctaacttactctctaccacccttgtggaatattccgtcagtctttatttagaaagaaactgtcattctctcacctctgtcactgtaaaacacagttgctactcattgctttctgaaaatctatctaaaagttaaaatgcaaagttactgtttgcaaatctataattattagcacaaacctaataaaaatgtaaatctggtaccatttgatgtcctttgaatgcttgcttcatattacaagcaaagttttatttttgttgagtatattttgaatgtcagtaatgaaaattaattaagtgtgaagtaggagccgggtgcggtggctcacacttgtaatcctagcactttgggaggctggggcaggtggatcacctgaggtcaggagttcgagaccagcctggccaacatggcgaaaccccgtctctactaaaaatataaaaattaggcgggcatggagacgcatgcctgtaatcccagctacttgggcggctgcggcacgagaaccgcttgaaactgggaggcagaggttgcagccagccgagattgcaccattgcactccagcctgggtgacagagggaaactgcctcaaaaaatgcccaaaaaaataccaaaaatatttgtcactgtttctgaacccttgcagtatatgttgaaataaataattttattatgctcatgaaaagatttctataggccaagcatggtggctcatccctgttaatcctagcactgtgggagactaaggctggaggatcacttgagctcaggagttcaagaccaacctggacaacatagcaagaccttgtctctcttttttttttttaattaaaaaaattttttttcaagatttcttttctttttttttttaagacggagtctaactgttatccagggtggagtgcagtcgcgtgatcttggctcactgcaacctccatctccagggttcaagtggttctcctgcctcattcttctgcctcagcctcctaagtagctgggattacaggcacctgccaacatgtctgactaattttcgtattttttagtagagactgggtttcaccacgttgaccaggctggtctcgaactcctgagttcaagtgatccacctgcctcagtctcccaaagtgctgggattacaggcatgagccaccgtgcccagccaaaagatttctgcaaaaacgttcacaacaggccgggcacagtggctcacacctgtaatcccagcactttgggaggccaaggcaggcggatcacgaggtcaggagatcgagaccatcctggctaacacggtgaaaccccatctctactaaaaatacaaaaatatcagctgggcgtggtggcgggtacctgtagtcgcagctactcgcgtggctgaggcagcagaatggcgtgaacccgggaggtggagcttgcagtgagctgagatcacgccactgcactccagcctgggcaacagagcgagactccgtctcaaaaaaaaaaaaaaaaatgttcacaacagcctattcacaatgtccagaaactggaaatcacccaaatatttaataacatggaaatagataagcaaactgctatatattttggtgcagtggaatactaatcagcaatttttaaaagaacaaattgccaatacacagaaaaacatggatgaatctcaaaccatgagtaaaagaagccagacataggcatactgtaagttacatctacttgaagctcaagaacatgcaaaagtggtgacaggcatcagaaaacggttgcctcagctggtagaggatgggagcccagtggaaaagggtacaagggaactttttggatgatggaaacggcctatattttcctttggatagtagttacataagtgtatatgattgtcagaactcactgaacttaatgaatgcttaaaatctgggcatttattttatctacgttttatctccgctgaatcagacagatatgattaaacaaaccaaaaataccagtcacttggaaattaaatatattcttttgagcctagacagaaataaaaattatgctaatagactttttttccacaaaagtaagattactgctttatcaaaacttaaggactggcagctaaatctgtaccttaagtaaattcattgccttaacctattctgttacttttttcaaaagagggaaaagataaggtggaaattcaattcagaggtttaaaagaatagcacaaaggaagatgtaggaagaaaataaataagacagtatcccaaactgggttttataagaagaataaacaaatacaagttgagcatccctaatccaaaactccaaagtccaaaatgctccaaattctgagtgccagcatgacacttcaaaggaaatgttcactggaggattttggcttttcagatttggaatggatgctcacccagtaagtataatgcagatattccaaaatctaaaaaaatttgaaatcccgaacacttttggtcccaagcatttcagatacaggatactcaaaacgtagtgaaatacagaaagagctaatcatggtggctcatgcctttgatcccagcactttagaaggctgaggtgggtggattgtttgagctctgtagttcaagactagcctgggcaacatggcagaaccccatttctacaaaaaatacaaaaattagctgggcatagtggtgcgtgcctgtggtcccagctgctcagaaggctgagatagtgcttgagcccaggaggtcaaggctgcagtgagccgtgatcacaccactgcactccaccctgagcaatagtaagaccctgtccccatcccctcccccgcaaaaaaaaaaggatgaaaaacattaaagttaccaaagaatttactcctaaaaacaatttttaggcccagataatttttcaggtgaattgtttcaagtgttaaagaattaaaaattctaatgctgaatataaacttggtgttttattttgtaattggagaatcggttaatcataaactgttttggaataattcattttgttaagttgtaaagtttaatgtaatctgagtatgcaaaacctagcaaagagagcccaaaaaatcctacaaacaattcctattaatataatgaaaaagaaaaaccagttaaaatgttaaaaataatagcaaattcgctgggtgcagtggctcacgcctataatccgagcactttgggaggccaaggcgggcggatcatgaggtcaggagatcgagaccatcctggctaacacggtgaaaccccgtctctactaaaaatacaaaaaaattaggcaggcgtggtggcgggtgcctgtagtcccagctactcgggaggctgaggcaggagaatggcatgaacccgagaggcagagcatgcagtgagccaagactgcaccactgcactccaacctgggtgacagagcaagactccgcctcaaaaaaaaaaaaaaatagcaaatttaagaaaagggaatttttatacactgttggtaggaatctaaattagcatagccactgtgcaaattagtatggagatttctcaaaaaattaaaaatagaattaacatatagcccagcgttcccactactggatatttatccaaaggaaaagaaaacagtatgtcaaaggggtacctgcactcccatgtttttattgtggctctgtttataataacaaagataaggaatcaacctaagtgtccatcagcagactagttgataaagaaaagtatatgtatacaatgggataccactcagccataaaaaagaatgaaacgtctgcagaaatatagatggaactggaggtcattatgttgagtgaaataagctaggcacagaaaggcaaatattgcatgttctcactcttgagaacagtgggagcttaaaaagttgatctcgtggaggtagtagatagaatgatagataccagaggctgagaagggtattgggaggagagggataaagagaggttggtcaatggatacaaacatacaattagaaggaataagtcccagtgttctgtagcagagtagggtgatgatagttaacaatgatgtattgtatatttcaaaatagctagaagacagaacttgaaatgttcacaatacatagaaataataaacactcaagttgatagatacccaaataccctgacttgatcattacgtggtttatgcatgtatcatgaattatgcacaaaatgagccaggcacagtggctcacgcctgtaatcccagcgctttgggaggccgaggcaggcggatcacttgaggtcaggagttcaagaccaagcctggccaacatggcaaaaccctgtctctactaaaaatacaaaaattagctgagcgtggtggcaggtgcctgtaatcccagatactccagaggctgacaggagaatcgctggaacccaggaggtggaggttgcagtgagccaagattgtgccattgcatgccagcctggccaacagagtgagactccatctcaaaaaaaaaaaatggattttgttcatgtattatgaacaaaataatcacatgcaccccataagtgtgtacagatacttgtatcatgaaaaaatagtggtcaggcgtggtggcgcaggcctgtaattctagcactttgggaggccagggtgggaggatcgcttgagcccaggagttcaagaccagcctggccaacatgacgaaacccctcccctacaaaaaaaaaaaagagctgggtgtgatagctcacacctgtaatcccagcactttgggaggctgaggtgggcagatcacgaggtcaggagttcgagaccagcctggccaacatggtgaaaccctgtctctactaaaaatataaaaattagccgggcgtagtggcacatggctgtaatcccagctactcaggaggctgaggcaggaaatctcttgaacccaggaggcggaggtttcagtgagctgagactgtgccactgcactccagcctgggcaacaagagcaaaactccatctcaataaataaataaagttagcaaggcatggtggagagcacctgtaatcccagccacttgggaggctgaggtgggaggatcacctgagccggggaggttaagactacagtgagctgagattgggtgccactgtgctccagcctgagcaacagagtgagaccctgtctcaaaaaaaaaaataaaataacaaatgcaatttaatagtacactaaaagaataatagtgttcatgaacacatagagtttctctcaggaatccaacttaggaagtatattaatatagcaaaattatagctcagataatattaaatccatgtgatttcctgagtaggtagtgaaagcacatagaatacagtttaacacccattccgttttgataagaattttgaaaagaaatgtagttaattccctactttgataactgtttcaggcccacagctagcaaacttttagctatgtggcattaatgctattacctaaaatccaggggtgaagcagcctgctttttattttttatgctattttgggagtttgggtcagtgagttaagttattaaataagagacaactattggaaagaaggaaataaatatattatttgtagataatataggatctgcctagaaaagcaaaagagagttaagtgactagatgcaagacaaataagcaaaaattacacagtttttggaagttacgatcaaatatattagaaagctgtggtcagtttaaagataaccccagggcaagaataagtaaccaaaacaagcccttgtaaaatttactattatagtgtcacaaatcagtggaaaagggaaggattattaaatgacagtaagattttgaaaaatgagaagtttagatactttcttgactatattaaaattccaaaaagattaaaaaattttttcagtctataggaaatgttaatgaaactagaactattgtaagtactagaagaaattacaaaagaaatgatcagtcaatgtaaataaagatgactgtttttgaaacataagtgttaacaaaacggggaaaaattattaataaacataatgaattaggagaggcagcatacagacgcaggctgaggagtcaggctgtctggactagagccgacttggccggaagtttgagcaagttgcagtggtagtggctacataacgtctcctctgtgcctcattttcctcatctatgaaatggagacagcaatagcactttcctcataggatcatggagaagattaactggtaaacaggcctggcacatgtcaactgctatgtagatgttaacagctagcattattaattgtaagtgacacacagagtcagaagaaaaactgagacagcccctcctttttccagttaaaggatgaaaaacaaaaaaattgttgaccaccagcgataatcacaaattttaaataattagacgtactgtggctgaggctgtggtaaaaggatgttcacgtaggagtatgaaatagtttgccttttggaaaataacttgttccatttccattcatgaagttcacttctgtgattatatcctaagaagaaagaatcctaaataaggaaaaacacttacatttaaaattattcaaattggcattatttataataatgcaaaattggaaatggcacaaatgtccaacagtagagaaatgcctaaattataacaaatctacttgaaatactgtattaagcagtcatttgaaagaaaaatttgaagagtttgcaaggaaaaaaccatggaaaatgcaaacgctataatgtgaagctgaagaaagcagaatataaattagtacatacgattacatctgaattgtttttttcttcttcttctttttgacacagagtctcactctgtcacccaggctggaatgcagtggcgccatctcagctcactgcagcctccacctcatgggttcaagcgattcttatgtctgagccacctgagtagctgggaccacaggcatgcaccaccacgcccagctagtttttgtatttttagtagaaaccaggttttgccatattggccaggctagtcttgaactcctgacctcaagtgatcctcccagctcggcctcccaaagtgctgggattacaagcatgagccaccatgcccagcctacacctgaattttttaaagcatatgcttaagaaaacaaaaatgtctatgcagaaatacaccaaaatgttaagagtcattgtcgttggttaggggcactttggctaattcttaaaataattacttcaagccgggctcagtggctcacacctgtaatcccagcactttcggaggccgaggcgggtggatcacctgaggtcaagagtttgagaccagcctggccaacatagtgaaaccttgtttctactaaaaatacaaaaaaatagctgggcatggtggcgggcacctgtaaccccagttactccagaggctgaggcaggagaatcgcttgaacccgggaggcggaggttgcagtgagccgagatcgtgccattacactccagcctgggcaacaagagcaaaactctgtctcaaaaaataataagaagaaataaatcagtttctctataattttcacattgaataagcatatattttactgtgggagaaaagattctaatattagccttatgattttagaaatggtctacatgtagctcatctttatttttggtgcttaaagtgacaaattatctcaatctgactggttttgtagataaagcaatggttttaaaacatcacccagacaaacggaaagcagctggtgaaccaataaaagaaggagataatgactacttcacttgcataactaaaggtaagaaaatgctttagagtcaggaatttctaatagtaattgttatttattaattgctgggattgggtttcttatgcatactgtagttcattcaactatcctttgacattttaaaacattttagttatatcaagttctttctaatcatcaccccagagcctcacgacacaaagtgaggtgtccccagccagcagcatcagcaacacctggcagcttattagaaatgcagtctcaggccctgccccaaacctactgattaaaatctgcattttaacaggatccccaggtgattcttatcagaagctcatcctacagttaattcatgtaagtgttctatttaatgatgagaatactaagatttttttttttttcgtttcagatgctttatgggactaaactgttccttagatgttttgctagcctagtttaaatcaagaagttgattatatcctagtacagaccctacagttacttattgctatttacatacacatcactaagcaaattaatgtaggttaccaccatttctaaatgtttccttaaatgtgattttacactttgatgctaatttttgaacagttgtatgcacaccgttcatatttactctttgccagttctcttacacagtgctccagaagcctaagatccttcgatcttttacaaccttgggatctaacaattaacttactagctatttctttttccccagagtcatcttttctcttgaggggtgggtgatatttattgttttgtcacttgtctactagaaaaataaagaaggagttaagtccagttatatccagtagtgctaaagctgttgttacctaaattaaatcctccccaacctgcaaacaaaattttcaaatatgaaaattaatgacttctatgttttaaggagggaaatacttgttttcttgcaggaaaaaataggtaaagttatggtgatgtgatcttaacaatttttttctcagcttatgaaatgttatctgatccagtgaaaagacgagcatttaacagtgtagatcctacttttgataactcagttccttctaaaagtgaagcaaaggataatttcttcgaagtgtttaccccagtgtttgaaaggaattccaggtaagttaaggcatcccttttgatcatagtgccctgttggcttgtttattgtagtcttccaggtttctgctctttccctctgataatagtttcatttatagattatttccactgtctcttcctcctcctcctccttctctgcaatattcagcccttctggtgaacttactgttctcatttatattgctttctaaacagaagttctacatttccatagtaaaatttctgtacaatttatgggaagtttctcttttaaatttacttgggctgggcacagtggttcacacctgtaatcccagcactttggaaggccgaggtggacggatcacctgaggtcaggagttcaagaccagcctggccaacatggtgaaaccctgtctctactaaaatacaaaaattagctggccgtggaggtgcatgcctgtaatcccagctcctcgggaggcggagacgggagttttgcttgaacccaggagacagtggttgcagtgagccgaggtcatgccactacactgagcaagactccatctcaaaaaaaaaaaattttgctttgagagaaataacagtatctgacttttatagtgtgattcttacacttaggtgacagtaattttccattctttgatttcctctttatcaatcggtatactactctctgactcattgtcagttgagaaatcctttgttctttatttgatcatctgattatcataaggcttctttgacaaaacattatttatagttacgattaaagcatacgtattttatttcattaaagtttgttttaaaatagttatgtaccaatattattttacatcttttttttccatctgcattggcaggttcccttaaagcacatcttggctgcacattggaattacctggagaacaggaagaactcctgatgcctgagttccacctggaaagattctgatttattggtttgaatttctgtggggatttttaaggctcccaggtgattcttctgtgcagccaaatttgagaaccactttgattagcggtttggcgccacctagtatttccgccatcctttctcccttggatttcacctgttttttggttttttttttttccttttttattttgagacagtatcttgctctcttgccaaggctggagtgcagtggcacaatctcggctcaccgcaacctctgcctcccaggttcaagcaattctcctgcctcagcctcctgagtagctgggactacaggcatctgccaccactaatttgtgtatttttagtagagacggggtttcaccatattggccagactggtctcaaactcctggcctcaggtgatccgctggcctcggcctcccaaagtgctgggattacaggcatgagccaccgcgcctggccacgtttgttttatagcagtgctgaggtggtaaaaagtagtagtatatttttctgtgtaatgatttcacagagtagaaaacatggatcagtagctgcttcaggatccttttcaccagtgatcaatgaagtgctgagccgagaaatctggctctaaggggaaggtggtggtggtgatgaggtggaaattagttccctctgtgaatattaacatttttaaagggctaggcctacaggttgttgttgtgctgactatttagggacaggagcttggcaaaaggggctagctgccattttttctagcctgcctagcagctgctatggcattgtattttatagaactgaagataacctgtgattagaagtctgtcccgttgtttctctcctcaccccagtctatctttggcctcacttttcgcacacctgcattgtttcatgccccactgctgaccttccagctccatcttcgagttgtagagtttgtagggaagggaaatcagaggaattagtaaaaattattgtttttaataaattaaattgtttgttgaactgttgtacataatttttgaagaattgtaagaatatttcctttgatatttcagatggtcaaataaaaaaaatgttcctaaacttggtgatatgaattcatcatttgaagatgtagatatattttattctttctggtaagtgaatatactgtttgtatgatgctgtcattttttaaaaggaaaagtattcaataagtacttgattgtttataaattaattcagatggacaaattgcagaaccttcactgaacaaaagcactctgttacctatgtgatatttacacttttaagattttctattaatgagatttctagatatcaagcacatgatagtagtaaaaaatgaaaattggggagtcatttgaataaaaataagtacatttttatttagttacttcctactaaaagtacttgagttcatgaggaaggagacagtgctatttgtctctgtaactaattcactaatttttaatatgcgcaatagttagtggccattttatatgtgctacattttctcatcaaatgtctagtaaatacaaaaacataaaatcacatagaacaaaaataacaagatttagttctatcagttgtaattgcttttaccttcagaggatacaaactggagatgagataaccactactagggttaccttcagacttgacagactagcgaaattgaaggcaaggaaaacttaaaaataggtcttggtcaagcgaaaaacctaacaaagaagagatagcagggcggtgtggttttgattatggagtgatatgtgcattttagattttcataccaaatgcaatgtccttaaaaaaggagaaagacttgaccttagttcaatactagaagggaaggaaaggtatccattaaaacaaattcattcacttgcattaaaaagaattttttttcatttattctgtcttgatcatgtattatttctgtctatattaggtataattttgattcttggagagaattttcttatttagatgaagaagaaaaagaaaaagcagaatggtatgtatgcaaatcattaataatggaaggtatttatttggttctctggtatttgtgatgatgtaaaaattgtcacgtaaattttctttcatattttctctttgtacatcttttttaaacaattttttaatattttgaaatcctttctcacaagttaaactaggtgggcccagatcaataattggttaggatatgcttaagaaattgccaaggaatataatgtcagatagctcagttcagcaaaatctttttcttctggttgcttaacctaggttttattaattttttttttgtatgtgtgcagaaatgcttttgacatgaatgtgcaaaaaataaccaaaattaatattaaatagaaccactgtttaggccgggcgtgctggctcattcctgtaatcctagcactttgggaggctgaggcgggcagatcacctgaggtcaggagtgcgagaccagcctggccaacatggcgaaaccctgtctctactaaaaatagaaaaagtagccaggcatggtgacaggcacctgtaattccagctactccggaggctgaggcaggagactcacttgaacctgggaggcagaggttgcaatgagccaaaatcacgccattgcactccagcctgggcgacaagagcaaaagtctgtctcaaaaaaaaaaaaatcattgtttaatgttagtaatgacacagcattttaacctctaggatgttatgtacatataaatattttataaaatattgcattttccagtcatagcatctataagcagtagtttgtttccaatattttctattttatagtcgtgatgagaggagatggattgaaaagcagaacagagcaacaagagcacaaagaaaaaaagaagaaatgaacagaataagaacattagttggtaagtagaattgatttaagtcccctaaatgttagaaattcaaaatgagattaactttttcttttgctagacaatgcatacagctgtgatccaaggataaaaaagttcaaggaagaagaaaaagccaagaaagaagcagaaaagaaagcaaaagcagaagctaaacggaaggagcaagaagctaaagaaaaagtaagacaacatttaatgaaggtggactttaaatgtttatgaaatctttaatcttcactttaatcttcacatctttttttaaaaaaaactataattcgaaagcagagaattgggtgctactgtgaatgaatcatgaccagttggtataattgagagatcttccttaccagcacgtttttattgagcaaaaaattgtgtcataagttcctttaatattatgcttatttctaatatgtcaattttacattttctaataaatgtttatagatctttaccagctgtctttccgagttcatccttcagttttcaataagtttatgttgccttttttcctaatataatttattaaaagtttaaatttttaaaattataaaacatttaggaattttactgtacctattaaaatgattttactccctttttttaaagcaaagacaagctgaattagaagctgctcggttagctaaggagaaagaagaggaggaagtcagacagcaagcattgctggcaaagaaggaaaaagatatccagaaaaaagccattaagaaggaaaggcaaaaacttcgaaactcatgcaaggtatatcagactgaacaaacactaggcacaagtaaatcaagttgcttattaagcaaaaatacttctttttgtttgtttgttttttagatggggtctcgctctgtcgcccaggctggagtgcagtggcgcgatctcagttcaccgcaatttccgcctccgggttcgagcgattctcctgcctcagcctcccgagtagctgggattacaggcgtgtgccaccacgcctggctaattttttgtatttttagtagagacagggtttcgccatgttggcaaagctggtcttgtactcctgacctcaagtgatctccccgccttggcctcccaaagtgctgggactacaggcatgagccactgcacccagccaaaatatttcttgaaaaaaaaaaattatttttatttatttatttatttgagatggagtctcgcactgtcacctggtctggagtgcaatggcacgattttggctcactgcaacccccgcctcctgggttcaagcaactctcctgcctcagcctcctgagtagatgggattacaggtgcctgccaccacgcctggctaattttttgtatttttagttgagacagagtttcactgtgttggccaggctggtcttgaactcctgacctcatgatccacccatctcagccttccaaagtgttgggattacaggcatgagccacctgtgcccagccaaaaaaactttttctaattaagtttttgttattgttgttgttgaggcagggtctcagtcactcaggctggagtgcagtggcgccatctcggctcactgcaaccttcacctcccaagttcaagccattctcatgccttggccacccaagtagctgggattacaggtgcataccaccacacccagctaatttttgtatttttagtagagacggggtttcaccatgttggccaggctggtctcaaactcctggcctcaagtgatccccctgccttggactcccaaagtgctaggattataggcatgagccactgcacctggccaagcataaatgtatttcttttctttactatgcaaatgtaactaaacaagacagagtctccatctcaaaaaaaaaaaaaaaaaaaagacatgctgagataactgaagatatgaatatagacacagtttcagaatatatatatatatatatatatgtgtatatatatatattttgtgacagagtcttgctctgtcgcccaggctggagtacagtggcgcaatctccgctcactgcaagctccgcctcctgggttcacgccatgctcctgcctcagcctcccgagtagctgggaccacgcccggctaattttttggatttttagtagagacggggtttcactgtgttagccaggatggtctcgatctcctgacctcacgatccgcctgcctcggcctcccaaagtgctgggacagttttagaatattaacttgttttttggtttgataatggtaagatgattatgtttagaaaaaaactatcagggttgaaaactgaaatatgtacacctgaaatttagaaaaagttaaaaacagccgggcgcggtggctcacacctgtaaccagcactttgggaggctgaggcgggtggatcacaaggtcaggagttcaagaccagcctggccaaaatggtgaaaccccgtctctactaaatatagaaaaaattagccaggtgtggtggcaggcgcctgtaattccagctactcaggagactgaggcagaagaatagcttgaacccgggaggtggaggttgcagtgagccgatttcgtgccactggactccagcctgggcgacagtgagactccgtctcaaagaaaagaaaaagttaaaaacatttacactgagataaaattatacctgttcagttgtcattgtctgtttttttgagatggagtcttgctctgttgtccaggctggagtgcagtggcgtgatctcagtttgctgcaatttccgcctccaggttcaagcgattctcctgcctcagcctcccgagtagctgggattacagctttgtaattatgttgatggatgtatttttgagtgtagatactatttttgtgtttgtgcttttagacctggaatcatttttctgataatgaggcagagcgggttaaaatgatggaagaagtggaaaaactttgtgatcggcttgaactggcaaggtatacctatggaactgctattgaagtcttcacttgagcttaggataaagtttcatttcttctttttttttctttagcttacagtgcttgaatgaaacactcacatcatgcacaaaagaagtaggaaaggctgctttggaaaaacaggtaatagaggaacacatcactcctacctatatgtagcatttaattctgctttgacctgtttcttcacctaatatataagtcaccaagtgcagggagtatctgatttctctttatgtttcccactgttttgttgttgttgttttatgtgttcggttttttggttttttgttttgagacagagtcttgctctgttgcccaggctggagtgcagtggcacgatcttggctcactacaacctccgcctcccgggttcaagtgattctcctgcctcagcctcctgagtaactgggattataggcgcacaacaccacacctggctaatttttgtatttttggtagagacagggtttcaccatgttggtcaggctggtcttgaattcttgacctcatgatctgcccatgtaggcttctcaaagtgctgggattataggtgtgaaccaccacgcccagcctgtttttgtttttgtttttgagatggagtctctctctgtcacccaggctggagtgcgggtgggattacaggtgtgtgccaccatgcccggctgatttttgtatttttactagagacagggtttcgctgtgttggccaggctggtctcaaactccttacctcaagtgatccgtccgcattggcctcccaaaggattataggcatgagccaccatgcccagtctgcattttgtttatgtagtaaggtgctgttgttgatttaagttggattagatgtttatggtttttaccatacttagtgtttgatttgtggtatctatcacaagcatagcttttgcaaaatcatattagaaaaaaataattgttttgattattccttgagtattttcatagggtaataacagttagaaccaaaagagatctttgttctgtctagtctataccttttattttacagataagaaaacaggcccagaaattcaattcaattcaacaagtattagtacctactatatatagcactatgcctaggttcttttggagaaatgcctaatgctgttgcaccacaaaggacatgctgagaagaacctgagaagaaccttaaggaccaaaagatggagagcccatagtaaatgaggtgtaggataggaagggccacaagttttagtgaccagggaaggctcagtgtagtttgaaccagcctgaaaggaaggacagagttaaaatgaaggtcagaagaataccacaaactataaaatagaagtagaagtataaagtatggttcagcctgggcaacataaacaaaatctctaccgaaaatacaaaaattaactggcatggtgtcgtgtacctgtagtcccaacttctcaggaggctgaggttagaggattacctgagcctgggaggtcacagctgcagtgagctatgatcatgtcggtgcactccaacctgggcaacagagcgagactttgtctcaaaaaaaacagacaaaaaaaaaatgttatggggaaatggagtgggaaacaaaatcagttaggaaaagcagaaccaatgatcaggtttttaataccttgttgactagtttccattactgcaaatctttgattaacagaaggttcaacattgtactactaatctgacgtttgtggataaggtgcatcagatagatgtaactagttacaagaatcttatttatttaagaatctgcactatgagcgtggtggctcatgcctataatccgagcactttgggaggccaaggcagacagatcccctgaggtcaggagtttgagactagcctggccaacatgatgaaaccccatctctgctaaaaatacaaaaattagctgggcatggtggcaggcatctgtaatcccagctacttgggaggctgaggcaggagaatcacttcaacctaggaggcggaggttgcagtaagcagaaatcacaccactgcactccagcctgggcgacagagtgagactctgcctcaaaagtaagaaagaaagaaaaagaacctgcactatgaatgtgatgatgggaatcaaaaaaatttttcaaggttagcattattgggactttactggttctaagggattgaaggggagaaatgagccaaagctgactcttaagatagcagctgacagaagcaacaagggcaaataaaggttctttttttacttgtgcatgtttgaaggtagtctagaaggaacaatgtaaatggtagagcttcaaaataaaagaggccattttgctatgccttcaccttttggtagagaataaatgagattgtctgcagaaagggtgaatatgagtttgaagagaggtttgaaatggccttgtggatgaataactcagtgacccacagacttgtcaattagtgtccaaggctaatggaagtcacatgacatgagtactgggaaaatcaggcaggctgtgggcagttcttggtccctcaggcagacctatgcagactggaagccagagtgaaaagctggtgcttctttttgggttggcctgagaggagtatggggtcagagtgagaatgacattgagagttgaggaccacaaagccctagccaggaagagagtgtagaatagcaatacagtatacttctaagtccctgacttatgatatttgtgcagatagaagaaataaatgagcaaatcagaaaagagaaagaggaagctgaggctcgtatgcgacaagcatctaagaacacagagaaatcaactggtggaggtggaaatggaagtaaaaattggtcagaagatgatctacaattactaattaaagctgtgaatctgttccctgctggaacaaattcaaggtactggttttaatgaaacttttcttcaactcacactggagcctggagataatgtagacagactccaaatagcagcacttgttatcacagaaacttgcagagataaattctgtgccacagcagaaaagtgtgaaaagtgaggtgcattttgaagctgtcagtcttacccattgcatcagtacacatgcacatatacatatgacagaatacttgtttctcaggaaattgaagatcatgagacaagtcttgatttatgttggcttactctgtcatggcttgttctagggattaggttttctgtagtttttcttttacagtcttgctctttgttttttcccacctcaagctggagcttgagtttaactgcaagaaagccctagagatccagcgtccctaattctatagatgaaaccgaggctgttttcagaatgattgatcttctgaagaaatgtattaaactggcagtatacacaaataagtggttttatttatgttgatttgtacaccaaatctgtaagatgtatggacttaaaaccaagattatcgttgatttaaacacatgaaaagcaaaaaccgtagtccaggcaacaggaatttatagtagcagcataattagaccaccaatctgagctcattctgtacatactataacctttctgcagtaaaaatctaatggtttttgtcgtttcattttgtttttccttactactattcatattattgtataatatatcctatcagatgggaagttattgctaattacatgaacatacattcttcctctggagtcaaaagaactgccaaagatgttattggcaaagcaaagagtctccaaaaacttggtgagttttgagaagtccatttgttactttaaacacctatttttaaaataacttatgcaatttaatgaaagattaaatgatgatctgttaagtattaaatttttttcatttctcagaccctcatcaaaaagatgacataaataaaaaggcatttgataagttcaaaaaagaacatggagtggtacctcaagcagacaacgcaacgccttcagaacgatttgaaggtaaattttgcttttctaaacgtagaaaatgctagccatgtatctgtgctgcttggacgtacaagacttagggtctatgttcagaatgatagggaaataaaatgtttagcagactggaagctgtaagcaaacatttccagggcaaagatttacttcacctaaccattaaaaatggagaattgcagttgttccatttcagatgccattagagaagggggctgtttgttttgcttaccaggttttacaaaacagtgttagaggatattattgggactaaagaatagtgttatatcgggataattgcttgattttgagaaatgtactgtaattatataagaaaatgtccttatgtttaaggaaaaacacagaagtgttaaggaataaagaggcatcatgtctgtaacttatggttcaaagtatgtctgtacatataggtaaaaataattagcaaatatgaaaatgttcacatttggggaatgtaggcagagtatacagggattctttctactcctctaaaattatttcaaaataaaatgttaaaaattgttagggttcaaaaccaggaaacatagtaagactcaaaaaaaaaaaaaatgttagggtttgatattatcttgggtgttgtgattactctagaccaatgcttttcatgttacaaatcatgacccatcactgggtcatgaagtcaatttagtgtgttgaatagaaaatgagtgttacacccattatatgggtgggtatacttgtgaaactcttgatcacgtgtgtctttgtttaggatgtgatataaatttttttcttgctatgacaaggtttgaaagcagtttatgtggaaaaagttctttcacttcatgttttgtgagccaccaatcctttcttaaactaatcgcagaaagatgcttttggattaatagacttgactatacataagctgtttctttcttctaagagtcccagttttacctatattctttaatcttgcttattatcccaaaatttcaacttaaagatatgagacttacagtgttaatataggggaggaaaatcattgcaaaaatcagcagtgacttgtttggctgagttaggcattatttcggttcttttaataaaggtaagtaacaaggcagggtttcagaacacctgaaagacacttctttataaaggagtttattctcctgcacctttatctccacaaaatacaacaggtattagcacactagtctcagctctttcttagggggacttgtttccatgttggagggaggtgggccctgatatttgtccagtctgctttctgtgaggagaggtgaccctgtgaaggcaagagtgactggcagtagtgctatgtgggtatgactcctttgcctcttttatggaaatgggaaggctccttcctcttcagttgtaccattaaacagcaagctggcaccattttttgaatagtgatttctcataggagttttgcaacagtacgtttaatttattttggtattgtgaagtaactggagaacagcaggaaatactgccatgtcacttccatcttttttccaagagaggaaataaaatctatggtatttagggctttaaaccaatacaaggaaattcaacaaaagacttcctagaacttaaaagctaccttcaaaaaagcttcttaggcaccttaggtaccatcaaatattatacaaattctctgctttgttttgaataggtggtggttttgttttgttttgttttgtttttccttctttaattgggaaggaactttggtttctaggcttaacttttaacagatctcacaggccgcagtttctagtagtagtcaggctactggtagtattagtctgtgttgtcactgcatagtctgaaataactaaattgccagaagtccattaacttaaccaaatcagctttctaccacttaacattctacttttacctacacaagtggactgtgtaatacttaacatccttaagaaacatatttgtttctgacacacatcttagatgttttctgaaatatacaaggtttagttgaagaaccacaatagcagttattggaagtgttcagcatcggctcccaagattttagcagatgtgacgaagagaacaccacactacaacacaatctaatctcagcttgcctctccagcactggtaccttgggcacttggcttaattttgctaggtttgtttccttcagtgtaaaacaagaatgatttccagggtttctatccagcaaaagtttaactgtgaggaagctcttttacctattctgtaaggaagtagatttatcagaactcttaatgaattgtggttgtgtttttgagtccaagagtccaacagtactataaatttaaatatggctttttaccagtctggtgagtgtattacattgatttttaagagataaacagtacaaggtagatctttactattgtgttttaaaagcctttgagattttattttctgggatgtgagctatctgaaattttttctcttattaacactcagagggctatatgtatctctcatctctacaagtttattttcaaaatgacacatcccagattgaaatgggcacttagcgaatacttgtggaccacaagacttgtctgagaacatgttcaaagacagttttcaaataaaaatttttcttaatcaggtccatatacagacttcaccccttggacaacagaagaacagaagcttttggaacaagctttgaaaacatacccagtaaatacacctgaaagatgggaaaaaatagcagaagcggtgcctggcaggacaaagaaggactgcatgaaacgatacaaggttgcagacttaagcgtttatagattgttgtattttaaattgtagcttgggtgatatagctcatattttatgtctattaagtggttaataatatagtgcttatttcaaaaccagtagttatggggtcaatattatgaggaagaaatgagcaaccttagaaactttctaggccctggcagataatgaaatcagtatatttagtactatctatcttagttgcttgaattctttacaccaaacactagattaaaatgtctgtttttaaatcgcaacttcttaaatcacacctttctcccttcctaggaacttgtcgagatggtaaaagcaaagaaagctgctcaagaacaagtgctgaatgcaagtagagccaagaaatgacaatctttgttgtgtgtgcatttttataataaaactgaaaatactgtaaacattttcattcttaaaattatactcatggtaataatttgaaagt

SEQ ID NO: 416 - DNA, 32742 bp, Homo sapiens
  source 1..32742: mol_type = other DNA
gcagaagggctctgttagtgcgcctctaagatggcgacgcctttggcggtaaattcgggtaagtgtggccagacagaaagacgattgagctgagcgataaccaggtcttcatggagagacgagaccgtgaggtttctcggagtctaggaccccacttatgtgcggtgcctgcttttccctaattctgggcctagagtcccacccctccccagtttgaatggcgcgcgtcggtgctgcggctccagccctcgagttggggtttgagattccaggcagtgaggcttgggccgctggacccaggtgtgtaatctctcacagcccagggctgagtctggtccccctcacccccaagtttcactgtgcgtctgtggtcccgatttcgctggaatacgcatcaggtcttccacagtgaagccagaggacccgagatattttccagccatgagcagaggctgaaagtaggcgtcggagttccttatagggtgggagatcttgcaggcagcgaatactccctattatgaagtcggccatctgaaaggtggtcaggaagagggtggcggggcttcagcagacgtcttctaaccctgcggatgtggttaggccctggatgttcttgtacctttggagctgtagattttcggggtggaattgaatctagaaggtagtaaaggaactctggaagatttggggtggatcctctttcggtgattctcaattcgggccgtaccgccctccagtggtgtttgaatgagtgagtgcattttgattgtcatatttcctggggtacactgctgtcgcatagtaggcggggcaaggatgcagaaagtccttcatggtcagagcagtccggaaaaataatttggtgcctagaatgttaatgcctcgattgagatgctctgaagttcgcgggcaagattaagagtatatctgtgtggtaaatgcttgtgagaatctcacttaaaaggactcttttttaaagtattggttctattttccacaggactgatattcttgaaaagttgtctaaatctgttttgtaaatcaaatcatttcagaaaagctatgataaattataatgaaggctatgtttactgaacacatactatatcccagcattgcacttattatcgtgcttatctcattcagttcccgtttatacacctttggagtagttactgttacatactccgttttacagatttggaaatagaggcttcaaatagttacgtaatgtccccagagttaaacatctaatgatctaagtcagtcttaggtgcttaaactacttagtgctactgcttaagcacaacctaattcattttatgatattagacgtatatattagaaggttagtaatgaagttacatgcttaatattgcggtccttccttcccaattagatatgcttaacgtgtggttgtatataatacatttctctattttattttattttttaatttttctttttgagatggagtcttgctctgtctcccaggcgggagtgcagtgatgcgatccgcgatcctggctcgctgcaacctctgcctcccaggttgaagcaattctcctgcctcagcctcctgagtagctgggattacaggcatgtgccaccacgctgggctaatttttgtatttttagtagaggtggggtttctccatgttggctaggctgatctcgaactgctgtcctcaagcgatctttctgcctcggcctcccaaagtggtaggtttacaggtgtgagccagtacgcaaggtatacacatttattttccttttttttttttttctttttttgagatggagtctcatcctgtccacccaggctggagtgcagtggcgtgatctcggctcactgcagcctccacctcctgggttggagcaactctcctgcctcagcctctgaagtaactgggattacaggcgcccgccaccatgcttggctagcctggctaatttttttttgagatggagtctcactctgttgcccgggctggagtgcagtggcacgatcttggctcactgcaacgtccgcctcctgggttcaagcgattcccctgcctcagcctcccgaggggctgggattacaggcgcccgccactacacccagctaattttttgtatttgtagtagagaaggggtttcaccatattggccaggctggtctcgagctcctgaccccgtgattcactcccttcagcctcccaaagtgctgggattacaggtgtgagccactgcgcctggccaattttttttgtatttttagtagagacggggtttcaccatgttggccagactggtctcaaactcctgacctcaggtgatccgcctacctcggcatcccaaagtgctgggattacaggcgtgagccactgtgcctggcctatatacattcctttagtacatactcgccctaagctattataattattaaacaaatcattggagggaaaaggagttgccaacagcagcaaagagtgtacattgtataataaagccttgtgtcaggagtgtttaattggcaacataggaaacatttttaaaagccaagagtcaggagctggttttttaaaaaactaaacgtcttagggaaggaactctttttccatcaaggaatgaatgttgggttgagtgggtaaaggaaatgtgtcatatacatgcaatatgcataatacatatacatgcatatacataacataacgtatacatgcatatatatagtatccttatgcagccttaaaaaggaaggaaatcctgtcacataaaacaacgtggatgaaacttgaggacatactaagtgaaataagccagtcacaagacacaaatactacatgattccacttatatgaggtatctgaagtagtcatactcatagaaacagaaagtagaatggtggttgccaggggctgggaaaggggaaagtggggagttgtttagggggcatagagtttctgttttgcaagatgaaaaaagctgtgaagatctgttgcacaatgtgaatacactgaacactgctgaactgtacacttaaaatttgttgagattgcattctatgttatgtgcttcctttaaattacagttttaaaaaatcaaacatcttggagttgtaaggaaaaaatacagagattgtagagttctaagacctatggttggccaggtgtggtggcttatgcctgtaatcccagcactttgggaggctgaagtgggcagatcacctgaagtcaggagttcgagaccagcctggccaacatggtgaaaccctgtctctacaaaaatacaaaaattagcctggcatgatggcaggtgtctgtaatcccagctactcgggaggctgaggcaggagaattgcttgaacccaggaggaggaggttgcagtgagccgagatcataccactgcactccagcctaggcaacagagcgagactctgtcttaaaaacaaacaaacaaaaaacaaacaaaaaaacctatgcttgtatttcagctgtataacttaactagtcttgtgacctgtatcaacctggctgagtacactcacagacttgtgaataagcaactattaacactgcttggcagtccttctgtgatagtctggtcacctcgtccattcacagcagtgactacttcagacctttctacactcttcaaatctttaacctgcaactaactaaaccctcagacttctagtcacagagaaaataggagccaacatacatgaactccctttattcactctcaaacctacaaacctaggtgtgtctgcattcttttgaatcacttttcctctgtcttcctatctaatgtaaatcccacccattgtgttcttcacctgttacccctttttttgtcttgtatattcacttctctctcttgctcttccctttctctccactgatgatctcatgcgtcactccacttactgtcctcttcctagtcaagcctttcaaaagatttgttagtattcatggactccatctccttccttcctttgttccttccttccttccctccttccttccttccttccttccctccctccctcactctgcccaggctggagtgcagtggtgcagtctcggctcactgcagtctccacctcccaagtttaaatgattctcctgcctcagcctagtagctgggattacaggcctgaactgctatgcccagcctactgactcccttttcatacctcctattccttcacccattctggtctcttccatccttgtaaacagctctcaatagggttaacttctgtttcttgtagttcagaaagttcctttttaaaaaattattttttattttgagacaggggctcattctgtcgcccagactggagtgcggtggtgtgatctcagctcactacaacctctgcctcccaggttcaagagattctcctgccttagcctccctaagtagctgggattacaggcgcccaccaccacacctggctaatttttgtaattttagtagagatggggtttcaccacgttggccaggggtgcctcgaatttctgacctcaaacgattcacctgcctcggcctcccaaagtgctggggttataggcatgagcagaaagtccccatgttttaaatcttcatttggcttgatcttttagagtaaagaccaaaatcctttttttttttttttttttttgagacagagtctggctctgttgccaggctggagtgcagtggcgcgatcttggctcactgaaacctctgcctcccaagttcaagcgattctcttgcctcagcctcctgagtagctgggactacaggcgtgcgccaccacacccagctaatttttgtatttttagtagagcagggtttcaccgtgttggccaggatggtcttgatctcctgacctcgtatctgcccgcctcggtatcccaaagtgctgggattacaggcctgagccaccacactcggtcatcaaaattctttaacgtgggcaagtgagccctgtgtgatgatcttgccaaacccgttttctgtactgcagctctcttggccttttgagttctttgacatgccgcattccctcttgccatggaaacccacaggttgtcctctccctggaatgcatgtcttcacctcccacctgtcagttaactatcacttttgttcttcagatttcagcctagttatcacttcctcatggataattctttcctctggctaggtcagagtcccctattatgtgatctcttgccctggctacctctccttcatatccttcatatcctgaccacagttggattttattttatttttatttatttttttattttttgagatggagtcttactctgtagcccaggctggagtgcagtggcgtgatctcggctcactgcagcctccgcctcctgggttcaagcgattctcctgcctcagcctccctagcagctgggactacaggcgcatgccatcacgcctggctaattttttgtatttttggtagagacggggtttcgctgtgttggccaggacggtcttgatctcctgacctcgtgatgtggcccgccttggcctctcaaagtggtgggattacaggcgtgagccactgtgcccggccagattttacatttatgtatgattatgattaatgtttttcctcactgcagtataatcttaccaatacctcacacatggtgaatgagtgagtaaatgtgatttgctggaggtatccctaaacattaaggaaaataaatgtatttctcaactgactaaactacatggtaaaaatacatatttagtaattttgaaaaatttatagtgtcccttcatttgtaatcagtaaaaaagatatttactgtaatcctagcactttaggaggctgaggagggaggatcacttgaggccaggagttcaaggcaagcctgggcaacatagcaacatcccagttctacaaaaaatacaaaaattagccaggtctggtggtgcgcgtgcgcctgtaatcctagctactagagaagctgaggcaggaggttgcttgagcccaggagtttgaggctgtaatgagctgtgattgcctcactgcactccagcctgggtgacagcaagaccctgtcacaaaaaacaaacaaaaaaaaggtgtttactgaaattggtcaaactcaagacagattgaagataactctttgttgcggctacctttggtgttttttttttctttttcttctttgagacgaggtttcactctgttgcccacgctggagtgcagtggctcagtcatggcatactacagcctctaccctctgagactcaggtgatcctcccacttcagcctcatgagtagctgagactataggcacaagccaccatgcccagctatttttttttttttttttttgagacggagtcttgccctgtcacccaggctggagtgcaatggcatgatctcaggtgactgcaacctctgcctcctgggttcaagcaattctcctgccccggcctcccaagtaactgggattacaggtgttagccaccatgcccagctaatttttttgtgtgtgtttagtagagacagggtttcaccatgttggccatgctggtcttgaactcctgaccttgtgatctgcccacctcggcctcccaaagtgctggattacaggcatgagtcaccacgcccggcctgttttttttttaaatagagacagggttttgccatgtgacccaggctggtcttgaactcctgcacttaagctccttgaaccttgcttgggaggcctacctcagcctctcaaagtgctaggattacaggtgcgagccaccttgcctggccctttgatgctatgttgatattaatgacgaactaagtaggccagtgaacctgtttttttattgttgagtttttttgtttgtttgttttttgagatggagtctcactctgtcttccagactggagtgcagtggtgcgctcttggctcactgcaacctctgcctccaggttcaagcgattctcccacctcagcctcctgagtagctgggattacaggtgcacgccaccatgcctggctactttttaaaaattttttgtagagacagggttttgacattttggccaggctggtctcgaactcctgacctcaagtgatctgcccgccttggcctcccaaagtactggcattacaagtgtgagccactgcagccggcctattgtagagttttgatctttaattggatgcctaccattattgggggaaaaattggatttttctctaccattcactgagcttattacactaaatatgtatagtacaaggaaatttattggtttttcagaggtcctactgtatattaatatttaaaatgagggagagaaaattaacttttgtcagcactttatcagatttctgaaatgtctgtggtaaggtatatttcagatttgcataggagtcatcattaataccttccctttataccatgtgccatttgatgaccaattctgagtcctttctgttactaacagaccttttcttcctcctgtactgccctcatcctagtttaggttccattttcttatttttttttttttgagatggagtttcgctattgttgcccaggctggagtgcaatggtgtgatctcggctcactgcaaccgccactcccagggttcaagctattctcctgcctcagcctcccgagtagctgggattacaggcacctgccaccatgcctggctaattttgtatttttagtagagatggggtttctctatgttgatcaggctggtctcgaactcccgacctaaggtgatctgcccaccttggcctcccggttccattttcttataagtggcttacttacctcttatccttgtttcctgacactgcctgttctagtccatcaaccacactagaacaccattttcctacaatgccagtttcattttgtcatctgctactggaaactttgccatttactaataggaaaaattccatcatggccctggaatccaaggctgaaacctactctatcctttgcagttagagagagggccaagaaaatgatcctgagggaagtcatctagtcaccaggatctaggtcctcattttggcaggcagagaaatctgatttttttcagtgtatccagagttgattaggtcccattcattgattattctctaatcaaattcagaaaagacagatacataaaccagtatgccagttattgctcttttttattttatttgtttatttatttgttttttgagacagaggcttgctgtgttgcccaggctggatggcagtggtgtgatctcggctcactgcaacctctgcctcccagattcaagagattcttgtgcctcaaccctccttgtagttggatttacaggtgtgcatcattgcacctggctaatttttgtatttctagtagagacggagtttcatcatgttggccagactggtcttgaactcctagccttggcctcccgaagtgctggggttacacggatgagccaccacccctgtctgccagttattgctctttaatgggaagtatgtctgcataggtactcatgttgccttgtcaacacatccttcatgctagaaatttatatgtcgagctatatttttaatcagaagattggaaagtgtgggactaaagcaggagaagcaaagcagggaattggatgatctgtctatgtaaggaagatctagacatgcagattcctcacatccccacatcaaagacctgacgctttgcatccttccctaatcttcagattagtttaggctctttctttcatgtactctcatagcccgttgtacttcatcatatcttttattatactgatatctttggaattatttgttttttcgttttgttttgttttttgagacggagtcttgctctgttgcccaggctgaagcgcagtggcgcaatctcggctcactgcaacctctgcctcccaggttcaagcaattcttctgcctcagcctcccgagtagctgggactacaggtgcgcaccaccatgcctggctaatttttgtatttttagtagagatggggtttcaccatattggccaggtggctggtctcgaactcctgacctcgtgatcggcccacctcggcttcccaaagtgctgagattacaggtgtgagccactgcacccggcctggaattctttgtttaatgtctgtcagtcttatcaatttgtaagttccatgaggcttgggattctgtctgtcttgctcagtctatgtgtgtatatatatatatatatatatatatatatatatatatatatatatatatatatgtatatatggtccctcagtaaatatttgatagtgaatgaaagtatgaataaataatccatctccactggtttagtccgtcctctccctgcacatctccctttaaaaaatttttttttcaggctgggtgcagtggctcatgcctttcatcccagcacttgggaaggccaaggtgggcagggtagattgcttgagtccaggagtctgagacaagcctggacaacatggtgaaaccctgtctataccaaaaaaaaaaaaaaaaaaaaaagcaaacaaacagaaattaggtgggtgtggttgcatacctgtagtcccagctattcaggaggctgaggggggcagtatctcttgaccccaggaagttgaggctacagtgagctgagatggcaccactgtactccagcctgggtgacaaagtgagaccctgtctcaaaaaaaaaatgtttttaaattacattgcgtcatctgacgttgttcattgagttataatgtatttaattacattacagttatctttcatgttgttcttatatcctggtaactttatttggatttgggttttctcaacagtttaccctgtttacagtctttaatgtttaggctatagttagttctaagtttcatctgttgagtaattggttttgaccagtttttccttcagagtctaaacacatatgagtaccttatctgcttatttccaaacagaaacctttggctttagagtcatattttttaaatggtgagtctaaaatcagtttagtaggggccgggcgccgtggctcatgccagtaatcccagcactttgggaggccgaggtgggcagattgcttgaggccaggagttcaagaccagcctggccaaatggtgaagccccatctctaataaaaatacaaaaattagacgggcgtggtggcacgcctgtaatcccagctactcaggaagctgaggcaggagaatcacttgaactcaggaggtgaaagttgcagtgagcggagattgtgccactgcactccagcctgggtgacagagtgagtgagactgcatcttaaaaacaataaagataaaatcaatttagtgggcccctcaccaaaaatgggacagaacacaaaatatcatagggcattgaatataataaatgaattaattttagttttttattgttgttgttgttgagacagagtctcactctgtcacccaggctggagtgcagtggcgtgatcttggctcactgcaacctccacctcccaggttcaagcgattctggttcctggcctcccgagtacctgggattacaggtgtgcgccaccactcctggctaatatttttgtatttttagtagagacaggtttttaccatgttggccaggctggtctcgaactcctagcctcaagtgatctgcccgcctcggccttccaaagtgctgggattataggtgagagccagcctgaattttagtattttatataatacttttgttccagttttgtatatacatgtgtactgggttgaaatgtgaaatatttcttactgtggattatagtcaaagtttgaaagcactactcctacctctttaatcttgctactgctctgaattctctttcatgctttcacacctgtctctgatcctttgctcacacttgttcttggctgatgtttgttgcccagattttcctcatccttcaaatgctgcacaagtgcagccattccttagccaactctgaccatcagtttgatcttttgaaattattttattgtttgtgccaacaatcatattcctttactggaatatttcacttatgtacattttatctccccaactggtgagctgtaagacaaagattgtttgtcttatcttctttgatactttactgttcatttatggagtttaaattttttattttttattttttgagatggagtctcactctgttgccaggctggagtgcaatggcacgatctcggctcactccaacctccgcctcctgggttcaagcaattctcctgcctcagactcctgagtagctgggattacaggcgcgtgccaccacgcttggctaattttttgtatattttagtagagatggggtttcaccatgtaggccaggctggtctcaaactcctgacctcaggtgatccgcccgccttggcctcccaaagtgctgggattacaggcgtgagccaccgtgcccggccttagtactatttttgaaatacctaaattcttcccaaacactttcactttttaagtattatgtattatagtataaatgtgtcatttactttccagtaaattatggtgaaagtacaatttactggttagggcacactctgatgcccagactgcttgggcttaagttctgacattatctagtgtgacctcaggtggtgaatattttgacctctctgcctcagtttccatatttataaaatggaggaagccatagtgctaacctcatagggtgttgttaagacataatcatacatgtaaagagcttagggccatgcttagtagcacacagcacaagtttagtcattattacttactgttatcatgtttatcaattaaaatgtgatcctttttatatgagtttataaaagtattctgtatttctatgctgttttataatagccagtgtctcagcccaaagtacattttcagcttctaagttttataaattctgagttatttccctactgctgcttttcatctggatgacaagaaggaaaggaaggaaaggcacttacctttattgagtgcctatgatatgaaaggcactggactgtgtgttttccttagtttatctcatttgaaaaacttacagctctttgaagcagatggtgtttatgttttatatatatatatatatatatatagagagagagagagagagagagagagagagagagagagagagaaactgaagtttaaagaggttatttcccttgttccagtagacatagctaatgaagtggtaaaactaggttcagctgatattccaatttaaagtcaggatttattttatttatttatttaatttttaaattttttttgagatggggttttgatcctgtcggccaggctagagtgcagtggcacgatcctggctcactgcaacctccgcctcctgggttcgagtgatttctcctgtcccagcctcccaagtagctgggactacatgtgcgcaccaccacacccggctaatttttgtatttttagtagagacggggtttcaccatgttggccaggttggtctcaaactcctgacctcaggtaatctgtccgccttggcctcccagagtgctgggattacaggcgtgagccattgtgcctacctaaagtcaggatttattttatagtaagtcagataaagtgatgtgtttatatcattgcttgagaattttaataaactatgcttttatattagtgtctcttaatcagttacaacattgatatttatataattagcaatcatttattatattaatataattaatatatattaattatattaatataattaattatattaatataattaattatatttatatattatattaatatattaattatatttatatattatattaatatatattaattatatttatatattatattaatatatattaattatattaatatataaattatatattatatattacatatattatatataaatataaaatatatgtaatatattatatattatatatttatatataatatattaatataatatagttaatgtaacatactaattataatatttataatataattgataattatattaattaagataacttcctagattaaaaagtagctgtgggtgtaactaaaatgtgtggatggtaacctcacattatttttcaagtgtatgttttctttgacggtggtttcatttattttttctttaagctgctagtctatggggtccttacaaagacatttggcataaagtgggaaatgctctttggagaagacaacctgaagctgttcaccttcttgataagattttgaagaaacacaaacctgacttcatctcattgttcaaaaatccggtaagaaattttctttttcagtttttttgggatttttttttttttaagatcgaggaaggaagtaaactcttttcttttttttttaattttcaaatttttttcagaaatttatttactgtgccacagtctcatgaggtcctgatgacatgtacccctaaacgcttaaaaaaaaaaaaaaagacagggtctaactttgtagcccaggcttgtcttggacttctggcctcagtgatcctcctgcctcagcttcccaaagtgctgggattacagacgtgagccaccatgccagctgcaaaaactatcttaaaaactttttttaatttttaatttttgtgagcacataaaggatgtatatatttatgaggtacgtgagatgttttgatacaggcatgcagtgtgaaataatcacatcatggagaatggggagtcattcatcccctcaagcatttatccattgttttccaaacaatccatttacactcttagttattttaaaatgtataattattattggctatcaccctgtcgtgctatcaaatagtaggtccttgcaagtaaactcttaatgtacgtaacaaaaacatgtcacctgtctcactccagtgattcaatgattttcttttctagatattttttaaagacagggtgttgctctgtcctccagactggagtgaagtggcctgattatagctcactatagcctcaaactcctggttcaagcgttcttcctggctcttcactcctaagtagctgggactacaggtgtgtgccaccgtgcccagctaattttttttagagatagggtcttgctatgttgcccaggctggtcttgaactcctggcctcaggtgatcttcctgccttggtctcaaaaagtgttgggattatagacgtgagccactgtgccctgctgtgattttaatggaatttttcttaggagcaatgttattctctatagaagttaatattatgtttatttctagctaggagataaacttaataatatttgaagactatttaagaaatttagtatattccagaaatattaactgccttagaatttctgacctctagttagtaatacatctatgcttggtaagattgattattttgtttatttccagatgtacgttaaaattttaagtattattttatagtagtttatagtattatgtaagttgtgttaatggaatgaattaattcttgagtatttttaatttctgcatcttgaaattctttgcaatagcaatagggtactttagtggaggggattcaaacttggaaaatgcttttcttgttgtttggcacttttcctttgcgtgtatgtgtttgtgtgtcagagtctcactctgtcgtccagtctggagtgcagcggtgcgatcttggctcactgcaacctccctcccgtgttcaagcaatcctccttcctcagcctccagagtagctggattacaggcgcctgccaccatgtccagctaatttttttgtattagagacgtggtttcaccacgttcgccaggctggtcttgaactcctggcctcaagtgatctgcctgtttcagcctctcaaagtgctaggattataggcatgacccaccacgcccagtctggcacttttcttttatatacagcaaggaagccatccaagaactatttataggattgtgttaccagaaatggctttttgctttttagcttttttttttttttctttttttttctttttttttgctttctttagtagaaagaaccccagcctgggaaccagttgagctgatttccagtcttggctgtaccactagagagttttatgaccacagacaagttacctgacttagctggatgtcggtttttctgtctgcaatagaggagctagattcaatgaccaatgtgtaacctttaagttccgaaactttagatgtatgatctatcagctaattctgtactgtacgtcatatgttaaatatttgcaccaaattatcttttaggaaataagactacattttatataacattaataaactgttacttgctctgctaagtaattaaacagttcatatatccatttgttatgtaccatttgaagaccttattatttttatttattatgtaattgaaaagttctgtagaaacttgaaaaatagtatgctattttgtatattttctccaaatttttcagatcagagtttagcagtcacagttattgagaaggtagtattggaataaaaagtttaaggttatgcaaaatattacttcataaaagtctgttctaaattagctgataagaaatacttctgtttgtcatgttaccaggctgaattatcatgaataagcttctgtaggtaacactttgggaccttgtctccagtgtgctattttcataacaattacaattttatcattgtagccaaaaaatgttcaacagcatgagaaggttcagaaagccagtacagagggagtcgccattcagggtcaacagggaactcgacttcttcctgaacagctcattaaagaagcctttattctcagtgacctttttgatattggagaattggcagctgttgagcttcttcttgctggtaggttgacatttaactgaaacagtggtaaaataatgcaaaattataaaatcactcatagtttaaaatagtttattgtttagattctatcatagtttctaaggctgcagtttggtaaaaccatattcaaaatatttccttttttaatctttgttgtttttttttgagacagagtctcgctctgttgcccaggctggagtgcagtggcatgatatcggctcactgcaacctccacttaccgggttcaagtgattctcatgtctcagcctcccgagtagttgagattacaggcatgtgccaccatgcccggctatcctttcttaacctttgattggaaggaaggcttcagtttagtgatcagaattgttaaagacatctcagaaattttatagcacaaagcacttactgtcagtgagtaggcaggtaaggtcaccacttttttggaatttctttttgagagagtaattcagataatgcatgagtaggtaaaaaataagatgatttcaataatacagagtactaggaagaaaataaaataaagcagtgagatatagagaggtggaggctggctagtgcaactctaagtaggatccgtagagaaggcctctctaagatggtgtcatttgccttgagacccaaatgatgagaaggtgccagccacccagacctattgggtaaggcttttccggggagagcaagcagccagtgcttgaggtgggaataaaggcgtgtttaaggataaaaagatcattgtggctagagcatcataaatgagagggagagcaaaggaagatgcagatacagcaggaatcagagcatgtttgattttgcatgataatgaaaggtatttggattttattctaattgcaatagaaagttgttgatgagggctttaagcagagacattacataattcattctaactctgaaattatttctctggctgctgtgtagagaaaagagagaaaaatttctatactataagcagtttgttttaattataatggaggagccatttgaagaaaatatgggcatgttagttgaacaaaagtttaatatgtctaaagataatatatggctaccaaaatcctttttgacctaagcctgcactaaaagaagtatgatattgagaatgagggggatgttcactagacatgcttgagttttgagtttaactcggaactttcatttaacaaacatttcttctatacctaccatgtgccaggcatggtgttaattatatcactccagtgatataaagatgaataaaatctcaactagtgtaaatacgctcatattctaataattgagaatgatgtggaaacaaatattttgacacaattaagtacaattaatgcagttttgtgcaagatttagagatggtccagagatttagagatggtattagatggaccttgattgtacagagaactcttaacaacatcatgaagtttaaggtagatgttgcaaaatgagtaagcatacatcaggtggaataggtggttatttgggaggatgaagggcatccaggcagaagaaattgcctgtgcaagagggtgaagcaaggtgatgaatttggggaacagaaaggagtagagtggaggagtagttgcagtaaggggaaaagaaagctttaggaaatgaaactgaaactataggcaaagtactcttaaaaaaaaagtgaaacttagccaggcgtggtggctcacacctgtaatcccaccactttgggaggccaaggcaggtggatcacgaggtcaggagttcaagaccagcgtggtcaacatggtgaaatgccatcgctactaaaaatacaaaaattagctgggtgctatggcaagtgcctgtaatcctaactactcaggaggctaaggcaggagaattgcttgaacctaggcggcagaggttgcagtgagatcacgccactgcactccagcctaggtgacagagtgagactccatctcaaaaaaaaaggtagaactcattcaaaggagagtagttaaaaggtgactgaacttgaattataaaaaggttgtttattcagagaagattccgagggaagaaacttagaaatatttgaaagattccatatgagatagtaaaatgggcattgaataaaattaaatttagtggacaacagtgagaccaaaagattctcacccagtatgtagaaatcacaggtaagtgtgagagttagaaattgagagtttggaaaatggtgaattccatgtccctgctggtgtttagggataagttggatggccctcgaatatgttgagcaagaagttagacagtggatggatgtttgtagtagaggaccccagggccccttaagccctgagctactgtgattctttgaactgaacattgttatattgatttttgtctcctcctaaacacatacgtgtttattaacaatattatttctcaacttccttttttaggagagcatcaacagccacattttcctggccttaccagaggattagtagctgttcttctgtactgggatggaaagcgatgcattgcgaattccttgaaagccttgatacagtctagacggggaaagacatggaccctagaactcaggtctttttacttcttgggatttcaggggttaatttgaaattacttgaagtatgacaatatttcccttattatatacaatctgagcaatatgtaacataagctgagtaatatactcccttattctgccaagacagatataacaatttaaacctgttttattgtgtttataaataaaaaataatttggaccgaggtgcagtggcccaaattatttttggattacaaagtgctgggattacagattacagtcttgagctcaggagttttagatcagcctgggcaacatgatgaaatcccatctctacaaaaaatagaataattaactgggcatgatggcatgcacctgcagtcccagctacctgggaggctgaggtgggagaaagacctgagcctgggacgtcaaggctgcagtgagccatgatcacgccactgcactccagcctgggtgacagagcaaggccctgtctcaaaaaaagagcgtttgctatacctattattatgaagaagcataaacaatattgtttaacgtagtttattgatttcttttcattacagtccagagctggcttccatgacaacacgctttacagatgagctgatggagcaaggattgacttataaagttcttacgctggtgtcacagattgatgtgaataatgagtttgagaaactacagcgagagagaggtttgggcagtgaaaaacatcgcaaagaggcaagggttcaatgaaatcaattcatgagttgtctgtcaaatctcagaggcagaaacatgacaattagaatgttcattttttcaagatgaattatgtagctgataccatgcctgattgccacttttctttttttttgcttttattatttttcattgacacaaaactgtacatatgtatagggtacagtgtggtattttgatacatatgtatgatatgtaataaatcataattagcatatccatcacctcaaacgtttattatttctttgtgttgggaacattcaaaattcactgtactactgtttgacagtacagtatacaataaattgttaattgtagtcagctcgtaatgtatattaaagtttgtagtcagctgtgtccataaaattgacttgcagttgtttcagcttcggtatagtcatttatgtgccattctagctctttttatgaaatgaacaagaaattggtcatcccaatttcttaaggaacttaaggataaggaataaacaatagggtttgttcagaattccagaggtgacgtcttaggatcacttgtggattttgataggtttttttattagcctttgtaaaaggtagtttgtactttggaataagaccaggcttcactgtaatttatttatactgatagtcatgtttttatttctaggtttctgatctcattaaggagtgcaggcagtctcttgcagaaagcctttttgcctgggcttgccagtcacctttaggcaaagaagacactctcctcctcattggacatttggaaagagtgacagttgaggctaatggctcactggatgcagtgaatctggctcttcttatggcgcttctatactgttttgatatcagttttatagagcaaagcacagaggaacgagatggtattgagttttatacattttcctacattaaaaaaatcagatttaaaattgtggggataacatttaaaaagggtgatattttagctactaaaatagtctgctctgttcctgtgtttgcagtccgttcatatttgaatatttatatataagatcacatttaaaaaacagctgcagtcctgttaattatttctgttttttggggggatttggaatggaaagtattaaagcatatattatacatgttcatgattgcacatgcctaatttacttaattgcttgtttctttaccattcatttacattttcaaactttttattaaaacattctgagacagtgactgtcatttcagtaatgtaatctttgatctgtgttttctgtgaagtaaataaaatttttgtgatctttagatagcatgatttctattttagaatttatgtgcagaaaaaatgagtgtctaacttttttcttgtttatttgtagtacacttataaaaatgactgaaaatagtgaaattgaaatttaggattattgtcattttctttttttgtttttagtatgtgtacaatcaacagtagtgtaccttttgggatgtagaaattaatgttaattggtcattattcttctgtgagaatgctcagattttctgacttttggatattattcctgtgtatcagaagtgagaatttatctggtgatcggtaaagtggtctatttttgtgttttcagatatgattcatcaacttccactgttgacagaaaaacagtacattgcaacaattcactctcgtcttcaggactcacagctttggaaactgcctgggctccaagccactgttagacttgcctgggcgctggcattgaggggaatatcccagctacctgatgtgacaggtgaattgattgtaggtaattttgttatgagaaacagcatgttagcacttaatgacatttttggaaggagtattatctttgacatacataagcataagcataggaagatatccagagttgtattaaatgaaacctttagtgtagtagtgaaatacagacttttttctccttgtctctcaaaaatatcatatgaaatactatttcccattcttggagccactgacaatgctcttttaccttcagggtatgagtttaaaatttggaatgacagtgtcacattaattttttttttttttgagatggagttttgctcttgttgcccaggctggagtgcaatggcacagtctcggctcactgcaacctctgccccccgggttcaagcgattctcctgcctcagcctcccaagtagctgggattacaggcatgcgccaccacacctggctaattgtgtatttttagtagaaatggggtttctccatgttggtcaggctggtcttgaactcccgacctcaggtgatccgactgccttggcctcccaaagtgctgggattgcaacacgtgagccaccccgtccggccttaaatgttttttaaaattaaaatatactattccttttatttttatatattttacttcttgatttgttcacaaactagtttttcacattgtgtcaaattaaaaacagttatttttccatacagtgtattaaaaaggagatatttggatcagtcaagaacagatgtggaatcccgacttttcttttttgtggcccaggctggagtgcagtggctcgatcccggctcactgcaacctccacctactgggttcaagtgattctcctgcctcagcttcttaagtaattggactacaggcacacgccaccacacccggctaatcttttgtatttttagtagaaacagggtttcaccatgttggctgggctggtctcgaactcctgagctcaggtgatccacttgctttggcctcccagagtgttgggtttacaggtgtgagccaccgcgcctgaccagaatactgacttttaacaacctgttaactcactgtagcatatattattctgctatttacatttacattatttaattgtcatattagtaggggtttattctaacagaatgagaaccatacatggaacacgaagcccaaagaattgtctttttatggtaaatctagaaaggctttattcaagtttacaatttatgtcagttttctaatcctaaagtatcaacagattctagtatcttatcaatcgtgtaattccagaacattttgttttcactagtgtcatgctgttcccaaggtgtttgcagaaagctttttttgtgttaggagtctttctttggccagttaatttctatctgtctgtcatctatatatctaaatgctgatagcgaattagacttttacattcccgtacaaattctgtttctcacctgtacgtaccctcatcatttataagtcttatttcactacttttctgacataaagttaccctttaacctttgaagtggctatgtgatagttaatatcttctttttttattttggagatggagtctcgttctgttgcccagactggaatgcagtggcatgatctcaggtcactgcaacctctgcctcctgggttcaagcaattctgcctcagcctccggagtacctgggactatagtcgcacgccgccacacccagctaagtttttgtattttagtagagacagggtttcaccgggttgcctaggctggtctcgaactccggagctcaggcaatctgcctgccttggcctcccaaagtgctgggattacaggcgcgagccaccatgcccaggtgtgatagttaatatattaactatataatatagttatacatagatagttattataatattatgtaatatggtcacaatcttatgctataattgcccataccactgcactagttttgaaaggtttaatagaatatgctatagtttgctgtagaataatagtaaaaataggttaggaatcacagccctagtttcaagtcccagatctttggctacttaatctctttgattttatatgctcatatccttttataagctttaatagttaggggtattataattagaatttttaaactataaaaatttttctgttaatttgcattttaaaaattgttagaaaaaatgactagcttgtgttattttgcagaaatggtcacttcttgaaataatccagacaagttttaacgaagatctccaatttgaaaaattggtttctgttctcttcatagacttctgaaacttttatcaaatgtttttattatattattctataaaaggcatgaagccaggtgcagtgcctcatgcctataatcccagcattttgggaggccaaggtgggaggattgcttgagcccaggagttcatgacaaacctgggcaatgtagtgatacctcatctcttcaaaaaattaaaaattagcccagtgtggtgacatgcccttggctgtagtcccagctacgcaggaggctgaggcaggaggatcacttgagcccaggagagaggctgtagtgagctgaaattgctccactgcactccagcctgggtgacagagtgagatcacatctcaaaaaaaattaaaaaaacaagcatcggccgggtgtggtgactcacgcctgtaatcccagcactttgggaggatgaggcaggtggatcgcttgaggtcaggagttcaagaccagactggcgaacgtggtaaaagcccatctccactaaaaacacaaaaaattagccaagcatggtggcgcgtgcctgtaatcccagctgcttgggagactgaggcaggagaattgcttgaacctagtgggcagaggttgcagtgagctgagatcatgccactgcactttagcctgggtgacagagtgaaactctgtttccaaaaaaaaaaaatcaacaaaaaaaccaagcatttttgtaatttcactaagctttacagaattttagcatactgtttttaggcattgaaactcaatttatattaagacaatgatgccttattgcctaaatggtcttcaagaagtaatttttggctgggcatagtggctcatgcctgtaatgtcagtgctttgggaggctgaggtagtcagatcacttgatgtcaggagttcaagaccagcctggccaacagggcgaaaccttgactctgctaaaaatacaaaaattaactgggtgtggtggcacatgcttgtcatcctaccttctcaggaggctgaggctggaggatggctgaaactgggaggcagaagttgcagtgagtcaagatcgcaccactgcactccagcctgggcagcagagtaagactctgtttcaaaaaaaataaaagacgtaatctttgagttgattctcttttaattctggtgtttttgaattcaagtaaaggtttgaaataatttgttactgttactgaaaatatttaataattagtaattttagtaattgttattactagtcataccaaagaattaagacaatattttattctcaaggattttgtataatatgggtagataagcacgtttttgtttgtttgagatagtggcttccctgttgcccaggctggagtgcagtggtgtgaccatggctcagtggcctcaacctccagggctcacatgatccttccacttcagcctcccaagtaggtgggaccacagctaattctttgatttttttgtagagatgaggtctcactatgttgcctaggctggtcttgaactcctgggctcaagcaatcctcctgtcttggctaagtgttgggattacaggcatgagccaccacacctggctgataatgcagactttatttcaaaatacgaaacaaaacattaaaaaaacaggccaggcatggcgactcatgcctgtaatcccaacacttggggaggccgaggcgggtggatcatgaggtcaagagatcaagaccatcctggccaacatggtgagaccccatctctactaaaaatacaaaaaattagccaggcgtggtggtgcgtgcctatagtcccagctacttgggaggcggagacaggagaatctcttgaacctgggaggcggaggttgcagtgagttgagatcgtgccactgcactccagtctcggcgacagagcgagactccatctcgaaataaataataaataaataataaaaatgaaatactacaaatcatatgttttcctctgtttgagactatcttggcttttatctgttcctggcccttttcaaggcaatgaaaatgtacttacggtaacagactatgtatttggtttgtatgacagtcaaacagaataagctgtgtagtagtctttttcaaagccagattgccacacaattacctagtaattttatattcaaaatttaagagcagtaatcagcaatatgtttcttgatggaaagatacaccataacctatgacatactcttaatagaaagttgaatgtaagtcagattaagttactctagatcaagccactgcacccagctgaggaattagttttaaagatgtgataatggccaggcgcagtgactcacgcctgtaatcccagcactttgggaggccgagatgggaggatcacttgaggtcagtagttcaagaccagcctggccaacatgttgaaaccctgtctctactaaaaatacaaaaattagccaggtgtgttggcgcacacctataatcccagctacttgggtggctgaggcctgagaattgcttgaactgggagggagaggttgcagtgagctgagattgtaccactgcactccagtctgggtgacagagcgagaccctgtctcaaaaaataaaataaaataaagatacgataatggtgttgtgtgtgagtatgtagtgaatttttacttttgctttctttctttctttcttttttttttttttttgagacggagttttgctcgttttccaggctggcgtgcaatggcgtgatcgtggcttaccgcaacctccgccttctgggttcaagcgattctcctgcctcagcctccccagtagctgggattacaggcatgcgctaccacacccggctaattttttgtatttttagtagagatgaggtttctccatactcccgacctcaggtgatcctcccaaagtgctgggattacaggcatgagccaccctgcccggccttgtttcttaagtatatttttgagttgtacactgcaaatacttactggtaaaatgttaaattggaatttgctttaatgagatatgtatgagtggagagggggaagatatagatgaggtaagattgtccataagttggtagtattgaaacaggtgatgggtatgtagaggtttattatacttatttttagatatatattggatattttccaaataaaatataaaaaaattacagttagacaagtttatattcaagttaaaatttagtttttaaattttagctacttggttaccaaattagcacagttacttacctattcatgttcaggttttggtcttggattgaagacttttcagatgacccatgagatttcattgggattaaagtcttaacatcattttaatatgtgaatgtttggatgatagctccctgactacatcagtgttgcatcacacatctctaaaataattttcattagttatgttattatttcaaagagtatgtatttttctaatacacattcagagtatattgttatttggggtttgtgagttctttagggtttatgagtcaattacagttatatatagtctcattttgtgcatagcacatgctagaaggctgggaagatgtctgaaccatcagcagagtattatgagatataattacaatctgggttaatgacttttcctccatgtactgtgttttaaaatctgtttctagctctggcagaattcacagaggcagatgaagcaatggcagaactcgcaattgctgacaacgttttcctgttcctcatggaatctgtagtggtatcagaatacttttatcaggaagaattttatattcgcagagtccataatctcatcacagatttccttgcacttatgccaatgaaggtaagtgtaataatgtaggatgagtaaatagtagaagaattttataaaataatttaaaactgattaaccagctttatgttttggaaactaataaaaatttttaatacagactaaaatttgccagtagctgtattacatcttgtgaatcagtttgtgactcatgaaataagtcatgagtctctacaagatatgagaacataccttgtagaatttcagttgtattaaatttgttgaggtttgttttatggctcagaatatggcctgtcttggtaaatgttctatgtacacctgaagggaagacatattttgctgttgttctatggaaataagtcctcttaactggggataagtcagtagaaagaaatatttgacatagtgaatggtttataaatgagaaagtaattaaatgaaaatgcttctgtgggtagaaaattactaacctcatgctgccctaaggattagtgctaaggttgctttatttaatatttttatacatgatttggaagaggcacagtggaaaaattgcattttatagataattgtttagattttttttttttttgagatggagtcttgctctattgcgcccaggctggagtgcagtggtgtgatcttggctcactgcaatctccgcctcctgggtaagtgattctcctgccacagtctcccaagtagctgggattacaggcgcccgccaccacacctgggtagttttttgtatttttattagaatggggtttcaccatattggccaggctggtcttgaacaggtgatctgcccacctcggcctcccaaaatgctgggattgcaggtgtgaaccaccatgcctggcccgattgtttagattctgaattgcagtgtataaaagggcttcagcatggatacaggtaaaataatgaatttaagaaaccgtaacacaaaggctgcttttgaatagatagcttgagctgtaactgtcatctgaaaagcgattcttagagctatttcaaacagttccttatagtatatgctctgtgtgctgttttgtgccaaagaagccatcaaatgttggcgggaagtaaatgagggagaaaaacgtctttttttgtgtttatattataaaaccacctatttcaaatgtacagtttttaaaagcaccctgaaaggtctacacttgtaatatattgtgcagttttggtaccatacctcctgaaaagtataaattgattatcataaatttgcccttaggattcttgtattatttttatttttataggatctatagtgatttttctctttaattcctaaaattggtaatttgtgtcttctcccccagttcttagttaaccttgcttgaagtttattgatcttattgatctttccagtgaattagcttttagcttcattgattttcttatattttgcttcaccattgttgatttttgctattatgtttattattttcttccctctgccttgggtttaatttgctcccttaattttgttttttaagatataagcttagattattgattttaaatatttcttttttctaatatgagcatttaataatgctatacatttacctccaatcactgctttagctatgccacacaaattttgatatgttgcattttcttttttgttcagtttaatatgttttctaattttccttgagacttctttgattgatgggttatttagcagtgtgttgtttaatttccaggtagttcacagactttcagatctctgtcacaggtttctagtttaattccgttgtgctcagagaacacgccttgtagaatttcagttgtattaaatttgttgaggtttgttttatggctcagaatatggcctatcttggtaaatattttatgtacacctgaaaggaacacatattttgctgctgttctgtggaatgttctacaagtgtcaattaagtcaagttggttgatgctgtttttcaagttttccatatccttactgattttctgtgtacttgttccattgaatattgagagaggagtgttgatatttccaactgtaattgtggatttgtctagctatgttttttttttttttaacagaatttgtttcttatttttgttggcatttagttcacacaaatgttgtgaagcagtgattctcaactgaggtataatgttcttcagagtgtgtttgggaaatgagtggggccagttttgcttgttatgatgactctggtgttgttattgatagttggtaggtagttccaaggatgctaaatgtcctggaatattcaggataatccaacccagtgaagaaacattgtgcccaaatgtcagtaatgtccccactgagaaatactacagttaagttcaacttttctatagtggaaaatgcattcaagttttaagatattatacattatgggtagtaatattgcaaataagattcctggcatgtttcttcatgtcacctaaagtggaatagatatttaaaaaatatattcttgtatgtagtcactttaagacagttgcctgatttcattattattagcatgtacaatacatttacatattaaaactatatctaataaatttaataggtgaaacagctgaggaatcgggcagatgaagatgctcgaatgattcacatgagtatgcagatgggtaatgaaccccccatttcacttagaagggacctggaacacttaatgcttttggtaagccattatattagaaagcttgtcctctttccctcctttcattattttttcccctaactttggaaaatttcaggtgtaatactttaaatgtccttttttttattgaaagtaatttttcagtcatagacatttccctacagtctttgcttactctttgcagattggcgagctatataaaaagaacccttttcatctggagcttgctctagaatattggtgtcccacagagcctcttcagactccgactatcatgggctcttatctaggggtggctcatcagcggccccctcaacgccaggtgagtctttaggttttcctcttttatactctggtactgtgatagagagtcttgaaaacatgaaagatattacttcctgattttattgctgttaacacaaatgatcactagtgtaacctttagagacttacactttttaaattttatttatttatttatttatgttgagacaaagtctcactctgtcacctaggctggagtgcagtgacgcgatctcagctcactgtagctttgacctcccaggtggaagtgatcctcccgcctcagcccccagggtagtcgggactacaggcatacaccaccacacccggctagtttttgtattttttgtagagatggggttttgccatgatacccaggctggtctgtaactcctgagctcaagtgtccatctgcctcggccctcccaacgtgctggatttacaggcatgagctactgtgcctagcctacttttctcttttataaaagaaaatttgaaactcttaaaatttaagttctgttgattttgaagttaatgtagtcaatcctttattggatactagatatgtgttgaattattagaggcagaaaggcatccagtctctttattatttacttatttttaaaagacagggccttgctatgatgaccaggctggtctgtaattcctggcttcattcagccttcccaaagcagtgggattacaggcatgagcactgtgccccacttgaattttattagtattttagttctccataggcatgacaatcttttcaagtttgggaggataggagaggtacaagtattaaaggagaattcttagacgttttaattgatggcaaaatgcctatgagtctgtagataatacaggcaaaaattctttctgtattaactaaagtatgatgtgcagaggcaaataaaatgaattgctatgcagtagttcacacctgtaatcccagtgctttgggaagctgaggtgggaagatcgcttgaagccaaaatttgagaccagcctgggcaatgtaatgagaccccatcgctacaaaaaatactagctcggtgtgctatcatgagcctgtagtcctagctgctcaggctgaggcaagaggacacgttgagccccggggtttgaggttacagtgagatgtggttacgccactgcactccagcctaggcaacagagtgagaccctgactctttaaaaaaaaaaaaagagttggcaggagattgccatgttcattttgggggatttctgttctagaagcttttatgcaatgtgtgtgtgtgtgtttttttttttctggactccagatcagatgcctttttttttgagatggagtttcgctcttgttgcccaggctggagtgcaatggcgcaatctcagctcaccccaacctcctctgcctcccagattcaagcgattctcctgtctcagcctcccgaataactggggttatagacatgcgccaccacgccaggctaattttgtatttttagtagagatggggtttctccatgttggtcaggctggtctcgaactcccgacctcaggtgatccactcgcctcagcctcccaaagtgctgggattgtaggcatgagccactgtacctggcccagatgccactttttaaactgtattgtttcagtgtttttctcatttaaaaaatacgttttgagccaggcacggtgcttcacacctgtaatacttgcactttgggaggccaaggtaggcagattacttgtgctcaggagttttagactagtctgagcaacatggtgaaccctgtctctacaaaaaatattttaaaaattagccagacatggtggtgcgtacctatggccccatttgcacgggaggctgaggtgggaggatcatttgggctgcagtgagctgtgattgtgctactacattccagcctgggtgacagagtaagaccctgtctcaaaagaaaaagaatgttttggagaaagatttccttaaaaatttttaaagtttttaagaaagctagcagtaatgaaaaatttgaaacatgtggaagagggaattattataaggaatgccccacattttaatttcacatcttaagttaacatcttatgatgtttgcttcatctactatattattattttatttatttatttatttatttattttgagacagagtcccactttgtcacccaagttggagtgcaatggcctgatctcggctcactgcaacctccgcctcctgggtttaagtgattctaccgcctcagcctcccaaggagctgggattacaggcacccgccatcatgcccagctaacttttgtattgttttagttgagacgggttttcaccatgttggtcaggctggtctcgaactcctgacctcaggtgatccacccaccttggcctcccaaagtgctgcgattacaggcgtgagccactgtgcccagcctgctatattatttttactttcgttttattttaaagtaaattataggcaaatacatgaattctatcccttaatatttaagtaagtatatctctcttaaaaatgttattttgctacatcatcataaaacctttttttttttttggagacggagtctctgttgccaggctagagtgcagtggcgcaatcttggctcactgcaacctctgcctcctgggttcaattgattctcctgcctcagccttt

SEQ ID NO: 417 - DNA, 32742 bp, Homo sapiens
  source 1..32742: mol_type = other DNA
acagataccctccttccggccgcgccactcgggaggcggatcccgtgggcctgaggaggcttcccccgcccggtttgctttccctccctcgctggcgctgccgcgagtccaccgagcggcctctgaggagcagccgcaggaggaggaggaggtcgtcgggggcggcgggcggagaccgcgctctcgcttccccggcggcggcaagggcaggacaatggaggtggcggtggagaaggcggtggcggcggcggcagcggcctcggctgcggcctccggggggccctcggcggcgccgagcggggagaacgaggccgagagtcggcagggcccggactcggagcgcggcggcgaggcggcccggctcaacctgttggacacttgcgccgtgtgccaccagaacatccagagccgggcgcccaagctgctgccctgcctgcactctttctgccagcgctgcctgcccgcgccccagcgctacctcatgctgcccgcgcccatgctgggctcggccgagaccccgccacccgtccctgcccccggctcgccggtcagcggctcgtcgccgttcgccacccaaggtgagaaccggccgcggccgctggggagcccggggagagggccaggagggggcgggcgcccttgtgcggcgcgacccgctgtcatgtcgccgccgcccggggtgcgcggcgggggaggggcgagcaggagggtctgtgctggcgacggtgacatggagggcccgcgctctgcggcgtgtcgcgctcggccagcaacttccccgggcgctgtggacttgaccgcgccgccgccgccgccgctgctccgcattctcaacagccgggcggcccctgccactcgcacttttgcagacctctgtcggagtctcctgcagccggaatctcgggttctttgccggctgcagccagttaactgctacccgcccgctgcctccacaaagctttgtccaggtccatatgatcctgatcatctcgtctatactcacgttatttgagctgcaggggagaagggagggatgaagatgaagtgatggtgactttctttgatgattgattgcagatcggatgtcatttatttcttatcttgcatgtttggggctctttaccttaatgagttcccagttctcttccctctcctctgctggggacaaaggaaccaagagacgttgttttgttgtgtgtctctttcaaaggttttattttgagacggcgaagagaaataatacaaagtgatttgggttttctggtattttatagataaagctggaagttactgttctctttgtggtgtttattactgtaaaattagacttttgacaggtgttccattgctaactttgacaggtttgaaacatttaaagtaagtttgagtacagtttcgggtagaacacttggcggtttttaaattttattattgcaaatatttgagcacctcctttttaaaaatacagtgtaactggaaaagcatttttaatactttttagaggaaatagttgatttagtttgaaataaaatgctaattaagtaattatgctaggtcaaggggcgtatgaaatggatacttcaaatagattgtgggctgagactcatttatttgactgcatgttaggagcagtatccacttgtaggagacagttttccgtgggtctccgtttcttcactcttgccagcacccttgccagcgagatactgactgccctttgtttctattttttcacggatattatctaaagagcagccttggaagatagagatagtgtcttccaccagagcaaaaggcggggatacatattatccagtataataagaataacgtctccctctggagcgaaagggtaggcatgcttactgcccatcttaaaagattagggttccctaagcttagggttcctctcctgtagagaaggaactgcctgtgtagatgtcaactggctctctttacgttgtccaatgggaacctggagttctgagaactagtgcaaaaatcttttttttttttttttttttgagacggagtctcgctctgtcgcccaggctggagtgcagtggcgcgatctcggctcactgcaagctccgcctcccgggttcacgccattctcctgcctcagcctcccgagtagctgggactacaggcgcccgctaccacgcccggctaattttttgtatttttagtagagacggggtttcaccgtgttagccaggatggtctcgatctcctgacctcgtgatccgcccgcctcggcctcccaaagtgctgggattacaggcgtgagccaccgcgcccggccaaaaatcttgatgatgctttggcttatgctgttcctgtgagtaaaaaacaaactgccctgtgtctctgacccttgaatgtcttctgtcaccatccatgaaactggtaaggttatttgttagcttgcaggttggacactctcagatccttcgcagtagtttgctctgaagaggcccacgactggaaagttcgaacaggtgaaagcttaaaccttagttcttatttatttatttatttattttttttttgagacggagtctcgctcttcttgcccaggctggagtgcagtggtgcgatcttggctcaccgcaacctctgcctcctaggttcaagcgattgtcctgtctcagcctcccgagtagctgggattacaggcatgcgccaccacgtccggctaattttgtgttttttttttttttttttttttttttggtagaggcggggttactccatgttggtcaggctggtcttgaactcccgacctcaggtgatccgcccaccttggcttcccaaagtgctgggattacaagtgtgagccaccgcacctggcctgttcttatttcttagacacagtttaaggttggtttttccttccttccttccttctttcctgcgttcttaccttcctaccttcttaccttcctacctcgctttgtcgttcaggctggagtgcagtggcacaatctcagctcactgcaacctctgcctccctggttcaagcgattcttgtgcctcagctgggcgccacacctggctaatttgtgttttgttttagtagagacggagttttgccatgttggccaggctggtctcgaacttctgacctcaggtgatccacctgccacagcctctgtaggtgctgggattacaggtgtgagccaccccacccgtcctcttccatttatattttaaatggttaaacaggcttgtagccaattaagatctgaattgtgcatgattatagaattatgacatattgtttgcctggccatgacatatggacttgaattaatgagaacatgggtcgtaaagttatcatcctcaattctgagacaagtttgtgattccatacttctcaaaatgttctgtgtaattacaatctgaatattttttatctttatgctgtattgtacgcaagagttcaaagaaagcgtttaaattggaagatgtttttgtttttatactaggaaaaacgttttaacaaattgtacttaaaagtacacctaaaaagaattaaagttatctttaaaaaattaaaaatgctatcctgagtcttagtgacttgggtattttgtccctttatctctccttgcatacttattttaatactagctgaagcaaaaatttagactttttttttttttttttttttttgagacggagtctcgctctgtcgcccgggctggagtgcagtggtgcgatctcggctcactgctagctctgcctcccgggttcaggccattctcctgcctcagcctcctgagtagctgggactacaggaacatgccaccacgcccggctaatttttttatattttttagtagagacggggtttcaccgtgttagccaggatggtctcgatctcctgaccttgtgatccgcctgccttggcccccagaagtgctgggattacaggtgtgagccaccgcagccagccaaatttagacattgcttaactaaataacgggttcatttgatcaaaccagttcttcattttcctactgaatttgtgagtacaggcatcacaagtcaagtaatatctattacacaaaggttaaataggtagttgggatggagaactgtgtgagccttggggtaaaatggtaggaaatgatggggagtacaagcaggggggcagactcttcttagctatagcaatttgtcatgtgagtgcagggcaagtattgaaggatcttttatttatttaatgcaaattctgaatctggatttttgaacaaaatttttctagtattagatattgtcaactaattaaaaatgtgtgaatatttatacacataaatatatatacacacacacaattaatttatgggcccatgctataggccaaacaataggtttgttgaggccaaatatgttatatttcatacactttttagatttcaaaaactggagattttcaaactttaacaccactaaactttaacacctaaaaaaaatttagatttttaggcccctccctcctgaaaatctgattctacctaatctggcgtagttgcagaatgctagggtataatacagttacactctagaattgtttctttaatgcaagcagtattctaaaactgtttcagatctagtttccctttctataaaatacttttcatgctctctttgtcatcctaaatgaatttcatggggaaaaaaaatcctaacacatttttcttacaaaagtaaacataatgtttgaactgttttaaaggagaaataaaatgaagcaaataacagcagaaaagtataatttataaatgctcagatacaattacactggccaccaagctcccattgagaacatttgttttaaaacttcggtttaactgtccttttttctcaggctacatgttggaaggaatgagggtgaatgaccacaagttaaaattggatgactccttcagtcttgactgtcattttcttagtatgcagttatatctaggagagaggcaaaactttaggaaatggattttcttttacgtatgttaagaaaacaaactgatcttagagaaatgttataatattgtgtagtattttgtgttgttaacgtactgttcagctaatgagtagcaaactgggagtttgagagcagttttttcctctctacctaaaagacaatattgaagagctatttttaacaaatactgagaacatacttttgaaaggtattatttgtctagagagggttaaaatataagactaaatcccttttccaagatttctttactaactggcagtatacaagatacgtaactattctgggactgatttcttggcaaaaagtataaatcatctcatgagtgcaatctttaatggcaaaggattaatatttaagaatgatctgtgttacctgtcagtcctatatatataaaaatatacatatttttattcacctgttagtaggtatcagtattttttagtttggagctattatgaataaaacttaaaggtatttgtagaaaagtcttggtgtggatacattgtcatttccctgaggaaataacttagaattggaatttcttgtttttatgataaatgtatgtttacactgcttgtactactttatagaccctccagcagttctctccaaagtttgttcacactctccccagttttgggtattgtctttaaaagttttttttgtttttgtttttgagacggagtctcactctgtcgcccaggctggagtgcagtggtgccatcttggctcactgcaacctccacctccagggttcaggcgattctcctgcctcagcctcccaagcagctgggattacactacacctggctaatttttttgtatttttagtagagacagggtttcaccatgttggccaggctggtcttgaactcttgacctcaggtgatccacccgcctcggcctcccgaagtgctgggattacaggcgtgagccactgtgcctggcctgtcagtctgttaaattttaaccattctagtaggtgagaaaagctatctcatggttttggttttcatttctctgatgaataatgatgagcatcttttcttgtgcttagtagtcattcttttttggtgagattttggtttgtcttttgcaaatttcaaaacttaagttgcttttttttttttttttttggagacagcatctcactgtgttgcccatactggagtgcagtggcgccatctcagcccactgcaacctccgccatgttgctcaggctggtctctcaactcctgagctcaagtgatcacccatctcgtctcccaaagtgctgggattatgggcgtgagccaccacgcctggctgggagtttgcctttttattgaaacgtaaagttctttatatatattctatatctaggtcctttgtcagatacatgtattgcaggtattgactctggcttgcatgctcattttcttggtgtcttttgaagagctaaaggtttaaattttgattaagtctggtttatcaatttattttatggttaatgacttttgtgtcctatctaacaattttttgcctaccccaagtttactaagattttctccactttttaacccagcatttttatagttttagctttaaaatataaacctgtaatccattttgtgagttattttttgtgtgaggttgaggttcatttttttaaaaactgtatgttaaaacaccatttattaaagacagtactttttcattatattattttggcatttttatacaaaaatcagccatctgtgtgtggtctgttctttattgatttgtccattcagctaatacataatgttttttgattacagtactcttctcagcaaattttgaaatttgacagtttgttctttttcaaaattcttatgattctttgaagtcatttgcatttctttacattttagaatcagcttttcagtttctacacaaaagtctgtcatggttttgattggaattacattgaatctagatatcaatttgggtaagggggaatgtgttttgttttgttttgttttgttttgtttttttgagatgagtcttgctctgttaccaggctggagtgcagtaatgtgatctctgctcactgcaacctccgcctcccaggttcaagtgattctcctgcctcagcctcctgagtagctgggactataggcatgcgccactacgcccagctgatttttgtattttttagtagagacggggtttcaccatgttggccaggatggtctcgatctcttgacctggtgatctgcccgcctcggcctcccaaagtgctgatattgacaggcgtgagccactgcacccagccataatgttcttaacaatattggttcttccaatctgtgaatatgtgttatctcttaaattctcggcactgtcttgtggttttcattgtagcattcttgtacaatttttgtttacatagtataaatattaaacattttataatgttaaatgatatcgtatatgatatttttaaaattttcatttcaaactgttggtagtatattgaaatacgattattggtttcatcccattatcttgctaaattcgattattaagtatcttttttttttgtttcaaggactccttaggattttctatgtagtctacagggagatagctttacttcttgctttctattcttaataatttatgtcttcttattgcaccagcaaggactccaatacaatattgactagaagttgaatttcagtattaaatgagaaaggatttccttaccttattcctcatcttaggaggaaaacactcaatttttcaccattaatatgttagctgttttctatagatgcccattatcaaaatgaagaagttcccttctatttttaatatgctgagaatttttattatgaatgggtgatgaattttgccatgtacttttcctgtgtctattgaaatggtcatgcaatttgtctcctttttttgttaatgtatgaattacgttgatttttagatgttaaatcaatcttgcattcttgagatatacctcacttggttttgctacaggtattttgaagcttttatgaattgcctgcccttttttaaggtgaaatgttctttgcttcctataatgctatgttatggtctactttgcctgatattaatgccattgtttttttaatctatgtgtttgaatggtatatttttcccatgcttttacttctagctttttaaagtatctcgtagatagcgtatagttgtcttacttttttatcccagcttttaatttttgcttttgtttaatccatttatattttatgtaattgttggtatggcaaggtttaagactgacatctttttatttgttttctctttgttcctgcttggcctccagtatctttgcttctctctcaatcccttagcagctgctctctggtaaacttcccatggacttgctctgcacatgcgtagtagccttcagccaaggacttggcaaaacccttacatagactactggcaccctttctctgttcagctcccttctcccaagtgctttgccctatatattccatctggttcacaatccccgaatctctctggctcctttgctatgttctgcattggctgtagctccatgaaccatgatcacaaaatagtcctcagttagggaatcaagatttagggggcttattcacctgagcttttctttcctcatggatcacagtactgcattgccttttgtccattgtctgaaaagttgcctaaggtatctgtcctggtaatatacagtaattaatgacaggaaagcttgtctcagtactagttactctattcctggtggaaaactgatgtcagaagaatgctttttaatttcattgtacctttttaaatatacccaaatgtgggtaatttgtaaactttcatttttaggtctctagatttctctgtttaatttttcttcaagaagttaaactatcaactagatgcacaagtttttcaaatttctttctgcaatgtaaccttgacccctttctcaatttttttttttttttttgagacagtgtctcgtgcagtggccatcttggctcactgcaacctccacctccccggttcaaacaattctcctgcgtcagcctcccaagtagctgagattacaggcacacaccaccacaccttgctaatttttttgtatttttagtacagacgggattttaccctgttggccttgaactgctgacctcaggtaatccacctgcctcagcctcccaaagtgctgggattacaggtgtgagctgccgagccctttcttaattttactccagcattttgaatacacacttagaccagtagtctccaaaatggcatgactaagtgccattatattttattctgtaatgtggtgtggcacaccacatatgcaataaaatatccattcaggtgagggaagacattagaacttcttttcagaaattgagctttaaagtacttgatatatagtttgtcacagtcacatgaataagcatgtcaaatggctacatttcacatatgctgtatggagtatcctgagagaagggattaaggctgcctcaagcccaaatggtatttgtgtgagttagaaattaagagtcctcttgacatacaggaccaaaggatgtgtgccttaggaagtggaatgtggacccccatttgcctgtaagtctacatttcccctccagtcaggcagttccttgtactgtataacctatcttaactgtacacagctgccctagaggtcatgggatttcgatactgcagactctgttgtttgtttttgcctcctacaagtataattttttttttttttttttttttttttgagatggagtctctctctgtcaccaggctggagtgcagtggtgtgatcttggctcactgcaacctctgcctcctgggttcaggcgatcctcctgcctcagcctcccaagtagctgggagcataggcgtgtgccaccacacccagctagtttttgtgtttttagtagagacagggtttcactatgttggtcaggatggtctcaatctcttgatctgcccacctcggcctcccaaagtgctgggattacagatgcgagccatcgcgcccagtctttgtaacataattttatatgtacttgtaaaaataggtttatgggttttaatatctgtttttaactaaatgtctgtcaaaaaatagaagattatggtaggccattaccaggcctctggcataaaacccttaatctcatttcctagggaagtcccatatggaggctgctcacaaaagccccttaatttcagcagtttgggaagtccctaagttgtaggatatagggtacatgtataataaccttaaaaagtgatcgcttgtttcaattaacgacagagacagttccatttaagtctgtaacttcaccagtgttgtatagatggatgtatacctgtcattcttgggacctgaatatgcaattagctgacaaggggattagctggcaaggagatccctgtcctatagaaagctgtagctgttactgtctcaattttgtgtttcatgttatcagtgtgtggagttgatggagctttaatttttcaccagctttaaattatttgaatcttagaagtcttattttcagttatgataaagatagtactcctttgcaggtagaataacattaaagtggcagagctggcactttataggctcttatcagttttattgtgaggttaacaactgattatctaaccagatctaacaagaagtgggcctaaaagttcaaaattaacaagattactctttgaaattgactgacatcctccattacaaatgatggaccatgcattaagtgtatactgcatctgaaagcattagttgacaatagtgtgaagctatcttgattagcaaaacatttaaaaatatttatttcatcttgattttattccttatatgttttacgctaatatgatttattatgtataggatgtactagcactgtagtatatgtacagtacatgttcaaatatttgtgtctaaaataaacataactattatctgaattgcctcaatatttttgcttttcatctagtctttcaaaacctttttcaaatgccatatcctctttgacattatgaaaccaccttatttctcaaaggactttcttctgattttttttctaatataaataatctataggttctcatctcatagtataataaatttatttttattttatttatttatttatttattttgagacagagtctcactctgtcatccaggctggagtgcagtggtgcaatcttggctcactgcaacctctgtctcctgggttcaagtgattctcatgcctcagcctccccaacagctgggattacaggtgcgcgccaccacagttggctaatttttgtatttttagtagagatggggtttcgccatgttggccaggctggtttcaaactcctcacctcaggtgatccgcctgcctcagcctctcaaagtgctgggattacaggcatgagccaccgcacccggcctggtataatacatttaaaagaaaaatgtcttctataggaattaggaatcctgactaccagaagatctttattttattttgattataggtgaagagtctcccttatatctcttaccaaaggcagcagtgttttacagggtcatgctcctcctgcaaggtcaagtaagagaagactaaaaaaagaaaaaaaaccaaccatggaaaagcatataggtggagagatagatagtgaaagccagattggggtaggttaaacaatgagagggagatgaaaagacatagttggaaagtttagacaactctgaagtggggaggaatgggataaggtaatacttaaggggagaaaaaaaataaaaagttgaggaaggtttctcactttctttttatataaatcaggcttaaaaacatttaaatggacatggaaaggatccacgagaactactgaatttataaaaaaaaaaaaagatttggtgaggcttctgagaaagcagaaaggcattgatctgaggcatgggtagagattggtgactttggataggagacacactttctcttgtgaataggagagaaggtaagaataggtgctaaatacaggtgtgtgtgtcctcaaaatgggtggaatttctgtattctgagccccccactgatttctcccttaaatagaaagtgaggtcgtctgctgagaatgagagggtaacaggagtggaacaaggttgagaagggagttttgaagttgaccaataaaatgtagtgttagtgcaggttgtgttgaggcttgtttggtgctaaagaccatgaattaacaacgatacctatctgtcttcttatagtgctatctagtgcctttttgaagcagggtattttagggcagtgctactcaaggcatgagctgcgaactattagggtctgaaacaagataaggacattgccacagaatgttgaccagtgtactgcttccttcatccagctgaactaaatgtcagctgaactaaatgatcttggttggtttacattctgacacaagctcttaaaaaaattttttttttaaatagaaacagggtctcactttgttagtcaggttgaactcctggactcaagcagttctcctgccttggcctcccattcaatcccttacgatggttaataattccttatgttggctgggtgcgttggctcatgcctgtaatcccaacactttgggaggctgaggcaggcgggttacctgaggtcaggagttcgagaccagtctggccaacatggtgaaaccctgtctctactaaaattacaaaaattaaccaggcgtggtggcatgtgcctgtagttccagctactcgggaggctgaggcaggagaattgcttgaacccaggaggcggaggctgcagttagcctagatcatgccactgcactccagcctgggtgacagaacgagactctgtctcaaaaaaatgataataataattccttaagttaaacttcatttcaaattaatgtgtggtttctctctacttactgtatgcagactgatgcatcattttgggcaacagtgatttgtctttttcaatgccttacattaagaaacacatgattgtctttctgtcccgttgttagtgttggccttgatcacttgtttaaggtggtgactgccagatttctccactctaaagctatctcctcctctccttttgtaattaacaaataaccttttaggagatactttggagtctgtgtgaatattctgttccaaaaaaacttagattggcatccactgatttcttgcctttatcagctattactgtgatagtacaaaatggtttttctatcactgtatgcttactagttgatagtctgctgtatggataaccattttcttttccatttatctatcatggacttatgaaatattttagtcagtatgttatagccattcctttctttacttcttttgacaatcaaattgcccaaatttggacaatagaaacctcttaaagttgacagtcatggctcactacagccttaaccttccaggcctgagccatcctcccacctcagcctcccaagtagctggcaccacaggaatctaccaccatacctggctaatttttatttttattgtagagacgggatctccctacattgctcagtctggtcttggacttctgagctcaagtgatcctcctgccttggcctcccaaagtgctaggattacaggcatgagccatggcacccagttgagcacttttttatttcctggcaaaataagaatttctagatttatcttgtactttttctttttttttttttttgagacggagtcttgctgtatcacccaggctggagtgcagtggcgctatctcagctcactgcaaactctgcctcccgggttcacgccattctcctgcctcagcctcccaagtagctgggactacaggcgtccgctactgcgcccagctaattttttgtatttttagtagagacggggtttcaccatgttagccaggatggtctctatctcctgacctcgtgatctacccgcctcagcctcccaaagtgctgggattacaggtgtgagccaccgcgcccggcctatcttgtactttttctatgccagctctccaaggagccccaattccttattttggtgaaatccagtttatcttttatggattattcttttgtgccatatttaagaaatctttgtctaacacaggtattttatcctgttttcttcttggaagtcccatagttttgaggtttacatttaggtctatgatccattttgagttaatgttggtatgtggtatgagatatggatccaagttcattttatacatggatatgcagtttttctagcattgttgttagaggactgtcctttctccactgcattgtcattgtcaaaaatcagttgtccgtgcatgtctgtgtttatttctggactctcttctgttccattggtctttttgtttatctttacactaatatcatgctgttgagtctgtattaaagccaagagatcttatgtcaggaaaacaatagggaagatgttctgcaggaaatccttgtgtctaactgtagaactaaatttagtgacagagaaaaggggtgacaaagtagtatatacttgttatgcaccctaacaatgtaggtataatacagttattcaagagtataagggatatcatttatgtgaatacttcctgaggaagctgttagagaattaagtttcagacagccaagaaatggtttaataggctcattgattgattgttttataaaacttaaccagggcatcaagagatattactactttaaatagatgctgtgtgttgtggtatgggaatggtgaggggggaagaatggagctaatttctatgttgcttatactagggaatcaaaagatagtatctaacaaagagaggacttaaggatattatataaagataaccattaggacaaaagcccaaacctttctagatagcaaaagaagtattggcagggggaaggaggtggtgggaagggtacagaaaggagagcaaaagaaacaaatacaatgaaattatatattctcactgtgacagaattgagaccatatagtgatattagtaaatgggcttaactggcctattaagagaaaaaatatttttgggttaacatagcaaaatccaactctgtggttttgttttctttcgttgctgttttgagtctgagtcttgctctctcgccctggctatagtgcagtggtgtgatctcactgcaacctccagggttcaggcaattctcctgcctcagcctcccaagcagctgggactacaggagcgatgcaccatacccagctaattttggtattcttggtagagatgacgttttgccatgttggccaagctggtctcgaacacctggcctcagtgatccacccacctcagcatcccaaagtgttggaattacaggcgtgagccactgtgcctagcccaactctgtcttttatataaaagatacatctgcaaaatcgaaaaactcaaagattaggaggttgggcaaagatatgccagacaaatataataaaaaggggttattatagttattttgcgcaaggtaaaactcaggccagaaatcattaaagaggtaggacacattataaataatgctacaagctgcagtctgtaatgaagatacgttattgggtgcatggatattcatgacagctttcatttaaaaaaaagaagcttcaggagagtcattaagagttaggagcatattaataatagaagacctaaaatccatctcagttcaagatagatcaactggacaaaaacttcagtaaggctattgaggacctagattaacacaactgaaaggtagatcttagggtcatctattgcatataagagaatatacatttttgtaaatgcgcatgggatgctcatgaaagatgattattgaggtacaaagaaaactcttaaaaatttctcccaggccgggcgtggtggctcacgcctgtaatcccagcactttgggaggccaaggtgggtggatcatgaggtcaggagtccgagaccagcctgaccaacatggtgaaatcctgtctctactaaaaatacaaaaattagccgggcatggtggcgtgcgcctgtaatcccagttactcaggaggctgaggcaggagaaatgcttgaacctgggaggcggaggttgcagtgagctgagatcatgccactgcactccagcctgggcgacagagcgaggctccgtctcaaaaaaaaaaaaaaaaagaaattcccccaaaataggtacagcattatactttgacattatactttttgggtgaaactgaggaaaggaagataatccattatattgccggtgggaatgcagaatgctaaaactggaagggaatttggtaatatctagtaaaatgcaaatgcatttcctcattgacctggcaatctccacttctaggaatgtatctcagagatacaaatgcaaaataataaagtgaggcgtgcacagtgttatttgtctgtagcactgttgataataataaaagattgatatgaccaccaataaatgactggtggaataaactatggtatattactgtgccgatgtaaaaaaggaatgaaaaagatatgaatactgctgtggagtgaattccatgatgtactgttaagtagaaatcaaggtgcagaagaatgagtattatatgctaccctttgtgtctctgtgtgtgtgtgtgtttcttagctctatccactaaaaggatctaaagcaacagtatctccatgacaataagaaaaagagaaaatatgtgcttatatttacaaataaacaacggaggccaggcatggtggctcacacctgtaatcccacactttgggaggctgaggcaggagaactgcttgaacccaggaggcagaggttgcagtgagcggagatcaggccactgcactccagcctgggagacaaacagagactccacctcaaaaaacaaacaacagaagaataaataattaaaaatgactgctagcgaggcaagaaaaagttgggaaggaattagagaagaaaattagacctctgtaaatgtaactggttcacagtattgactttggaactatgtaaatgttttatgaaactgaacaaatataagtaactctccctgcttccccagcaaacaaaacaaatgaacgttgttctgtatcaaccagatagttttacctacatagtaaaggatttttgaaactgatttttaaatcacaatattgattgtgcattcctagtatgctatattgtaagcacaaaaaaacttatattgcattcagtggtgtgtttttagtggttatgttggtattttgaaactattcaggtttcatgtgaggtaaagcaagcagatacttgtggtaatatcattaggcatagaaattctcaggataatgatgaaggaaagctccaggatggcagcttgcagcaggcttgaaaaggtttggagctggatgaaggacttcatatttcagagaaggatacatttgagggcacaaatgtaaaactgtttgattagctgatatatttgaacatattgaaaagggtttgcagttctgtcggaaagtttgctgctgatttagtgataaatacttaaaaactaagcagatttttaaaatgcaggcaattgataattcgagaatgaaattgcttgagaaaggaaatactgtactatgctctgcacctcagttgtgaatattattaaatgtttataatatataaacatgttttatttatcagatttccaactaaaattataaatttgttggaaaactaatagaaataaatgtcaggaggataaggagggaaagattttttgatggggtcttacctacattttccactgtaaggctggacaggtaagccttgtggtttataaatcttggaatgttgtaatttaaaaagaaattggtttatgtactagtataattaaaggaaactgagaagtatattgattaatattataggtcagggtaaattattttgttttgggcacagtggttcatgcctgtaatcccagcactctggaaggctgaggcaggaggatcgcttgagactaattcaagaccagcctgagcagcatagcaaaaaccctgtctttttatttatttatttatttttgaggcagcatcttactctgcggcccaggctagagtgcagtagtgcaaacacagcttacttcagcctttatcccctgggctgaagtgatcctcctaccttagcctcttgagtagctgggacaacaggtgcatgctaccacacccagctagtttttgtttattttagaactcagggattcatgaatgggcagtatcagttgagcaagtggctcagtgctccaaagaaggggcaggagagggaaactttgataaggtgttcttggcatcaagacagtagaaagtacctagttagaggctagttggcagtttctgattcataaagtcactagaggttagttggtggtttctgattagttaagcttaagttcactttgagtttggtttctttttgcttaaataggaacccaaggtgctgtggccatctcagcatagtggccttccaattcattattttaatagggattaagaagactaaaagttaaggctccatccttgactttttaaaaaagcttaatcttcccttaacaaattctgtcaattctcctttctacatctcagaaatcggttgccttctttttatcttcatttcctgaggtcatttcagctgcttcctaattgtccttcctacctctgagggtgccttctcatttttgttgaagaggtctccccaccatgaactgaaaacttaggatgcttaagcttttcaaaaagtgtgagggaaacacatgtacaattaacatattaagtgaataattatataaccaccacttagatcaagaaacacacatagccagtaaccccaaaagttccttgtctgctatatttttatcactccttccctttcccttagaagttaaccgtttgtccaaccttttttttttcttcttcttcttctttttgacagggtcttgctctgtcacctaggccagagtgtagtggtgcaatcagggatcactgcagcctttatctgccaggttcaaatgatcctccagccgtagactcctgagtagctgggcgtgtgtcaccatgcctgaatgagacggagttttgctcttgttgcccaggctggagtgcagtggcgggatgttggctcaccgcaatctctgcctcctgggttcaagcaattctcctgcctcagcctcccaagtagctgggattacaggcatgtgacgcctggctaattttgtattttttagtagatatggggtttctccatgttggtcaggctggtctcgaactcccgatctcaggtgatctgcctgccttggcctcccaaagtgctgggattacaggcgtgccactgcgcccggcatttattttattttttaattttatttttttttgagacagagttttgctcttgttgcccagactggagtgcaatggtgcgagctcagctcactgcagcttctgcccccgggttcaagcgattctcccacctcagccttccaagcagctgggattacagacatgcgccaacacctccggctaatttttgtgtttttagtagagacagggtttcgccatgttggccaggctggtctcaaactcctgaactcaggtgatccactagcttcagcctcccaaagtgctgggattacaggtgtaagccaccgcacccgggccatgaattaagtttttaaatttttttttgtagtgacgaggtctcacttttacctaggctggtcttgaactcctgaggtcaagcagtcctaccacctcagtctcccaaagttctgggaatacaggcgtgaggcactgcacttggcctgccccacttttatgttaacaattccttcatttacgtaatggtgaatgctgtaacctagctttgtctgttttgggactttgtgtgaaaggaatggtgctggtgtattttatttcttcctatcttcatttaacattgaagggatcatccatgttgttgcatatagctatagtttattcatttttaatgctatataatactttgcacaaatataccacaattaaattttccattctgttattgctgtgtattggaaatgttgcctgttttttgctctttttaaagcaatgaagctattaacattcttgttaatatatcctgctgttcgtatatgtgagtcctgaggttttggtgtgtgggtgtttttttgttttgttttgtttttttaaatacggtaaggcagaattcctgatcatagagaaggtgaacgctcaagttaacttaccaactctcatatacccactagcagttcatgtatgttcctgttggctcagatgtagatgttcactaacattttgtattatcaatctttttattttttggcaacctcgtgggtgtttcctgttaacttattgggatctgagaagcttttcctaagtaccagttaggttgagcactttccatatccatcatttagatttcagctattgtgaagcacttgtttgagtctctcctattttttctttttgttgggttatttaaactttttttttcattttttaaaaagttattattattattattttttaagacagagtttcactcttgttgctcaggctggagtgcaatggtgtgatctcagcttgctgcaacctctgacccccaggttcaagcgattctcctgcctcagcctcccgagtagtagggattacaggcatgcgccactacgcccggctaattttgtatttttagtagagatggggtttctccatgttggtcgggctggtctcaaactcccgagctcagtgattcacctgccttggcctcccaagttattattttttttatgagacttgatcttgttgtgttgtccaggctggtctcaaactcctgggctcaagcaatccttctgcctcagcctcccaaatatctgggatgacaagtatgcgccaccgtgtctggctattttaattttaataggagttattttatattctcgctatcttcttccattctgtttgccttttttatagggtcttttattttttgaatttgaatttttgaattttatgaatctctgtggtaagtactctcgttttaagaatctttctgggctgggcgctgtagctcacacctgtaatcccagtactgtgggaggatcactcgagcccaggagtttgagactagtgtgggcaacatagggagaccttatctcaatacaaacaaacaaacaaacaaaacgagccaggcatggtggcacaagcctgtgatctcaactacttgagaggctaatgtgggaagattgcttggacccaggaggacccagggctgcagtgagccttcatcataccacagcactccagcctgagtaacagagcaagaccctgtctccaaaaaaaaagaaaaaagaaaatattttattttaaaagctctataatttttccttcacatttgggttttcgtttcatctgcagttgatttatgtgtatggtgaggttgcagtccagtttcactttctacctgctatccaagccccattagcggaaaatagtaccattcttttcccagtgctctacaccgccgtgcttataattatgtatgcgtgagtctgtttcttccttagcgtctgatttctctttctcaggcagttttaatctgttgatctatttgttactacctgcaccagggccacacttttttttccttttagaaaaaagggtcttgctatgttgcccaatttggtctcgtactcctgacctcaaattgtcctcctgtcttggtcttgggattacaggcatgaaccactgcttggcccacattctctttacagtagtttttgacagctggcaaagcaagtccttatgtaaccccttaccaatacctgtaattatttttcagaagcatcttctaattgttttttagctatttgaattatcacataagaatccacctgtcaggtttcacaaaaaaacatgataggctattgggattatgagaaattgataaaaaaaatcactttggggagaatattattatgcttcttaatttttttcctttaagtcagatgggtagcgtggtagcatcctaacaaagtttgaaggaggcacatcgtacacatatgcctgaaaacctgatcatcatgcttatgaaccacaaaaggatcttatgctttctttaccgactcgttaagtataattattcccattgagattttgcaagtcttctcttaaagtttttctaggtacttgataggttatgatgctactgtaaatgatattccattttaacttcattctacctttttgttcctggtaaatataaatacaaatgtgtggggttttttttcctttttattattttttgtagtgatggtgtctcactatgttgcccaggtgggtcttgaactcctggactcaagtgatcctctcactttggcctctcaaaatgctgagagcttttggccactgtgcctggcccaaatatgttttatgtcttaatttgtttttgtttttttgagccacagtctccttctgtcacccaggctggagtgcagtggcacagtcagggatcactgcagcctcagcctcctgggctcaagtcatcttcccacctcatcctctcgagtagctgggactacaggcatgtaccaccatgctcagctaatttttcctcatttttgtagcggggggggtctcactttgttgcccaggctggtgtcaaatccctacactcctctggcctcaaatgcctacactcctctggccttggcctcccaaagtgctgggatcctaggcattagccactgtgcctggacccaaatgttaaaaaatttttttttcaataactttgttaaatctttctaattctagtaagttctctgtagctttgtttggcttctcttgtatctaatcatatcatctgtgaataatgacagtgtttattatttccaatctttatgccttttctttttcttgctttatcatgctgcctaaattctccattgttgaataaaagtcaagccagtggaaatttatcttgttcctgatctcagaaaggaagcttcaacattacaccattaaataggaagtttgctgtaggattttatatagatcttttataagcatatagatattcccattggtgagggagggattcctgccataggattatgaggttggcccaatacataacaactgacactgggcagatgaaattgacaacagtttattagtcacatagacttgtatagccctggggaggacactacattgccaggcagggccacatgatggttgcacttgggacggagtaaacaaacagggactgtgggaggtagcctttttatgtagtatcatgaaagtggggtgcccctggttcccacaggaggatgagattggcttgtttgaataattatataggttggcaaggaactgaaactcaatatttaagcataagcagaaattgtgcctggtcgctttgataaagagtatttggttaagggaccctctctgtggaagtagagtggggaggagaacttgtggttaggctgttcaaagtcctcccggttttaccagaatcaaggcagtacataatattgaacctcaattctaggccatatacctccccatttattttctaatattcacagaggcatgtgtgtctgtgagtgtatctttttgatcataaatagattttttttttttttgagacggagtttcgctcttgttgcccaggctggagtgcaatggcgcgatcttgtctcacctcaacctccgcctcccgggttcaagttattctcctgcctcaacctcctgagtagctgggattacaggcatgtgccaccatgcctggctaattttgtatttttagtagagatggtgtttcaccatgttggtcagactggtctggaactcttaccctcaggtgatccacccacctaggcctcccaaagtactgggattataggcatgagccaccacgcctggccttagatttttttttttttaatatactttttcttatgtatctagtgaaagcataattgttcctttaatctgttaggtggtgagttctaagaattgattttctaatagtaaaataaactttcctaggcagaagtctactttgtgatggcatattattcttttcacatgctgtaggatttggtttgctaatactttgtttattacttttatgtttatgaattaccttggcctgtggtttttctttgtaatactgcccttatgaatttttttgtagagttaggcgaacttcataaaatgaattacagagtgctactgatttaatttccctgaaggaatttcatgatacttacaatccctgtgtaagtttggaattaaagtatttcttgaatatatggtagcagtcagggactgggcctttctttgtgggaagattttaactctggattcagttttcgtaaaggtttatctataggactctattctacttgagatactatggtagacagtttctttttttctaggaatttatacattttatataaattttcaattttattgatataggtagttgataataacctcttggtaattctttctctgtgtcatctaacgttatgaattttctttttcattcccagtgctgattttataggccttccctatttctttctctttcctcaatatggattttcaattttattggtttctttgaaaaaatacattaatcgttctgtttcattttattaatttccttttatttgggaatattttactatgccttgtcaatgttttgagtacttttttttacagtagtaaaatatacataacataaaatttactactttaatcatattcaagtatataattctgtggcattaagtacattcatagtgttctgtaactttcactgctatttccagaactttttcatcatcctgagaagaactttttttttttttaattatactttaagttctagggtacatgtgcacaatgtgcaggtttgttacatatatatgcatgtgccatgttggtttgctgcacccattaactcatcatttacattaggtatttctcttaatgctgtgcctcccccatcccctcaccccatgacagtccctggtgtgtgatgttctctgccctgtgtccaagtgttctcattgttcagttcccacctatgagtgagaacatgcagcatttggttttctgtttgctcagaatgatggtttccagcttcatccatgtccctacaaaggacatgaactcatccttttttatggctgcatagtattccatggtgtatatgcgccacattttcttaatccagtctatcactgatggacatttgggttggttccaagtctctcctgttgtcagtagtgccacaataaacatacatgtgcatgtctttatagtagcatgatttataatcctttgggtatatacccagtaatgggatcactgggtcaaatggtatttctagttctagatccttgaggaatcgccacactgtcttccacaatggttaaaccagtttacactcccaccaacagtgtaaaagtgttcctatttctccacatcctctccagcacctgttgtttcctgactttttaatgatcgccattctaactggtgtgagatggtatctcattgtggttttgatttgtatttctctgatgaccagtgatgatgagcatttttcatgtgtccgttggctgcatacatgttttcttttgaaaagtgtctgttcatattctttgcccactttttgatggggttgtttgatttttttcttgtaaatttacattctttgtagattctggatattagccctttgtcagataggtaaattgcaaaaattttttcccattctgtaggttgcctgttcactctaatggcagtttcttttgctgtgcagaagttctttagtttaattagatcccatttgtctattttggcttttgttgccattgcttttggtgttttagtcatgaagtccttgcccatgcctatgtcctgaatggtattgcctaggttttcttctagggtttttatggttttaggtctaacatttaagtctttaatccatcttgaattaatttttgtataaggtgtaaggaagggatccggtttcagctttctacatatggctagccagtgttcccaaaaccatttattaaatagggaatcctttccccatttcttgtttttgtcaggtttgtcgaagatcagatggttatagatgtctgatgttatttctgaggcctgtattctgtcctactggtctgtatctctgttttggtcccagtaccatgctgttttggttactgtagccttgtagtgtactttgaagtcaggtagcatgatgcctccagctttgttctttttgcttaggattgtcttggcaatgcgggctcttttatggttccatatgaactttaaagtagtttttttccagttctgtgaagacagtcattggtaacttgatggggatggcattgaatctataaactaccttgggcagtatggccaatttcacaatattgattcttcctatccatgagcctggaatgttcttccatttgtttgtgtcctcttttattttgttgagcagtggtttgtagttctccttgaagaggtccttcacatcccttgtaagttggattcctaggtattttattctctttgaagcaattgtgaatgggagttcactcatgatttggctctctgtttgtctgttattggcgtataagaatgcttgtgatttttgcaccttgattttgtatcctgagactttgctgaagttgcttatcagcttaaggagattttggactgagacaatggggttttctaaatatacaatcatgtcatctgcaaacagggacaatttgacttcctcttttgctaattgaataccctttatttctttctcttgcctgattgccctggccagaacttccaacactatgttgaacaggagtggtgagagagggcatccctgtcttgtgccaattttcaaagggaatttttcaaaggtcagtttttgcccattcagtatgatattgactgtgggtttgtcataaatagctcttattattttgagatacgttccaccaatacctagtttattgagagtttttagcatgaagggctgttgaattttgtcaaaggccttttctgcatctattgaaataatcatgtagtttttgtctttggttctgtttatgtgatggattacgtttctcaatatgcatatgttgagccagccttgcatcccagggatgaagcccacttgatcttggtgaataagctttttgatatgctgccggatttggtttgccagtattttattgagaattttcacatcgatgttcatcagggatattggtctaaaattctctttttttgttgtgtctctgccagggttggcagatttatgatgctggcctcataaaatgagatagggaggattccctgtttttctgttgattggaatagtttcaaaaggaatggtaccagctcctctttctacctctggtagaattggctgtgaatatgtctggtcctggactttttttcgttggtaggctcttaattattgcctcaatttcagagactgttattggtctattcagggattcaacttcttcctggtttagtcttgggagtgtgtatgtgtccaggaatttatccatttcttctagattttctagcttatttctgtagaggtgttaatagtattctctgatggtagtttgtatttctgtgggatcggtggtgatatcccctttgtcattttttattgcatctatttgattcttctcttttttcttctttattagtcttggtagtgttctatctattttgttgatcttttcaaaaaaaaaacagctcctgaattcatgaattttttgaaggggttttttgtgtctctatctccttcagttctgctctgatcttagttatttcttgccttctgctagcttttgaatttgtttgctcttgcatctctagttcctttaattgtaatgttagggtgtcagttttagatctttcctgctttctcttgtgggcatttagtgctataaatttccctcctcacactgctttaaatgtgtcccagagattctggtacgttgtgtctttgttctcattggtttcaaagaacatctttatttctgccttcattttgttatgtacccagtaatcatttaggagcaggttgttcagttttcatgtagttgtgcggttttaagtgagtttcttagtcctgagttctaatttgattgcacagtggtctgtgagacagtttgttgtgatttctgttcttttacatttactgaggagtgctttacttccaactatgtggtcagttttggaataactgcagtgtggtgctgagaagaatgtatattctgttgatttggggtggagagttctgtagatgtctcttaggtctgcttggtgcaaagctgagttcaagtcttggatatccttgttaaacttctgtctcattgatttgtctaatgttgacagtggggtgttaaagtctcccattattattgtgtgggagtctaagtctctttgtaggtctctaaggacttgctgtatgaatctgggtgctcctgtattgggtgcatatatattcaggttagttagcttttcttgttgaattgatccctttgccattatgtattggccttctttgtctcctttgatctttgttggtttaaagtctgttttatcagagactaggattgcaacctctgctatttttgctttccatttgcttggtagatcttcctccatccctttattttgagcctatgtgtgtctgtgcacgtgagatgggtctcccgaatatagcacactgatgggtcttgactctcgatccaatttgccagtctttgtcttttaattggggcatttagcccatttacatttaaggttaatattgttatgtgtgaatttgatcctgtcattatgatgttagccggttattttgcccgttagttgatgcagtttcttcctagcatcgatggtctttacaatttggcatgtttttgcagtggctggtctcagttgttcctttccatgtttagtgcttcctttaggagctcttgtaaggcaggcctggtggtgacaaaaatctctcagcattttcttgtctataaaggattttatttctccttcacttatcaagcttggtttgactggatgtgaaattctgggttgaaaattcttttctttaagagtgttgaatattggccctcactctcttggcttgtagagtttctgccgagagatccactgttagtctgatgggcttccctttgtgggtaggtaacctgacctttctttctggccgcgcttaacgttttttccttcatttcaactttggtgaatctgacaattatgtgtcttggagttgctcttctcgaggagtatctttgtggtgttctctgtatttcctgaatttgaacgttggcctgccttgctaggttggagaagttctcctggataatatcccgaagagtgttttccagcttggttccattctccccatcactttcaggtataccgatcagacgtagatttggtcttttcacaaagtcccttattccttggaggctttgttcatttctttttactcttttttctctaaacttctcttctcgcttcatttcattcatttgatcttcaatcactgataccctttcttccacttgatcgtgttggctactgaagcttgtgcatgcatcacctagttctcatgccatggttttcagctccataggtcatttaaggtcttctctacactgtttatgctcgttagccattcgtctaatcttttttcaaggtttttagcttccttgtgatgggtttgaacatcctcctttagctcggaaaagtttgttattaccaaccttctgatgcctacttctgtcaactcatcaaagttattctccgtccagctttgttccgttgctggcgaggagctgcgatcttttggagaagaggcgctctggtttttagaattttcagcttttctctgagcagaacttctttacccattaagcaagaactcctccctattgccccttcctcctagcccctggtaacctcttttctgctttcacaaatagaactttttatttgccacaattagaaaacagattattggactgtggttcatatccaacagctcattcaacattagcacgtatctcatccccagttgcttttccagcactgctaccttcactgtgaagctccatgagtttttccagttcaaacctgggcttcttcagcatttttacttttctactgaaaacatcatggagaggagaaatagattggcaagccttttctatgtcttttccagtgctatccggaatcaatgtattgaccacatctttcaagtcatttgtctgtacctgtcaggtcatgatttccagcatcttcttctggatttggcagacctgttggtgcagagcataagagatcttccgtatctgattgttggtttttttagtaaaaccaatacagaacaaatgaaacaagtaatcataagtagtagtcttgatgtcaacatgagcttcaatcatggtgtgccattttttcaccctggaacacattttgtcctggagtaagacccatgccatggaagttaagtcaggcaatttttgccctgaacatctttgataatcagtttgaattttctaaatgcaacttcatcattctgcaagtcaacaaagactcactgcaaacacataacccttgagaccatcagatgcaatttttgttccttggttttggtgattagtgtctttctgatatttcttggacatagcaggagctttcacatcataccaatctttctaagaaaatggatcaactacctttttggctccctttgctgcctttcataaggtgcttgttcttgacaactgctatcgtgctgctcctctttccttctgtccttgggagtttgcctattctagaacctcataaaaatagaattatgcaatatttgtccttttctggtctgacttatttcctttagcatagtattttcaagttttatccatagcatagcacatatcagacatcacttcttatgggtgaataatactccattgtaagggtatagcacattttatttacacattgatcttttagtggatatttaggctgcccactctttagctcttacgaataatactgctacgaacattggtgtccaaatatctgttagtccctgttcttcagttctttttgggtgtataggagtagaatggctgttagctttttggtgaactacaaaactgttaccacagcagctccaccattttgcatcgtgtcagcagtgcacaagagttatagcttctccacatcctggacaacatgtatttttccttttatttatttaattttttggatgagagccatccctagtgggtgtgaagtggtaatctcattgtggttttgatttgcatttcccaaatgatgttgaaaatcatttcatgtgcttgttggttgctgttttttttttgatcttctttggagaaatgtcagataggcacagtggctgaacacttataatcccagctatttgggagtctgtggtggcagggtcacttgagcccaggagttcgagaccagactgagcaacaaagggagaccctgtctctacaacaatgtaagtaaaaaaatttagccaggcatggtggtacatgactgtagtcccagctactcaggaggctgaggcaagaggaacacttgagcctaggaggtggaggctgcagtgagctgtgattgttatcactgtcctctagcctgggcaacaggataatactctgtctccaaaaaaaaaaaaaaaaaaaaaaaaagggaaagaaaataaatgtctattcaagttctttacctatttttgaatttttgttgtaaaagtttatatatcctggatactaagcacttacaagatacatgatgtgcaaatatattctcccattctgtcggttgtcttttttaccgtcttgataatgtcctttgatgtactgtagttttaattttggtgaaggggacatcctgcaaagtagcagagtaggaatttctaggagttaatccttacattgaaacaaccagtaaactggaaaaaatgaccagaatcaacttgcagtctgtggtgccaggggagtgcttgatgaagggagaggctactgctcttgcagaatagtttggggaaagtctcaaatggactgtgccagccatcaacaagcaaaaataagccatcccttagacgttggaaaattatagttgtaaagttaccgcagtaacaagatctgagtttatcctgcttggagcttattgagcatcttacatgcatggattcatgttcttcatcaaatttaggaagtttttaggtattaattattccatatgttttttgcctctttctcttctaggacttgttcaatggtgttccacaggtgccttaggttctgttaattttttctttattttttcattttaatcttcagactggataatttcaattattttatcttcaagtttgctgtttcttcttcctgctcaaatctgccattgtactgctgtatgaatttttcattttagctcttgggcttttcagcttcagaatttcttttt

SEQ ID NO: 418 - DNA, 32742 bp, Homo sapiens
  source 1..32742: mol_type = other DNA
ggcggcgcttgattgggctgggggggccaaataaaagcgatggcgattgggctgccgcgtttggcgctcggtccggtcgcgtccgacacccggtgggactcagaaggcagtggagccccggcggcggcggcggcggcgcgcgggggcgacgcgcgggaacaacgcgagtcggcgcgcgggacgaaggtaacgcgccgctgcgggcggcccggccggcggggctccgggagtgcgaaccgggcggcggcggcggcgccaggacctccccgccactgctgtgccggtcccgggtatcgccgagcggggctcaccggggcgccgcgtttgtaggcgtgcggggggtggagggtgaggggagagcccccctccccggaaggagctgtgagcttcgggctggcccgcgggaccctgcgagtgaggcagcgcacacccctggagctgcggggcggggggcgtgtggggggctcctttcccggtgcttgtcctggccggggcgccggggccggggtcggggcgttccggtgcccggtccagggtggcagctcgagcctcaagtctcctttgtgtggcgcggccgcggcgggagcgcccgggtgggacgggacagacacaagttggtgggacccagccgccgagtccgcactcagacaaaggacggactgtgtctccggagggctcggcgcgaggggaaggggcatgacacccgggcccgccggcgggcgggagaggggcgtggggaggcgcgggccgctgccggggtgggcagggctcggccctcgcctcgcgcacgcccccggtcccgggcgcgccgaccccgggctggggccgcggcgctcgcgggacgacgttcgcggcggggaactcggagtagcttcgcctctgacgtttccccacgacgcaccccgaaatccccctgagctccggcggtcgcgggctgccctcgccgcctggtctggctttatgctaagtttgagggaagagtcgagctgctctgctctctattgattgtgtttctggagggcgtcctgttgaattcccacttcattgtgtacatccccttccgttccccccaaaaatctgtgccacagggttactttttgaaagcgggaggaatcgagaagcacgatcttttggaaaacttggtgaacgcctagtgagttgccactttctaaagaatcgtaatccttaaacattacaagctgttttggccaacttgtgtgatacatctgagaatggcgacaggtgctaacgaaatcaactgtcattcagccagattattccccaaatcccgacgggttgaatgaggatgaggtggtagaagtaggtgatcaaaatagaatggctatgacaaatgtgtgtttagattatacggttagcagtttcttattaattggtctcgttttctgtgaacaatagctttggtgattcagaaaagactgcatggagaaatgtttgttgcctaagaaatttaacgtgtgctgtccacagttaaacttcctttatcacacaggatctgtaacatttaaattcatttggaaataaaaatgtgtctttgctatttacttaaaggcttgctttttagggttcaagcaagttattattagtttaattttgtggcgttttgatgtcatcataaaacagcatttaataaacctttgaaaaacacgaatgctgtcacaattgaatgtagtttatacttttaggggttttggagtttattttctattactcttcataagcattagcaactaattcatgtttaggaatactgtacaagtgtgtaatcctaacttgtttatttgtaattttatttgcaggaaaacaagtatttaagatatattttaattttctattcatggtctctaaagttaggaataggtaggattctagtcatagatataaagcgtcttgttctctcttttcggaggtgtgttgggtgatgtaatatttaaggtttcccggaaacaggaacactgcatcttaaattctcgtttttgtggaaagtgaatatattccaagaaaacaagttagaaaaacataggcgttcttctggttgcactgtcctatatgataaagatctaatgtgcatctgctaacttaaggtttcataaaaatggagacaaataaatgcaatataaatttattacatatattttggagagtgttgacaccactgtacgggcattccaggtgctggtctaagtgttgagacattataacaaaaaagtaacgtttatattagttactattaattctgtatttaaaaaatcctattaataatcttgtccattatgagataaggtagttatgcagatttttggcagaaattcggatattttaggatacatatgtgtgtgtgtgtgtgtgtgtgtgtgtgcgcgcgcgtgtgtgtgtgtgtatatgtttttttttttttgagacagagccttgctctgtcgtccaggctggagtgcagtggctggatctgggctcactacaatctctgcctcccgggtttaaggaattcccctgcctcagcctcccgagtagctggaactacaggcacgcaccacgacacccggctaatttttgtatttttagcagagacagggtttcaccatgttggccaggctggtctcgaactcctgacctgaagtgatgtacccgcctccgcctcccaaaatgctgatccagacgtgagccaccacgcccagcctaggataaaaatttctaactttgcccttgagtgttctctgtatttgataattactattctttgtacttgccatgagatattttgaaaaacatctctttggggaattggtttaaaaattcatattaaattattttctggtacaattgagaatgtatttagtcagtttaagtagcagtgacttaaaacacacttgttgatctagtgtagttagaaaaagttctgatactttgatacctagctttgccttgcacaaatacatttaagtgaatatctttatgttggccatttaaaaattttaggcaaatttctccaagtcatactggaattttcccaggataccttccttcttttgaggtagtgtgctcaaggattctgaatttatttcagtattaccctttacatgagcagtgattgagaaagttgatctgctttttaaaaaccaacaaggacaaatcctccaatataatgtattctgtggttaattagcaatgatttatggattagccttgaagtctttatatcagtatagatgacaaattttctgtaaatcatgatagattctatatgagtaggtgaaatcttcgggggagagcataagtgaacagcagcaattcattaaattcagagaaaggttcatggtcagatgatacatactttaccttctggaggtcttccctgaattcccactcttgtgttcccacagggttttatcatattttattgtagcatgactcaattgtattgtaatcacttgtttatgcatccctctcttccctacagtcaaagtgcctcctggtagaggctctgtcttatttttttctttgtatacctagtacctacgttggtatttgctagagaataggggttttaaatatagttgaatgaattaaggaaatatgaaaaatgtagggaaataatttgacaaaggaacttgcaaagtgaacaggatatgttagtattcatgtgaggaactttgaaatgtgtttttctccctctttaatagggaatgattacaaagaaaaatagttgtcaaggtgaacaagttccaagtttttcctagttataatctgtagtactaaacattagatatcctttagatgcaactattacactcggacaactggagagaacttgatgaatcatctggatatttagtaatagtatttgcttaatttgatttaatgttgatattgatgatctctttgcaaaaatataaggaagggaaagggcgagagagggtagtagatcttttaactgaaaagctgttttgttataattcatgagttctttattggagtaaattgaggtaggttttggagctaaaactgaaggatgtagcgacagtgtaattggatcatttattgggatgcttttcatcattcttttaaaatgatttaaatacagattagcaaatttagtgatacctcaaaagttacagctggtaaatttctaagatagttgcaccattccatatcttgccactgttccactacttggtataaaaatatgacaaatttgtgtttagattatgtggttagcagtttcttaataattggtcttgttttccattaacaatagcaagacagaacaagatcatagctcactgcatccttaaactcctgggctcaagggatcctcctgtctcagcctcctgagtaactggtattaccagtgcacaccattgtggtgacttatttaattttttaattttttgtagagatgggatcctgctttgttgcccacgttgatctcaaactcctggctccaggcaatcctcctgccttggcctcttaaagtacagggatgacaggctgagccattgtgtttgacccagatactttttttttttgagacggagtctcgaaagtgattcttgtgcctcagcctcctgagtagctgggactacaagcgtgcgccaccacgctcggctaatttatttatttattatttattatttatttttttgagatgcagtgtcactctgtcacctagactggagtgcagtggcaccatcttggctcactgcaacctccacctcctgggttcaaatgattctcctgcctcacctctcaagtagttgggattacaggcatgcaccaccaggcctggctaatttttgtatttttagtagtgatgggatttcaccatgttggccaggctggtctcgaactcccgacctcaggtgatccacctgccctggcctcccaaagtactaggattacaggcgtcagtcactgtgcccagcctccgataatttttatattttagtagaaactgggtttcactgtgttggccaggctggtctggaactcctgacctcaagtgattgacctgcctcgtcctcccaaagtggtgggattataggtgtgagccaccacaccctgctgtgttgtttttgtttttgttttttgtttttgtttttgttttttgatatggagtctcacacttgttgcccaggctggagtgcagtggcgtgatctcggctcactgcaacctctgcctcctgggttcaagcgattctcctacctcagcctcccgagtagctgggattacgggaacgcaccaccacacctggctaatttttgtatttttagttgagatggggtttcaccacgttggccaagctagtctcgaactgctgacctcagatgatccgcctgcctcggcctcccaaagtgctgggattacaggcgtgagctactgcgcacgcctggcctggatactttttaaacatttttaaattaaaaatttttttttggagacagggtcttgttgtcacccaggctggagtgcagatgcgtgatctcagttcactgcaacctctgcctcctgggctcaagcgatccttccatctcagcctcccaagtagctgggactacaagtgcatgccaccacgcctggctaatttttgtattttttgtagagacagggttttgccatgttgcccaggctggtcttgaactcctgaactcaagagatccacctacctcagcctcccaaagtgctgggattataggtgtgacccactgcacccagcttttgtttttaatatttgtaagaaccaccttgtgtctgccaacaggcgaattaacaaaatgtggtatataaaccaatgaaaacataaaaggagtgaaataaagacgtaaaaggagtgaaatttcaaaataaaagtaaaaagatttcaaaataattcagacataaaaggagtgaaattctgatacatggatggagctggagaatattatgcttagtgaaataagccagatacaaccttttgtacaaaaatacaaaattgtatgatctcatttatatgaggtagttagaagaggcaactctatggagacagaaagtagaatagaggttaccagggctgtgaggggagaggtgaatggggagtttaatgaatacagagtttctgtttggaatggtgaaaaaattctggagatggataatagtgatggttgaacaatattttgaatatatttaatgccacagaattgtacacttaaaaatggttaaaatggtaaattttacacgatatgtatctgtatctatatatatctctctctatatctatatatcttaccagaatacaaaatttaataacacactccgaaaacctttacagatgaggaaactgaagaaaactgtctacaggggaggagttaagaatttgcccaggattattcagctgggaatttgcattcgggatccaaacttagttctgtttcactacatattatctactccatattatctgttctgtgttatctgctggctttctgggtgattaaagatatgtcagctccgagaagaatgagtttatttgaatcattcagaaagttacatttaaaagtaggtaattgtagtttgatggaaggtacagtgtgaaaccctagacagactaaaggttaactttgaggatttctttctcagccagagtggtaatagtatgcatttgagaggggaggagagtagagttctaaggatgtggtctttggagacagtttcttgggttccagtccctgagctaccaatttgtgtctggggtgttatcctcttgatgtcttagcatccctatctgtaaattggtgaggataatgataacatctgataaggtggttgtgaggattaaaggaattgatacatgtgaaatccttagaactgtacctggcaaaaagtgtttgataaatgattttcagttattgtgccaatattattttagagttgatgtactttctcattaatggaaccaaacacttctcaagttaaaattacgtgcttaggactggtaagttacaaaaatggtaccacacgttttatctatttcaatttagaaatgtctgttgattaaatgtgttcgctttaaactactgaaacaatgtagacatttataaaatgaaagcgtattgatccctgttatctcattcgctacctttaacggtttggtgtatattcttccccaaattttcaaatatattcatatatgaatatgtatttttacatacattttataaaaatgggaccaagttatttggttctaacatggcttttttttaaggtcaatacaaagatctgttttattaaaaaataattgatattcctttagggctcactatatgcttggtactcttctaagtcattattttatatagatactataatatcgagagatggagagattaagtaacaactagttagtggtagaggaaggattttaatttgggtacgttagcttcaaagtcctgatctcccagccagggatcatttttggtaaggcctgtgagctggaaacgttaacacttttaaaagagttgtaaaacaataccaccccacttccctgaagaacatataagggagactagataccgcctgccaagcctaaaatacttaccatgtggccctttacagagaaagtttgctgccccttgctctaagccatccagctgtacctctttggtgtaaggggggtgcatagtattccagtttatgaatgtgcattacgcagcaaaccaatctgttgtgattgacattgttttctctcctgaaaagaagtgaacatccttatgtatctttgaacatttgtgtgacaattttctatagagttggctctttcaagattatgaacatttctagttttaataggtgttgtcaagttatattaatttttagttaaaacaacaactgtattgaagtataatttacatacaataaaaagcacacatttgaagggtatgatttgaggagttttgacaaatgtatgcacctgcaccgctgcctggatcaagatctataatggttgccatcatctcagagtcctttcatcctcttttacagtcattctctcaacttttttttttttccctccaagatggagtcttgctctgtcacccaggctggagtgcaatggcatgatctcggctcactgcaacctccgcctcctgggttcaagcaattctcctgcctcagtctcccgagtagctgggattacaggcgtctgccaccacacccagctaatttttgtagttttaggcgagatctcagctcactgcaaccttgacctcctgggctcaatcgaacctctcacctcagcctcccaagtagctaggaccacaggcatgtaccaccatgcccagctaacatttattattaatatttttttgtagagatggggttttcctgtgtcgcccaggatggtttccaactcctgggctcaaatgattctgccttggcctcccaaagtgttgggattacaggcatgagccgcggcacctgacttgtagtaaactctctgaattaatattccattgtaggcatgtgctacagtttttaaattcatttacccatggatggacacataggactgttgtcagctgttgataaagctgctatcaccatttgtatgtctttcctggacatgttttagtggtaaatattgattttactttgtaagaaaccgttaaactcttttccaaaatagttgtaccattttaaattgaaagttacagttgtaactgtgcaggagttacagtttcttcacattttcattgacacttcgtgttgccagtcttttaaattttggccatcaaatgagtattaagtatctcattgtgggtttgtgtttctcagatgatcaatgatgttggaacatcttttcatatgcttattggccatttgtgtactttttttggttcaagccttttgtccctttaaaaaattggattgtttgtctggttgagtggcaagaggtctttatatgttctgggtacatagtcacattatctgtcagattgtgttgcaaatattttattgttcatttttgtttgattttgtgtatttttaatactataaagatcaagttaaaactttaatatgggaagcataatcagataaattatgtgaaacaaattgtccttaattcacgagtcatttaattagtgtaacaaaatgttatgcatttgcagaaacttgtaaactaaaaggatattattcatatgctgttaggtgtatggatgataattttttttaattaaactagttttgaaaattattgtatttagtaattctcttcattttgcataattcaaaccttttcatttattagtgagttaagccttaaattttttcttcaaaggataaatgagaatattaaaagtaaaaagtgaccttgatcttagaatggggtatgtagaaatgatgattgccaaacttagtttccctactttgacaatcaagtaaaattttttttttttttttttgagacggagtcttgctctgtcccccaggctggagtgcggtggcgcgatctcggctcactgcaagctctgcctcctgggttcacgctgttctcctgcctaagcctcccgtaaatttttttattatagaaatggatggcttttcagattatatatacttggtttctatacactattttatttttgtaaagtagcagttcttttgctcaacacctgaattgcccccacaataaatttttagtttttcttcaatattcaagtaatacataacttttccttttcctgtttaacaaagaaaaaaatatataaagcaagctgttggacctccattgggtgttgtttaccaccactgtaggtgatcgtggcattgtccacctcagtcttctcatggctgtggattcaagttaagaaattcctgaaggtagcattccaggtagtctgtagaacagcccaaactctctgaattagtattatctctgataggtgttttttttttctttgcttttttatttgagacggggttttgctctgtcacccagcctggatttcagtggcacaatcttggcttactgcaacctccacctcctgggctgaaacaatcctcccacatcagtctcctgagtagctgggaccacaggcacatgccaccatgcccagctaattttttatatttttgttagagacagagtttcactatgttgcccaggttggtctcaagattcctgagctcaagcgatgttcccatcttggcctcccaaagtgctgggattacaggcatgagccgctgtgcctggccctggtagttttcttcttatatctttctcctgttgatctcacttgattttcttactagtctacaggaaatttcacgtggagattctgtgcctgtcctctttctggaatatcttccttattttagcatctcaacatgctgttcagcttctggcttgaaaccacccctctcccatcccaaccaagttaagcagcttctttcctgcttagaagtaccataacatgtgtattaatctttttttttttctctctccttcccttcattttaagctcctttttattaatctgtagggcagagcttagaaaaaggtttttgtatattgtaagtactaataaaatatttgtgaagttgatttgggacttgggagacctctcttctgtaagcaactcaataaataattatttaagtaccatcctcacccagtgtactgttagctgctgttatgatattgattactgtaaaattttaaagtatatccttggtagactgttgatcaaagtcagaaagcttgagaaactctgaggcaaaaaaaaaaaaaaaaaaaaaaaatgaagagcatgaaatgattctgcaaactgatcttacaatgatctttctttttttttttttttttttgagacagagtctcactctgtcacccaggctggcgtgcagtggcaggatcttggctcactgcagtctctgcctcccaggttccagtgattctcctgcttcagcctcccaggtagctgggattacaggcacacgccactacgcccggctagtttttgtatttttagtagagatggggtttcactatgttggccagactggtcttgaactcctgacctcaggtgatctgcctgccttggccttgcaaagtgctaggattacaggcatgagccaccatgcccggcctctttttttcttttttcttttcttttttgtacacagtttcactctgttgcccaggctggagtatagtggcgtgatcatagctcactacatcctcagactcctgggttcaggggatcttcccatctcagcctcccaagtagctaggactatagacgtgagacacgatgtctggctaattttttacattttttattttttgtagagttggggtcttatatgttgcccagggtggcctgccaccttgtcctcccaaagctgggattataggcttgaatcagatcccagtgatctttatccctcagctgcatttatatgggctaaattcatacatagtatatcaagatgtcttcaggaagtttaaaaaaaaaaaggtatcaaaaagacagtatgtcatgactgctttatctattttagtctcttagtttttgatactaaagactagaccggagaaatgctttaacaaatcacaaaaatctaagaaaatagacagttaattatttttaaacagtggaagaatttcaatcataattaaagcagcttttgtattttttgatgtcatagcctatagtgaaatttcatatattctgtttgtagatacatgagttcctacgatatgcttgcacataatagaactaattactatttgttgagaacctaacctgtacctaatatacatgtagtttctaaatcaaacattttactttttttaaaaattgtaaaaagcccatagtaaattaatcatgtttaccatttaaaaatgtacagttcagtagtgttaaatacattcacattgttgcacaacagatctctagaacttttttgtcttgcagaactgaaattctgtacccattgagcactaattcccacttccccctccccccaaattcttggcagccacctttctactttctgtttccatgatttttgactgttttagatacttacatgcatgggattaaacagtatttgcccctttgtgattagcttattttgcttagcataatgtcattgaggttcttccatgttgtagcatgtgacagaatttttttcttttctgtaaaggctgtatactatttcgttgtatgtatagactgcattttaaaatccatttatctattggtggacatttgggttgcttggtgatttggtgattcactattcatggttagccaggagtaatatgcagtaaatgttggtatacaaatatctctttgagatcctgctttgaattcttttggatatatggttgcccattgaacaacacagctttgaactatgtggatccatctataagtggatttttttcaaccagccatagatagaaaatatactattcggctgggcgtggtggctgatgcctgtaatcccagcacttgggaggctggggtgggaggatcagttgaggccaggagttcgagaccagcctggacaacatagtgagacctcatctctacaaaaaataaaaaagttagctaggtgtggtggcatgcgcctgtagtttcagctacttaggaggctgagacaggaggattgcttgagcctgggaggtcgaggctgcagtgagctgttattcatgccattgcactccagccagggcaacagaacaagaccctgctcaaaaaaaaaaaaaaagaaaatacactatttgtgggatgtgaaacttgtgtatagggtgggtgggctttttgtatatgcaggttccataggtcagatttgggggtttgagtatgagtgaatttggatgtatacaggtggtcctggaaccagtcttattcttcctcttcttttttttttttttttttttttaattattcgtcttttattttttggaaccactcttctgcatatgctgtgggatgactgtatatccagaattgtgattgctggatcatatggtagttctattttaatgttttgagtaacctcagtactgttttccataatggctgcacgatttttacagtcctacccacagtgcacaaaggtttcgatgtctctgcatccttgccaacacttgttattttctgtttcttttggtagtggccaacataatgggtgtgaggtgctatctcattgtggttttgatttgcattaacaatgttgagtatccttcatgtttattcaccccaaatattttacttttgaatttattgaaaatcatgcattttaattatgtaaaactcaataccatgcatcatttgttaaatgggaaaaggagaatttgtccttatgactattataaaatattctaataaggtgaaccttttttttttttttctttgagacaaggtctcgctgtgtcatccaggctggaatgcagtggcgcagtcttggcttactgcagcctctgcctcctgggttcaagtgattctcctgcctcagcctcctgagtagttggtattacaggtatgcaccaccacacctggctaatttttgcatttttatagagtcggggtttcaccatgttggcctggctggtaataagatgaactttatacttttttttttttttttgagacagagtcccactctgtcacctaggtgcagtggcacgatgatggctcactgcagccttgacctcctgggctcaagtgatcctccacctcagcctctcaggtatctgggattacaggtatgcaccaccacccctagctaatttttgtatttttttgtagagatggggtttcgccatgttgccccggctggtctagaactcctaggatcaagtgatctcccaccttggagtccccaggtgctgggattacaggcatgagccactgcattgggccagaactttatacttattaaacagtatgctgatgataggaaaaaactgtgcaatccttattcataaaattctgatctaaaacgtgttatattaaaattaattaataatgcaagcaaaattggcaaatttatttgtaaaccccattttgggctacttcgaaaattatttatggatcagaaaaggttgggaaatacttttctagagtaattgagcaggccctgtagatggcagaagtgttgcttgaactggcgtagaggaagaaagtgttgaattgccccacttaattccttaagtaattttgcctctttggagaatatttgcctgaaatagagaactcaagttatgctatgaagattctttttgaaaaatagagacagggtctcacattgcccaggctggtctcaaactcgtgggctcaagtgaccctttcaccttggcctcccagagtgcagggattacaggcatgagccatcatgccagaccaagaagatattttggagggctacatcccaccagtagcttgatgttgtacaaagagtggtaggctctgggcgaggctctgccattatactagttgtatttccttggcacgtagcttttgtggatctctcctcttcatggtgacatgaatgagatgaataaataatggaacaacttgtgtttactgagtatctaccatgtatgtgcctgcagagaggatgtcttcattttgcagatgaagtaattagtaaataacttgcctaggttccctcaggtagtgggcccttgaagaatgggcttttatggccaagtgcattggctcacgccagtaatcccagcactttgagcggctgaggtgggaggattgcttgagcccaggagttcaagaccagcctggacaacaaagtgaggccccatttctacaaaaaattagccacatgtggtggcatttgcctgtagtcccagctgcatgggagagtgaggtgagagggtcgcttgagcccagaaggtagagactgcagtgagccgtgtttgcacccctgcactccagcctgtgtgacagagtgagactgtgtctccaaaaaaaaaaaaaaaaaaaaaaaaggctattgctgcctatagggtcctttttagtgcaaatactaggattctaagcacttggtttctgttacccaggtcaaactatttctttggagagtttgattaccatcacaggtgatggtaagattctccctagctggcatttaatccagtggttatatgcatctttcccaaattctttatcaagttggtcaattcatagaacatctaatgctgattataagcctattatcttgcttgtgtctctgcactatgggcataatagcacctaaaagcttttgctataatggactatgatgtatctgaataaattacctttataaacaatcaaatctaaattggcaagttcaaatttacccaatttttcttatagaatttacctttgcagttaaagaaataattgttttttaccatttgtctagtatgacttgttatttacaaatagcatgtaactggccagctgtactatacacattttctagaaaagaaaatttcttcaaatttcttattgggtgccttagtcttttacccattagggctattcaaataaagaatgagatattctcttattctctagaaagagacattctatactaatggaaataccaacttttaaatctagactaccaaaaaaaaagtcatgtttttctaccctagaggctatagattcttaatgtcagccactcatcctggccctctcattttcttcttttcccatatggaagttctagggtgatatagtttggctctgtggccccacccaaatcacgcgtcaaattgtaatccccaaagttggaggaggggtctggtgggaagtgattgaatcatgggggcagacttttcccttgctgttctcctgacagtgagttctcgtgacagtgagttctcgtgagatctggttgtttaaaattatgtagcacctgccactttgctctctcttccccctgcatcagccacgtataatgtgctggcttcccctttgctttccactgtgatgataagtttcctgaggcttccccagccatgcttcctgtatagcctgctgaactgtaagcaaattaaacctcttttctttataaattacccaccctcagctctttatagcaatgtgagaatggactaatacagaaaatatgtaccacagaagtggggcatcacaataaagatacctgaaaatgtggatgcagcttttggactgagtaatgggcacaggttggtacagtttggagggctcagaacaagacaggaagataagggaatgtttggaacttcctagagacttgttgaatggttttgaccaaaatgctgatagtgatatggacagagatggctaggctgatgaagtctcagatgaagatgaggaacttattggggaactggagtaaaagtcactcttgctatgtgttagcaaagagactggcagcattgtgctcctgctctagggatctgttgaactttaaacttgagatgtttagggtatctggcggaagaaatttctaaaagcagcaacgtgttcaagaagtggcctggctgcttctaaaagcctgtgctcatttgcataagcaaataaatgacctgaaactggaacttaaatttaaaagggaagcagaacataaaagtttagaaaatttgcagcctgccatgtggtagaaaagaaaatctcactttctggggagaaattcaagctggctgcagaaatttacataagaggacgatacatggggtaaaatgctttttcctcccctaaaagccttggtattaatctggaaatagcaggaaggtaactgtaggaattatataatgggtttccctgtgcttggtcatgtctttgtatcatttccataggtcagtggagactcagaaaaccagtttctctgggcttttgataagtaatgttatagtaatcaacagatggtaactttcggtaaaacaaattgtcttcatctgttttgtgctggtataacggaatatctgagactgggtaatttttaaaattatttatttatttatttttgagatgggagttttgctctttttgcccaggctggactacaatggtgcgatctcggcccactgcaacctccgcctcctgggttcaagtgattctcctgcctcagcctcccgagtagctgggattacagttgcctaccaccatgcctagctaattttgtatttttagtagagacagggtttcaccatgttggccaggctggtgttgaactcctgccctcaggttatctgcctgcctcggcttcccaaagtgctgggattacaggcgtgagccaccacgcctggccaagactgggtaatttataaagaatagaagttggccaggcacagtggctcacgtctgtaatcccagcactttgggaggctgaggcgggtggatcacttgaggttaggagttcgagaccagcctggccaacatggtgaaaccccatctctaccaaaaaataaaaattagccgggtgcgttgatgtgcacctgtagtctcagctacttggaaggctgaggtgggagaatcacttgaacccaggaggtggaggttgcagtgagacagaattacgccactgccctctagcccaggcaacagagtgagaccctgtctcacaaaaggaataaatatatatatatatgcatatatgtatatatatatgcatatacgtacatatatatgcatatacgtatatacgtatatgtatatgtatatatacatatatgcatatatattatatataatatatagtgtatacaatatatgtatatacgtatatatatgtatatatgtatatatatgtatatacgtatatatatgtatatacacatatatatgtatatacgtatatatatttttcacagttttgggggctgggaagtttaagatcaaggtacctgcatctcatgaaggctttcttactgtgtcctcttatagcagaagatagaaggggcaagctgggaataactccctcagtcagactcttgtataagggcattcacaaggcaggaaccgtcgtggtctaatcacctctgaaaggccccatctcttaatactgttacatggacaacacctgagtttttgagggacaccttcagaccatagcacagatactgacaagtctcatcaattattaagtaaatagtacttgaagggtttgaaattttgtagtaccccggcagtgtgtttatatttgtgataaattttaagtataggaaaatcatggaaagacttactgctcataactgccgtacctcgtttacctctatctttccctaaactactactgttcttagcaagatcatgaactgtggggccgacataagccagaggagtttctgaagagtctgcttcagtgaggggttctgttgatagccatagaataaagaaatggcactttgcagacattggtacttccttgaaagaactggctgtggcatatacagaactcaaaaattgaaattactagataatggttacttggtttagattgcctggaaattatgagaggttctgtaaatgctttgggattagtagtttgaaccacctagtccattttatgattctgtcttcagaatatagaaggaattgcatcttatttggggattaggatataaagttagtgtacaaggcaaaatagcatgtaggcaaagttacccatgcagagtttgtgggaagatgccttaccacaaaccagtaccttctttttaggttcaagaccagcccatttttcctctagaatgagaacagatcattgctcttctgttgagcacagagttgttggtttgtacttaagggcaatcctgttagaatcactcctgagtggctaaatatcttcagtctgagagacttgtccagcaggttatgggaacagcagattcatgtcacctgtctcttgctcacttaggcaaacgcttagtgtctggaatggtgggtagaacccttgtatttactaccaaaattgagctttctctgacatttttgctcaatgtatgttagatttgtgtaagttaaattagatgttggcttatgcgtggtataagatttaaaatagacttcttagcaaaaagaacacctggtatcagattgacttaccccttcattttgtttgcttttattcagtgaagtgttgaaataacaggtatctcatgtctcatctttgaattataatgaattttgtatcatagctttagtttctggtacttttttttttttttttttgagacaagtctcgctctgtcacccaggctgaagagcagtggcgcgatctcagcttaacgcatcctctgcctcctaggttcaagcgattctcctgcctcagactcccaaatagctgagatcacaggcacctgccaccatacccggctaatttttgtatttttagtagagatggggttttaccgtgttggccaggctgatctccaactcctgacctcaggtgattcgcccgccttggcctcccaaagtgctaggattacaggcgtgagccacttggccccagcctctgatacctatttttttccgtttttcctccaacagtgtttctgtaaactgagtatatactcgatgaaatgagaagatttaacttataaaatcgatttagtatagttttcaagaaaaacttaaactttttttttctttttttccttttttttttttttttgagacagtctcactgtgattgcccaggctggagtgcagtggcacaatcttggctcactgcagccttggcctcctgggctcaggtgattggttctcccacctcagcctccagagtatcttggactataggcacatgccatcacgcctggctaatttgtatttttagtagagacagggtttcaccatattgtccaggctggtctcaaactcctggactcaggcaatctgcctgccttagcctcccaaagtgctgggattacaggtgtgagccatggcccccagctgaaaactttaacctttagatgtcaattcagttagtgagtctgttttatctgttgttcaagcaaattctttaaaacacttaaaatagttcagttcttcagttggttgaaatttatatggccatttcttttctaagcagtactctcagataaacaccagaatgctggtctatggacttcagtttgaaatcaatagtttactgtcttgctggaaggaggaaagtgatcttactgttgtggaaaatatatcactgcagaatctactcacttttgctgcaacggtcaagttaatgttttctatcattcagctaagattgctaaattagtataactttcctttgcctttgaactttttagcactacagaaaccaggactacaaatatgttctttacttttttctgttattttcccctatcatgagacttcttgaaggcgaatgctgttcattatgctttctcatctgtactttcatgtacatgtaatccactgtagtgaaggcactaaaacctgttgtattttccacatttcgatagatctctcacaggatttaacacttttggaatgctcagtaaattattattgactgcttgataatacctctttgttcctgcctttccccaagtccttcaacagaagtttcttctagcactttgcaggtcagttgagtggactatttgagtccctcacagtaatgagcttgtgtgtttttgtcattcttttttctttttttgaaaaaacaatagagtcatttaaggaagcaaaaaggtccctgggtcaagatttttattttatcttttatggtggtagggtgaggtgtgagtatttagggagatggttggtaggatggcgttgtcttagggttgcaggaggatcagaagggtgactgtaactactgatgatatcttacagtggtgaaggagaagataagtgaaaacagaggcaatttgtttaaacgaattttagtagatattagtctcttaatttggcactgacatatgacagattatttcatttaaattctgtagtttgacaggtataataaagtacccttcattaaatattcttcacatatactcttgtttgcctttttctagttgcaagagtggtgatttctatgtttcattataaattttagaaatatataatttgaatatattgtctgttctaggttctctgtgagtcaagaaaaggcagggtattatgacttcggattcgtatgatgtctggatatatttaaggggagcagttctcaaagtgtggcctgggattatgggatcaaaactattttttctttctttctttcttttttttttttttttgagacagggtctcactctgtcatccaggctggagtgcagtggcgacatcttggcccactgcaacctctgcctcccaggttcaagtgattcttgtgtctcaacctcccagaaactattttcataataatactgagttgttccttgcttttttttaaaaaaacaaaacaaaacaaaaacaaacaaaaaaaccatgttggacatttgtacccacggtgcaaaagcaatgaataaacactgttggcaccttagcacttgcagttaaaaaagccagttttgtttgagaatgtccttgatgaagtactaaaaatgattaattttattaaatcttgatccttgcgtgcatgcagttgtaacattctgtgcaacaagatgggaatgtgtgtaaagtgcttctgctgcatattgaggtatgttgggttttgagcaaaagcacttacgtgattaagttgtgagctccactagccacttttttcatggaaatttcatttttacttaaaagagggtctgacaaaccatgattattcagacttaggtatttggcagactttttttaaatcaatgaagtgagactgtcacttcaaggaaaacaactgaccatatttgttggcagagagaacatttgggctttcaagcaaaaattaaaatttttggaaaacttttgtctgttactgtgagcatgacagcttcccagtacttaaagactttctgatgagattaatgggtttaacaacatgattttttgaaatatgccaacttctggaaaatctgcgtaactcagtggaccagtactttttagatgaggaatgatgatttataacattgtgcctgagttaaagattcatttaaagtgaatagactaatgaatgttaatgtggcagagtaggaaaagttcactgatacaatttcggattccatgttgcatctaatcttgtaagaaagaaattaccactgctaactgaagtatggtggttattttgaggaaaagcacctgtgagattgagttgtgaactgaactagccactttttaatagaactgttttggtgtaatatcaaagcacgagatccacaatgacctcagaaggctattcaaacactctcccttttctaagctaagtatgtttgagactggattttcttcatatacttgaaccaaaacaacatattggaacagattgaatgcagaaacagttacgagaatccgtttcctattagacagatattaaagaaattggcaaaaatgtaaagcaccacttactaattaattttttttttttttttttaaataaaagaaggctatgttgctcaggctggtctgaaactcctgggctcaagtggtcctcctgcctcagccccgcaaagtgctaggattataggcatgagcaaccacgcttgccctcactcactaattttttttaaaggaaaataagtttctttttaaaaatgtgttatttatattaggtacagttggccctccatattttcaggttcagcttctgtgcattcaacaactgcagatcaaaaatacttgtggaaaaaagccaataaaataatagaacagggcgggcgctgtggctcatgcctgtaatcccagcactttgggaggccaatccgggtggatcacctgaggtcaggagttcgagaccagcctggccaacatggtgaaaccctgtctctactaaaaatacaaaaattagctgggcatggtagtgtgtgcctgtaatcccagctactcaggaggctgagacaggagaatcgcttgaaccctggaggcggaggttgcagtgagccaagattgcgccactgcactccagcctgggtgacagagtgagactctgtctccaaaaaaaaaaaaaaagatacaaataatacagtataacaaggatttatataacattttacattgtattagatgatcataagtaatctagagccagatgatttaaagtataaaggagaatgtgcataggttatatgcaaatactgtgccattttatataagagatgagcatctgtggattttggtatccatgaagttcctggaaccaataccccctagacccccatggatactgagggcttgctataacagtttttaataaaaataaaaaacaggccaggtgtagtggctcacacctgtaatcccagcactttgggaggccaaggtgaggtgattgtttgagcccaggaattcaagaccagcctgggcaacatggcgaaaccctgtctctgctaaaaatagaaaacaatagccagacatggtagtgtgcacatgtggtcccagctacctgggaagttgagatgagaggatcacctaagcccaggagggcgaggctgtagtgagccgtgattgcgccagtgcacttcagccagggccagagtgagaccttgtctcaaaaaaataaaataaaataaaagtaaattgtaaaaaactctttagtttttcatttctattatgttaaatgttaatagctataacacatataaactaaacaggtcatgagaccaaaatgctgaagaatggtgttaatggtgttcttacttactttgaattaccgtttttatttttctatgctagctaattactatgtgaataattaacctcaatgaagttctgtattctctgttgtagcagtggctgatttagggctcagttgtcttttgacctgttcttccttctcatatgattgcatctcgatttttaattttagacttagtttttaattctaaaattaaaaatctttttttttttttcttctatgcccactgctgtcaacccagtcagggcccttatcactttattcttgaattacttcagttctccattttttttctcatgtggtgtttttcaaacttgagtgttgattggaatcccagggttaattcaactttaattttatgaatatgatttcatataagttccttatgataaaaccagagcagatttacaaattaaatatagaccatcaaattagctgtacatatttaaggatgagattttgttaaaaccaaatagtcaatgttagagcttatagaatggcatagcctcaggatcagctttataatcagtttttttaaatttggcttgataatactaacagagaatggctatttgcataaatatgttttataaaatggtgttaacttttagtctttgttcaggataatgagacctactagttaaccagaacggggccagcaagcaactcttgaatgctagttttaatgcctgatcaaaattctgtaaagctgtgttgatcactgaggcgttgcggatatactgagcctgcattaagtggatatttaatctaattatttctggaatctttaccagaaaacatgctcttacatagtttgctcctgggtttgctgttggtgaactgccgttggttggtgggatctctgtgtcccatgggctttgccacacagctggggctctgagtacttcagctcacattcctttgtttgccacccttgccttaactcacttacctgtattgttttttctcccatagcactcaacatcatcttacatgtaaacattttactttgttgttgttgttgttgttgttgttgttgtttttgagacagagtcttgctctgttgcccaggctggtgcagtggcacatcttggctcactgaaatccctgcttcctgggctcaagtgattctcatgcctcagcctccttagtagccgggactacaggtgtgtgccaccactcctggctaatttttgtatttttagtagagacggggtttcaccgtcttggccaggctggtcttgaactcctggcctcaggtcatccacctgcttcagcctcccaaagtgctgggatcacaggcatgagctactgcacctgacactttgtttttaactgtttctgtccaactagattttaagctgtataagggcacagatttttaattgttaattgctaagtcttcagtttctattgtagtctctggcttgtattagatgctcaataaatatttgttgacttaatgaatgcatattaacccttcttttctttattcaactgcaaactcaaatactcttttctgagttgtgtgctctcactgtgggtaaagaccagtttttctcttcattttaaacacaactaaactggccctgaattgtatagaatccttttgatttgttgtttgatcagtacaagttcagtcagtggcacagttacttcccttgattcagattctgtagaagcctaaaagtgcattatctcttcaagtagacatgtcatcatataggctgctatggagatctttttttttccttttaaattgtttgtgtaacagtttctgttttaaaacagtggaattaccagcctggacactatagtgagacactttctctacaaaaaataaattaaaaaaaattagctgggtgtggtggagtacacctgtagtccccagctactcgagaggctgaggcagaaagattgcctgagcccaggaatttgaggcttcagtgagttgggattgcatcactgcactccagcctggacgacagagtgagaccttgtcccttccaaaaaaattgaaaaagtagaattatatttgggagtttttttcctcaaattcctttgaagttaagatttataaaagtatgggaggccaagctgggattatcatttgggcccagatgttccaggctgcagtgagctacggtcgggccacggaactccagcctggggaacagagtgagccctgcctcaaaataataataaaaataataataatagtacaagctctcttaattactacctgttttttttttgagacagagtcttgctctgtcacccaggctggagtgcagtggcgctatctaggctcattgcaagctctgcctcccgggttcacgccattctcctgcctcagcctcccgagtagctgggactacaggtgcccgccaccacgcctggctaattttttgtatttttagtagagatggggtttcaccttgttagcaagaatggtctcgatctcctgacctcgtgatctgcctgccttggcctcccaaagtgctgggattataggcgtgagccactgcgcctggccactacctgtttttttttttaatcctatgtttttaaataattctaatcatctattcatattttttgtttctcctatttaacattttatgtaacatttttagattttaaaatttgtttctgttatcacttctaaaagtgaatgttatttttaaaaatgaatgcctttacattgggttgttatgtaacctaatttgctttaacaaataactttattttggagtaattttatttttaattatttatttatttatttatttatttgggacggagtctcgctctgtcgcccaggctggaatgcagaggtgcgatctctgctcactgcagcctccacctcctgggttcaagcaattctcctgccttagcctcccaagtagctgggattacaggtgctcgccatcatgcccagctaatttttgtatttttagtagagactgggtttcaccatattggccaggctgctcttgaactcctgacttacgtgatccgcctgcctcagcctcccaaagtgctgggattaacaagcatgagccactgcacctggcctattttggaatacttttggatttatatagccatggtatatttgttaaaactaagaaatcagtatcagtatgttgtcattaactaaactcaagactttatttggattttgccagttattccactaatgtctttctttggttggttggttggttggtttcaggatccaatccaagataccacagttcatttagttatcatgtctcctaagtttttctgatctgtggttgttctcagcatttccttatttttcatgacctcttaatcgttttaaagtgtattggtcagatgttttgtaagaatgtcctttgatttcggcttatcggatgttttcttatgattaggctgaagttatgggttgaggtctgggggaaggataccacagaggtgaaatccccatctcatttcatcacatcggggagtacataatgacagcagtacttaccattgctcatgttaatggttatggttttttttcacagaaacattactgtttccctttccagactcttctttggaagtgaatcattgaatctagctcacgctcagggggaaggaaattgaattctccctcccagaatggggacatacactcatgtatcagttggaattcttgtcaggagagttgttccttctcctccagttgtttatttaatcacttatttatatcatagactcatgaataattattttattctgttataatactgttatgatttactctgctgctcaaattattccagctttggccactgagagtttcttctgtttgcttccagtctcggacctatccgtctcctttcatctttggagcatttcccttcttctactggcttgccttgtagtttccctgtcccaaccctagaatcagctgtttctgcagaccctgcttccttgtatttattggaaggtggtatttagaaacaaaagtcttgggtgcagggtatgcttattttattgctcctggggtgtcactgcttccaggccctctgttggacagaccctggaaatgcaggtatttcagctaacctgcatgtgcatacatacctacgtttctgtatctatccgcatatattttaaaatacacgtgagttcatattgatatatctgactaattcatcaccacctcttgcttatttgtaacttctttctgtgacattgagaaacttggcacacattatctacattttatttacttatttgtttaaccctagtgtacatgtagagtattttcagaattacagactggtacccttatgagaaacaaatttaccagctagagtacagagtagattgtccaaagttctgtagattagctccccccgacctcctgctccttccatgagattatctcataaaattataatactgttagacttgctgtatagtttgcattctatcctgagatcccctgacatcctgttttgtttttatttgcatacagtttaccatttaaaaaaagtctttatattgagttgttaactttttaatataaatgttgtaattcctgatattactcatctgccatttatgtagttgatagtcactacttttttttttttttttttttttttgagatggagtcttgctctgtcgcctaggctggagtgcagtgacgtgttctcagctcactgcaacctccgcctcctaggttcaagcgattctcctgcctcagcctcctgagtagctgggattacaggcgtgcatcaccacgcccggataatttttgtatttttagtagagacggggtttcaccatgttgggcaggctggtcttgaactcttgacctcatgatccacctgcctcggtctcccaaagtgctgggattacaggcgggagccacagcgcccacctgatagccactacttttttaatgctgatatagtgcttaccatctgtcaggcactgtctatgcaccgtaaataaatttacttctcacaatgactctgaggtggaggctcttgaattagccttttttcatgaggagagtgaggcacaaagatgtgcagtaacttggccaacttcacacccagctgctaagtgggagaacttggatctgaacccagggaatgagctttggagtccaaactcttgctttttgtttaatgctgtgtataggacttagaattaatacaactaactcttctcttattagtttagtttattacttggaatttggtgtgaaatagagagtgctgctaccccaattctttgccccatgtgtgtaacaggcattattaatcatgacagcactctctctgctgagctagaacatggcctggcctaaggccaataatccttatggacacaaccctcaaagtggttgtatgagatgaactctccttgccatctctgatcttgtctgttttgaatcctgattctagtgcccagtgcatggcactgcgtgcctgcttctcctggattcctctctcatggtcttcctttttacagggacaggttttctatattccccctcaggcataggatctgtttctcttaagtaattaatttttatcacttaccaataatttaacatctatatgtctaagttctctttatattgtttttcttatccttacctacaaaatctcatttaccattgatttaaatttcagtatattgaaacaatggattgtaacattaaaaataaatgaaattgccaaatgatactaacagctgccttcaaagcatttaaacatacaaacaggcactattgaagactggagagttatcaaaattggcaattttttggcagtcttgctgtgaagtaaacatttttaaaaggaaggacattgagaatattgtaatcatattacttacatcttgttgggtttggatttgaccttacatagcctggtattcagttaagagtcaaagttgctgctattaatttagttgagaaggataaatagtacatgtagtttattgttttctttagagaaatagaaacagaaacatttatttggccagaccaaataggtggtcattcccttgatttagcaaatccttgaggtagaattttttttttttttttttgagacggagtctcactgtgtcgcccaggctggaatgcagtggcacgatctcggctcactgcaagctctgcctcccgggttcacgccattctcctgcctcagcatcccgagtagctgggactacaggtgcccgccaccacgcctggctaattttttgtatttttagtagagacggggtttcactgtgttagtctcgatctcctgacctcatgatctgcccatcttggcctcccaaagtgctgggattattggcgtgagccaccgcgcctcccggtagaatttttaaagaagcaataagggctctgacaatacctatgggacttttttcaaattattcagttattggcagctgggtaaagagggacaggaatgtctgatttaggtaaatacctctcacaagtggagtaggggcgtatctggtagagaacagtgctgattccttggacttgtgtggcctggccacctgagaggtaggtaggaaggtgtgtcttggccatgtcctggggcctctgtaaacctgagaggatggaggaagctctactttttctgacgatgctgttggtgataatgaagtaggctatgagagcccatcttccattaattcagatgttcctatacagttggccctctgtaaatgggattctacatttgtagattcagccaactgtgggtaaaaatacttgaaaagaaacaaaagtgtgtgtactgaacatgtacatacttttttcttgccattattccctaaacataatagtttaacaactatttatgtaatatttacattgtattaggtatttagtaatctagagatggttttaaagcaggggtccctagtccccaggccgtggactggtacccgtctgtggcccgttaggaactgggctgtacagcaggaggtgagctccgcctcctgtcagattggcagcagcattagattctcacggaagcgtgaaccctattgtaagctgcacacgtgagggatctaggttgcacactccttaaaagaatcttttttttttggagacggagtctcgtctcactgtgttgcctaggctggagtgcagtggcatgatcctggctcacctcaacctctgcctcccaggttcaagtgattctcctgcctcagcttcctgagtagctgggattacaggcacctgcctccacacccagctaatttttgtatttttagtagaaacagggttttaccatgttggccagactggtctcgaattcctgacctcaagtgatctgcctgccttggcctcccaaagtgctgggatatgagccaccatgcctggccatccttatgagaatctaactaatgcctgatgatctgaggtggaacagtttcatcctgaaaccatgtaccctctcccctctttgtggaaaaactgtcttccacaaaaccagtccctggtgcaaaaaagttggagactgctggtttaaagtatatgggagaatgtgtatacgttatgtaatagtgtaccattttatatcagggacttgagtcttcgtggattttggtatctgttgggggtcctggaactaatcctccgtggatatggaggaacaactgtatatatggtctcagtaataaatacgtatctgagataccctctgtattaagaaaaaaaagatgggaatttcttggctcatataactgaatagttccgaaatttgggaaggtctgcctgacttagggcttaggtcatgagactacagttctttcttggctttgacttttgttttttgtagttgttgactctgttctttgaggctcttctccaagatggcttccaacaagtccttgggcaaacatttttccaggtttagacctaaggggagaagagtgagcattcttgtcctagcattgcaggaaacctgagattttcactgtgactgcactgattgtggccgtgtatctaaccctgtactggtcactatgtctagggagatgtaccttggtcaggccagggtcacaagcagcttgagtcagcttcctccagtgtacttggtagttctcagagaagagttggtgtgaagttcccaagagaagggtgaattgaccctgggtggcaaaaacaacatagcatctactctagtgggataaagtaagatggtaaggcatggtgttcagggtatttctgagtttggtttgattcacaaaatagattgtgaacactgtaattgcccttaattttagttaacctatgtaaatgtaaatctgtgaggtgtcactacattctgctaaagctttgatgggctcctgccatattctggtttggcttttgtattaaagagccattgttgttttggtttcactgtatacaggtagacttttgttttaatgaatagaggtataatctgttttgaacaggaaaagctgcttttgtattctggataaagttcatactagtgggatttcacctatgaaactaaacaaatctttgaaaaatttaaaaaccatatgtatttacacagtgtccattcagtagaagtcgtttaaataaaggcttctgccaatatatgaatatttagagctgtattttattattttactttttttgagacagggtctcgctctgtcacctaggctggagtgcagtggtgtgaagacagttcactgcagtctccacctcacaggctcaagagatcctcccacctcagcttcctgagtagttgggaccacaggtgtgcgccactacacctggcttgcttgcttgcttatttattgatttgagatgggagtctcactatattgcctaggctggtcttgaactcctgggctcaatcctccaaccttggcctcccaaaatgctgggtttacag

SEQ ID NO: 419 - DNA, 3356 bp, Homo sapiens
  source 1..3356: mol_type = other DNA
gccgccccgcgagaagaagagcgggaagaggcggacagcgaggccaagatttcagctgcgggacggtcaggggagacctccaggcgcagggaaggacgtgaggaggggaagcgggctggggcggcagccgggcggaggggcagctgcgcaggcggaatgaggaacgcctttgctctaaggcgaccaccctggcagctcttcactgaggggcctcggtttccacatctgtcgctctccggtcccaagaccaccaggaccgacggggctctccgggagggtcagcccctccggtggccccagtcatgcatcaggggacggatcagaagggctaggaagaggggtcgtggggaaggccccagaaaaaagaggaaggagggaagattttgcctgaagcgggaaagccaagggctgggcggcgcgagacccccattcctagcgactggggctggctggtggcccgcggcagcccccgcgccgggaggattaggcctcccgccgctcccacccgtccggaccctcccacgtgtttaggtcctcccaaaagtattcggcctccggcccctgccccttcccccggctggcctggacctcggggacgtggggggaaccccgtgggagcagggggattctggacggggagggagtagcggttggggagaaggctgagcggggaaaggagagaggggctccggggacggcagggaggagagtgggtcgtgccggagacccagggagagacacaatgggcaagattaggggtgtagggtgggagtgcgaactgactgattcctagcgtgggcagggaactttgctaaaactgcaggccccagggaacagcgcgggcagggtgggagggaacggagagggccaggcggaccctaaggtcaatttggagaaagggccatttccaggctccttcacctgtgcccagcgttctacaggcctggaccccgcccccgctccccaccctccccccagagcagggcgcgggaggaggcggctcgggctggctcggagagctgaggggcgcacacccgcttcgcagggccagggtgacacggaagcatgcgacggctgctgatccctctggccctgtggctgggtgcggtgggcgtgggcgtcgccgagctcacggaagcccagcgccggggcctgcaggtggccctggaggaatttcacaagcacccgcccgtgcagtgggccttccaggagaccagtgtggagagcgccgtggacacggtgagtagcatggcccgggcaggagcggggagggtcgtaccccaggagaccagcgcattcccacgaagggggacagaagtgcttgggctctgagccccagccctttggagaaaaggccactgtccagcctgctggaatgtgactgcgtgagggaggtgcggatcacaccagggcttgctctgcaccctcagctggctaccggccatcctctgcctgcctgtctgtccgcagcccttcccagctggaatatttgtgaggctggaatttaagctgcagcagacaagctgccggaagagggactggaagaaacccgagtgcaaagtcaggcccaatggggtgagtgaaggggtgtgagagcaatgggcgcatgctgggtgtgagtgcatggacttggggtttggggtgtggggcacatgcctgggtgtgcatgcatgaattgggaggtccattaagaagccctgaggttagagaccccactgcgaagagcctccttagaggtggagtggctcagcctgagcccaaggttgtgagagtggctggtgggagctggggcctggcagacaggaagatggtttggttacccctggacttatcttcatcagagcagggctcacctcggtctgagttcctctctcaagcatcagggcctgggtggaaggagccggctgtgtgggtgtgtctggtgcccccctagcctagcaggactccagtcatcagtcacggtgggggcaaaccttccaccgtgggggtgatgcctgggctgggagtgcagtgactgtgttctagttcccgctctgtgagcacggcctgggctctgtattacaggttctgcaaaggccccagttccctctgtcggctcaaggagggcactggactatagcaatgattcatcaacctcaaaatcaaatcttacaagaaaataaatagaataggtgacagctgagccactctggaggcgttgggtgggaagaacccatcggaggaggattcttgccttcacacgagcacaagcagacacatccatgcatacatcacacacccatccacccacactcctgcatacaaaccacatacatgcgtgtttatgcatgtgccacacaacccatctgggaaggactcctgcctgcacacacatgaaagttccatagtttgaaaactgcatgggtctgacttctgacattctagggtggctgtgcctgaaacctgctggcctgcatgacctcttgctcctgggctcgagggcctagttggggatctggtcccatgatgggcagccctggctcccaccctcatgatgcccaggcctccctcacccttttcctctgctcaccccatgctccccgctcccccacagaggaaacggaaatgcctggcctgcatcaaactgggctctgaggacaaagttctgggccggttggtccactgccccatagagacccaagttctgcgggtaagaaggggcaagggtgcacaggtggtgacagggctgggaagatggatggaagctgagcctatgggctggtctcgaggctaaagcttggccaagcaggagggagggcagtgggggctagaaagcgctgtgcctgtttggacattctccaagggatgtggaggggatgtggaggatgctggcagccctccactggcactgcccacccctcctacactgcctgaacagttttgggcactggcaggaggctgaggagcaccaggagacccagtgcctcagggtgcagcgggctggtgaggacccccacagcttctacttccctggacagttcgccttctccaaggccctgccccgcagctaagccagcactggtaggcaccagggggctgagagcaccgtctggatgaggccagccctgggaatgctgaggggctgggctgggctttgggagcctgggaggggacaggtcagaagcctgggaggaaagctgggactggggctgaagcaacctccctcacccccaaacctgtttccccttttgtctagagatgcgtggtgcctccaggaccgctgcgggtggtaaccagtggaagaccccagcccccagggagaggaacccgttctatccccagccatgataataaagctgctctcccagctgcctctc

SEQ ID NO: 420 - DNA, 32742 bp, Homo sapiens
  source 1..32742: mol_type = other DNA
gcgagagcggcgcctgatgacgaccgggagggcggggcccgtctggggcgccggcgggtgcgtttgaatctggtccgagcgcgggaaacggcgggtccccgagcccaggtaagagctgcggtgccgagccgggattgggttcagagcaggggctgggaagtagcagggatcgggcgggaagcccctcctcggctggtcggggtcccagcctcccctcccctaaggaggcggccgacctgcgtgcgggcagtgctgcctctgacggaactggacggaactggcgaccccgggccatcccccctacccagctcagcgacgcccgtccttcttgtccgtgtcggaggaaaatcccagccccgggcgcgggcactgccctcagagagcgaccccccagccctgagcatgggcaccgtcctcagagagtgtcccctcagtcctgggcatgggcactgccctcagagagcgacctcctctgtcctgggcatgggaactgccctcagagagtgtcccctcagtcctgggcatgggcactaccctcagagagcgaccccctcagtcctgagcatgggcactgccctcagagagcgtcccctcagtcctgggcatgggcactaccctcagagagcgaccccctcagtcctgagcatgggcactgccctcagagagcgaccccctcagtcctgggcatgggcactgccctcagagagcgtcccctcagtcctgggcatgggcactaccctcagagagcgaccccctcagtcctgagcatgggcactgccctcagagagcgtcccctcagtcctgggcatgggcactgccctcagagagcgaccccctctgtcctgggcatgggaactgccctcagagagagtcccctcagtcctgggtgtcggtactgcccttagagagagtccccctgagccctgggtgtaggcactgccctcagagagtatctccccagctgtggacgtgggcattgtcctcagagacatcagtctcctgaactcttgttgctggtttggtgcctcttgttgtgtccatgaggaaggagtttggggacggagtgggaagtcacaggtggtgagaaggtaacagggatttcttctttttaatgctcatcttgatttagtaccagacctcctgtgcgaagagtaacctgctcttcggactgataactggatggtgagatgactccttaccttgaaagtagcattctggctgcagggctgaggtcttatgcacatatggtacaagaaacatggaatattgccactttgggagatagattgaaaaattaaccattaaaaaattacagtcactaatataagagggaaaatgggaaatataggaataagtttggtagtctagaggaagtgtattactgtaagttggactaacatgccaaagaggtacacttggaaatagagcaaacaagaaaagtgaccagaactatgaaaaagtggagagtgttcacagacttgccgggcgaagatgtatgattccatgtgtttgctgcaccttattggattatttttctaaaatcatgaatttgtcctagccactattcattatgcttgttactggccactctcccttccctccccattttctttgtcagtgaaaaatgtgccagtcatgcttgatttaaagagggagacacgttgtcgttaggcaatttcatcattgcatgaacatcacagagtggacttgcctacacctagaggtgtagcctacacacataggctgtatggtgtagcctactgctcctagaatgttactgtactgaatactgtaggcaactgtaatacaatggcaagtatttgcatcgctaaacatatctaagcatagaaaaagcacagtaaaaatatggcattataatcttatgggaccacggtcatacatgtggtctgttgttgactgaaatgttatgtggtccatgaccgtagttcatagttcagccatttgagttgaggaatgagatgaccagacttcactgttaacttatttcgggagtcattaaactgaggttatttttgctttgttcaatttggacattaaaatctagtattatatgtttaagatgactctctgtccccataattattggcaataattttccatattgctctatttataatggtgcaggtggttttcatttatttttaaagtgagggggctcctactgcaaatgtgttccatcatttgctattacctcatctttaggttgatgttttttcagtagggcaccagtagcaccaggtattgtgaatgcgaaatagaatttcctggaaaaacacaggcaggatggagggtatacaaagtcccctgagctctcattatcccgaaggggtgggaggagggtgctgtggttgagcatgcctaatgcatagtctaacaagatcccaggtgacccccggggccactgttttccatctcactttgaataacaagatgacactaacagtgggatttttttgatggaggaatggcctttagaaagggagcatcttcagaatctgcagctgggatcagattgttcttttgttgaatcaactcagctctgccgagccagcatcttgctaaggtactaaaaagggagagatggtggtgagcttcctaaggctatttggatttctccctccttagttggtaattttattaacaattgttgataaaatatcattaatatcatgttattcacatccccagtaaaggaaataagtaaattgtttttcagatattatagcgtgttttatgtcagaatgtttttagaaactgtctgccatacgtggttgaggaattttcttgcagttcttggatgttaatatcaaattaaatcttacaggaaaagatatatttgcaagtgtttcagtatgattgtgttttccattagggttacaaaataaatgccatttgaacagtgccatctgtcatggaaaaacgtgagacgtttgtacaagccgtgtctaaggagctggttggagagtttttgcaatttgttcaacttgatgtaagtttcatgttttagttttgttgtgatttttgactgtgaatatgaaatatgttctaaagtcattatgtccccaaaagaaacatagttatctcagtgaatccttagcgaccaatgtttatttgaaagaagaaaacaaaaccctttatactcaaatctacctgctggtgggctacgctaagatgtaaaagataaacagaagttaaccagtcaaagagggatgttgggggaaaggacccatctaacaaagaaggtcactctgaagactagagaaggtttgttgtgtttgaacttgaagttcagcaggaaggcagaagatgaggctgggggctaggctacacgagtctttaccattttaaggaattcagactttatcttgagaacggtgggtgcttgaagcagggagcgagctgtaggcaagggaggaagagaacaaaagagaaggagagagaactagtggacaaaatagaggtaaggagaaaaatatggtttgccttttggaaatattcctctgactacaagtgagaaatatgtcaaagggacatatttaaggctaacctcttaggttgtgctcttcaaaatgatggttgaattaggaactggaaatgggaagctgcttggtagtgaagtgatggcactattggactgattggatatggatatggtggggaagggcccaggcgtctgactgtgtagtaccattcagcaagctcatgaacgtgggaagagggcagattcaagggagaatgtggctccattttggaggtaccagatgactggtggtgggatgtgcaccagcggatggccagtagtcagacatgcacgtctggataccaggggaaagggctgagctagagacaggttgggcatggaagcctaagtcatgggaatgcctgcagttatctctgtagagtttcagataaaagggcctaggacacatctctgaggaagccagcattggaggcactgactctgaaatacgaaagtatctttggggcaggagacccttggcacacttgtctcacttgttcttattatgtggtgaaaatcaaattagtgacaaagaattagaggaatctaataatgaatttgttactggcaacatttaagaaatcatttttctttataagagaaatgagcttataacatgttttggtattataaaatgatatcctgtaaacttaaaaataatcgcaaactcataggcatctcatcaccatagaagtgtttataagagcaaattagttagataatatataaatgtctgctttagcagtagcagtgtatatggattgtattggaaatgcagtacatacatattttaaagtctaaaagattgttgttgcaaagtgcataccataatgttaacaaaatcacagaaaactaaattgaaaatcagaggtaaaaatagcaactcaaaatcacactggtggccacaatgacaggtgcccttctggggtgcgttgtttccagccacccgttgtgtgccaaccagcctttgcagtgttgctggaaagccagcagacatctcaggagaatactgaattagtccttatactaatgaggcattaactctagtttatcaataagctttattaacacttaacagttcagcttagtacctagtcaccgtgtggctcttacgtgtaaaaatgaaaatgtgtaggattgtgcatcacgtggtttcatcaagttgaatgacagaaatgccattttatataataatgatggtttcccatagttcaatttgataagaatttaaatcagtttggggcctatcaggtagatctttccaagtacagttagttctgctgtaatcccacacatgcattaccaacagtcactgcactctgcagaattggttaaaataaataaataaataaataaataaataacccagagagattatggggaaaatggagttagagggacaacactaaaaaattttgccagtgacatgttaaaaacaggaacctaataaaacagtagcataattttatatgttaaatcagtaagaaatgcataaatactatagtaagcatggcactttaccttgaaaaatatttacattctatagttgggagtaggtgcctgtgctcccaaggtacacctgcccctctgtgtgtaagaggaagaaaatgaggtagaacagaggagaaaaaggcaagcaaggcagaggggaatacagagcattggagagcacggtgggcctggggagggtgcagtgcagtggggttggagcctttgggtcatagcaggtgaggggcacaatgtgtggcccaggtatgaatggactgagctggtaggtgtctgagttgtgtttcatgggatcctggtggctccagtcagtgggtgcagttttctgcattcacctggtatttcttgcctatgaaatcccacataagcaaatgggaatttgcctttggtcaaattgttccttgatgtattgacaatgttggaacaaatttttattttcaagcaagtgttccagagtggagctgattatactgtatgcccttgtccttcttggagaatcaatgatggggaggaggacacagcactgaggagaattccatcatttaacaaacatgtcctaagtgccttctgtgtgccagacactgcactgagagttggggttatagtacacacaaagaaaagtttctgcacaaatgggggtttatgttctagtggtagaggaagaaaaacaagacacatagagaaataataaagcaggtggaggctgggcacagtgactcacctctgtaattccagagctttgggaggctgaggcaggaggatcgtttgaggccaggataacactggcctgggcaacatagtaagaccccgtctctacagtaatgttaaaaaattggcctagtgtagtggcttgtgcctgtggtcccaactacttgggaggctgaggcagtagaattacttgagcccaggagtttgaggctacagtgagctatgattgtgcaactgcactccagcctgggtgacaaagtgagaccctgtctcaaaaaaaaaaaaaaaatactactactactgataaagcaagtggaagtggaagttgggaacgatggagtggctaaagaaaacctcagagatgatatttgaacagagttggtacagtcacatgactcttgatgaggataggttctgagaaatgcatcattaggtcatttcattgttgtgtgaacatcctaaagtgtgcttacatacacccagatggagcagctcagtacacacctgggctagatggtacagtctaccgtcctaggctacaaacctgtgtggcatgttactgtactgaatactgtaggcacagtgttgtaacacaatggtgtgtgtctaaacattgaaaaggtacagtaaaaatacagtataaaacataaaaaatggtacatctgaatagggcacttagtgtagctggagctggcacaactggaagttgttctgggtgaataactgagtagtgagtaaatgtgaaggcctaatacgtcattgtacactactgtaaactataaacacattacacttgggctacagtaaatttataaaaacatttttcttcaataataaattaaccttagcttactgtaactgttttacttgataaacttttaaaatcctttataataacacttagcttaaaacacaaacttattttgctttacaaaaaatctttcttcattttattttattttaacttttatattcagggttacatgtacaggtttgttacataggtcaacttgtctcatgggggtttattgtacagattatttcatcactgaggtattaagcctagtaattagttatttttagttatttagttatattagttatttttcctgatcctctccctcctcccaccctctaccctccaataggccagtgtgtgttgttcccccgtgtccatgtgttctcataatttagctcctacttataagtgagaacatgctgtatttggttttctgttcctgtgttagtttgctatggataatggcctccagctccatctatgtccccgcaaaggacttgatctcattctttttttatggctgtatagtattccatggtgtatatgtaccacattttctttatccagtctatcattgatgggcatttaggtttattccatgtctttgctaaaaatactctctttatacccctatttgatagcttttttctatttttacttttttttttttttcttttcagttggagccttgctctgttgctcaggctggagtgcagtggcgtcgtcttggctcactgcaacctccgcctcccgggttcaagtgattctcctgcctcagcctcctgaatagttgagattacaggcacacgccaccacaccggctaatttctgtatttttagtagagacagggtttcgccatgttggccaggctggtctcaaactcctgatctcaggtgatccacctgccttggcctcccaaagtgctgggattacaggtgtgagccaccatgcccagccatctatttttactttttaaacttttttgttaaaaactaagacacaaatataccataagcctgggcctgtaccaagtcaggatcatcagtatcactgtcttccaccttaacatcttgtcccagtggaaggtcttcaggggcaataacagacatgcagctgtcatctcatctcctatgataacattgccttcaggaatttctcttgaagcacctgcctaaggctagtttacaattaacttaaaaaaatgtagaaggaatatactctaaaacaatgataaaaagtaggtttgtttacaccaacattaccacaaatgtgattaatctgttacactatgatgttttgacagccatgacatcactaggtgataggaatttttcagctccattataatcttatgggaccactctcatatatgtggtttgtcattgactgaaatatcactatgcattgcctgactatatttgatcagagatccaaatgggccatgcagagatttgggaaaagaagattctagacaaaaggaatgggaaaggccgagcccctgaggcagggcacatttgggaagctaagggtgtggacttaggaggaggagggtggcagggttagggtggagaagtaatttctttcctgttgaaataactgctaagttaaaagaaaagttgcaagaggaattcaaaggaatcctgaataccctacgtccaggtttgccagtttttaccacttgccacattttctttatcatcctttgtatttacatttttttgaatcacttgagtcagttgtaggcattgtgcctctttatctctaaacatttcagttcgtatttttctaaaagatattctgttatataatcacattaaaatcctcaaaatcaggaaatttaacattgtggataatcctgttaaataaccctctgcagcctatgtcctctcctcttgaatctggattgggcttgtgctgctttgacggacggaatattgaggaagtggccttcagaaagtttggcagcttctacttcctctcggagcccgtggttgtcatgtaagaagtgcaggatcaccctctgctggagagagagaccacacacaaaggctggaggatgagactgcagagggagacctcattagtgggcaccaaagtgccagacatccaacacccagctgccaccttaagcacaggcatgtgtccccaagagtgagcatctgattcatgagatacagtaaaattgttgctttatgctaccaagttttttgctacgcaacaagacttcccctgcttcatacacattgtgccagtcacaagaggatacctccctctgggcatatagactacaaaaaggcaccttgctggggcacaggtggccagggcactcacacagggaggagaggccctgcaggatgtccaccccaccggcccctcatcctggtgcgctctgtacagcacagggctgcacagcttctgcatccgggggctggaggtggttgtggaaggatgcccacaggcagctcgctagtctgcacgtgttctttctaactgctgggcttttgtgttgccctgcctttgcccagtgtcctatggccctagaggcctgggccgtcactgctaatgtcgtggcaatgccaggcaatgaccaccccaaggccatgctggggagaggtagaacattttgatatttgaacagcttttgtcccccatcctttccttgcccttccagccagctcttcagtgccctaggcaacagccactcatttctcacatccccagctccaaacagccttcagtgaagctgggtgtgtgtctcattttgttgctatagtttgttactggaacctctctcactctcatttcttcagggttgatttttcaggaaggagttagcagcccatcctagtttgtcacataggtggatgggcagctatttcttttccttcaggctatatccttcagcatacacctctaatagattttaacaatctgtaggttgttattcttgcccctagactgtgaacttactcagggcagggtgggtcctgattcgtttctgtgccctaaccatcagtcaactagtatttcctgatgtaagcgtcatgaatcagcccagtcatttctctggtcaccttcagtcaccagagtttgccctgaatagaacctcttgatctttgaacacagtagctgtggtccatcacccagatgaatgaccccagcaccaaaactgtccattgatatactggaaaattaccattaatggacttaagcgggccattaacttattttttctgcataattgaggcgtaaagaattattcaattgttcatgattgaatgtcgggtctataggtagatcaagatactgtctaaggtcaaacatttgagagctggtctgtgtttgcatgtgattgacaggcaaaggcttaaggaaaatggagaggagaattgaaggggaggagggtcaaggaaacgaggaaagagagtagatagaagtgaacaagcggaggtggaaaaagctagatgaaaaatgaaggagcgctaagaagaggagaaaacaaacaccagggcaggagaggagctaggagagcaggaagagaggatggggggatggagggcttatgaggttatctttactctagttcctccatcttactgtgttttttatgaccccgacagttttgaagagtgcaagtggctcttttgtggtatagccttcaatttgcatctgttgaggatctgattaaattttagtgtgcattttggcaggaactgcttagcagtgttaggtcctcggcgctgtcaagacaggaagcgcatggcatggtctgtccgtccctgtgtgggtaggtgtccgccaggtctcttctgggaacctgcctctgtgggaaagtggtgacactgtaatgtcctgctgctcaccaggcttccacccacttgtttcagcatctcccgataattcctgccagagtccataattattgtgatggctataaaacagtgattttctaaccctgtattgcatctatgtttattcactgacattctagagcatgcaggtgctattaattaatgatttgatatttattatcagtatgctgtcattgattttttctttttagagacgggctcttgctatgttgcccaggctggagtgtaatggtacaatcacagctcactgcagccctctctcccagagtggttggcttggcctcgtttatgcttatttcattcaactggttataattaatcactgtcactgttttggtgctcacattgttccaaatttggctatagggagtccctttaattggattctatgcccttttgatgagggccgctatttgcttcatcaaagagtacgtgaggtcatctcagataagaggaaatgggtttagagggttgttggaggagatctgaaatcatcttgttggctggtgggagagaatgatattgaggaatgagtagaaggtggtgttgagggcccacttggggctggaatctgtggccacagtattattattgccattgttattgaactttagcctacttttgtaatctaattctaggtatggagatggtggacatttgggtcccttttagggagggttttgctaagtgggtgaaattttaaaaactctgaagattaggatgctaggaaagaataggtggagaatccctgtgcttcttcccttttaggaatggattttgaatactgcaaccaaactcttgaacttgtaatgaagttaacacttaacttttcttttgatgacattatgaaaaggatatgattaattttttgtatttgaaatgtgacacttgctatttatgttacagaaagaggcctctgatcctttcagcctaaatgaattactagatgaattatcaaggaaacagaaagaagaattatggcaaaggctgaagaatttattgacagatgtgttgttagaaagcccagtggatgggtggcaggtagtggaagcccagggtgaagacaatatggaaaccgaacatggctcaaaaatggtagtatttgtttttcaaaaataagaaacgtttttctcttttttttgtcaaaaaataacttcactgtgtatcattgaattttacattaagacagattttgaagttagaagtcaagaattttagaagtttagtctgttgtagttttattcacttttcaaccctactgttattaatctaatactaaatattgctgttcttttaggatgatttacttttattcaactttaattctttttagaataagctagaattgtggcttgatttttagaaaatttgtaactgaaatttctgctaaaaactgattttaagttgatgattttaattcactcatgctttgatttttcatttatagagaaaaagcatagaaataatttatgcaattacatctgtgattcttgcttctgtgtctgtaataaatgaaagtgagaactacgaagccctactggaatgtgttattatattaaatggtgagttgattttgttataaatggcatatttagaagtgggtgttgaaatacttgtttttgtttctgtttttatttattcattcatttatttattttttttgagacggagtttcgctcttgttgcctaggcaggagtgcaatggcgcgatctcagctcaccgcaacctccgcctcccgggttcaagcgattctcttgcctcagcctccctagtagctgggattacaggcattcaccaccacgcccgcctaattttgtatttttagtagagacagggtttctccatgttggtcaggctagtctcaaactcctgacctcaggtgatccacccgtctcagcctcccacgtggctggcctgaaatgatactttgtaaaaggaaactagttgttttcatgagcattgttgaatttagtagcagaagttgtataaaggtatagctttgcagtcaagttctttttcttcagctagaataggagcatacttacataagagttgtcctgaatacttatttattttatatttatcatttttttttagagacagaatctcgccctgttgcctatgctgaagtgcagtgacatgaacccagctcactgtagccctgacctcctggcctctagctatcctctcacctcagcctccttagtagctgggaccatggcccatgctttttgttttgttttgttttgttttgttttttggtagagacaggatctaactgtgttgcccaggctggtctcaaactcctgtgctcaagtgatcctcccaccttgccctggcaaagtgctgggattacaggcatgagccattgtgtctggcctaattagtttaatttaagctccattcagatgttatagatggtgagatgggcagtactcagcaactaactgctatttacaggtttttcagggaagtctgacttactggaccaatgatcaagaacttgttgagaagaaaatacctgattatgtgattaccattgctagatagtgtcaacttaactaagaatttgtgacactgaattttttcttaaagtatgttgtgaacgtgatctgaggagtgattattgactcctaggggagttttactgtattgaaatttaaatgatggtacttttcaagttttaacaaaactgtaaaactagttattaatttagtctaagttaatgaaaatatttgattatgaaatatataaaattttagttacaaaagatgtaaaaatatcttaatgatttttaagaaaacttttcacataccctcatccttcactgtgcgagtgtaattagtttgttgtgacaaagtatctcatcaagcttcttattcttagcatcacttggatttatgtatgttttatagtacattgttttattctgaattcttgagttgaaatacagtgtcttattaaaaagtcaccccaatcataatgaaaatagcttccaaatgctttgtgaattttactatcagtttatttgtatggtctgcaaataactagtgaaatgattagtgctaacactgtagttgctatcaacttcccagttaattcaggaatgttatattagtgtaatgacattcagatacctacagattataattatgagcattagtatcattaatctaattattgagcttttctgttaataaaagcactgcagtttttgtattcattatggtaattgctttgactgtttttcacctctgagccaaaatttgaggctggcacattgagggatagtagtggattattgattggtcagtagacctgtcttggctctggtgttaacagagataccattggtgttgttacactgaggtttggttagcctcagcatctgcctttctaaaattggtgatacgatttctctgagacttccagttccaaaaatctcttttctattatgtctgttgagggtctttttataacaatcgtcaaacagttttttaattaacattatttgcattttataactaatgtatataaatctttggcaagttaaacataactaatattatttgcttagcaaagctttaaataatatataaagtcatgatactctaaactgttgactctgaagtaataagaatttgccttactaattggaaaattactgtgctgtattttaggtattttatatgcattacctgagtctgaacgaaaactacagagttctattcaggatttgtgtgttacctggtgggagaaaggcctgcctgccaaggaagacacaggaaagacagcctttgtcatgttactaaggaggagtctggagactaagacagtatgctcactttttatttttttaaagacagggtctctctctattgcccagatggagtgcagtggcatgatcatagctcactgcagcctcaaactcctgggctcgagcaatcctcctgcctcagcctctcaagtagctgagacttcaggagtgcaccacctagctaggactttatttttaaacgtcttcctaacattctaaacctgcgctattcaacgtagtagccacttgccacagaaagctgtttaaatttaaagttaaaaataatgaaaaattcagttcctcagttgcattagtcacattttagtagctctacagtgaaatgtggctaatgtctactgcactagacagttcagatgtataaaatcttcatcatcgaggaagttcttaaacttgctggatttttaattattttccttatgttttaaaaaaatgttctgtagagctatagggggcatttgcaaattttaaaatctgtttttatttgtcgttattttttaatctttgatgaatcaactagaattaccattatttatgatataaaatatacttgatttgaaatatgactttactgttcattgaaaaaggtatcacattttttgtgtcattcctagggtgcagacgtatgtcggctttggcgtatccatcaagctttatattgctttgattatgatttggaggaaagtggagaaattaaagatatgttacttgagtgcttcataaatattaattatatcaagaaagaagaggtaaataggtatttgttttttgatctgtttgtgagctgcttcttaatagatgtttctcctgtgttcacatggttcctgtctgcaccatgctcggtgttgcttagctaccaggagctatttactgcacatgatttttactgcatggcagtactagagaagacattttacaagtccttgcttatttcatcattaaattggatggtaacaggtggctgtgtgttacctaggggaaccgtaattacattttaaattaagaatgattaaaaataaggttgagaaagcacttctctatgaatgagatctggccttctgccctaattccattttaattgccatgtactcaaaactgtcatcccataatatcctccctttcttttttctacccatcctgtaaatccagagaggcttctggcctgttgctgcactgcccgtcctggggtcaactcccatatgaggctactgagcacctgaaatgggacccaactgaactgagattagccataagtataaaatacacatggatttgaagatttagtgggaaagaaatgaacataaaatagctcattaataatttttgttctatacttaatataatagacaatatttttattgtctgttatattaaatattgctttacataaaatatattattaaaattaatcttctttacttttgttaacatgactactaaagaattgagaattacagagaggctcgcatagttcttctgtgttaggggccttctgcagttgtttactgagcgtcgactacatgctcaggcagtgccaggggagactagaacaagcttttgcatttggatgctcatggctcagcaggcacatctctgaggcagaaggaggaagtcatccctcctccctgaaggaggtggagaagggcttcagaggaagaggaggaccagctctgaggtacagaataagtttcctccaggtgtcacagctgctcagcggcagagacagaactggaccccggcgagccatctgcagtctgctagacaaagggccatgtgattaggactgagacctttggctcccagggtctttgttcactttataggtggtgcccttggtcaggcctttcagcctcagagttttgttctgtaaaataggagcaacagttactgtttcacaggattgttgttaggaacagatgaggtaatatgtatcaaaccgcagcccaggcgctggtggataagaacccctggggagggctgccctttgccatccttgctgtgtcagcaccatcgttattacaaagatgttggacacagcctgtgccccacacatgtctccaggattgttctgaaatgggagagtgaagaaattaatgatggattcaaacaataaactattttatgttgacttatacataaggagttgatgaatcgtacttgttaacttatatatgtgtgcagatatataacagacataaatgtatgtatgtgttataacctctaccctttttaaaaaattgatgtctcctttgaatttaagatatctaaatgtagtttcctaatcaatcattaatttggtcaggtcagtttccagtcattctgggtaaaccataaacatcttgtactgtactaacagattacttccagtgaatattactgtttttttttttaacttgcctgttgtgagcatggttaccctgcatttgaatcaaaatgtattgcatttctgtaggattccagttctgtgcagtggtgtgctggtaagagatgaaggtgctattcactgagagagttctagatagatgcatcttatgcactctatagagtatgaagattgtattcattcttcttaggttcagatacataatctagtagcatgcatataaattatcatcacatgatgtatttatgacttgaagactgtgtatttggaaattctagcttgacaaacacttagccttttaactatatgagtcctcagttttctcatctataaatgagaaggtgaaatgaactgggatattcaactccattcccacccacctatgctagatttaaagctttctttcatttgagactatggaaccatccatgacagagccagaatgagatgtttatggacccatggttactgtctgtggtctccatctctgcacctgtggcccttgaggacagaggcgctcagtgtagcggctgctcggccctgggggaggtggcttgtgtggctcctggctgtgcaggccccgcagacagctcaactcgtgcatgtgctctcagtgataattacatgtgcctcgtttttagcaatagcaatgtttagcttactagacgttcaaataattgtttgttatttggcactttttatttggttgcaatgtaaacattctatccttttttatttctagggaagaagatttcttagttgtctcttcaactggaatatcaacttcatcaaaatgatccacgggaccattaaaaaccagttacagggattacaaaagtaagtgttaaaagtactgaagattttgtgctgtcttaatctggttttgaaagattccatttggtctgacttcttaagttatagtaatggattagaagctttagaaatacgttatttattatgtaccattggatcactgggtagctttttccttttataggaaatcattcttttccagtattgaccactgaaattaaggttttaatttgtggtagttctttaaatagttaaaatagtttccagttgaaccttagcctcgctcgtaataaagccatgtccatggtactttgaatgcaatgtgtgctttttggttgaacgtggcctggccagggtggcttctcggaagagcctgtggaatctgcaggagcagcagggaacgttgcagtcatgactctgccactccctgcgtgatggagatgtcaagtgtgtgcttgtcgtttgccaggcacaaggcagagtacttcatttgctccagcactgagtacttagtctccattttaaaatttaatcctcacaactctcttttgagataggctttgctttctaaatttcccagtgtcaggcaactgtataagtaccaagttgggatctgattctggatctctgattgcaaagctcctgttgtatactagattgctttttcatatttcctcatcttcagaatatttgagttgaactaatagatttctaagcttatgattcttaagttgatactggtattttagggcttcttgtacctcaggaattggtagcgtgaaaagtccaacgtgactccaagtcgacaatttatttatatttaaatatttttgactttagaattttgttctggacttatgcactcatagtttcacagaaaatagtaaagttttgggtaagccttgactgagaaggatgaaatagttcgtcacttcagtttcctttcccaaaaccttctccgttttctactttttgctacaggtagataacctatttctatagatgatttgcaaagcactagtttaaactgagtttcttcttcactatggttggagagtagctgaaatgatacatgttgaaagaataattcttaaaatttgcattaaaactattttgatctttttatataggtctttgatggtatacattgcagaaatttatttcagagcttggaaaaaggcttcagggaaaatactggaggtattttcatttttttaaatgttaacacttatttttattatattttagttactaaataagtagtcaaagaagggttatttaagatccatgtttatgcactctgtcaaaataaagccaaataatgaaaatctatttgatgggcaatccagtcacttgctaagatgtgtggtttgtgggaggtaggactgtgctctttcagctgggagggagctctgaccctgatctttccagccatgtgctcactgggcatttggaacgtggccagtctgaatcaagatgtgttgtaagtgtaagaaacataccagatttcaaagacttcatatggaaatgagaatataaaatatctcagtactttttaaaaatgttgagtgaatgttgaaatgttagtggtttggatgtattaggcgaaatgtggtagttggccctttgtgggtttcgcatccatggattcaatcaaccaaggatcgaaaatatttgggaaaaaaatgcattgtacttaacatgtacagacttttttttccttgtcatcagtccctacacatatagtgtcacaactatttccataacattgacactgtattaagtattataagtaatctagagatgatttaaagtgtgcaggagtgcataggttatatgcagatactactccactttatatgaggaatttgagcatccgcagattctggtctctgagggaggtcctagaactgatcccccatggataccaagggatgactgtgtaatattgaagtaattttacctgtttcttttgtctgtttttaatgcagccactagaaaatttaaaattgcatctgtggcttgcattcagtttctattggatagtgccgttcagggacttcaagtcacctcttttagttacattatttttgagaatttgaagatattttctttgattatgggtaactctggtgaatacatagtatttatgttatgaagatagggctatgtaatccacaatcccaactcaacatccagatacccttttggacaaaaaagtgtgtttgttttcccttatatttttcttataccaggttctcaatcattttatttttctctgagaataaaatttttactctaggtcagaaaggagcctctcacaaccctgtgttctatcctgacttttcattcctctttggagagcaggccctgcactgatgggcagagggaggaacctgcagagtggacagaggctgccccatgtctgggtttacttccatcctctctgctcctctgcacaacttacacttgatttgtattgccaaggtttatcactgacttctagaaaataaaaaataggctgggcgtggtagctcacgcctgtaatcccagcactttgggaggccgaggagggtggatcacctgaggtcaggagtttgagaccagcctggccaacatggcgagaccctgtctctacagaaaaataaacaaaataaaaactatttgactagatgtatacaaaattggtatcaacaatgtgtatttctcagtctcactccattcctctctgccctccctctctttaagtttttcaggcaaattccagacctgacatttcatttctacatactactttattcatctctcaaaaatgtgcttatggaatgccattgtaagacctaaaaatgtgacagtaaatccttggtatttttaaaaataatcaagccacattaaaatttttccagtgatctcaaatgtctccttagagtttttttgaattaggactcaacaagttgcccacatggcatttgcttgttataccattaaaatcgcttattctagagcattcctccctcctttccttttcttaaaatctatgccattggcatgtgaggaaactggaccagttgtcctgtagaatgttggcatactgatagttagctctaaaggtttggattcaacttttatggtacaaataacttcccaggtagtgctgtgtatctcatctttcattgcaagtcagacaatgtgtggttgtcccacattaagtgatgctaagtgacttcaggtgaaggaaatattttcaaatataatggggaagaggaacttgagcatctgcagactctggtttgtattagtattaaccctaggagcgtttccttaggtccttcctcaaagccacagaaatcctgctcatgtgtgagggtgggcacagagtacaggtacagacatagggtccactggggttttttgctactcttagaggctaggccttttcccagttgctgcactctgagtaccattagtgcatggggctgatgaagggcttcccacacaccttccttgctcagcccttgtcaacagtggccctgaaatatcttatttacagtttccgccgtagaggtagttctgtttttgttctgtggaggctgttggaacaaatccagtcttctgaaggttgtccaggtcagtgatgagtcagaagagggggctccacactcaccatgcactcagtctctgaaatttgtctgatttgaactagccttgagtggtaggtggaatcttacattgccatttggcacagatttgatatttcatcaaataaaagagaagcaaagcattctccttgctataagaaaaccaaagggattctaagaagcatggacttaaaataagaaagcttggacaaaagggtccaggtttttttctcatgaaatataagatggacaggtcagactctttgtactcaaatgccgcactgcttgtcaggtcgtcagtaggacacacacacaccaagtgctttgcattgcatttgttatttcaggcgattgaaaatgattgcatccaggacttcatgttccacgggatacaccttccgaggaggtctccagtgcattccaaagtgcgggaggtaagattgtgaacagattgtttttgaaataatgtttcctctgttttgtttttagataattgttttggttaaattttaaaattaagctttcacagacatcagttagggggatttctcagaaccttgatatttgatgtctggcagttttattcctgccaccaaagttttaatgaggaaagcaaaggtgtattgttgagatggttagtattgtatttgaatgaccttaaattcaattctctgtcttgagattttccagaattattggtttctaatggccactatcatttttttcaaagatcctagagggtatttgaaattatttttattattttacttattaaattccaattttgctcttctgcaaaccaaatgaataaatgttttgattgtttcttttgatattttgttctgtaaaggtaatctcagaatttagattaatctcagaatttagatatgaactttacctttatattaataattgtaaatggactgactagataagattctatcatcagtgccattactacactgataggtgtttgatggatcttaaggatcctggcaggaggaatgggaaaatctggtctgctgtgtttatttaaattaagcagctgctgttgatcagtgttctaacccatgggatgccttgtttgcttgctgttagttttggcaaccatatgtcaagaaaccaagtgaataaagactactcatttctttgttttgttgtagagtgaaactactgctatttatagaatgtaaatatactaattatattaattttgagtggataagaaaatgtttctttgcattattgatgatttaatttcagttacacaaggataaagaacccagagatttatctagactactgagttttccagaggatttaaaaatcgtgattgcatatatttaggataaatatattcaatgaactccctgtcctacccaccccccacccccatcccagtgtggctttatttagttgtagtcagtttgggttatttatttcacatagatgagttggtgtttcaaattttatttagtagaattgcattaaactatgtatttatgtaaactatgtttatgtaaactatatgtgtagtttatatgtaaactatgtatgttttcatatgttatttttgctgtggtagtctgagtaattaagatattataagtatagatatcactatttggtaaatttatggaaaaatgcacaaaaagaatttaaagggagaatattagatttcactcaagtgaaacgtgttactcaactccaagtaattgtttttgtcacaacttataacacattatagtttcttcctcaaattgtttttatttgataactattaaatttatctgataagtcattttattgatattgaaagaggtttcaggcagtgcttcagacatcatttgaaattaaaaatctcaacattgttgatgaaaatgttctagaattagacagtaacaatggtagcatagctctaaatatactgaaagccactgaattgtatactttaaaacagtagattttgtggcatgtgaattaagtcttaagctgtttagaaaatttttctatgaagcaagtgtactgttgatatcaaagtttgatagtattgtacacaaaaagcaaactatagactaatgtcacttatcaccatcaatacaaactacaaaataataatcagaaaaaaataatccccatactgcagctcttctagggttaagttgatacaagctcacttaaagtgtaggctgttcttttacagcctgtttaatctttcaaaattttcatgtttcactaataaagtttagccccaaaaggtgtgaatagagaagtaaggcaaaattaattgttgttagggacatgaggctacaaagaattttgggaagattctgactggaaaagaagtgagtaggaaaagaagaatgaaagctacaagaatgatcattttctgattttttcataagttttgggaggaacttgatacctaaattaatctcatacagtgaggggtcactaagtgtgacacctccttgttacaaagttatgaaacagttaccacatgttggtaataaagaggttagttaatgttttggaacaagcgtgagctcttagaaccattcaggaatctccccttttccattttatcctgaaggtcagaggtttaaacgagtctttttttgaggttatgtggctgttggcagaatagcagaaactagaacccaaaccattttatagcccaaggccattaatctttttatttcagccgtagattctttcttgtgattgactgcatttactactgtcctatatccattgaagttactcctgctgaagaattgtcatgacatgtggatgccagccagagcctacttgtggtggagagaacaattctccctgttgctctttccaaatgccattttattttatttatttatttttttgttaatgccttccttttcctttttttggtccttaggttctgagttactttcaccatcaaaagaaagttcggcagggagtggaagagatgctttatagattatataagcccatcctttggagaggattaaaggtatacatttcaaatagtttatccgtgtttggaatgtactacttgtgcttttgaatttagcaaactctaagtccaaattacaataaaatagtaaagataaggctgaagactgaatgctttctgaaatttttgaacaaatgtttttttcttttattaaaagcatttcttggtttcatttaactggaaatctggattggtttagtgctaactacacagttatttttaagtaaccatgtttagggaaggagattagaggcatgccgtaaagcaaaccagctgaggctgtgggtggtttgccgcgctggcctgggctgtccagggctgtccagatccttgagatctaacaaacacacaataactttcagtgcagacaacctggtatctttagtgaggatgtggggtgaccacttcttagtgacatgaagtgggctttgaagtgaggaagctttatcttttcatagtatctgttgacattgaactgagcaatgtttggtcaatttaaacgttataattgtctgtaatttgaaaataaatctgtatcaagataattaaagtgttactttgggaacactgtacttaagccttcgtatgttaactctttgggattctgagatactcttcttttattattataggccagaaactctgaagttcgatcaaatgctgcattgttgtttgttgaagcatttcctattagggatccaaaccttcatgctattgaaatggatagtgaaatccagaaacagtttgaagagctctatgtacgtacttcaggtggtcaagcttcttacagatatcagctttgtccaggctgtggcatgtactgcttgtgtgtgtccccacctcccctgtaaccgccagagctctgctcccacatggcatggtttctaaacctggactgttcttcagagagatgccacttctccctggggccttctataacagcgtggacctgtggtgtctttttctacttttgggacatttaattatttattactatgtgtggttttaaacattttatgcatatgcctgttgtttccccaatggagaggtggtgtcatatggtgggtaaagcacatgctctggtgtcagccccctgctctctggggtcagagtccaccactctcacttaataggtatgtggctttgggcaagtcacttaacttctctgtgtctttctctgtaagtgtgattgcgatattgcctatcctaaaggtgttgggtagcataatgagcaaacactggttatatttcagggcaagcctacaaataatgcctgtggcaggtgatttttcagatgaggtgctaggatgttaagatgcggcatttatttccaaggagtattgtggattcttttcatctacttagtctgtatttcctaacacagcttacttaagcagtgcatactatctactgtcctaagtagtaaagttttaggaaacaatgacaacaaagtgctgttgtaatgctgttgcctgtggtgcttctgaagtgctcccttttttctttttcttttctaacttatggaaaacctgacatgcagaaagttaaagtaatagtataataggcctgcacagtggcttacgcctgtaatcccagcgctgtgggagggcaaggtaggaggactatttgaggccaggaatttgagaccagtctgggcaacatagtgagacctcgtctctacaaaaagttaaaaacaacaacaacaacaaacaaaaaaacagcccggtgtggtggcacacgcctgtggtcccagctacttgggaggcttcagcccaggaggtcaagtctacagtgagccatgatcacacaactgcaccccagcctgggtgacagagtgagaccctgtctcaaaaaataaaaagaaaaaaaagtgtaataaatatctgtatacttcttcaagcacacacacacatccctaaatgaagtcattagtattttgctgtgtacattatgtatatttatctacaattcctttttttttttttaaagattccttatttttaaattttattttattttattttattttagagacagagtcgtgctctgtctcccagcctggagtccagtggcgtgatcatcactcactgcagcctcaaatgggaggatcgcttgaacccaggaggtcaaggctacagtgaaccatgattatactactgcactccagcctgggcgatagagcgagaccctgactcttattttaaaaaaagaaaaaaattttgtggacaacaaaattttaatctcatgtaattttcacatgccataaaatgttaatttgttcattttttccaaccattaagaaatatgaaccattcttagcactgtgggctgtgtaggagcaggtaccagctgggtctggcctgcggcattgttcaccaaagctggctgagagctcctgtccctggtgctgcacctcttgaggctttaactcaacctttagatggaaattaggctctatcatgaggagacaaaggaggtgatctgataaataagtaagagcagtggttatttcctgtatcctctgtgtaccttaactgttctctcatgctttttgctttattggtatttcttaaacctgagtaatatggagaaccttttttttttttttaaaataaaaaagggtctaggtgcagtggttcacgcctgtaatcccaacactttgagaggccgaggaagaaggattgcttgagcaatcctgggcaacatggcgaaaccccatctataccaattaaaaaaaaaatcagctgggcactgtggtgcatgcctatagtctcagctactagggaggctgaggtgggaggatcacttgaggctggaaggtcaaggctgcagtgagctgacattgtgccactatactccagcctgggtgacagagcaagaccctgtttcaaaaaagaaaaggattctttgaatgtttttaaatgaagggatgcgacagaaacagcattgcaagtcatgtgctgtcattttgagtgcttctctggtgatggtgtaattgcaaacaggtctggacactgaatccagagaggatgtggttgtaaggtgattgtctggaatatatttttattatttttaaagattattattgaaagtaattaatagaaaacaaaatgtataaaaacttctgaatcccaaggacaggccttcagattcctaaagttcttttctgtttttttttttttttttttttttgctttatttttatcatctttttttcttcctatttgctttttcttaaatgactggtcatcttttccattcttatgtttggataaaggattgggttggtaaggtagttagcaggtgttcttctctagttgtgtagagtcatgtctcaggtttgcctaaatgggcagagtgcaacagcaggaggacttcccttagtttctgtggaggaagagcaggcaggcaggtgacccctcggtacccaagtacaaagggccctttccttctgggtggcattgctcttccttcttttgcttttctggaggcttagagttattgctggctctttttttgttcttctttgtctgttgcccagtatctcttcctggcagatgacacacgtggtttagaaaccatttgtaagactttatcctggggagcacatccttgcccctgaactcctgctggcctgtatgcctcatcaggggttgtttgcagcccttgccacaaactcttctctgtaacctgggctctgggttcggggctgatgtgagctctctgaggtcacagcctcctgtctttagagcacccttacctaggaatgtctaggttacaaccttttatgctcttttctccatgaatctattccttattccctctcttacagaaatttctcagtctttttgtttctattattgctaatagaaattgatcattttggtcaaattttggggaagagatggggtaaatgcttaattttaacttgaaatctttttttctaattaaagtagtaagaattctgttgtgtttttcaacgtttctaatagaaaatgtcatgcataataaaaaagagactggagtaataacccctgtgtgcccacaacacagttttactcattgctgactaatcccaatctgatttcttcttcccctgtcttgaaacatatttgggacatcatatcatttcagctctaaatgggtcagaaggtattgataaaagataattttttttttaatcatgccatgatcacagctaaagataaattaacgatgattgcttagtgtctttgggtacccattcgttgctctcattttctcgttttgtttgaatgtttctctaactaaggcccatgtgctatgactaactgacatgttgcttaagtctcctggaccacgagctctcttgccataatctttttgtgttttgttttcttaaaacttgctgtttttgttgtcattgaagaagccaaattattctatgacgtttccagcagtctggattttatagaacccattcctgtgatgccattagtgtgtccctctgccctttgtgtttcctataaattggtagttaaatgagagagttgatccgattcatgtatttgggattttgtttcgtgagattatttccctgttgatgtcgaatactcccatcggggtacttattgcctcattgtctgtttttgaatttttagtaccactgacgatcatggcctggattagttcattacaagtagaattattttattctgggctctaaaatgcattacagcattttagaattcaaaagcgtggtgtacgtgggccatgcctaatctgaacacctgccatggtcagctgagtgtgcaggtctcactgaatgacagagctggttttgaggccctgctgtcaggggatgtggcacatgaggcaccccatgtttctggcttgatcttaaatactctgctttagaagcgatagcaagtaatctcaggtctaggaatccatatgtgtccagtatttctatgctcaaagtttctctaagttacgaatccctgaagtgctcacgtgtgaagcagatgtggatttcgggaaataagtcaaggtttttaagcctttctcccctcctacttatagagccttttagaagatccttacccgatggtccgttccacagggatccttggtgtttgtaaaataacttctaagtactgggaaatgatgcccccgaccattcttattgacctcctgaagaaggtgactggggaactggcatttgacacgagctcagctgatgttcgttgttctgtctttaaggtaagattttttaaattatgtaagtaatgtttatttgttgtagaataattagaaaaacaggaaaagaaaaagattaaaataatacctgtaatcctactccacaaagataacatttttgacctgtcatatatccaaagtaaggtttttaaaaaccaaattcaaagtgttttctacaaaaaatgatgacttgaactaatagtagtttttagtgtaaggggggaaggggtcccagtactgttgaatttattctcttttgtctctttgtgtaatgtcttggagaaatatgctttgcatagaatcttgtacatataatatatttggattcacttaagtaattttttagtatctcccacctatcaccaacaccaattgtagctcaaaccttgcaagaagaactcacattttattttctaagcaacctgaactgtcttcaggtttatagaaattgtaatatgtatgttagatggtagtggggtggccactgatcttttttccccctgactttggtgagaaaatgtgaaacggccaggtgtggaatgaaccagagggagggggctacccaggctgcaaaagcaaatgctcttggagagagggtttggagaatctgtaaagctctcagagaggccaattcagagaatttcttgaggtactgtgagatgacctaagaagaactgatctcactttcctgctactggaatcaactgtttagaagctctgactcccctgagcacaaagcaggtgacttcctcttctctcaggtgcaaaacagacattttcagagcagctcttgggcctcacggccatgccctagtgggagcttctgtggatcttcctccccacttctcaggaacctgcttgcttattttctgtattggaaaagttttctgggctaggtgcagtggctcacacctgtaatcccagcactttgggaggccaagacaggtggattgcttgagttcacgagctcgagaccagcctgagcggagtggtgaaaccctgtctctacaaaaagtacaaaaaaaagtagctgggcatggtggtgtgtacctgtagtcccagctacttgagaggcagaggtgggaggatggcttgagcgtgggaagcagaggttgcagtgagccaagattgtgccactgcactccagcttgggtgatagagccagaccttgtctcaaaaaaaaaaaaaaaatttttttttttctgtgcatattcaacctctccctctcagcagtgtccttcctataggtttgtaagcatgttcgcatctccatccgaggcagaggctcccccatttctcctcattgcagagaaagatattctgaggagcatgtctgtgtttgttgagtgatcagacatttgggctcatgcctgttgctctgcagtaattgttaggagcaaccttcttactctcaaaagagtcttagtttagtggtcacctaaatagtctatctccatttcctgcaactccccagtctactataaagcgtcttctatgtccactactccagtaaagcatttctagccaaggtgaatttcacatgaccacttctctagacttttttgacctctgagcagaattcattcctacaccattcccttgtccctctggatgttgtggtaaaacctcagtccctcttcttcctcctggtctttggttgaatactcttactcttcaagtgctggctgaggagccagggagccgtgcgcctcttgcactgtgacgggctccccctggctatccggtttccagccttgctctgactgtggtttgcatgcggctggtcccagtttacagacaagcgtcttctttgagagctctgctcaggtgaccagcaggtagctctgagattcagactatccacagcatgcagattaggaagtgctcctggggtgcacacctgtgtaagggaagggacattaagccgtgacacagcctgggaaagcctcgtgcagacccacaggcagctctggagccagcagagcccttcagactgggcccatgctgattcactattgcacactggctgcccgggaagaagaaggcattttcttcaggaggccatccccaagcatgctgatggcgagggcagctcagcagccccaggacagctggggtgagtgcttcatttctgatggggccttggttgtacgtcatagcaaccaccctgtctccactgctgagttgatgaccatcttttccaaacctgctgccatccaagagttttatttattttcctctctcccccttgctcctctttctccttgaagtgatgatgccatctgctgagtcactcacttgcgtgctgttcttgcttcttcctccttcacccaagtcctgtctttcccttcctggtgtctgaggttcacctgctccttcctgttgctgtcatccaaagtggctgcagctccctggccggtcttctcttggtcctgaccttctgaccaccgtctggtgctttcatgcttctgaggaaacccttgcagggccactctgagatgcctcccttgcccagatgggtcatctgtgaggagggatgagtgggctctggagtagaggaagagtcagcagagaatctacagaagaaagaccagagaagttgaaggagaattaggagaacacagtgttatggcaggggctacaggggctgtgggattgggggaactggcaaggtaggtggtggccggtggccggtgtccagtgggagggcaggatcaagaggaggctgtggacacaggtggagcagatgattcaaatcagtctgcccttgagtgctttggaagaagagctgtatatacttgaaattttttgaaaaaattatcgtcattaaaatatatgtggccaggcatgatggctcacgcctgtagtcccagcactttgggaggccgaggcgggcagatcacgaggtcaggagatcgagaccatcctggctaacaaggtaaaaccccgtctctactaaaaatacaaaaattagccaggcgtggtggcgggcgcctgtagtctcagctacttggggggctgaggcaggagaatggcatgaacccgggaggcagagcttgcagtgaaccaagattgtgcccctgcactccagcctgggcaacggagtgagactccgtctcaaaaaaaaaaaaaaaaaaaaaaaaaaaaaaaatatatatatatatatatatatatatatatatatatacacacacacacacatgtgtttggaataccgtatatacttttaataaaaacctgtgaaaatgtcctttctcctgaaactagatggagaaggcagtagagcttaagcagtgctggagtttgggggcccagactgagccttggcctgtggaggagtgccacctgctacgtggccactgtagtcagccgagagtgcgttcgagtcaca

SEQ ID NO: 421 - DNA, 16295 bp, Homo sapiens
  source 1..16295: mol_type = other DNA
gatctcctggcaacgctgcggccccgcccacatcatgacgcccgaggagaacgcgggtaccaaactcttgctgcagggttttgagagccgcttcctagtggcgcgcacactgcgctccttcccctggcaggtgggcggcggggcgagcggagaggcccgcggggctcgcggagtccaggggcagacgggatgggtctccgtgctgaaacccccggcgctcctgccacgtgagttcctgggctctccctggtcagggccgcgagacccggtccccgtccctggggcctggccagagtcgctctcacccatcctgccccgcgagctggcggcggaagctgggggcgtctccacagtcttggggtgcagacgcgcgctcggtgtggggtacagttcacgatcattttcatgactttttaaaggcagtaatcgttctggtcactgggacacatctgccctcgcccattctaaaaagtcagcgccctcaggcccgcgggtaaccacctcctcctgagcgcggtgaccaggtcaaaggctgtccctagggcctcagtgttctcatctgtatgtcgagcactacatagaatcagctcatgcgctgaggctttcacgcctgtgatggaagagatagagaaggggctggcctctcctctccctggggacctgccattctcagcacaggcacatgtcaggcagcagcctcccttctgccagcagaggggcttaatgcaccccgttccatttgtaattcatgtgcagtgagctcactgggatgagtcagtttggatatatattcctccctgggtctgccccattttatggggtgttgcttaatcatttgcgttattccattgatataaaatatttagcactcagagatcatttctggtcaggagaaatttatgcatttttaacccaaaatagaaaccttcataaaagcatcataggtctccattcaatattgactataattgttcacatgcccacgctgaatgctaacttgggctcaccctcaacacccacgaggtgggtactattattatcactcacatttgaccagagggattgtttgattagggtgtagtagttgagagttcagacccaggagacagcctgcctgcttcgaatcctggcccaacccctggccctgtgtgaccttgggcaagtgactgcatctctctgtgctgttgttttcttattcataaaatggttgatataatgatacctacctcttagggttgttgtcagcgttgagtacaaaagcctgtggatcagtgcctggctcatggtaaatgtatgtcggtgttagctagtgtttttactcagtctcaaaatgtttaataaatgccttctgtgagccaagcaccatggatcagcagtacccatgatagatgaggctctgcttgcatgggagagacagagaataaacaaataaatgaataaacaagaaaagaccagatgagagtggctttaaagccaagaaaacaggggaatggtgaatggagcaactggggagaagagtcaccaaagtcggggaatcagggaagccttccccaaagaggtggcatttgaactggggcctgagtggtgaagcagccagccatgggaagggtttggggaacaggatatgcaaaggccctgtggtggaaacaagccagctgtggttgaggaaaaacaccaaggtagccagtgtggctggagtggagtgagcagtgtgggccagggatgagggagaatagtccagagagggggattagcagcaggccttgtagggccttttatggcatagaaggagctctgaagcaatgaagtgccttgccatgtgtcacataccagccgagacagtctgcctaactcgggagccaaagctcactgctgggcttgaggcccctgtaagaggacaatgtaacccaggctggtatgggcacattctgcatttccacttaaactcagatggcaagcccatcaaaccttggtgccatggctgccctggtaattcctggctgaccagtgtaaccagggagctggcccatgacctgggtggcagctgagtagccaggactaatgcgaccaagagtcagccttcttcctgtgactcatccaggtgcaccctgcgacatctgaaggtcaggcttttagctgttgtggcttccacttccaactggctccacgtccccagggagggatcacatagagctttgccaacacattctattgcgtgtttaatgttcctgtgaatgggcccttgagatttctctctctcccatccacacagagcttagaggcaaagttaagagactcatcagattctgagctgctgcaggatattttgcagaaggtaagaatcccagagtccctgggactcatgatcctgcctcctgaatctctccggaagacctgagagaagcagcagaggtgtgcttgtaccctttaaaaacagccctcttcaaagaacaaaaccattgagtcagcacttcaggagggtgtcagcacctccgacagctcctacggtttcgttttctatctaagacttagacaaagacatcagaatatacaaaaatctgcaagggggggaaatctagggaatgttttttaaaccatccacagcaaaaacagagatgacaggtgcaaaacagcttctagcatttggtagatgctcagagactttcttttttgcattcatgaggcctgtcccgcccactcctgtctcttctagacctaaatgggcccttgctttgcccagggtggggtttggactcaagtgcatctgcatgcaagtgagagccaggatcaccacgcggcccagccacaggctgaccttggccttgagggccaagtgcagatcaccctgcatcctgggtcttcaccttcgaagggccatgagcccttctgaaaagacaaagcaatagactccctcccagaaagaagtgcaccagaatacattttccatacaaactcaggggaggcagacatcctccacgcccacccacccagcccatcctaggagccccggtgaagaattcctgtgctagaggtgaaccaagattatccacgtggaaaagatgcagccacagcagggaagactttcggggcaatacagtaggtcagggcttcgaggatggagatacctgaagttatctcgcaccttgctctgagtttcaccctgagcctcactctcgtaggtggtgaagcatgagatgtagggagagctgctttaaaacccagcacaaggctgggtgcactggctcacacctgtaatcccaggtctttgggaggctgagatggacggatcacctaaggtcaggagttcaagaccagcctagccaatatggcaaaaacccagctctactaaaaataaaaaaattagctgggcgtggtggtgcacgcctatagtcccagctactccggaggctgaggcaggagaatcgcttgaacccaggaggtggaggctgcagtgagccaagatcgggccactgcactccagcctgggcaacagagcgagactctgtgtcagaacaaatgaaaaagcagcaccagcatgaagagtctgtgtgttgcgtggggtactttgctgcccttgggcagaatctgcatccctcccaggcagcaggcgctgcggaccgtctcctccctctccctccagtctcctgttttcccgccgtcccccctcctgctgcaccagtccctctgccctcctttccaagtgccagcccgtggccacctcagagcttgcacaggctgttcccactgcctggaacttgctcatcctgcacttggcttctctcggctttagctggagtcaccctgagcgtcccctcccctccatcctgtccccagggacacacgctcccagagagcagttgctgagtgggcctccccgcctcttccataaagccagatagttggtgactgtccttactgcaaaccctggttcacactggctcccctgggagggaggtggtttgggcccacatgccctgtgttcctgctcagaatgggcgttagaaatgctgccatagcctgtgccactgcagtggaagcatctttaggaaacggcttatatcttaagacaaacttcagatgcgtggggccagaacgctgtgtccatctgcatctttgctgagggatcaggtagcctggagtttgccctctgctgtgttggcttgaagctcataggagacttaagatgggctctcgagcaaccaacgttctgtcctttgccgtagactgtgaggcatcctgtgtgtgtgaagcacccgccgtcagtcaagtatgcctggtgctttctctcagaactcatcaaaaaggtcagttatgggcagtgtccgcccagtagctggacagcatagccaccggcgtgctgcacaccccgtccttcccaggccctgggcctgctttgcaaaccccggcatggcaggggcctccccaggcaactggctgcaggtgtgtgtgacccatgggagacagtgcagggtgggaataaggggaggccagcgtctctccctgagtctgccctctggggtttccacagcagctgcttctctggggccccagctcctagcatatggattctcattcctaccaggctggaccagcccacagcactggaaccatcacccacaccctctgtcctgcccaccaaagggtttggagtttcctgctcttgtccgtctctgggttgccccacgggcccctgttggaagttttagctcttgccatacctttggaactagttcctctggtgaattctccgcattgatcctgctggaatgagctctttcctgactgatataggatggattttattttttacttatttatttatttatttatttatttttttgagacagagtctcactgtgttgcccaggctggattaccgtggcacaatctcagctcactgaaacctctgcctcctgggttcaagcagttctcgtgcctagcctgctaagaagctgggactacaggcacatgccaccatgtctggttagtttttgtatttttagtagagacagagtttcaccatgttggccaggctcgtctcgaactcctgacctcaggtgatccgcctgcctcggcctcccaaagtgctgggattacaggcatgagccaccgcacctggcctaggatggattttaaagatgggcccgaacatgcagggtttgacatgaggatgtcgagaggccattccttagtaggcagtagcagacctgctgagtgaaagggccacacttttaacaaataaacaatcccctgcttctccaatacctgctttctccctagttctccccaaaagggtgcatctctggtcaccagcaggtctgccctgtgccaccacgagagggcagcagtcacccagtgtaccctgctgctgccctgtgaatcctaggactgggccagctgtggagaagcagcctgctgacagccacagcctgcagcatgggccgccctcacagttctgcctgggctcacttaaaagcaccttttgttttcctcctctctgtgtttgatccaaacacagagctctctgtcatggtcatgtggcagctctcacggaatccttgtctcctgccctagactacacctaaccctaccctctgaacacctcttgctgaaggccctcccatccacgtttccctaccaagtggaattatttctttttagagacaagatctctgttgcccaggctgtcctcaaactcctgggctcaagcagtcctaccatgtcagcctctggagtagctggggctattcagcacacaccaccacgcccaacaaagtgaatattttatatgcaagctggctggtatcacaccattccatcccaaatctcccctgcaaacttggtgaaaatcatctggccatttttacagattagaacaaaagcaaacaagctctcactctgtctgcccccagcacgaggctgtccacacggagcctttggatgagctgtacgaggcgctggcggagaccctgatggccaaggagtccccccagggccaccggagctatttgttggtatgagaagggcaccctcctccccctcacagcccagatacccttcctgcacagacaaagtgaaaacatgggtgtgggttcaaatcctgactcacccattctgcagtcttagacatgaggtccgttaaccttctttagcctcggtttccctgtctgtaaatcaagcacttcaacaacaataacatgtgttgtggggttgttgggcatttgtccaataggtaacacacactacctgcttcacaaggacctggtgcccagtcctcaaagaatacttgacagggccaggcgcagtggctcaaacctgtaatcccagcactttgggaggctgaggcgggtggatccgaggtcagaagttcgagaccagcctggccaatatggtgaaaccgtgtctctactaaaaatacaaaaattgggccgggcatggtggctcatgcctgtaatcccagcactatgggaggctgaggcgggtggatcacctgaggtcaggagtttgagaccagcctggccaacatggtgcaactccatctttactaaaaatacaaaaattagcggggtgtggcagtgggcgcctgtaatcccagctactcgggaggctgaggcaggagaatctcttgaacccaggaggtgggggttgtagtgagccgagattgcggcattgcactccagcctgggcaacaagaacgaaactctgtctcaaaaaaaagtacaaaaattagccggacatggtggcgcatgcctgtagtcgcagctacttgggcagctgaggcaggagaattgcttgaacccaggaggtggaggttgcagtgagccaagatcgtgccactgattccagcctgggtgacagagctcaaaaaaaataagataaaacatagatacagaaaaccacaaaggaaaaacatagcatattgaatcatcacaaggcagccaccccttcatagccacacccagcccctggccaccgctgacctttgctccatcaccagaattctgttgtctcaggaatgttggataaatggaatcctgtgtggcctgagatgagtgtctttcatgccgcatgacaaccttgaggcccgtgcaagcttttggcatgtcaacagttagctgcttctcattgctgactggcaattggtcctgtcatggtttatttggccatgtggtggatggctatttgtcttctaagccacttgccttctgattgctggactgactctctcgccctctcttggtgcagccctcgggaggctcggtcacactctccgaaagcatggccatcatctcccacagcaccacgggtctggtcacatgggatgccgccctctacattgcagaatgggccatcgagaacccggcagccttcactcacaggtgaccttggggcgcagggcagggcaccgaggcgggcttaccctggtgcagtcgcagacacggtcccctttcctctcgccaggtctgtcttagagcttggcagtggtgccagcctcacaggcctggccatctgcaagatatgccgcccccgggcatacatcttcagcgactgtcacagccgagtcctcgagcagctccaaggaaatgtccttctcaatggcctctcattagaggcagacatcactgccaacttagacagccctagggtgacaatggcccagcgctggactgggacgtagtgacggtccatcagcgctctgccttccagctagatgttgtcattgcagcaggtaatgcccagccctgagcaccctgtgcaggcactgtccttgcagctctacccagctcttggctctgggaaaagggaacaatgggcgctgtcaggcatggacatgatggggcttccagaagagttactctgggcctccagggtgaaatcaaaggacggggtgcctcttaaggtgaccttcaagccacagccctcttgttggagtcaggcatactcccattacagtcatcaccacatggctctgtcccagagccatgccctgtgtccttcagagaccacaggaggaaaacaaccagttctgggacgaggacagggcccttgagagaaggtggtgtttggctgggccaccaaaaacccctcagccctgccagcacactcagtcccctctctggtcgaacagagctctgcctgtggtcctgggtcacagtcctgaaatccacaggtccagcgctggccagggacaaaggcccacccctgcaagccagcagaccaatcagcagacacctgaaacacgaagttcacagcagggtcaggctttgtgtcatttgaagccctctagataggccgagaaccagagctgtttttgtaaggaacaccagtgagtctggagatttttttcttttgcttcggtcttttgcagctttctctactaagggttctcctttttcacccaagtaattgcctttccatctaatggctcaaatggtcaaaaggcatctaatagtctcatatgatcgctgcctctctggcctcgccctgctgctgaggtcagcgtgacctggaactgtccgctggtccctttcagtaacctgaagctttcaccgtagatgtgctgtattgcccagaagccattgtgtcactggtcagggtcctgcggaggctggctgcctgccgggagcaccagcgggcttctgaggtctacgtggccttcgctgtccgcaattgagagacgtgccagctgttcaccaccgagctaggtgagcccccaccccagcctgggcctgtatgtccctgagctgtcactgcaggactccagtggaagtgaaagagctgggcaccagggaagagctaggatgccccacactccgacaccatgaggggaactcgggcagaggccggtgagcagggtgggctcggggcattgggggcttgcagcaggaggagggtagctcagcacagggagggagggtctgagcccagcagccctactgtgtgcttcagagcagggttccctaagcccttgggcctcggtttcctcatctataaaatggaggtggcaggaggggcagtcggggtcagggctggacagagctgtggcctgcatgacgctggagcacaggctgtacaggcggatcctccactccactgtcttgagcacccagttgatggaagacgagcagggtgactatagagaaggggaactggccccgtagtgggccacccactgtcctcagacctgacatttgtcagcccccagcacctgtgagggtgtgctgtcattgtcccatctcaccgacaaagacagtaggacacacagaggccaagcgacccccgaccccctcccaaagccactgccctcccacacctgggcaacagtggccccaaccccaggcccaggcctcctgcaggaaggaagaggactgaatggagggcatggcaggctgaaaggacgtggcctcctcaaaccccttggtaaagggcctctggggccacctggcagggaggggctggcacaccaggaagtagcctcctcctgggagttaagccagagcccaagtcctgtccccaagtggcctccagagccaccttttcagaaaaagtacatcatgcccatgcctgttacccctgcttaagtccccgcctcctccctgagcctcctgctggcctctcacctagaagcgggggtagtcctcggccctccagccagtgggtgcagacctggatgtgctggaaatgcttctggtggatgaggcggctgtaatactccctcagaggccctttgccttcacagagaagagcagacactgccatggacccgtctctgtccctgccacatggccccaggcccaagacactccccctaggagggatccttttcccagaagctccacccctcggcagctccagtcaggccccatctgggcccttccagaagcaacccaggagccccgagacctgcaggggtgtgtgcaccctgacccctgatgcatagccctgcacctgcagccagctggcctcgggctgcaaacatggtggggtaagcactggcctggcacctgaccacccactgggtggacccagccttctgtctgtgttgtgcacaggggacacgaggactccccctgccctgccgcagcccccagagcacatggtgcgggttccaatccgcgcctgccctgccacagcctccagagcacatggcgcgctttccaaaccactcctgggagcctagaggccagaggagggaggagagcaggaccagcagctggcccagaccccgcctcttcctacaccacttccgcttttctccctcctcactgagtcatcttgaaagggctcagcagcagtaactgtgggacaggggctcttccatttgaaaaattaaaagaggcttggttaaggcaccaatgacatggccgggcacagtggttcatatttataatgtcagcatattgggaggccaaggcgggtggatcacttgaggtcaggagttcaagaccagcctggccaacatggtgaaaccctgtttctactaaaaatacaaaaataagctgggtgtggtgggcacctgtagtcccagctactcgggaagctgaggcatgagaattgcttgaatgtgagaggcagaggttgcagtgagctgagatcgcaccactgcaccccagcctgggagacagagactttgtctcaaaaaaaaaaaagacaccaatgacataacaacaacagaaaagatgcttggaaactactgaaaaagtagaaagcttggtatctacagattcacatctgggctccctgccctgctgtgaaaccctctgagcctcagtttcccacgtgtcaagcagtataagaccctatggcagagagctgcagtgaggattaaggagacaagatcgtgggaagcacagggtgaaggctgcgtgcccctccccctctgccatcccccagccaaacagacacccagggtcccaggcagtacctgttatcacacagacaagagaaggaaggttgcgtccgtgaagagtcagttgttcaaactctgtgtttaaaaaaagaagcaattctacatggaatttctgatagaattttttttttttttttttcctgacagactctcgctctgtcacccaggctggaatgcaatggcgtgatctcagctcactgcaacctctgcctcccaggttgaagtaattctagtgcgtcagcctcccaagtagctgggattacaggtgcccaccaccatacctagctaagttttgtatttttagtagagacacttttcgccctgttggccaggttggtctcgaactccggacctcaggtgatctgcctgcctcggcctcccagagttctaggattacaggtgtgagccaccatgcccattcagaaaaaaatttttaaataaacaatagccagagtcccctggtcaggtggagaaagtgcactgctctggcagggaggcccccagcctctgtgagatactctcctggagggcgcatttcagcctaagggcctggtcactcaatgacccaaatggggattcagggaggcccacctccaccacccctactgtccccaggctgccccacccagtagcccaggacaggaacatgttgcaggccaggcaagcagctcacagctcagtggcccggacaagcccagagctcctcaccgcagccacacacctactttctaaagctgccagcaggatagagaagtcttcgtcctctatgagaagagaattgaatgtcaggggcctgtttctagacagcactcttccagctcacacaccctccccttctcattgagaccgtggcggggtgggggcatccaggactggtaggggtaaggagaacacaggttggccaggtgcccgtcacaccagccccaagtgccccaggggtcgtgcagacctgtccaggtgtgctgctgaccagcagggctggccgctcatggagacgcatcaccagcccgctcccagcatcctgctccatgaaggctgaccgctccatggctgggtcctcaggttctgagctgaaggaggagaaaaaaaccctgtgagaggccacagagcaggcccaggacccagaacgggcatctcctgccatggcaaggcctgcaggctcccaacagttggggtgcccagccgcatcagcagcaccaggccacccctgccaatcgaggcatgggcttgctttctctaatattgtttctgggtgctaaggttacaacagcaaacaagactgactcattccttttctccacgggacttactgtcttatcatcccctggactcaagatgagggtgctaggatgccctcccacaccaccccagcttacccaggggcacacctcagggtatgtggacctgcacaaaggtcccttccttagccccatgagacaccccaggggacacacaggtccacagatcctgccacaggcctgggaacccattggcaggagagtaagacagtgcaggggtccacaaacatttcttaaggggccagagagtaaatacttcaggctttgcaggccagacgttctctgttgcaaaacgcaattctgctattgtagctcaaaggcggctatagacaactcagaagttaatgagtgtgttgtgtcccaatgaaacttgatttacaaaagcaggagactggcctgtagccttagtttgccaacccctggatgagtgggttcccaggtctgcagtgagaaggggagaggccagggcagtggcgagcaggagagaaggcagctgaggatgggaggcctaccaggccctgaacagagagtgcgtgctgcccaccttcatgaggagccggtgctgcaggtccagaggtgcctctttaaagaaagatgccagcttgtcgtagacggtcacagccctgcaatgaaatcatggcaggactattgcattagtccagcgtggaggctactttctgctcaaaccactcatttgggtcccgtgcccaacgtcacccatcctcagcaaaaccaccattatttccttctgcctggtttccagaaagttcccctaaagccctgaggaatcaccgaatgaaaggggctttttacaaacaggaaacttaagtggagtgccaatacacaacatggattgcagcaggctcggtctaagataaaaccagacggtggacaacaggccaggtaagacccacatggtctgcactccctggttctgttattgtgtggaggaatgtcttagtctgttgctcctgtgggtgtagctaaagcacaaaccaggagtcctcatccttagaaagcagttagacagacatctgagaaccaatcccaaactgcagccttccacagaaccttctggaaccttctggaatgcaacttattactgccagagggtctttgatgagagtctactctccaccatttgtcttcagagagaatacccacctattctctttccgtggaaaggtaagttattggagtttatgcagtctggtatattaattgagagctttacttcaaagaatgtcacgtttatggttcagtctcacagactgggttaaaaaggcagtgttgactattaagttgtaaattactatgatgatcattattattgaagcaagctgtgagaaatgagcattatcttacaatatctgcattttagtgaacctgaaggaagagtgtattgctggaattacagaagcctgagaaccacaggggaattctcactgcagggtattcagggtcaaaagctgattctattttgcatgctcaatccttcgtcaatttatttttatttctttctttattttttgagacagggtcttactctgtcgcccaggctggaaggccttggtgcaatctcagctcactgcaacctcgcctcccgggttcaagtgattctcctgcctcagcctcccacgtgactgggattacaggtgctcaccaccatgcctggctgattcttgtacttttagtagagacggggttttgccatgttgcccaggctggtcttgaactcctgacctcaagtgatccgcctgcctcagtgcctaaagtgctaggattataggtgtgagccactgcacctggcctaatttaacagaatttaactgagcaaagaatgattcacaaatcagactcaaaaattagacacagaaacaaaataggttcagagcagctctgcgctgctgcgtagtcagagaaaattgatgaagagaaaaaggaaaatgatgtacagaaaaggcagtgaggtacagaagcagacagattggttacagctcagcatttaccttatttgaatgtggtttgaacagttggcagcctgtgatcagccaaaactctctgattggtatatgaatacgaatatttcactacccattcttctgagcatctaggtgttttctattcacacattcattaggtgtcaggtctgtaaagcaaaaataaaattctaaggcccccccaaccatctgaatagacttcctcctcagccaagactgttttaaaatttaacctgagagactatttcaggcattgccgggaagtcggggtcaaatatgcctcatgatacctgtcaggcattaatatcaacgcagactttaagtctggtaagaaacattttacaatctcatttctaaatgcacttcttaaagtgaggtattgttcacttggaatattccactgtgattttaaatcatctttagtaagattttgacagttttgtaagtgtttgctgcttccagggactcatatttatccatgtaaatgtaggcatagctggaaggtggagtgtattcagctcttcagaaattaagggtttcattttacattgaatcttgcctttggctctcagatccccttgatcaactttgtcaatgattttccctactaagcatgtgagaaaaagaaacaaaggtgacagaatacaaaaattcctgcgaatttccaaaagccaaagttcacactccaccgcaattttgccatttactgtcagttcctgtctgacccaatcagacacctgaggtctctaactggatccaggctagttaattcttggatccaatctgatcctggacccagtccagtttctgtcacaacttctgaatgcagtttggataaaaaaatttgctcaaacaaactcagatagctcaaatcataaatcagcggggcttcagaatctgagagagaattgagcagtaatccccagttgtgagacagcaatggacacagtgggcaggcgagtactgaactccctctgcaaaaattctaacagtgagaaaatttaaccatcccacatcttgcctgtacccttcaaactgcccttcattcttcctgggcatgggccaagctaactttgggagacatttagtttatagtttaaatgataatagctcttctccaaagctcaaccacatttgtaaagctgatgagagaccgccagggtaagaggatgggaggagcctgatttctgctaaggtgtagacataaatgattacctgccattattctggaggtcacaagacatggaacttccccaattactcctgcaaatcacatcactattgtagaacccacgatcagccttttcggatgtcttttcaggtttttgcttgtctgatgactgatggctccacccagacctgccaaccactcccgcggccccatccagaagtggctcagcgtgcatgaggaccatctccaacatccctgtgattgtacccccaaccaaccagcagcaagaacctattgcctagtcacctcccctctctttccccaactatcattgaaaaagtctggcttccaaattttccgggagactgatttgggtaataataaaactccagtcttctgttcagccagctctgcatgaattaagctctttctctattgcaattttcctgtcttgataaattgtctctacctgggcagggggcaaaatgaacccatagggtggttacagtaccttgctgggtcacttgatattcctggagggtcacgggaagcgctatgtgaatcccacttctgatattgtaagattctctccagggcctgaaagcttaaggggttgagcaactcctcccttctcaggcccagccccagggcgcaaggccgcttgcatcagcagcgtgcgtgagcagatgcgccagcaagatagcaaaagcaggaagagagccagccggaagacaagtacctctgaagatggagaaagaggccatctgggtacaacgttgcagttacgtcagaccaggacacttcctgtttacaggagactataaaacctttgccccatcctcacttggggctgacgccgttttaggcctcagcccgccagcacccaggctctcattaaaacagcatgttgctccaca

SEQ ID NO: 422 - DNA, 19284 bp, Homo sapiens
  source 1..19284: mol_type = other DNA
gacacacccaggcagcccaccctgcccaggacctggggatgcggggcgggagagcgcggccggcgtgggagagctttatggggctgccccctcgatcgtctgcgaagtggggcgcggggcagtccctggaccggctctgctgtgctccgggcagtcgggggcttgcgggcgctccggggaggatgcgggcaccaccggctggacggtcgcagcctgcagggggccctggggacagcctgcctcatccccccggcgggctcgggccaggtggcagcgcctgggctcgccgcgcggaggcggcggcttctcgggctaggggcggcggcaggggcggccccgggatcacatgggcggaggcaggtccgggagccccgggcgggctctccccagagtcgggtagacggcagcgggagcggtggcgtctccccgccttccctccctcccgggcctgggcgcccagccggacaggtgagcggcagccaggtgagcgcgcccacctgcgcctctccgcgcggcccgccctccccggcgccgggctcctctccgcgcccctgtcggcgcggaaccctggcctcgtccgcggcccagctccctggagcctcgcatcagcgggggcgcccccgcgagctgcgctctccccggccggagcgctcctcctccagcccccagcccgcagggtactttgccctcggagcgaaggaggctccagaactggtagagccgggccatcgggctgggcacctccccgcggcgcccgcagcgcggagtccactgaccggctcaaaggtctgggaatctcggggcggccgcgagccggcctcggggactggggtgggggcggtgctgggaacagaggctaggcctgggcccaaggggaaggcagccggggatggagcggacagaccgctggtgctcttgatagattctcgcagcacttgcgtccccagggcagccccaggatgggtgctgggcagggtggtgcccagcctggcaccgcggcttcctgcctggattggctcctggctccagagctagaggctcaggaaatcccacaggggtctgtctgcaagggcacttccttgcccagcggaggggctgtggatgggaggcctgtcaccccggctgtctgtcgggcagcatcaggaatctgggggtgggtgtgtccagcttgacagatgaaccctggcctccttgccctggcagccggcccctgggggaggtggggagcccggtcttgcccgtgtgatccactttgccaagaacgaggtgggcagctaggaggcccatgtgaagactcggcctcaccccaccagtccttcacctggccagtgacttacacagtctgtactggtgccagcctgttccttgacccgtcactcctgcttcctgagccctgctctccctaggccactcaccagccctcccccagagtggagaggaagtaccgtgtgctgtgggttttggggacaggaagcaagcgctagtgggactgagccctgatggtggaggaggggagactgagggggtgctggcatcccctccacttgccagcccctgccccccatgctccagcaagccccctgcctggcagcctgggcagccccctcctgggagtcgctccctgggctgaagactaaggaagggagaacccagaagcatggcttcccagggtggggggaagtgaaaccgggctgagggagggagttagccacttcctctacccaccccaaagcccctgagtagctgctccgggagctgtggtgccctctccttctccctttggctcctctcctgctgccttacagtgcccccagagccggctaggggcatggacttcacctcctggtcctctcttcctcaggtatggcgttgacggtggatgtggccgggccagcgccctggggcttccgtatcacagggggcagggatttccacacgcccatcatggtgactaaggtaaggatggtggctcaaagagatgagaaggtcctgccagaagcgaggtcggccctgttcaccccactctgcacagatggcttgctttttctgttctggagctagggatctgctgctgcctggcgtgctggctgtaagggagccgtggccctttgccacggggatgtggtggccacttcaggaacagaccttgggagtgaaagggagctgggaccaggacagggccggctcttgcctccccagttgctatccccacacttgcaggcagccatttggggtgattactagaacaagagccccggagttcttggcagtctcctcttgacctgggcccaggctgggaacattcacaggagggctgtgcaggcagccacctgcaaggtgcgatttgcacgggcaaggctctctatccaaaagtatttccaagcacagttcctgaaattctgccactgcacattctttgggaggcccattagaatgccagtgtggggtgggggctgccacctgcgctcctggaggggatggctgatcagctgggtgtcatgagcaggcagagggacatgcaggagggtgcaggccggcctgggtcaagccagcctctgtgtttcttgggtagcagagtgggaagtcccttctccagctgggccacggtctgagcatgccagctcctcatccctacaggtggccgagcggggcaaagccaaggacgctgacctccggcctggagacataatcgtggccatcaacggggaaagcgcggagggcatgctgcatgccgaggcccagagcaagatccgccagagcccctcgcccctgcggctgcagctggaccggtagggcctcccgctctgcagagcctgtggcattccccctcctccaccaccccacgtattgagcagcccttgctcctgcccatgggctagagctcagccctaaagcggccttcttgggccctctccacaccttggtgagaaggtcctgggctctgcttcctgcagcagggtgggctgaggggtgttcccatgcctggttgggtaaaggtgggcgccaggctgggcgtgcagtcacaggctgggcagggcgagctggcaccagccaccttgaagcccgggtttgactggttcccaagagtgtgcagggcacagggcgtgggcatgaagtgggttgaagaggggaaccttctgggaaaggtatgcccgaggctgcatccccaggactcctgcttccaacagggcatggcctttgtttagttcccagctggaagtgaggacttggggggctcattcctcatagaggctgtctgttcctccccatcactgaaggcagatgcccgatcctgggttactcctagggttttgagcctataagccaaggtggggccagggtggggcctggaggccaagctatagggggaacaggtggctccctggggtggggcattgcagtgagtcacagatcgggaatgccaggagatccccgagccaggagagccctctgcacgggcctagaacctgagtcagacacctcttgcatcctggccacccccacattgtcctgctctcttcagccctaccaagcccctccttctccaactgccctgccctgtggtgtggcagaagccggctcccttcatgtcattcaggtccctgggtgtttgcaggagcgggaccccaagaaggagggtagagagcacctcatggcatctgggaatggggcagaaagctacaggaggctgagggtctggcagcggaagggcaggagcctcggactgtctcttcctctggggttctctggagggaccagggctcgggggaggtaggcctgggctgtaagtcaggcctctggttctgcaccaggcaagcccagactccagtctcttaattttttttttttttttttttttgagacagagtctcgctctgttgccaggctggagtgcagtagcgtgatctcggctcactgccacctctgcctcccgggttcaagagagtctcctgactcagcctcctgagtacctgggactacaggcgcgtgccaccacgcccagctaatttttgtatttttagtagagatggggtttcaccacgttggccaggatggtctcgatctcctgacctcgtgatccacttgcctcagcctcccaaagtgctgggattacaggtattacaccgcgcccggcccagtctccttacttttgctgacgtgatgcccacccccccccccgcccccatctcccgcctcctaccctcccaggtgacctctctggtattcagaagccctggggcaggaagcagggctccaggctggagccagagactgagctctcctcaccctgatcccatggctctcccaggaagcggagggtcctgttgccctacatctctagaggcagcctcacggccaggaatgtgtggcaagatgggacgaggcaggctgtccctcagcccagacttcagttacctcccattcagggctccagctgggttccactttggaagagggtacccagggagctgggagggcgtgcccctctcgctggtggggagctgggcctacttgtctggaaggaggcaggcgggtctcgccctttgtttaactggggagacccctgagaaagggatcaggagtgacgcgctcaaaggcaccctggcctccagtgggcagggtgcacagctggcccagtcaccgtgggctctagaacttgaggcagctcactttccctctctgggtttcagtttctccatgggttaaaatataaaggattatttctatgaaatcagtaatcaggccgggcgcagtggctcacacctgtaatttcagcattttgggaggccgagtcgggcggatcacctgaggtcaggagttcaagaccagcctggccaatacggcgaaaccccgtctctactgaaaatacaaaaattagccgggcatgctagtgggcacctgtagtcccagctacctggggggctgaggcagggagaattgcttgaacccaggaggtggaggttgcagtgagccgagattgcaccactgcgctccagcctgggtgacagagcgagactccatctcaaaaaacaaaaaaatcagtaatcttcccccaaatcaatctacaaacccgaggctgagtgatatcagtgacaaagtccaggcaaaatagaaaaaaaaaaaaaaaaaaaaaaaaaaaaaagggcaggataatgtgaggactctctaataaaactgaatgtttgaactttctgatgaagttatgtacgttctactttttaaaaccaaactatcctttctttttttggggtgggttttgctgttgttactgtcgtttgagatggagtctcactctgtcgcccagcctggagtgcagtggtacaattttggctcactgtaacctctgcctccctgggtcaagcaattctcctgcctcagcctcccaagtagctggtgttacaggcatgcgtcactatggcttggctaaatttttttttttttttttttaattagagatggggtttcaccttgttgatgaccaggctggtctggaactcctaacttcaagagattcaccctccttggcctcccaaagtgctgggattacaggcgtgagccaccgtgcccggccttggtgtttttttgagacagaatctcgctgtgttgcccaggctggaaggcagtggcacaatcacggctcactacaacctccatctcctgggctcaagcgatcctcccacctcaacctcccaagtagctgggactaccggcatgcaccaccatgtgcagctacttaaaaaaaaattttagtagtcatgaggtcttcctatgttgcccaggctggtcttgaactcttgggctcaagtgatcctcctgccttggcttcccaaagcgttgggatgataggcgtgggtcaatgtgcctggccaactgtcctttcttttaaggaaccatggttgtcattgatgatagttgtttgtcttgagtttgacaaagttaaaagttgacaaccggatgtccaaattttctgtagcttttactggtgttgagaactagatctgggaacagttttggcctcttttgggggttgcagggtgcagggcccctgtgacattccctccctctgttgccttctcaggtctcaggctacgtctccagggcagaccaatggggacagctccttggaagtgctggcgactcgcttccaggtaagctggtgccctcccctgacagcctcagcaccctgatcactggtgcatgaaagtgaggcccgagggcagggcggccttggcggggcagccctgcctttcctgacacagtcactctctccacagggctccgtgaggacatacactgagagtcagtcctccttaaggtcctcctactccagcccaacctccctcagcccgagggccggcagccccttctcaccaccaccctctagcagctccctcactggagaggcagccatcagccgcaggtgagtgtgcctgtgagtgggtaccctggtcgcctgcgctgccagctccaggctggctcctctgagtctcaggagctctgcttgggagcccggggcagcatcctccctgggcaggctgggggtggccctggcacacactgtccctttcccactttcagcttccagagtctggcatgttccccgggcctccccgctgctgaccgcctgtcctactcaggccgccctggaagccgacaggtgaggctccctgggggaggacaggctggaggaacagaagcacctcccgttcctgtgggttgccagtgccccgggactgcaggcggccaggcccacctgggcagccatggcctccttctcctggccacaggcatgctctgctcctgagccagggaggccatgcttctggtcgtgggccacctgtgctgtgcccaagacctgcccagcagtgcccagtagcccgtccatctcctgcacccctcccctcatccccctcccctcccatcctgctgacttcctccctgcccagtatgtttctcttgggctgtggctgaaatagtttcgctgctgttgttgggatgattccctttcgtctctggctgcatctctcgaacacattcctccccattccaagacccgggcctgcctgactcccacccacaccctcccttcctcctctgactcagcccagagatgccccagtgggactgcggttctgccttgagcgctcttggcttattctgtctcctcctccccctacccccgccagctcccctggactctctttcagccaggtcccagtggcccctggtgacagcctaacccccttcctgggtggtatttctcctcttcaacggtgggggatggtgagggagtgaggcagccaacagccctgggccgcagctgctggggacggcgtggggggcacgtccagcctttggggtgatggggatatggcccagctgctgagccctacctttgggttgattctgcattccagaaagcagagcctttgggggtggccagggagggcactagaacccagaggctctggaggaggaaggagcaggatctttctgggggccttccgaacagcggctgcctagtgacccgctgcgtgcccacccagaggccagcctggcactgtggccatagagatatattccatgggtccccttgttaaggaattgaagatgcagttgtagagataaggcaaacttgcaaaacaattttggagcaattaggcactaagcagtgtggtattaattacaaaagcaggaggcgttctgggaggggaggggaaggaaggctgtgtgaggagtattgctggacgttagaggtggtggtgagagggtttagggaaggatgagcaggaggcccgacatgctgggagatggagaaacactggtccgggcgacggctgatgtattggggctgggggattttttagggggaacctttgttctgagatgagccaggaatgagcttgtttcaagagggctggtcagtgtcagtcctggctctgttccgcgacacctctggtgggctgtggtctcagcaggacccacgtgctcaagggcaagccttcccgagcttccccatcgtgttgcccccagtccaggaaaatgaagggtgtgggaggtacagaggcatggctcccaaaccagcggcaacacctgagaacttgttggaaatgcaacttcccaggctccagcctacacccgctgaattgggcatggggcttgtgggtcacgagcccagagctgggtgtggggagactcacttgggtcggtcccacctctgcctgacgacttggaccagccccccttcctctccctgggcctcaggtcagactagacgctctgagttcccttctctgaccttgatgactctgctcattccttcggcaaatatttgtcgagcagctgcttcatgtcagacactcatctgggctctggggatgcaatcgtggaaaaacagagtgacacctctgaccctatggagctgacgttctagtctacaaatgaggctgtggtcccacgggtgcacaagtctcagggtcccacagctgccttttgagaatcactgtgtagctgggtgctgtgacatgtgcctggagccccagctactccggaggctggggcgggaggattgcttgagcccaggagtccagaccagtttgggcaacatagtgaaacccccatctctttaaaaaaaatcgcttatacttgagagtcttaaaggctctaagaggtcccatgagaaagaaacccacttaatttttctttatatcctaaacttgttgaacagcagaatttctcctgaatttctacccctgaccccctgccctgccctgccccacccccaggaacatccttgcgttccccagcacacatttcgagaggtgttggctacagacaagctcatgatgggcaggtgaagggggagcagctttcctggatttggagataaaaggtctcttctgtgaaggcaagggtcgctaacccctaaccgcctgggaggaaaggaaggagagaaagacattgtctctcccagtcggggagctggtctccttttctgggctgggcagtctggtgggagtgtgtgagaggaatgctgtgggctgcagaggcaggggtgctgtgtccttgtggcctcctgacatggccaaggctgcagagagctggaggctcaggatgcccttatagtgcctctggaaattacaggttccccctgctggtaggcacatgccttggtgagcagaggccaagtgaaaaaagcccctctccctctggttgggaatgaggacttgcctcatgaagggatcccgggccggtgccctaggcagggcccatggtggtctgtctggagatgtgatgtggctcgtgaattcctgcggaaactatctctaggtccttcaggtgaccgcacagccccgggcagttgccctggagcccaggtgtggagtcccagccctgcctctgatgctgcaggtggcttggaccagctactttgcccttctgacctgcagtctccttacctatagaacgttttactggagaaccctgagagcagagggatgcgaggccaactgctggtagcagcctggtggggtgagggtctagggttgttttcttaagatccagaagtttttgctttagcttaaggatgtgtgcaattttccatgtggcttcataattcatccatgactttgaattttaaaatggagagaagttggcttcccaggaaatggtgcccctggccctgggcatcggcccacctggctgtctccaaggctctccttcccagtggctggtgcgggctccgggagctcagctgagtcccattggggtggcaacggaaagggagcaggggagtggggagtacggagatgcaggctggaaactggcctccaggaacaactgtgaggttgaaggcgagatttccatgttgggagcaaatttaagagccccagatggacacggcacacctggagacaggcactgctgcctgagtgtggcccagggagggctcggctccccaaagctccacggggcaggcccagacctcccagcagagtagggacaggctggttagcccagactcccgcctctgaggagaggaaccagctctccttgggaagagggcctctgccctggccggccctgactcccaggggacttcgaccccttgcttcatccctttatgtttctatctcctcagtgcaaaagggcagcgtgcttcctctctgctggttccgtgggatcggagccaggccccagtgtgcaatgtctttgcacacagataatagcgtgcgtgacagaggactctgtgcttagctgtcacctgctgccttcctgctgcccggtccccggcagaacccgcatgcctccctccctctctggaccctggcagtctctgcgccctggctccgagggaaggggcagggggcccgctggtcggcgagggctgggagcccccgacaccttggctccaagggaaggggcaggggtccgctggtcggcgagggccgggggccccctggtgtcgggcctgggaacagccgggctaggccctcctgggtgtgttggcccaaggctctggccctgactcctccccggctgcctcctcccaacaggccggcctcggccgcgctggcgactcggcggtgctggtgctgccgccttccccgggccctcgttcctccaggcccaggtaccagcaggccccggagggtcgggttggggtcttggaaggctgggaggggcaggagggagacgggcttccccgagagggatggggtcccccaagcccagttggctcctccacctcccagattcctccccctcccccacgctcttctcctgccccccacccccttgcttgcctaagctccggcacgggaccctcattcctggctgcctcccaccctgcagcatggactcggaagggggaagcctcctcctggacgaggactcggaagtcttcaagatgctgcaggaaaatcgcgagggacgggcggccccccgacagtccagctcctttcggctcttgcaggaagccctggaggctgaggagagaggtgagggtctggggggctggggaggggaaggaggttcccttccgtaccccgggccctgactggatgggtcagtgaaccagtgttcttaagtgcctgtgaggtgctcaccccaggactaggcacggagccgagcagagcgcgaagccccagcccctgcccataaggagctgacggtccgggagggtccgggagggtcaccagcgtgctcccacagagtagtgggcagtagccagctgggatgggaaagtgtcattcgagtgataaaagcggtggcagggcctggggctgggcctccagggagggcttcttggaggaagagggatttgacttggcctcttggccttagaaaaaacatcaagacttaaacagcattaagagggtggcaggaagcactgtggaaggtggaggctggcggccagagggctttggggtgtgggagtgagagaatgggggcctgatagcatgaaagggcgccagtggaggccaagcccctgcagtgagggccctcgggaagggaatcaggctgaggagtgccctaacccaggaaagccattaaatactgatgccaggcgagcaagacatacggaggcttgccagagttccgttattcatgtgacagacactgactgtgcccatctgagggaccagatgtgtgcagagtttggggataggtggccatgaccccactcctgcccttggggagctccgttcattggggcagatgggcctggccagctcccatggaagtgagcgctgctgtgggagttactactcccacagcccctgtccttaaggtgctcagcaccaatgccctctagaacagtggggagaaggggagggagatgacaggacaggtaggagagtggccagagaggcttcataattcatctatgactttgaattttaaaatggagagaagctggtttcccaggaaatggtgcccctggccctgggcactggcccgcctggctgtctccaaggctctccttcccagtggctggtgtgggctcctggacctcagttgagtcccattggggtggcaatggaaagggagcaggggagtggggagtacagagatgcaggctggaaactggcctccaggaacaactgtgaggttgaaggtgagatttccattttgggagcaaatgtaagaggccatatggacagggcacacctggagattggcaggtggctggttctaacgctgatgtttagctccaaggggcatttgcagaggcacagggggtggggtgagaaggtttggagcaaatctggtctgttttgaccctgaggcctcagaaggtcccaggaggcagcacagggagagagcagtgactttgccaaggaggcctcagcgtccttagctgcagacgggcgacagctgccccgtagccctgggcttcatcttcgtgtggcttgagagctcagatgtgacaaggcatggaaaagcactttgaaagccacaccgaggcattgcgctcctgttgccatctccagttattatctaatcacactgttattaccaggtcattagagagggagcacctgcttcacctgacactgagcacagatggccccaggtggccttggatgggcaaactcggccttgtacctgcctccttcatgcccttgcccagcctcagccatggatctggcaagatcaccttcctccttacctggtgccactgtcagcgtgactttagggtttctcttataagggtgctttccaagaccacctcctcagagcatctttgggaggatgctgtggttggtgggctctcaccacatgtctgtctgccctgcccccaggtggcacgccagccttcttgcccagctcactgagcccccagtcctccctgcccgcctccagggccctggccacccctcccaagctccacacttgtgagaagtgcagtaccagcatcgcgtgagtgtggaggggggtgggggacctgagccttcacaggggagtggggagggggacagggcactggatgctttcaggaagggccgggcccatcaggggctagcactgggtacccagtcggggactctaggggaagcagtgttgcacagctttgggggcattagttacaggcttcttaggagcctaggctagctgcttccggctgcatctcctctccctctcctccttttcccatcccttttgatttctctttgatcatttcaaagcctctggagatctgcccggaggtacagcacatcctcttggaaaatcttgctctttccccttcttccccctttggagcaggctgcatttttcccgatgtgggctcatttttcttatttttcttttcttttctttctttcttttcttttttttttttttttttttttgagacggagtctcattctgttgcccaggcaggagtgcagtggtgcaatttcagctcactgcaagctctgcctcccaggttcacgctattctcgtgtctcagcctcccgagttgttggggctacaggctcccgccaccactcccagctaatttttgtatttttagtagagacgcgttttccccatgttggccaggctggtctcaaactcttgaccttaggtgatccgcctgcctcggcctcccaaagtgctgggattacagcgtgagccaccatgcccagccgaggtgggctcatttttctcattaagtggcatttataatgcaaccacattctctggaaggttgctgaaaccccccctcaggtaaatttctgaagtgtgtagtgtgggaggggcaggtgattgactttaggcaaatcccttaacctctctgggctttagtgttttcatctgcagagtgggagaatatccagtccccctgctgtgcagagatagggaatgtgtgttgaaaaagcatgttttccatcctggttctcaaaggtgtgtgtgtcgggtcccttggagggtttgttaaatgccgatggctgggccccaccccagagcctcctctccaggaggccaacaggcctgagaatgtgcatttctcacgaattccccagtgatgcggatgctgctggctgtgggacccaggaccacactgagaatcactgctctgttaaaaatccaggcaatgtgggacggacttacagtctttatgtgagaggaacaacttttaaaaaaaatttttaatatttttaatagagtttcactctgttgctcaggcaggagcgcagtagtgccgtcatggctcactgcagccccaaactcctgggctcaagtgatcctcccatctcagcctcctgagtagctgggactacaggcgtgtgccaccatacctggctaatttttaaattttttgtagagatggggtcttgctatgttgcccagtttggtttcaaactcctggccttaagtgatctgtccacctgggatcctaggcatggattacaggcgtgagctactgtgcctggctgacttatttatttttattatttttaattaggggtcccagcagtggcagcggtggtgggggtttgtgtgtgttagggggtttgtcaaagtgagattcctgtgtgcagcttcaagaatcaagtctcgggccgggtgcagtggctcacgcctgtaatcccagcactctgggaagccaaggagggtggattacctgaggttgggagggcaagaccgtcctggctaacacggtaaaacccgtctctactaaaaatacaaaaacttagccaggtgtggtcgcacatgcttgtaatcccagctactcaggaggctggtgcaggagtatcgcttgaacccggaaggtagagattgctgtgagctgagatcacaccattgtattccagcctgggcaacaagagcaaaactccatctcaaaaaaaaaaaaaaaaaaaaaaaaaagtctagtctctgagaaggctttgggctccacccaggtcctgatgctacagtggggaccaggccccctgggcatggtggcctcctgcttggtgctgtggctctgagctaaagcctctccctccccttcaggaaccaggctgtgcgcatccaggagggccggtaccgccaccccggctgctacacctgtgccgactgtgggctgaacctgaagatgcgcgggcacttctgggtgggtgacgagctgtactgtgagaagcatgcccgccagcgctactccgcacctgccaccctcagctctcgggcctgagcccgccatgccctcagcctgcctcactgctgggccagggtcatgcctatataagttggcatggcagggacaatggtgggcagttgctcttacatgagctaagtttggagacctgaggcccctttgtcctcgctgggtgggccaaggtctgggacctgtcttggactgtgggagactcaccctcaccttgccaggcctctcccctgcaggactggcattgcactagtctgaggtggccactgcctttgatcaacctttgtgtgcgagggtctaagtagggtcgaacacagaagtgggaaggagaggggtgggccaggggctaatggtgtcactgtgtaaagtttttgacatactagctctataaatatatgaatatggacaaaataaagtagatgtcccttccttctttttcctaccgccagccctgggtatgacctgctcccaccactgggtggagggtctttatttatgcaacatacgtttcttcttcttttccctccctcaaatcccacccctgccagttgcctgcacctgacatttcccatggaagggccttgcctcttttaggttgggagtcatgtcattccttaacctttttgtaaagatgcccgttttacaggaggacgcttgtgctatggagggaatgagattgtcactggaagctttggaggggatggtggagggcgccaagcggagggacaggaggaagaccaggagacccatccagccaagctggtgagacaacctctgatcctgaggaccggccgcccaccaagggttgggcccccggggccaggttgatctaccgacaccttccacttctttcctgggagagactgctggcttcattggtgattgatttggaggggggaaaaagggcagggtggctcaggctttaggcccaggtactggggaggcctgaggagccctcctggagctcaggaggccgaggctgccttaagctgtgatcatgccactgcattccagcctgggagagagagaggacctgtctgttgaaaaaaacacaaaaacaaatgaatgcatgtggccagtgccaggtgagctgccctgggggttcactggagttgaggcaggggacagtagtctcccctgccagcctaggattttgggcgtcattcacccactacccctagtgctagtcccagaggatgctgcggagggggcagcctcagctctcttttcagagaagatcaaagctgggcttcccagggtgcctggctggtccctgccggcagctttgtgctctccggctctttgtgaaaggaatcttggcgcagatgtttgtgttgcctcctcaggcacctgtagatataatttacaccatgatatcattgtctcaccttttgcctgggtggctgcctgagaaaggtctttctttttatagaaaagatcaaggctgtctggcgcgggactccatgagccccaggcgctggtcagaaacggggtagtctctttggcgccacctagtgtccagtttggcccatggcggggcccattcacggggcaacactgggcttctgggcacagcgggaatacagaaagatacagcactcctcatgccttcctggaggtagaaggccagtggcagcgactgagctggcatgaatgaataagaggatgtggcactgagcgccaagggctaccttggaacgcaccgaggagcgtcccgtgagttcaaagcagtggccgtgatgcaaaaggagggctgggtcttggagacgtggagaagaggaatgctgagtgatggggtggctgctggggggatgcttagctcagagcagtggctgatggggacactgagataagatcggaggggagctgtcaatgccagaagtggtttgaacttccccttgaggctctagggacattttgttttgagacatggtcttgctctattgcccaggctggagtgcagtggtacaatcttagctcactgcagcctccacctcccaggctcaagagatcctcccacagcctcccaggtagctgggactacaggcgtgcaccaccacacccagctaatttttaagtttttttttttttttaagagatggggtctcactatgttgcccaggctggtctcgaacttcgggccccaagccatcctcccaccttggctttccaaagtgttgggattacaagcgtgagctaaccttgcccagcctctgggaacacttggaaggttttaagcagagaagtgacaggttggaaaagatggtttggattattgatatggacagattcccacctgtatgtagcacgccatgctgggccagcagtgtcataggagtggagggggataagtggggactggggacatgtgaaatgatgggcattccagtgaggcatcgaatgccttctgagggctttgtaggttccagctcaaatccccctctggctcttgttctttggtgtggcagccatctctcctcccaggggtcctgagggtttcagcaccagggttctctgcagccacacaatcagcccggctcgggagcaaactcccctggaagaacggagttatgagttggtcagcagaggaggctggggacaggcagtttttggtcttttacctctgatcttgtccccaacctaagccagctagctgcgtgctcccactccctctgccgcacgccgcccgtctatgttcccggactttgtccagtgcagtgccctcttcccttcctgcactgaggagattaactgaagtgacagattagagttagaagtggcccaaaggagcatctggtacaaccccctttggttagagaagggaaagtgacttttccaaagctgcacagctagacagtcataatggctaagctctgggggtgcttttgatgtgctagggatacttccaatgctttaactcacttaatcctcacaacccgagataggtactgttaccatcctctctgcagacgaggaaaccgaggaccaggaggttcagtaaatggtccaagtactcctagctagtaaggaatggatctacagcctgcctcccaggtttctggcttgtggggggcagagtttgtccctctgtcatcagaggcagccttccaggcacagctctggtcacctctggtcacaactggaggtcaccacagccctccccagcgctctgtaggctctcagctttgtgcttcctcccacgggtactagctccagctgagcttgcaggaaacccacttcctgaagccaggacttccccatgggaagtgcaggggccactgggcagcctgagggctgaccctgctcaggacactgtctgtctcaggaactcatggcagtggtttaccttgtcaggagtgcatggacgggctgcccctcccattccttcaagcatcactcagagagccctggcctggctctaggcttgggactgcggctgccacaggaagggggcatccccctactttgggtgttgggtcagatcctgcccccgtgcccgccagggctcaggttcctctgagctggtcctgggccaggacgcatctgcatggcggtggtggggaggaggggtgcgccatggcctggaggggagtgtgtgttggggtgtgtgtgtggaggttcttttgagtcacacacaaagcattgtgctgagacactgcattcctgctggctgggcttcctgtttccagatgcattcctgtcccagagtcaccacagagactgtttggaatcccgccccacattctccaaattcagggcgcgatctggcaaaggctccctcccccaccctcttactttggagggagtctgggctccctcctacccagggagggctggcagggctctggcacggccggggtgtgattccacacatcttcttggtcttgcataaggcagttcctggagacccagcactctggttctctctctgcctgtgagaagcggaatgggtactgtctaggaggactgggcagggtgggggcaacccagaggacccatggctagcagggaagggcctgggcttgaatgtgactctgttgagacatggccagcaattctggcacttggctgtcattcggctggcctgcgcagagattggctgtgggcctcagtttccccattttataaagttttaaaatctg

SEQ ID NO: 423 - DNA, 32744 bp, Homo sapiens
  source 1..32744: mol_type = other DNA
gaattccgaatcatgtgcagaatgctgaatcttcccccagccaggacgaataagacagcgcggaaaagcagattctcgtaattctggaattgcatgttgcaaggagtctcctggatcttcgcacccagcttcgggtagggagggagtccgggtcccgggctaggccagcccggcaggtggagagggtccccggcagccccgcgcgcccctggccatgtctttaatgccctgccccttcatgtggccttctgagggttcccagggctggccagggttgtttcccacccgcgcgcgcgctctcacccccagccaaacccacctggcagggctccctccagccgagaccttttgattcccggctcccgcgctcccgcctccgcgccagcccgggaggtggccctggacagccggacctcgcccggccccggctgggaccatggtgtttctctcgggaaatgcttccgacagctccaactgcacccaaccgccggcaccggtgaacatttccaaggccattctgctcggggtgatcttggggggcctcattcttttcggggtgctgggtaacatcctagtgatcctctccgtagcctgtcaccgacacctgcactcagtcacgcactactacatcgtcaacctggcggtggccgacctcctgctcacctccacggtgctgcccttctccgccatcttcgaggtcctaggctactgggccttcggcagggtcttctgcaacatctgggcggcagtggatgtgctgtgctgcaccgcgtccatcatgggcctctgcatcatctccatcgaccgctacatcggcgtgagctacccgctgcgctacccaaccatcgtcacccagaggaggggtctcatggctctgctctgcgtctgggcactctccctggtcatatccattggacccctgttcggctggaggcagccggcccccgaggacgagaccatctgccagatcaacgaggagccgggctacgtgctcttctcagcgctgggctccttctacctgcctctggccatcatcctggtcatgtactgccgcgtctacgtggtggccaagagggagagccggggcctcaagtctggcctcaagaccgacaagtcggactcggagcaagtgacgctccgcatccatcggaaaaacgccccggcaggaggcagcgggatggccagcgccaagaccaagacgcacttctcagtgaggctcctcaagttctcccgggagaagaaagcggccaaaacgctgggcatcgtggtcggctgcttcgtcctctgctggctgccttttttcttagtcatgcccattggtaagtcttgaacacccctcactttagcatctgggggtcttcaccctcctcggcttctgttaccccagactcccagtccgggatggaagaggaaggattagcatttcaaacagcacagctctagggcaattagaaaaggctcccttgtagaaaagtgaattttcattctctttctactccagtctcatttatattaggtcctagagcactttttcgactgtaaagtggcttccaactgatgcagattaattggtctctttaataagaatgtcaacttttcttaatgcctataagcacgtgttcaatttaaatgcatctgctctctctagtctcagagtctccaccaagtgcttaggctgactgtggaatgccattttcactctgctacagaatgcaaattctcttggcctgaaaataagtaccatgcttattctggacaaatgtgtgattttattattgcattaggttattcataagggtttgttataatggtctgtttatgttctatatctgtgctaattttattttctggattcagtatggaaggaattatggtcagccactaagaaaaaaaaatgattttatgtccaaaccaatttaagccttaaataattaatcatagtatttccaataagtaaatacttatttttttattttaataataagtattaaaacaaacacttctcttatccaaaatcatccgggaagttgcagataacactgtttgaaaataatacagtacacataatgttacaaatccaatttttgcagatgctaaattagctgttgtcaaaattaattagctcattataagtatcagcaagctgatccacttggaatagacatctatctccttcaatgagatcccaaaatggttgtgtgctatttttagtttgtaagctcaaatacagacccaaacatcgattatccaccaactctaaaaaacaaaacattatgcctaacattaataaaagtccatttcaagtgctttacagcctaatttaaatggcatatacttaaagtactttaatttgcaactctgtggaataatagcaactattatttttttgtgccacttatgttccagacattttcctaagctttttatttcattagtcccctcgacaactcagtgagttatacacaattatcctgcaatcacaagccatgggaagggattcttcaggttctaataccatagccaccagccaaggatagctatttaaatgttaattgaaattaaataaaattctttcagttcctcaattcctcagtcccactgaccacatctcaagtgctccatagtcacacgtggccagtgactactgttttagacagcagagatataggtcatttctatcattgcagaaatgtctgtcctgtagggctgccagagaggccctccttaatccaatacctggccttccattgtgcctgcccatcattattacttactctgctcctggaagtacatcacagctttgaaattatagaaattacactctttacctgagcccctttgcacacgtattcatgcgtgtgctcgctcaacaagtatttatggaccatctgttctaggcactttggatgaacagggcagaaaagtccttgccaatgagacggttgtatttggaaagggtagacataagcaaatgattgtatcctaaaatgtcaagattaacatgcactatcaaaaaatcaacaggatgagaggctagaaagtgacaaagacaatgagggcctgctttagtgggtagtggggaaaattctgtctaaagaggtgatatttgagcagagtcctgactggactgaagagcaaagcttgcaagatctgggaagaagagcttcctgggcagagggagcagcgagtacagagatgggaaagagcctgacctgttcaatgaagatcacagaggccagtatggctcaactacagacagggagggggcagtcaagttcaagaagagattggagagatagacaacaccaaagtcatatggggtctttcaggccaaagtaaagtttgcatattattctaattgtggtgggaagtcattcaagggtgtttagcaggtgagtggccagtctcatttatatttttgaaggatcattctggttgttggggggaaaattggctgtttgggggcaagagcagaagcagagactagttaaaaggctattagaagtcgaggggagagaggtcatgacatcttggactcaggtgagacaggtagaggtggtaagacgtgatcacattcagcacttattttacaggtaaagttgatgagtgtggacaagggtgtgagaaataggtaggtttagggcctgaatagctgagtaaatagtaatgcacttcactaaaactggcaaaaccaaagagttatgtggctgcaaggggctgcagggagtgagaagtatgagcctttcttttgtatcactgtgttgagaaacattcattagacatggaagtagagatggcaagtagggagttatacactttacatagatttggagcttagagaggaggcgggctacagatataaacttgggatatatcaacatctttaaagctacaagaatggagaggttgacaagagaaaagataaagagagtaaagagagataagaacagagcctctgcacctttagtcccagctatttgggaggctgaggcaggagaatcgcttgaacccgggaggcagaggttgcagtgagccgagatcatgcctgcactccagcctgggtgcagagcgaggctccatctaaaaaaaaaaaaaaaaaaaacagagcctctgggggtcaggtcaggaaaaacaggagaaacagccagcaaacaagattgcaaaggagtagccagggagaagaaaaatcaggagaatgtgatgtcctggaagcctagtgaaaatgtttcaagaaggcaggagtaatcagctgtgtcacatgcagctgagaggtcaggttagaggaggactgggagccaacactagatttggcagtaagcaggtttttagtgataggaggaaggcacgtgaggctcacaggtccagaggagtgatggaaccaaaagcctgattgtgtactttctagaaagaacaaaggataaaaaaagtgggaacagggaaaatagacaactcttctgaaaggttttgctatacactggagctaggagatgcggtgtagctggaggggtatagagagagctttcaatggtgggaggtggggatatgacatgatatttatattctgatgggaacgatgggatagagagaggcactgatgggataggcaaaagaggcaacgggattcagtgcccaaggggagcattgggaagtgacaaggagagcaaagtgtgtgagccctgaggcaagtagagacagagggagagagatagtgatctctttaggatatgtttatgtcctcagtgaaatatgaagcaaggtcatcagctaagagagagtcaggaatggggaacgatggcagttttagcctcagagaaggtgtgaaagattcatctttgagagtgggacagtaaacattttatggaagtttggtagagtcactgggaagtcctgaaggcctatctgagatttacggtcataacattaaagtacagcgggaaggagggttgtgtgtttttctctaagagctaagcagctgagggatacaggaggcaatgctgaggacctactgtgagtcccagagagtgtgtgtgtgaagagacacagactcggtcaggttagggagcatccacagccaggttgtagaaggagcccaggtgacgatgggtggcctgagagtttggagcttgcagtggtggctgagctatgcatagagatgagaaacaatggcctgggtcctggagtcatctaggggaggtggatgctctgactagtcatagcccgctcttggatttgctctcccagggagtcagcagtgtggaggagaagatgttgtggtggagagaagtggtggtagacaggagccctcggaatcactgggcttcttttaaatcctagtgaggtgccaggcgcggtggctcatgcctctaatcccagcactttgggaggctgagcaggcggatcacttgaggtcaggagttcgagaccagcctggccaacatggtgaaaccctgtctttactaaaaacacaaaaattagctgggcatggtggtgcacgcctgtaataccagctacctggtaggctgaggctggagaatcgcttgaacccgggagacagaggttgcagtgagctgagtcacaccactgcactccagcctgggtgacagagcgagattctgtctaaaaaaaaaaaaaaaagaaaaatgatatgacaggagggaagtagggaacatacagttcacagggtctgagtagctgctcagtagtgcaaaggatccctgaacctgccagtctgtggctctcaatttcttcctgacaccaattgagtaagagatgatttcctccaagaatgtactggctatgtaataagcaccaggctctcagctacacagaataaaaaagatgaataaaacacagtgccctcaagggcctcacagtctagttaaggagacaaattgtcaacaattattgcaagtctatgacataggtgctcagagtgatattattacatggtgctcaggatggtgctcagaatgatattattacagtgtgctaaggaatatagcagttcattgtgccgagaggtcactgagaagcttctacatgcatgaccattgacagagcagagacttaaagaagatggcactacttctgctgggtcgtcaacgagatgttatatgtttttttattaactgtcttaagtatgtttttcatgcaaaatgtgagcagaagaataaatatactatcatattattatattcaagggacatacattcttaaatatgacgtgctgttttggagaaaagggctgtcggtctgcactaggctgcgggagaggaaagagattaaaaactgaaaccagggcagggatgagtgtgctatccacagctgagaagtgaaacacccatgtttaatagggactgacccaggaaaatcaggtgagtaggctatttgactgcaaaggtccttcctgtatattgtgagaagtctcacgttcccttttcccaagcttctttccactaaggctgggttgcttgctgcattgaatagcatgactgttgggaggaatctgacttgcctgcttccaagtctaaatcttgctaatcttgttccatttttgcatcctaaatgtttggttgaaattcagaatgccttcaagggaggggggtgccatgtgcagttgttaacagtcatttatactttggagcaaatgctttcaaaagcaaattttggccatggagatgagtagagagactatgacggtgtcagccttcaacctacgaaagagaaggaaggataagaactctgcttctcaggaagctccagcatctaaagcctatgaatcatctttgttgatttcatctcattgtctagagcccactagttccagaggcagtgtgctgctgaatggagaaactgttggcctgagatttaaacctaggctttctttttcatataacaggggatgttatataggtcagctgcccagcatagtgcctaactcagagtaaatggtaataaatgttcatcttaccagaattcaaatgattcacagaccattactgatgtatgtcaacatgcagatgttgccatgaggggtggatgtccttggcattctaagaaatagaaagcattggaaagaagatgaaaaggcaacaatcactgaaaacatagttacgtgtctgaattctggatatgttatctgatttaaacacaaaacccagcgttattataggacctaagccattgattgctgttgccactgaatcaaaggaggcagcattgggctgagatgtggcttacatagacatagaatatttgaggattatgtttataaaagaacaggaggcagcacattgatagagcagaaaaatgtgttttaagattggatgtttgaggagggcacagctggcagtggatttatcaggtggaggcaatgaggcagagaatgattcattcattcattcagcagtttcattgaacatatactgtttgccaggaagctatagaatcactggagataaagacaaataaatccctgccctaatggagcagaacatctgaacaattagatacctagcaaaggtatatgaaaaatgacaaggaaaaaggacaagtacatacaatgatatatgataatcccaaaccctctgcggatgcccaagataaccaggggttgagggttgcttcactgcaggtacaaagggagcagttccctagttctcatggaaaaggttcacctcttagagataatggtgtgaagaaaaactagtgccattaggatttattttattttatttatttatttaatgacaggatctcattctttcacccagactggagttcagtggtaatcatagctcactgcggcctcgaactcaagtgattctcccacctcagccttctgagtagctgggactacaggcatgcaccaccatgcctggctaatttttatattttatttttatagaaatgggatcttgctgtgttgtccaggctggtcttgagctcctgacctcaagcaatcctttttctttagcctcccaaaacattgagattagaggcatgagtcaccacacctggctagaatttattttaagataagaagccagcgtttcagttactcttactacaccacagaccatcccaaaaggtagtggcttaaagcagcagccatctatgtctcatgattctatggtcaaaagtacgtcagcacccagcttgcctggcaattgaagctggctgtgagtcttggtggcctctgttcccttctaaaccaccttcttatagcatggcagctctcccccaagaaagtcaaggcagaaactgtgaggcctttgaagagctaggctcacacctggtccagcatcactgctgtttcattctgcagtcacagcaagtcaggagaccagcctaggttcaaggggaagcgagacagactcatctcttgatgggagagcagcaagtgtgtacacagaggggcagatcattgtagtcctcttgcagatcaccgacctcacaagtgtgccaaattacatttctctttaatccatcagttatattgagaacttcccatatgccaggcttcatgcaatgcactgagtaaaaccaactgggatctttgcctccctgcaggcttctaatctccagaaggagatagacattaatcagatagccacactaagttatcgaaaaccgtgtacagagcaatgaagggaacataaatggtgccttgaaaatatgtcctgtggctaagggtggtcctggactgggagggtagaaaggtctttctgggaaggagggcttgactattaagtccagatctattgaatgagtaggtgtttaaaggcaaaaatggggagggagggaagagaacgtgcgaagactttagtggggctggcttaatgtccataatgactttctagaaggccactgtggccagaaacaagaggccaagagataactggtgtccagtgaagctggaaagggaagaaccagactaaacaaggctttatagccattatacaagtttgtgtttttatccaaagatgagcaggaatgacatgatagagtttatacagcatttcaagattatcaaaggcttagtgaaaacaagattgtggatagaccagttgggagacctttatgcaggacaaggggagctgtatcctgccaagtgcaatccttctaccgtgccatttaaaaaacttatttccgtgagctgccacatcgttctggaatgcctcttttgtcactgccttcagagcttagatttatgagaaaagctttctcgtgatcagaaatagtataaccagacttggctttaaattaattttggctctttccacaagacaaatctgtcaatgaagatttaccatcattttcaaaagaacgtgctgcaggctcagaagacatcaacaatgagctctaacaatgctttgaacaatagctgactctttcaagtcaggctatagacaagtgagttattacttggatggagtaataatccttagtcacttagtaacaaagtcattgctgtgttctgtcacctcatggtttcatggtggatatgaggacagttttctaaggcattttctttgtctaacaagtttactgtattttagccctgctatttggtttgccagtttgacacttgcctagtggcttttcatttttatgttttctatttcttcgctatttgaatgtttcttttcttttcttatttttttctttaagttctgggatacaagtgcagaatatgcaggtttgttacataggtgtacatgtgccattgtggtttgctttacctatcaacccattatctaggttttaagcctggcatgcattaggtatttgtcctaatgctctccctcctcttgccccccaacccccaacaggctccagtgtgtgatgttcccctccccgtgtcatgtgttcttatttgaacatttctttttatatttttatccatcacttatatttctcctcttgtgaaatttcctatctgtgctttttggccactttttatacagcagtttttctgtctttttttttttatcggtaagctcattttatacattgaagataaataattacttatttatcacaaatcctgggttgccagtcttctcacactatatgcaaatgtgccaagaagatgtagcttattttccaaaaacggatgtgatcttttctacaaacttccatggaaatacacatatgcatgcactcacatgcacacacacacacacatgcatgcacacacacttttagttaaatttaataaactcattcaaatccaataatttatgcatcatctttgcatattcagtctcttggatgccttggtgtcctagtccattcaggctgctataataaaatgccatagactgggtggcttgtaaacaggaatttatttctcacaatcctcgaggctggaagtctgagctcaatgtaccaacagatttagtgtctgaagaagacctaccttcatctttatggatggtaccttctagctgtgtgctcacttggtggaaggagtgaggcagctccctggggcctctttctgcatcacctcccaaaggccccatctcctaatatcatcacactgggggccaggattccaacataggaatttcgggggtggggcacaaacattcagaccacagcacagggcctttcagatctgccctctaagatactgaccacgcctaggggcttacaaatgtcatagtagtcagagagggtttgactatgactccattgtttcctggctccagtgacactggctctgttgctgttggccagggagtcactttgtccctgcagccctgtgaacaactttgacaacctcctgcaccaaattctcaacaatgtttccatcccagtctcagggcacagagagcctggtgggttccttccacaccacactctctaccccaccacactggctgccacattaacaggtatggtggctctcatggaaaggactgactacacccagaatggagaatgggagaaagcacctctgcctgctccccccccccgccccgctttaacttcaggcatttttttgttccagacatggtcttgctgtgtcacccaggctggagtgaagtggcacaatcatggctcactgcagcctagaaccctgggttcaagtgatcctctcttctcagcctcctgagtagttggaactacagacatgcaccaccgtgcccagccaatcttcaggcattcctaccactcttgttgagagagagggctcagaacaaatgccaactgcctctttccactaccttcttccccacctttctcacagtccctcagggaagacagggaagtctttcctcttccttgttctggctaaaggggacactcctcctcctttccagagtggcatccaccttctatggaatagcaaagccaagtggacagcagagagagagagaggcagagagagagagagaggcagagagagagagaggtttactaagaaaagaataaagatgaggaatattttaaaatattataatccttatacatatttaaaactatcttttccacttggttatttgcattttgttgttttatggtttttgcaaatgtttagacatttaaaatatttatatagtcaaatattttcatgttttttcattgaatgtgccttctcagggatgctcagagagaccttccacaatgtaagtctgtttcctcctcattcttttagagcatcatttgtaatctacctggaattcatgtttgtattttggtagattatgcctcacagtatttattttgaaatggttagccagatagtctcaaaaggcttatcaaataatccatcatttcctttcttatttggaaaaccacatttgttatattaaaaagaattttggatctattttggaatacactcgcttcttttccatttatctgtctctctgctctagtattgctgtcacattactttaatggctgtggttgcataatacattttaatattctctaggttaaggcctggatgaatattctttttcaaaattattttgtctattgtacattcattctgccaagaaaactctggattcattttgtcactccatttacttcccaaactacttttgaactgttgtttagactttagttttaagcacatctgctaacatctcctggaaaattgattaaacaatgatgttgggaaatgctgctttgatattttgacagatatgacactgtccattggttttagattgatatactccatcatatcaaagaaatatctttctagagtttacaaaactatacagatctagatttaaaatgtattttaatttgtttgcatttttaatattattcaataaaaatgaatttttaattttgttaaattaaacatttgctttattgatatccatcaatataatcttttttcattgacattgatttgataaaattttatttcatattattaacctttccatgtattcttggattaaattctactcaatcaggtgacatcaccgttattcatgttgctgtatcacaggaaatatttcacttctcatttgcatctgtgtttctgtgtgaaatgagtctattgttttacgttaatgcactgtctttgttacattttggtagcacgtttatgttaatttcataaagcgaattgtgacacttttcattttttttctataaactgtaacagcttaaataccgtaagaattatgtgttccttgaaggtttgaaaaacttgcctataaaacattcgggcccagctccttttatggatgcaattctttgagactggtttctatttcttccatggatagtggtctgttctgatcgtcagatttgataatctttattttcgtattttccatttgccttctcattgaggttcaagtttttagcatagacttctacatgaaattctgtaactttttatttctttgctatctttcttctttctttttgtctttgctcagactttctgaaagcctgtatattttattagtttttttcaaagaatccaagtcctgaatttattagtcattttaatctctttcccagtacattaatgtaatctctagagatttctctcttttattttctggttatattttgcttttcaatattagcttacccagaatgtttagttcatctattttaattctttcttgtctaagattaaaaacaatccaagctgtacatttgcttctacgcaaagtttagtttcttcccttatgtttgggtaggcagtgctgtcatccaatcagtctgccttcctgcttttaatatttcccttgtcctgtgtagacaggaaaggattcattgtgttgttgttgttgttgtttgttcatttgaaaatcattggtaattttatctcccactttctcaaatgtaatttctaatttaatgcattgtggtcagagagtgtgagctcaataatttttagcttatgggacttattgagattttcttaatgacttaatatgtaatcaataattaatacacaatagatttaatctttagtgtatatattaactaaacattaatagtggtgttttccagatcttctttatccattaatctttatttatcttaccattatctattatatactttacttgccaaatattgagagaagtatgataaagtttccctttgctaccaggtttcttcccactatttcttacatttttaacaagttttgctttatatatgtttatgtttttgcttcatgcataaaagatcaaatcaataatatcttcatttaaagatagactttttgttctatttaattatttttcctggatatgcacatttaaaaaaataatatttcaatctctaatctatttttattcacatttgttcaccattttatatagcagcttgtgtacttcacatcaaatggatttctcataatccatgtttctaatatgggtatttgtccttaataaggatttaactaattttcatttattgtgacagattatttggtgtgatttttgtcaacttatcatatgctttctggctctatgcttccttcgttttcactattttcagtctttcgtaaaacgggtaacttttttctttgctttttaattctgtggtggtttggaaagcttgtctcctgtttttaattttactagacataactttctagtttttcaaaagcatgtttaaaccttcagttctctctgttactccaccacccacctttgcccatggaaggtgagaagtttagcacactcttcttttcccttctctttaaaacctctatcttttagttaataaaatagtgcattttaaaactagattattttcattaaattttgtattgcctctcctgtcttttgtatctctctataatttagtttaccaattgtcctcctattatatattatgacttactcactcctgtgctctggatttttcttaatctcccagatggaacagaggtcggcaaatcatggcctgcttttgtgagtaaagttctaccagctaggttggccatgccctgtaattgacatattgtctgtggtgcttccatgcgacagtggtggacttgggtagatgctacagagactgtatggcccacaaagtttaaaatatttattattatattagagaagactatagcaccaaacaaaattttacctataaagatataagcaagggccatgtgcagtgactcacacctgtaatcccagcaatttgggaggccgaggtgggcggatcacttgaggccaggagtttgagacaagcctagccaacaaggtgaaaccccgtctctattaaaagtacaaaaattaggcgtggtggcacacacctgtaattctagctattcaggagcctgaggcacaagaatcacttgaactcaggaggcagatgttgcagtgaactgagatttccacactgcactgcatcctgggcaacagagcaacactttgtctctgacaacaacaacaaaaaagatataagcaaaacacattttctcagcccttccaggcctaaaccttaacacatgaaagacaacttatgtgacatagaattcaagtgagggttttgtttttcttttttgtttgtttgttttgcatttcaaaatactcttgttgcttctttgtttcttggcatttaatgcttcataaatgacgtgaggtccccttgattattgtttttttgtcaagtactctctttgtgtatttatttttcaactaagatgtttataaaatttttttctctattaaattaaaaagtatatatactggggacttctgtttggggtaacttttcattgctattgcttgagatccagtgcaccttttgctctaaagccaaaggcagcctcctttaatgatgatgtcctctgctctgatcttcctcttggaatttcaattcctatacctgccctgttttttttttgttttttgttttttgtttttgcatttctctctcattagtcacttttttactatttttttttaaatttccatttgaatttctcaagttcatgttccactttacttatttggtttttgtaatacacaatctccatattccctccatcccactccatatggtgggcacactgtccatcttcgtcaccccctacacttgttttgtgagcctaatagctgcttaagtcttgtttgaatacaatttagagatcatcctccgcatcaccattttaaaggtgtacacttgctctgattcctgggatcaatctcctctattgaatagctgaagcttttcataggaacagtactttttctctttttcttcaacctcatagagggtgacctggtattaaaatttgaaatgggctttgtttgaaactgggtaggttcctcttcaaatctttcagatccagattaaggggagaaggaaatggattgtctttgttgtgattcgaatctgccagagtacagaactctttatccttcaagagatggaagtaacatgttttgattttgcacagcaaaggctgtttctcttgtctgtttggtgcagggtgtgtagtgccctctcctccgggtggcatgactgaccgcctgggcacctgttgtagagaacctcctttgtctgctgaccttgcctgggaaagttcagggtccttcccatcctgcctggatgtaagcattgagatttacctttgacaagctggccctgatcctgtgtgtgtcgcagtttctgctctctcaagcccctggggctattcctgagaagctactggagccattccgtctttcccgtcttttgttgatgtgaaccgaggattcatcagttttttattcaggctggtcctaaccaaactatagtttcaagaaacttctcagagattctggcttatgaactttggctttccctaaggtttttagcagggaggtaaaatttcacctgtatgtgtattcttttagatagattgagaatttagaaagaggacctgagagttcagctccgtctggaattcactgcctgtgtgcaggctccttttcatggggatatcagagtgtgaagcagaagtgggtcacccgcagtgcgattctctccttcagtccttcagaagtttgtggttcaagacaaagcagacccatcctcctatagcctttgattctcaacagttagaggaagacaactgtgcagtgagacagtaacagaatccctacacagttcagtaagctgagctttcccttgtggctgtgatcacaagaggattgtgtgaaacgtgtagagtttaatgactcttttcctaggaaagaagaagtgaaaccattcacacacctgaggatgtgtgtgatgtcaagcggtagacttgtcagctcaggctgccataatggaatacctgggcaggtatagactgggcagcttaggcagctgacattgatttctcagagctctggaggctggaagtctgagatcagggttctagcattgtcaggctcttggtgagggttctcctgctaggtcacagatggttgccttctccctgcattctcacctgatgaagagagagagagagagagctctctggtaccttcctctttgtataagggcatgaatctcattatgagggttcaccctcgtgacatcatctagtcctaatcacctcccaaaggccccacctcctaacaccatcacactggtggttagggtttcaacatgtggatttggggaggacacaaactttccatccatattagtggtacttgcatggcacttactgtgtctaatttaaatcccagaagtagccaggaagatggaggttgctatgctcatgtagagataaggaaactgaggcacgcaagggattagtgacatcttgcaggagctgcctggctgccttccctgtaacagaggaaaggggcctgtctacagttaaaagccctggaatcacacgtggtcctgccctttgctctgcactctggtgtcctcatctgtaggagaggggcttgggttgagccagtggctttcaaacttctcagcttcagaactctttgtgcaaaataaatcccactcagaaatccaagacataaaatggataaaggcagcactgcgctggtgaagcagccagggaaccctgcgtcctgaacactcagccctcccttcctgctggcagcggctgctgagggggatctggagcacaggttgctctctgtgctaacagtgtctgatcccagactcattaaatggtatcagaagaagtttgggaagaagtgtggtttgtattttcaaaggagaaggaggcaaggttgacaaagggcacatgagctgtcattatactggaatgctggcagagcagtcgtctttgcccaaaaagggtttgaaaagggaacattgcacattcactttttttatgtgctatccacatttagcttattgccagggcattcgttgccagtgagaaacctactgtctacaagtggactgcgtagtttagttcctcttaatgaaaaaggttttggacatttacctggaattttcatgttgttttgtttcatgagtttgctgtcatttggaaattactaaagaacaatctcagaaatgggtttttaaaaagaaactttaggagaggaaaaaatcccaggataataaacttttcctaaagaggtcacattagtagttctcaatcgggggtgatgttgacctccaggaggcacttggcaaggtctggagacgtttttctttttgtttgtttttgtttttgttagtgtttttcttttgttttgtttcttttttttatttattattattatactttaagttttagggtacatgtgcacaatgtgcaggttagttacatatgtatacatgtgccatgctggtgcgctgtacccactaactcgtcatctagcattaggtatatctcccaatgctatccctccctgttccccccaccccacgacagtccccagagtgtgatgttccccttcctgtgtccatgtgttctcagtgttcaattcccagctatgagtgagaatatgcagtgtttggttttttgttcttgcgatagtttcctgagaatgatgatttccaatttcatccatgtccctacaaaggacatgaactcatcattttttatgactgcatagtattccatggtgtatatgtgccatattttcttaatccagtctatcattgttggacatttgggttggttccaagtctttgctattgtgaataatttttgtttcgttttttgagacgatgtctcactgttacccaggctggagtgcaatggcgcgatcgcggctcactgcaacctctgcctcctgggttcaagtgattgccctgcctcagcctcttaagtgggtgggattacaggtgcctgccaccacgcctggctaagtttttgtatgtttttagtagagacagggtttctccatgttggccaggctggtctcgaactcctgacctcaagtgatccacccacctcggcctcccaaagtgctaggattacaggcatgagccactgcgcctggcccaagatctctttctgtcatagtgtcacaattggggtgggagatgctgctggcattgtgtgggttagaccaggggtgctgccgaatgttccacaaccacaggacagcccccacaacagagaattaaccagcccaaaatggcaatagtgccaagattaacaaactctggtttatgctacaggaattcctgaaatttacaaaaatacatcagaaacagcacatttaaagcagacatcaattattattattgttcagcttttgtttactgtgttgccaacatcttagctagtgattcaaaacaaaacaaaacacatgaaccaaacaaaccctgaggtctccagatgccttgaggtccccaaagaggcaatatttgtctactcactttgttttaattgtaattaaattcacataacgtaaaattcacaattttaaccatcttaaattgtaaaattctgtagcatttaatacattcgcaatgttatccaactatcaccactatctagttccaaagcacttcatgaccccagaatgaaatctgggtcccattagcaatcactcggcattccccactccccaagtgcctggcagccatcaatctgtatggatgtgctgattcctgatactgcatatgaatgggatcatatatgtgaccttttgtgtatacctcttcattttgcataatgttatcaagcttcatccatgttatggtatgtttcaggacttcattccttttgtatgactgaatactatttatttgtatgaatgtaccatattttatttatctgttgctccattgagggtcatttaagttatttctgccttgtgaccactatgaatagcattgctatgaacatccatgtacaagtttttgtttgagtaccagttttcagttcttttaggtatacccctaggagttgaattgctcggccatatggaacttctacgtttagctaattaaggaactgccaaattgtttttcacagcaaacgccccagtttacatacccaccagcaatgtttgagggctctagtttctctacatcctcaccattacttgtcattttttaaaatgatgtccatcctagtgggtgtgaaatagtatctctagtgatgttgctttgcatttccctaatgactaataatgctgagtgtcttttcatatgcatgtttggctattcatgtaacttctttggagttatatctattcacatcctttgcccattttttaattgggttatttgtctttttattgttgagttgcaggggttattaatatattctggatgccagaccctggtcagataattgatctgcaaatattttcattcgtgggttgccctttcacattcttgatagtatcctttggtggacagctgtctttaatttttatgacatccaatttatctactttttcttttgttgcatgtgttcttggtgtcatatatctaaggagtcattgtctaattcaagcttgtccaacccatggccaggacggctttgaatgcagcccaataaaaattcataaactttcttaaaacattatgattttttccaattttttaaagctcatcagctattgttagttttagtgtattttatatgtgtcccaagacaactcttcttcttccactgtggtccagggaagccaaaagattgaacacccctgacaaagttgcaaaaatgtatccttatgttttctcctaagagttatagtttctcctaagagttatagttacacttaggtccttgatccattttgagttaatttttatacatgataggaggtaagcttccaatttcattcttttgcttgtagaaatccaattgtccaagcatcatctattgaagaaattattctttctcccactgagtggtcttggcacccttgtcgaaattcaactgatcatagataaatgagttcatttctggagtctaaattctattccatcaaatggaattgtattccacatttcatatgtcctttatccttatgacagtaccacactgttttgattactgtagctttgtagtaagttctgtaattactacccactattttttacatctctaaaagtttaatagaaactttcaaaaagactacctctttttaaagaaaatgatgtagaataggacaggtacacaatgtctgtattcctaagttcaaaagctctgaaaattgcaagttctcgattaataatttggggccaaaatctgaccttatcagaactcatttggcagtgaactcaatctgaactcaggtgagtccatttgtagattttatattttacacgttgtgttgcagaaatatttctgtgtttgattgtagggtgctgacccatatcccactggtagtagtatacaatatacaacatatgatccagatgacctttataaaatctgaaaaatcctgatttccaaaacacatctaataccaaagtttttggaaaaggaatggtggacctgtatcacaatacttgttatctcatgatgctcaaaactcccatgatttttaaatctttgattagaaaaacacaaagggaaacaaataatcataacttgcttcatgcactaacatttatggcacaacacgtgttcgccaatttattaagcactttaccactgtgtctctgcagccattgtggtccgtttgtgaattccttcagatatttacacaatgtaaaatattgcacttgaatcagttcctttgttttaaactttgcccttctggatcatcccttaagatgaaaatgcccagcttttccatgaggcagttgcactgtgattctggtacatccaatcctatattcttagcccattactcattattcatttaattccatagttcctctatatgttgatgaggaggtatttttatcctcattttatctgacaaaaaaaattttgtctacatagttttaactgcctcatagagccatgttgatcatatggcaagcaaggtgttcaccatggccatcagttccaagagaaaatagacaatcctacactctctactccaaccctgatcagcccatgtggtttactggacaaagggaagaagtggacaaatgagaggaattgaagctgaaaagagccaggagaaatagagggatgagcaggaaactaggggacaaagggagtaaattattaacaaggcgagtctaatgttcactgagctctcagatgttgtcacatccagttcttatcctgcacttgctgatgaatcaagacatgttcacaaagcactgagcatctgctgcgggctcggttctgagctaagtcttctggaggtcaggaagaagaagagccactttcttcaagtctaatctggggaaaaggatagcacacttgaaacaatagtcatcaggacaagataacactcattataaatggtctaggaatccagaggggagatatgccaggcaggtcttaattagggaagtttccatagagggaaggagtctttaactgggtcttgaaaggtagaatttgaaaagccaatagcggatttgaaaagccaatagaagctccaagacaggagtgaacacagcacattcatgagcttgtgagataatccttgagtggtgtgtgtgtgtgtgtgtgtgtgtgtgtgtgtgtgtgtgtgtagaaagagagagagggagagagagagtcatggaaaaccagacttggtgggacaatattattatccagacttggtgggacaatattattgacccagaccagggatgatattattctgggtgtctttttgaaaaccagacaaaggttttggccatgaaatcagaggaagtggggagccactgggggtttgaggcagggaagcaacattgcagagcagtgttagaataagatccggtctgcagtgatcgcaaggtgtgttgaagtgagagattcaggctggctgtttaggtttgaatgaggacctgctcaggggtgtggcagtaaaatacagaaggtcggggagagaacagggatatttcaaggcaggtcaatgggaatcagagactgcgtctgaggaatcagagtggaattaataaaagaggcttttgagctttgcatgcagtagggattagttgtccatagacagagaggctgggagaggagttggttccagaaaacctttagtattgatcatattttgcctgaaatgatggtgtttaagtgaaactatctggaactatgctgtccaatatggtagcctctagccacatgtaataaattaaattgaaattgaaattagataaaattaaaaattcagttttgcagtcaggctaactgcatttcaagtactccatagctccatatggctaatgtccactgcattcaacagcccaggcagagaacatttccatcctctcagaatgttctgttggacagggttgacctagagatcagcagaaataattggcatttggtgaagaagagctcttgagatgagagtcatgggaatagaaaatagcaaagctaagggaatgggtcatctcctaaggagggctgaatgttagaatatgttggcatcagtaggcagaagaaaaaacaagcagaacttgcacaacgttttggaaaagtgggagactcaccacagcataaaatcctggcaacaaaaagaagagagaattttagtgaagagaaagtggcgccaatatcaaatgcagcagagaagtcaaggggaaagaaaaggagaaaaaaaatagcgtttagtaatctgaggtcatttgtgacctatcaaagctgatgcagagttgggaagagatgtcactaaataggaatgccaccagctttctcttgtgctagggtaggagtttgggatctaggaacagtttcagctgaatgttagggacaggaggcttgtcatggaggatgtggaaataaaagtggaggtgaggaacagagccaggacctgagaggacaaagcaaagggatgaaagattgtgctgtcgccatcaagggctccaccaagggtccaattttgtttttgtttttttccaagaaaagaaaaatgagtacagaaggaggggaatctgcaggcagtggttgagaggatttgaatgcaaaggatatctgggaaagcccgatgccttcacagttagaagggagtaagaaaggaggtgcaagggtggggtaggctttggtggctcagacagtgggtggtaaaggaaactgtaggtggccttgagactgtggtcctctgagattggaacggtcacttgaagccaacctgtcagcgtgatctgcctgctacttcccacttcccttccactggattctttttgtgattgctttccatttggatttcagtttatgctttatgtgctttatttcattgaatccatgtgaacatttgggggcagttgggcattttgattctcatttccaacctgaggaaactgtggtagagggtggttaagtaactggcccaggatcatgcagcaagtaagtgacagagtagaaattgaacctgttccctctggtgcccttaatgtcctctgtagtcttcacccagtgcactcatgcaaccagcctattcctgctatcatgactggcttgctacaactgtgatcatgcccacataaggctgtgtttgctctctatagccataattctcctgtcattactgagaggtggaaaaatgtttgaggggaaataacacaaataacacttcctggtgtcaacccagcctccataggggacaaaaatgcttagcaactctttcaaagtatccaagacaaaacttgacctttaagcggtttctccatttagagttaaatttgtctttagcaaatatggtttgaataaatcaagacttcctgttttagctatttaatggggaaggtaataattccaatctgattttaaatttttcttttgccaaattccacagggcaagaaaaaaaaaaaaagaacgctaaagttcaggataaaaaagaaacttcccaagaagtgcattggtacaaaccactgctgtggtcatcataaatgtcttttacttttactttccaaaccaaagtctagggtttccatggtaactgctttggccccagctggtttgcatcatgttgtttgtatagaagccagtggagcagggctcgactgtgtcacaaagttcaggtgtcaatatggatctcccgggacaaataccagaaagaaaaatattgcatgcaacaccttctcctacccaaccgctactttcccaaaccccagcactctgctactgtgctgaccaaatgcccagggatttccagtctcccatcctctcaaagtcaaacctccagctgcatccagttgtgacttctgtatatgtctaactgtgtccattggaagggaattaaagcagcaggcttttaatttacaaatgttgcatccattcgaatgttcttgagcaatagtgtttcataagggttacaacatagattcaacaaccccagccaagtgcaaacttgagaaattgcagattgccttcctgtgattcacccagaattccagatggaaattatttctcaaggtcagtgcaaagctccgtacaaaggtgtctcctatagagaacatgtggtgtgaggctggaccgagggtcaaggcttccattcctgtttgctccttgaccttggcagagttagcctgcctccgagagcttctctctagccataggggaatcacatagtttgtgcctttcctccccacacacccttcccaccatcccaccccaagacctgctcctattttctaggcttggtgagggcactaaggaagaaatatgcctccttccgccaaattacttccatttcttaaaataaatcccagcttttctcttctgggaagccaccccagagtggactaagatctcaaaatatcttttatttactttattcaagaaacattgagagtctaccaggcgccagacaggaacagaccctgacttcaaggtggagactagcatgtaattaagcccaataaaggaccaaaatcattgtacaggtacagtcagaggaggctggttttccagtttgaagtttaggaagtcaaaaaacttcttcaggccgggcatggtggctcacgcctgtaatcccagcactttggggggccgaggcaggtggatcacaaggtcaggagatcgagaccatcctggctaacacagtgaaaccccgtctctactaaagacacaaaaaatgagctgggcgttgtggcaggagcctgtagtcccagctacttaggaggctgaggcaggagaatcacttgaacccgggaggcggaggttgcagtgagccaagattgcaccactgcactccagcctgggcgtagatcgaggctccatctcaaaaaaaaaaaaaaaaaaaattcttcacagagaagtgaagcaccacttaactagcacccttattactttctaataattagcatgcatagtccatcattatatcatatgctttaaatacacaaatttgcttgcaagtctatcttgatatctattgaaataaaaatctctaatgtaaagacctggttttcattatactgggtttaatatctgacttgtccaggatagagctagtcacatggtgagggtcaggtggccttaactctggttccagagctgaggggacacattagaggacacactggtggtttacctgagggggtggccctatgcagacattaaggagggaggcctttcctctgtgtccaggtaaggaatggatccacatctaaggccaaagctacagaatagggacttgcacacagtacctttatcttctaccacttttttgatagtaatggcatctacatttttaccatttcaaatttttgaatgaccctggttctcccttgctttgtgccattgggaagcttccttctctccagggctcagttcttcaccagctgaatgatgaaagtggcttaggtgatcatcttgtaagctctaaattgtattccataggcctaacctgaatcagtcttatcagcttggaatcctcagggcctaagcacagtagtaagtcctgaataaatatttgttcaattaaattgaagagactcaaagtcaagtcctgcattattggagagcatagagattccagttattgtcctctatttcagatgagcagcggggtgaagggtctggattttctactcatcactaagcctcggaaggtggtgtcagtgactgggatctgcttgtaagctgctccaacttggcttcttcagatatagattcatacagagcctagacctgtgccttgctttgttaaatatctgaatgtaaaaaggaaaaatacatcaattgtccaaagtacttacatgtggtcttataaactaaagaaagtaaccacatagatttctggtgcctgaaaaaaagaaaacatgttgtagaacatctgtatcattaaacgcctgtcctggtttgtactcaactacttggcttaactttgcacagtcctgagaaatacaagtcttgtgattggtatagacagccaactggagcaactcaagccggaaaaacaacacaattgtcctggttgtacattgcactgcatacaatcactaaaagacaattctaattctgtcttccgtattactttggtagagactaaagtaatgtattgagataggaatcaaaggcagtaaaagtgggaacattctgagcatacatgggaggtactgagcttctactcattgagccttctccaaacatgtcagctcactcaggtgtgtgtcagaatagcccttgcaaaattctctcataaagcaaagcttttttccttgtgctataacacatccccactgtgggcaccggttaggcctcaggctatctagcccaatggctactgtacactttttttttttttttgagacagagtctctctctgtcacccaggctggagtgcaatggtgccatcttggctcactgcaacttccacctcccaggctcaagcgattcttgtgcctcagcctcccaagtagctaggattataggcatgcaccaccatacctggctaatttttgtgtttttaatagagatggggtttcactgtgttggctgggctggtctcaaactcctggcctcaagtgatctgccctcctcagcctcccaaagtgctgggattaccggtgtgagttgccatgcccagcctggctattgtagactttaataggactcttaatttgactttaatgtgactacttctcttcctatctgtgcttcttcatatagactctgcaccgcacttggagatattttatcccacataatcaatgtcagacaaaaataaatttaaaaagcttttttaaaaagcctgaagaggtccaggcacatgcctggtagaggaaggtgaattctatatgctttttttttttctattgacaaggacaaatatctctcagcacttatatactagccattgtatatctacctttgtttagtaatcacagttctattaggcagagtgaggtgagggcccattacccagttaggaagtggcaaagctgagattcaaaccaaaacccttggattctggaaccaagggctttcccctgtactatgctgccttcctgggctggtcgtttgcccttctctcagctctttggaactgcattcactggcacacagtctgaagggacctaagcactccccttcacttgccactcagcccaaataccactgctggcccctcctgaagagcacagagaagagaatctccttctgaacaatgagcagagattttgtttaaaatttctcacatctctttgtagtttatttttgtaaacttggcctataagacgctacttatttgctcttatatgtgttacctgcagttttaagaaagaactaccagaccaacaatatcactttggttttggtttatgtagcctaaataactcgctacacgtctcttcttaaagtgtttaatgagagtttttagtgaaatttgctgttttgtggaaatattcacactaggtgatggattatttgaaattttcttcctaatgcagcgctgctgtgtaagaacatcatcattgttcagtttggtgggttttctcttcacggtgtagataacagtagaagggacttttgcaggattagcatttacaatgctttgtcagtcagggtcatgggattagactcactgagtcagtcatcagtagctccattaactgagacataaacagattcattaaagagtggaatgaggtccaaagttgatgtctttgctgagggtcacactgagctaccagctgcatcatgagcatctttagaagtcagcaccttggcaaaagacatgaagaccaaaatcaagaactacaagactgccccttttgacagacgcttccccaaccagactaggaactgctggcagaacttcctggacttccacctctgtgagaaggcaacaaccgctgaagggtgtgatgtctctatgtgtgaatgataccagtgtgtgtacaagttcttctgccctgctcctgggtttcagtctaggatgacagctgggctaaaggcacatttcctggaaagatctgaactggctgcatcttacccctcctatgtccttcatccttctcccaggcaaagggaaacctgggtacatggtgatcctcaccctggggccctgaatcatgacttaactatgaataaaaatgctttggaaaagcagggggaaagaagtggaaataacaaaaaataatgaatcagggagggcattccagggtgcattccagctttgtcagtaacccctttgaccatgtcactgaatatctctatgaggaattgcatttcctacctgacatagtttgagtatatccccacccaaatctcaccttgaattgtagttcccataattcccatgtgtcgtgggagggacaagtggaaggtaattgaatcgtgggggcagtttcccccatgctattctcgtgatagtaagttctcacaagatctgatggttttataaggggcttctcccttcgcttggccctcattcttctctctcctgctgcgctgtgaagaaggatgtgtttgcttcccctttcagcataactgtaagtttcctgaggcctccccagctctacggaactatgagtcaattaaacctctttcctttataaattacccagtcttgggtatgtccttctagcagtttgagaacagactaatacactatgtgagaaattgggtttgtaaaaactgccccaactacctcaaaatagtgttgttggagaggaaaagaatttgcacactacaaaaagttaagtgttataaaaatgtaagattgtcttgttacttagatcacaaggcataaagaattgctagctaaagtagtagccagttcccttgtgatgagttatataatggtgcagtcagttgataagggtcaggccaccaaagaaaataagtgtttaaggacatatacggcaacatgacagagtaacttgatttctatgaaatgtagtaataaaaataggggcttgtatttgcttgacattggctttctttttaatttcattgtttatgatttatttttcatacacttaaaaaacatcatggtgcacaatggatttgagaaaaactggccctttacacgatgatttgagagcttggtatatgtggcatcaaaaatcccaggaaacaagtgaagaattaaaatagaagtctgtatgttttacctatccagcaaaaggtggaagtggaaaaagtccagagttccaactggatgggtcagttctctgccagatgttggtgtcctgtagacccagccagaggacatgctttgatactctgcccttggagatgcactcagtattgtcagaggaatacaggtccaaagtgaagaactatctgactgcaggggctgatggctcttctgggctggtgggatctacgtggagattgctgtgctctacaaggctaaataacactcatgagaatctatggtcaactgaggaaagagagaatgttaatttccatgtctggaaacatcagaaatggctgaataatcagcagatgtcctgatttgtgttttggtcttcctatctgtagatgaatgcaacttaaaaacacatcctaatatcaaataggaaaagctccccctttccacccatctcattttagtttttcacctataattattcttccaggtaaaatttagaattattttgtctagttctaagtaaactctttgttgaaatgctgttaatttataaatcagaatggataaaactgatatcttcacaacctaaagacttcgatcccagaatgtattacttctttcaagtcagttcatctttgtagctttctctattgtttattgtatacattgcttattaaatgtatcccttggtattttatagttttgttgctactgtgagtagaatatttacattctaattacaattaatgctggcatataagaaagctatagattttaatatatttaacctttacccagctaccttcctgctttcttattacatactactaataactttttccagctaataacttttgagttatccagacatacaaaaattatcaatgtttactaactctgctcctcctccttctcaatacatataactcaccttttccttggctcattgcattaactattatttccagaacaatgctaaatacatgaagatatcctattgaaatataaaaggctttcttttcatgtcaacagaaataagttattttgaagccatatgccagcttcctcttcctctccatagtttcttaaacacttgctgatagaaacaaaatctcattcagagaagtatgaaagacagtcttgaggaaaatatgcaagccgaatgaattgtctctgctttgccttagcaatatggtgctaggagaaggtgggatttagggactgattgtatgtctacttatcaggttcctacatgttttacagcagcttaattgctctcaagaggagtgactgagtcattgctgagcttcttagtttgtgctgggtcagagcagttgcctgaattttccagcaccctatgcaaagttctgccatggagatagctgggtgtccttctgaggtgtttactttgaattttatttttggttccagtttgaacccatattcaaggtacccaaccctgacaagcaaaagggagacaaaatttatctcttggttctattcccaacccattcaaaaatagaaggcagtcagagttctcaggagctaagacgatggggggctgggttgcatggcttccatgtggcgaggtcaagggaaatcatccggccagtgtcactgctgtaactgcccaggctgagagtcttgtctgtttcccactggaatggggtccagtgaggcttcagactcaccagtgttagaaataaattttatactctgagaatcagagaccctcttttcttctgcctactctcatcctttatcgatttccacacacacgtatatctataactttactaatatacatacatgtgatcgtgcacccgtgcaatgggcgctgcagtgtgccttctgtgtcccttccctatggtgctgggagggccaatgcctggcagctcccaactgtgtctcactcctggtggctgcccactgcaaatgagagtctccttcttcctgcaggcagccaacatccaatgactgggcagctgtccagagcaatgctgccttccccgggatgggctgaggcttttgtcctgactgcatggcagcccagcttctccttccaccccatcctgcttgcctccctcccccacaggtgtgacaaggagggcacatcctcctgcaggcaaacctccgtctcagagtctacttcccagagcctgtttctcagtctacttccctgccctagacaatct

SEQ ID NO: 424 - DNA, 32744 bp, Homo sapiens
  source 1..32744: mol_type = other DNA
aaatacctgaaccaaggagaagctgccaccatctcctctgtggactcctgtaaccaaaccagaactttttttttttttttctgttcagtgacatctggtaagttgtttcttttatgtaatttgtactgtaacttgtggttgattttttaaaaatggaccttaatttttagaacagttttgagtttacaggaatattgagaagatagtttagagcattcccatgtaattcccacccaacttccccattatcttgtattagtgtggtacatttgttacaactgatgaaccgatactgatacgttattcttaaactaaagtctgtgcttgattcagattcttggtttttatctaacgtctgctttctactgtggcatcctatcaggatagcacattatatttagttatgttcccttaggctcctcttagctgtagcgttgtttctcagactttccttgtttttgatgaatatggcagttttgaggagtactggttgggtattttgtaggcttctcctattggcatttgtctgatgtttttctcattattagactggagttatgggttttggggaaggagtcccagagttaaagtgctgttctcatcacatcatatcaagggataatattgtcaacatgatttaggactgttggtgttgaccttgaccacctggtagaggcagcgcttgtctggtttctctgctataaggtgatcctttccctgctccaatctccgccgtgttctctttggaaagaagctgctatgcacagcacacacttaaggagcagggagttttattctacctccttgaggatggagtagctacgtaaattatttggaattcttctgtatatgggacatttgtctcttctctctcctttgattttcttaaagcaagttatttcttgagggaaagtgaattttacttttctgtttgcttaagtgaattttgggggtttggtttgtttgtttttgaggcttcggtctgttacccaggctggagtgcagtggtatgaacatggctcactgtaatcttcaccttctgggctcaagtaatcctcctgcctcagcctcctgaataactgggactacagatacatgctgccatgcccagctaattaaaaaaaaaattgtagagatgagggtctcactttgttgccaaggctggtctcaagctcctgggcccaagggatcccctctcctctcagcctcccaaagtgctgggattacaggcatgagccaccatgctcaggctgtttaagtgaattttaaggctatgtaaaaaggccagtgggctagaaatggggagaatcaggttttagtttgaattttacagaacagtgtgatcttaggcaagtcattaatcattcctcccaaaagaaaacagctattgcagaaattgctggcaggtgtatgaattcctgataaggagggaagtgtcatcttatgcctcattagctttaacaagcttgggagagcaatatgagaagattcaaattcgtttcgctagaatctgctaaagtacgttatgaaaatatctgcttattttgcttacctctttacctagggaagaaagatggagaaaaacatgtcatcctaaagcctcccttctactacgactgcttctggtggccacatttctaattctgaacacattagccgatgtgttaatgctgaaaacatacctcttttcctttagagatttggaggcccttgtttcacttttgcttctgagctaatgtgtttaaattgctgccttgggacatccctagtttggaagagcagtgcagtggccaacgaggtggttaggaaatgttgccaacaccaaagttacttaaacctaaacccaaactcaaagagaaaggaaataaattctaaatttcatcaacattctatcatttcattaacagtctcctcctcttccttctttcattcttcagctcaccttcttgtgagagcaagaaaaaacttgaccaaagattgttttttttttttttgagatggagtctcactctgttgcccaggctggagtgcagtggcatgatctcagctcactgcaacctccgcctcccgggttcaagcgattcctctgccttagcctcctgagtagctgggactacaggcatgtgccacaacggctggctaattttttgtatttttagtagagacagagtttcaccgagttagccaggatggtctcaaactcctgacctcatgatctgcccggctcagcctcccaaaatgttgggattacaggtgtgatccactgcacccagctgatcgaagattctttaaggaagatggtagagcatcctcaatgtgtttgatcaatagggacaagaacgggagtcagaatctcagctaaggtggcatctgttccccaaagactaacagacgtggcctggatgacactagtactgatttctagtttaactaccttcataaaatattcaaaaaataacatttgtacagatgcataagtgcctgcagagcaattttgcattcattatcacatttaattctcacaacgaactcttttttattttttatttttttgacgtggagtctcgctctgttgcccaggctggagtgcagtggtgcgatctcaactcactgcaacctctgtttcctggcttcaagtgactctcctgcctcagtctcccaagcagctggaattacaggcatgctgcaccatgcccaggtaatttttgtatttttagtagagacagggtttcaccatgttgaccaggctggtctcgaactcctgacctcaagtgatcggcccaccttggcctcccaaggtgctagaattacaggcatgagccaccatgcctggccaatgaattcttgatacaggtattttttttaaaaccaattctatcctatatgtggagaaatagaggctcagagagatcaggtgatttgctctgtgttgcattgaagattgggagcaggagcaaaaatccaggcattctgactccaaatccctaataatttttgctccaccattcacatctggaatatggaagccctttgtttgcagatactgtgaccacattgtttcctgctgtacccccagtatctagaacagtgcctggtgcatcataggcactcacaaatatttgttgaatgaatggatggataaataaaatagtaaatataatttctgctattcttgatcttaccatctaagatatatatctatatctagatctagatagatctatctagatatagatacaaaaaattatatctatcatcattcattcaacaaattatttagtgcttgctgtgtaccaagtacttcccatatttattaaaagtagagagtaaaccaatgttaatgaccaaaatgcccctttgagaaactttgctaatttaagcatttaaatttaagtaagtaaatagtgttggcaagggttaatgatgcgaggcaaggtagggtgaaatgagattctgcctaaggagaataactaggggaaaagaaaaggacatttgtcatttgtaataaacacattgaattttgcattgaacacagaaaaaatgcagtgaaaatgtattcctctgatagtctctctctctctctctggcttgttttacttctgagggtgtcttcaagtttgcaggcagtaaggttgggcatggtggctcatgcctgtaatcccagcactttgggaggccaaggtaggcagatcacctgaggtcaggggttcgagaccagcctggccaacatagtgaaaccttgtctctactagagatacaaaaattagccgggcatggtggcaggtgcctgtaatcccagctactcgggaggctgaggcaggagaatcgcttgaacctgggaggcggaggttgcagtgagctgagatcatgtgccactgcactccagcctgggcgatagagcaaaaactccatctcaaaacaaacaaacaaacaaacaaaaaaacaaagaacaacaaaaacaaaaacaaaaaagcagtttgcaggcagtagcttcagcttcagttcctgcatacaattctatcaagttgctactctctctccccactcaacagccttccttctcatgaaatgcctttgccatgcatttgagggaaccctcctttgcgggcactactccttccattgccctatgcctgagctccagggggcttgtttaaatagtgcctattagaggctgctgaatgtgatgaaaagaacattgaacttggagtcaggaaaactgagtttcagccctcattgccataatcttactatgtgaccttggacaagtttcttccccttcctggtcctcagggtctggatctgtagaagaaggggccctagcattcttttttttaagacgaaatctcgctttgttgcccaggctggcagtggcgtgatctcggctcactgcaacctccacttcctgggttcaagcaattctcctgcatcagcctcctgagtagctgggattacaggcgcgtgccaccacaccgggctaatttttgtatttttagtagagatggggtttcaccatgctggtcaggctggtctcaaactcctgaccttgtgatccacctgcttcagcctcccaaagtgctgggattacaggcgagagccaccgcacccggcccgcattctttattcaatgccatgatatgcagctgttctagtacaggaatgacctgcgtttgtgttgcctctgtgattttcctgtaagaaaaaaaacaataagcaaacacaaacagaagaaaaggagggggagagaagcaagaataactgtgaaaagttacaattatttatcaggaaatcagttctgtgcagccttcctatatctagctgaatgtgcacagtcttatttaaaagatgctattcttaggttcagtgcacatgaatgtaaataagcactaaaagcaaaacttcagtgctaaccacatagctgaaatacaagcaaaataaaccacacaggcagaaccttgcttatctgagcaataaatttggactgttatcaattgcttctccacagaaaccaaattttcacaatgaacaccaccattccttccctttggggggaaatagactgcaggatgatttgaagaaggactatactcctgtagctcattttctccttaatacaatgcacttgaaatcacagtgctcttggtgtactgctcttggccacacggaagccctaatcattggtacggtctcagtttcaatgacaggtgacattttcaaaatgagaatttgtgtctttttagcacccatctaaatcagagaacactcacactttaaggactagttcagtctttgccttacacatgggaaacctgaggccagggtgataaaacgacttgtcttaagtcctccagctttattgatgggtggtaaagctggagctggaagcttccacaccagatttccagcctaatgttcttcccacctcatcatttagttcaacccaatgactatatactgaatgtctgtaccaaactacccccatttgtttatcgcttttcctttttatgtacttggtgtttattttcttctgtcctcttagcctttttgcaaatgatccctttccatttgctagtgtttttgtttggtcatcaaatgatcccttcctgccagtctttgaacattggccaaaggaatttgaagcccaatccaccacaaccaaaccacataatttccaatgattccaaatttcagttagagttcacaaattacttgtatacagaaaccatagatgctgctacggaggaagttgtgtggttttctgtcttcattgcatgcagctaaacccaaaccaaccccagctagttacatgctaacggcccttgctggacactgtgtactgttgatttagtaaatgaagtcaaatgaactaaagttcttgtgattctgaaagaagccaaaactactacccgtattccagaattcagtgaccacagctgcttctgctctaaactcaaggccctttgattttgtgccctttaatccacagctctctcaattgaaggtccctaatcttagtgtctgtatgaccacgactcttatcaacttggtctatcagttcttttgtactttatccggctccactgtttcctcctagaatttgaattccagcacaccagctgtcctggaggtcgaccatggatttgttcactggttgtatcatacattttgttttgcttccagtgctcactgtgataatatgatgcctagcatttcatacgagttactccttaagctgctctcttcagaaaacaacagatctttttcctaggggtaatcctagttctgtatctaatttttttttttctttgagacagggtcttgctgtcacccaggctggagtgcagtggtgcaatcatagctcactgcaaccttgaactccagggttcaagggatcctcccatcttagcctcccaaatagtgggtactacaggtgtgtgtcaccacaaccggctactttctttctttttttttttttttggtagtgtcaaggtctcacttgattgcccaggctggtctcaaactccagggctcaatgaatcctccctcctcagcctcccaaagtgctgggattatagatatgagccatcacaccctgcctaaaattattgacatgcattatggtatatttactcatgttatagcccatctacctttttttttcttgtagctcacctaggttttgatgtgtgtcagcatttctgactcagtattccaaaccagaaattgcttgtgcctcttgtgaaatttggtgacctcatagggcacttctactaccagctttcttggtgaaaatttcaagtaagaacatagaatcttgggatttgaagaaggcttaaaatttatctatctcaatgtcgttattaggtggtcatatcaatataggttcagacacctctagaggcagaaaactcacggtttcctaagggagctcattccattttggacaactctgattagttgagaatgttaaaccaaaatgctttcttgtacctgccacctagtggatctatttctaccctctgggaaccctagaaaatatgcaggatgtctcttttatttgcagctgtaaggtaatgcatttgaagaccaccatgaaggcccctgcccccatcttctgcctttacctgtgtcttccctacctcacatcaaatattcctcatccccgtggagcagtcctcactgtgagtgccgcttcatttgcatacttgactatttatttctactctttgctttactcttcaatcaaggactctaacataccaaaaatgaattcagggccaggcatggtggctcacacctgtaaccccagccctttgggaggctgaagtgggtggatcacttgagtccaggagttcaagaccagcctggccaacatggtgaaaccccatctctactaaaattgtaattagccaggcatgatggtgcaatgcctgtaatcccagctactctggaggctgaggcaggaaaatcgcttgaacccaggaggtggaggttgtagtaaactgagattgtgccgctgcattccagcctgggcaacagagcaagactctgtcacaagcaaacaaaccaccagaccaaaacaacaaatttagcttttaaacatcctttggtgtggaatctcatcaaaagcttcccatccattatgttatccattcattcagctaacgtttagttagtcattgcccttcttgatagaaatgcaccactgaaaaaaatgcagtcctctgacctcgagtggttcaaccaggaggaacagacgtaagcacagcacagtcagtgttataacacaggtgtgtatggagccggggacacacggggggaatgagtgggaatcagacaccgtttcacagaggaaacactagaacaggattttgaagcaagagcaggaattcacctgcgagaagaagggaagggcaccccacatgtgctaaaatgctcagcagttcaataggataccctgctttggagaactgtaaggagtgtgggatgatctgaaaatgggctgcagaggggaggaagggagagggaaagagctctacctaagactcagaatcttgcacttaataggggttctcaccccattcacccaacacccaccaaatacagaagccgtttagtcagttaatatctgcaaaccaaactaagagtaactgatgaatggtgattttaatttggggttaatgtgtaaatgagacatagtttccctaaataacagcctgtgggtctagtaggacagatcaaaggtgattttgcatatttcagaagggctggtgactctgcttttgaaatacacggctgagtgatccaaacagaaacatcaggtaacggcaagtaagcaccttgggtgttccccactcgtgttcctcaaattcttctctatgggtggagatgaagcagctccaggctagcagattctaccctgtctgggcagtgccctctgttctgagcctccacgggtccagttctccctctatgtccaagccctatctgctggtggactggagaccaactggatctgccccttcttcttttggatgtgcctctcctctccctcctgcagatgctccatgctgcaagctgcaaggagagcccaggaggggtgtcctcctggtggaagttgcgcttggtgaggaaggtccagggaaccaagtcactgcatctccttccccagtcagcagccccccaaagcaactccagggaactctaggaatatctaatgttccacctcccagattcctgctgagactttctggaactaaatagcactggctcagggttcaagccttgccccagtggagcactgatgccacccaaagcagcgaagctatataaattcaccttcacagctctggtcaccagaggcttattctcatttcagcgtgagttaccctaaagctctcaggtaatactggtttagactctttttttttctcaagacagagtctcgctttgtcatccaggctggagtgcagtggttccatctcggctcactacaagccccgcctcccaggttcaagagattctcctgcctcagcctccccagtagctgggattatgggcacccaccaccacgcctggctaatttttgtatttttggtagagacggcatttcaccatgttggtcaggctggtcttgaactcctgacctcaagtgatcctcccgccttggcctcccaaagagctgggattacaggcatgagccactgcgcctggcctaagtattattggaaaccagtgttcaaacactaatctttgttatatttccatcaagtagtgtactaggtgttgtgagggattcagagatacgttggaatgggcagaaataccgcacaagcagactgacacatccttagggtttgctttctgtattttcaaattccgctgccccacctgtctttgtactttgtcttcacaggctggttctcctgaactgagaagagcaggagttcacgtaacaaggaatggcagaaacgaaggatgtttttggccaggaaccgcatccaggtaacatctttgcagtatcttctgatggaggatataggaactgattactgatataggataaaaggcaaataggttgggactatatttcactgttgtcattgttccttactctttattcagaaggtgctttctcgtgacaagtttaaatagtgaatgaagatcagatatttcaacagtaactgaaataacctgttcataatgaagtgaactgtttggccagcagttaaataagtgcggctttttccttaaaaaaaaaaaaaaaagttccaggctgggcatggtggctcacacctgtaatcccagcaatttgggaggctgaggcgggtggatcacatgacgtcaggagttcgtgaccagcctgaccaacatggtgaaatcccatctctactaaaaatacaaaaattagccgggtgtggtggtgtgtgcctgtagtcccagatacttgggaggctgaggcaggagaatcacttgaacccaggaggcggaggtcacagtgagccaagattgtgccactgctctccagcctgggcgacagagtgagactccatctcaataataataatgttccagaaagtcagcttggactctctgtccaagtcaggtagcctgtcttacaagacccctggaatgacgttaggcggctttccgtagaaggagagatgtaggtgccttggagcggctcctggaagggtgactcacattggagtcagtgcgggtggcttccctccctcagaaggctggtattgcgcccctggagccaataagggaggcttccctataggacgatgacagggatataacccccagttgcagaaaacagtggcgtatcatatcctttgtgttttgagaactgaagagggaatgtttcctcactccgaggggatggatttccttaggggcaaagtgcagcagtgtttctgggttagtgggggtgatgctagcatctgaagcaagcctgagcaggcatataggaagagctgccactttggggtcacctcagttgagcttagcctagaggaatgggatcgttttgcttggaagatttctggcagtttctggcaatggtctgaatcatgtctgtaatcccaggactttgggaggccaaggcaggaggatctcttgagcccaggagttcaagaccagcctaagcaacacagcaagacctcatcactggaaaaaaaaaaaaaaagaaaaaaaaattagccaggcgtggtggtgagtgcctgtagttccagctacttgggagctgaggtcggaggattgcttgagccacggaggttgaggctgcagtgagccgtgacccagccattgcactccagcctgggcgagagtggagacctcgtctcaaaaaaaaaaaaaaaatttcaacagtcaacaatgaaaccgcatctcagctcaggctgttgggggatcagttttcaaaactgacaccttgtggcagcaagaaggaacagcagcagtatactacgctttttggactgccgctatccaccccaacagctggtttctcggtggagaatgctggaaagggcaaggaagggcttgagcgatggacaagaataataagatctgtgatctaaattcggacaagtttattttggttacaatctaatataaaaatactaccctcgtatggtataaatccaagatggaatactttctcctttccagatagttttgcattttagaaattgaagaaaaagttttaaaccctgctgtattggacttcctagcatttgctttagttgagaaataagcttccaaactcttatcagattcgttgccagtccttacaatgttgaaataagggccctggatgtgtggacttggcccttgttttatacacatggctaagagattaggcaaacattgtttacccaaaagagttcctgagttacaaagtctacatccctttccactctttccacagacaggttgtggacacatcctggagttctgagatgctttttcgagcacagattaaagtgttcttcagccggtagctggcctaggggcctgaccagcagacttctttctttgcctcttcctctccagctccagccaccaagccagcaaccacttggtatttagttctaaggcagtcctcaaaccgagccagggcgaattcttgaatttgagctcaatcatcagttagaatgtctgagagggaagggtcgaagtataacctctctcaactctcagttgtggcttgagcgtggagcatgaggtggcagagattcaggccttggcaaatagcatggcttgcactagaatattctacggggtgtgcgttggcttccatttctactggaagatgcaaggttgaacagagagggagggctgcctgaattgtctgggagatctgtgtctggagccctcaggcagagactgggccttctgtgtgggctgccgttcttggatgccacgtgacatttcttctctgtgattctgcagggaatgacctcagaatgtcacactcagttttggagcctcatggcctccctgtgattcttggggatctactcttttggttcacctcatggccattttctaaggtgcaggccagccccaggagccctgggttagaaccattttcaacaaccttcaccccaaagatccacctcttgcccctttctagccaggtaaacatgaccagggggtgttttctaaaatccatctaaaacacaacattttggttataccccttctttaggatgatgggcccaacaagcccttcacttcataaccaagggaaactgcttaagtgaatgaatctccgcagagctacaaagatctgcttctaggtgatttctgttcttgcttattatgcaaggaagcaactgctgatgtctccaagtgaagaagggaaaaaatttccccaaattttgaaggatctctgaagggcatccatccaaactcttgtaatgcatgtgtattttttttgtcagttctctcattttccagatgaataaattgaggctcaagaagatgtgattttttctggtcacctggcccctgttttcctttgcattctgcttctagtcgctttctttcctagtctggaaagacctcccagaggcctttcctcactgcacacttaaccccgtcttcagcttttctctacacagttggttgatttcctaagacttggcatttggtgaagaatgtccagccactttggcttctgaggagttgcaaatagaaactatttatctggggagatagattgaactctacattttggaactaaatgcagacagtcttgtgactctgagaagtaggaaccaaactggaatgatccaacagtgttttttcccaaatgagtttatgggcagacagagctggaagcagttcctatttttttatttttttattttttgagacagggtcttgtatgacccaggttggagtgcagtggcaaaatcatagcccactgcagcctacaactcctgggctcaagtgaccctcccacttcagcctcctgagtagctaggactacaggtgcacaccaccacacctggctaatcaaaaaatatatatatatatatttttggtaagttcgagaccagcctgggcaacatacagaaacactgtctctacaaaaatttgccaggtgtgatggtgtgtgcctgtagtcccaggtactctagaggctgaggtgggaggatcacatgagcctgggaggttgaggttgcagtgagtcgtgatcatgccgcagcactctggcctgctgggcaacacagtaagacccctgtctctaccaaaaaaaaaaatttttttttgagacaagggtcttgctgtgttgcccaggcatgtctcgaactcctgacctcaagcaatcctcccaccttggcctcccaggcatgtaatccctcatgcttcagattacagacatgagccactgcacccagccagtctgttagaccctttgagtttctatgctgatagaggtgaggcaagaataccataccccaacacctataatcttatatatcctctgtttatctctagttgaagatgatttatataaagaacgaacgagaaaaagaaggaaatcagatcgagaccagcggttccgagcatttccctccatggagcagagtgctcttaaggaatgtgagtgtcttggaactgttgttttaacatggttcggttctgttccaagtatgttaaaatggtcaaaggaagaggaggttaaattctgaagctggatgaaacatcaaataaacctgttttggaaagagagggctcaaagtctctgtagcggtatgcagttaggcaatttgtctccaggcatctgtgggcaggagggttgttatcaaaataacttcttccagattagaacaaagcctgtgaaaatgatgaggttggtgcttccgtgggtgtcagcatggtgtccttgcattttttctttctttttatgaccacaggagggaaaaatctagaaggggctgaagcccgtggccaagcataccataacttctgttaccagagtttcagagcagcctggctctttggagattttcagaaccaatgattgctatctccagtgagccgccatccctcgtgtgagataacctgctatcttgtttaatcggcttttcatttcattttttttttcccttctctgcgatgttcaacagacacctcctttggagacctagtactttatccctgccaggtacctgcaggtgacatctctctgttaattccagatgaaaaattggaatcacggaccagaagggttttgagcaacacttatcagaaacttattcagtctgtcttcctggatgacagcatccctaatggagtcaagtatctcatgtgagtctgaaatctgcaaccctgaaattttatgtcagtgtctttccttaggcgattataggtgctttcccccaacaaggaaagggactatttaattagaaactaagaaaagagggacacaaatttctgtagctatgggatagttgccattcattgagctgtcactgttaggtaatctgctaagtgctttatatatgtcaaatatcatttaacccatccaacactcctataaagtaggagctattatgatcacttccattttactgaaattgaggctcagagaggcccagatgtgaacaaactcacaccagtagtcagtgagagggtccagaattcaccccaggctgtgtgactctgagctcatgtccccaattatttgtcctctgctgacttgaaggactcgagtggtgctgaggctacaatttctcctgctcagtaagactctgtgttgctcctaacactattaatacttcatgtctgtatacattgtatttctaggatcaagaatatacaatttctgtccaggtgtagtggctgacacctataatctcagcactttgggaggccgaggcgggtggaccacttgagagcagcctgagcaatatggcaaaactctgtctctatacaaaatacaaaaaaattagccaggcgtcatggagcacgcctgtagttccagctacttcagaggctgaggcaagggagtcgcttgagcctaggaggttaaggctgcagtgagccataattgcaccactgcactccagcctgggtgacaaagtgagatcctgtctcagacacataaacaaacaaaaaaaagaatatgcaatttccagtgaatacaaataaagacacctcacatctatatagacattacagggattgtgtggaattatcattaccaaatatttttacataatctcatttgatccccaggccaactctgtgtggtcaacagggattgatattctcctttgacagaggagagaacagagactcaggttgtagtgacgtgcccgggattagaattcagttcctttgcattctgtttcaatgctcttcactctaaactttgatgatcatggcaatgtgcattttaaaattcatccagaaataggcttcttgccttgattgaaaagccgacagtggacccaatctacattgcattatttggaagcactggggctgggaagagctccctgatcaatgccatcatccagcaagcaatgtttctaccagtgtctggagaaagcatatgtacttcctgcattgtacaagtgagctctggctgctgtgtgcagtatgaggccaaaatccaccttctgtctgaccaggtaagtgttcccttcctccctccttccttcccttccttcctttttccttcctttcttcctttttcgttccctccttcctttctttcttccttccttcctcttccctccctctctcccttctttccttcttccttctcttcctttttttcttccttttctttctttccttctcactgtctctcagagataacattatattccttgcaaatacagctcatgcctttgttgaatgaaaagagcccatcccaggagaaagttcatcaagtgagctggggagggggtctagcctggtccttgcatttttatgagactttgggcaagccattcccctcttcgagaccccagatagatgacctagattttctgaatatgcagccccctggccctccacagggggcaatgggcccctctgtttgtcggtgttctctgtgtctgtgtcaagaggggcttggccctactctgccttggcaggagtggagggaggagctgaagaacctgaccaaactcctgcataggacggaggagctgagcagagaagaggcagatgcgtggaacagggatgaggcagtggaggaagccacctggaagctacaaatgatttatggaaatggggcagagagtaagaactatgaggagttactgagggcgaagcccaaaaggaagatccccacctccagagtcatcaccctcaaggcggaagaggtagcgtcaagttcgttttttccttgatttcatcctgggtctcaagtctaacagttgaacctgtttcaggggatgggcttgtggtacagtgtttgtgtgaaataagaaataagttgctacccaaattagaagtatccgtagcccaagttatcctcattatttatggctatcaaatggaaatttttggtatgtgaatggaggagctcttatgcccagaaaaagactatttacagttgcttgagaataattagggatagtttgggctgccaaagattttttaagaagacttatagtggcttaaacaaacagggatttattccttttctcatgtaagaggtttgggggcagtaggggtggggttggtttagtggatcagcaatgccaacatcagcatctctggctccctttgccttccgtcgcccccattgtcatgagatggctcccggagtgctagacttcatgctagcctcctggaaggaagaagtggagaaaaggttggcatcagccacatctcccctttcatcagaaagtaaaaactttcccagaaatacctctgacaaatttctgtgtagatttcagagttcagaactgagccacacagcccttcctggctgaaagggagtccagagaaagtgaaaagcagacttgtcatgatttgcttagaccagtttcactccactgcctccccagtcagacagaaaatcaggattctgctggcataaaagagggacaggatggacattcgataggcaactagtagaatgatattcttgcttttataaacaatgtttattttaagttaaaattcaatttctgaattaaaacaaaatatttgtggaatcaacattcaatttaggaaagctatacatttaaaaacctagtttttcttgtatctctcacctttaaatacacctttaaaatattgctattctatttataaatctagtgattattggtaaaatgggtacaatttttatacatgtcctaaagttaaatgttcaatgatctcctgattaacaaagcaaatcttccttaaatattaatgatacttacataattaatcacatttccttaggctttttgcattacagttaaagttcaatatacttgagcctcttaaaatgtttaaatgcttgactaggcacacttaaaaatcaaatgaatgaaaccttttcaaagcatgttactatctcttgcatacctggaaaatcaaacaaatacagtgcccatttcttacagttttaagacgaatattactattaaaatgattacacttctaatatctaaaacatagactgagcatgtctaagaaacacaatgattacaaaactagttgctttatctgaatacacgcaacttacacaagggtatcaacgtctttgccaactctatatttagaaatactccttcccagcgtcataaatttacgcacggaaacaaggtgaacagaattaccatctcgatgagtgggcttacaaattcagggtttccactggagatcctagaatcaaggccttctacaacgatgtttgcccggaaccagtttattgggctgagccctcttgtaggaaggggcttttcaagcccctgccttttcctgggcttctctcttacggtatctgctctattttaaaattacaatgtcttaaagagcttttattatctcctccgtcgtggtttatcatttggttgaaattgatgaaatctcttactccttccccagattgcaacaaatccagcgatttaatttaaactctcttaagaactgacattcttatctttctttcaggactattttatagaaatttatttaacagtgaccaccatacatcccaaatcccctgtcctctgaagtaccccagttgcgatttactgtcatagttgctggcatggatgtgtcattgtcccgagacatgtttaagtaggaaccgtggtctaagaactattccctctctcacccaccatcattaaaatattctagaaatgcctacatatcaaggtattttttgtaatcagaagataaattttaaaaactctttttaagatccaatttcggccaggcgcggtggctcacgcctgtaatcccagcactttgggaggctgaggagggcggatcacaacgtcaggagatcgaccccatcctggctaacatggtgaaaccctgtctctactaaaaatacaacaaaaattagccgggcgtggttgcgggtgcctgtagtcccagctcctggggagtcaggcaggagaatggcgtgaacccgggaggcggagcttgtagtgagccgagatcgcaccactgcactccagtctgggcaacagagcaagactctgtctcaaaaaaaaaaaaaaaaaaaaaaaaaagatccaatttcagatcaattttcagtttggaaaatatggttaccatatcactgttaattttctatagtcattgctagctttctggtaatgaaaatatcaattacatagtatgttaattttagaactgaatgcagtttagaagataaacttattattcagcaatactataacttccctaaagtcccattttagctgacattggttttgtttcatctgtaaggtaaggatcttgaacttgctcctctccagggtccttcctggctctcaggttctaggtcctacagacctgattgcaggcctcctgttggacgcacttcttacccttactcagcatacttaccatgaacctgcatcacagccaaccggggtgaacagagctgggtgcatggctggtgtgtgtgactctgtcctccttcttcaggcagaagagctgtccatcaagctggacccctacatccgcacacagaggagagattgggatggagaggccgctgagatgcgcatctggcccttgatcaaacatgtggaagtgacacttcccaaatccgacctgatcccagaaggggtcgtgctggtggacatcccaggcacaggcgacttcaacagcaagagggacgagatgtggaaaaaggtgactgtctttcgtaggtttagttctctcttccctaaactcctctaccctttctcaagcaacaaagaatgctctggtttcagcttcagggattttgagttcattggaattaaattcttttaatttctatgttctaagtctcaaggccctggcagggtgtgggtagccagagaaagtggggagggaggaatcacaggatgtgactattggagctgggacaagtgtgtgtgatgtatgagaaagaccagcaatagagtggcttaagaggaaacagagtgaccaaggacagaagggaactgggaggccaagtgttggggacaaagcagagaagctgcagccagtcaccaagaaccaagaggctgcaactgtgttggctgtaagcagcatcagcatagagctggaggtctgaggaagctggcgtggtgggggcagggtgaatcttcctgggtgaatgggagaaggagcatggggtccgtggaggagggagactatggaagacatgcctggaaaagttctggggtctttagtactactgctccagagtttggcttcctgggaaaacttgcaggaagagagggactggggcatgtgattgagaaagggcgcggtaaacagaggcgctctggagcacagggtgggaggaacacaggagcccaggagctggaaggggactgggagagggggaccagcatcagtgagttgtgagcagcacagcagctgccaaagaatccagttctttaaactccacaggtttgtttagatgaatgattgtgccaggggagcttggtaaccacgacttccagtcacaatctagagcaagctctagcctctgccctgattgtacagatgaagacatgaaggctcagagagggaaagtcacttgtccaggaccacacagccttggagagcaggtttcctaacttccctgctggggctctatctaccccacctcccccagggcacgctctatattatccacctcctgcaggaggaaggcagtctctgtgtccttccccttggtcggtggctcaggcctggccttgtgagccttagtttctgcaagacctcggatcctggggtggaaatcgcgaatcttggctagttccaggcccggccgagagagcgacagcccaggaaggctgccagggcctctcgctggatggagccgcggctgcagccagttcagatacactgggcagcttatcaaagacggcagatctggctcagaaaatgtgctctgaggaggtcaggctgaagcgagggatggttcccaccgtgctctgcctggcccagctcccctgcattcttgtgggttttcttgacctcctctcacaagaagttactcaagacccccctctgcagggagaacgacacagttgccctccctatgtctctcaggctgccagtcttgccttccctaaaacccgttatgaattcagatgtccctgaatctgatctgccacttagaagtcacgtgacttgaggcatgtctctgaactcctctaagtcccattctcatagcgggggcctggggagatgcaggttgggggtggtggggtgccacctcatctactcctaagtctggcagttcaggttttatcgaaatgcttttttgtatcttctgcgacactaactttaccaaaccctggcagtgggagctttgtgtggggtcggtctgaaatttaaccactgcaccctttatggttgctgtccttttctcatgttagtaaacactaagcacctgtggcttaccaggaccatggggaatatgaaggtgacgggggccctgcccttaaggagcacccagcctggcatccttatggccttccgctggctggaccattctctgcccactgttgacactacagagctggaagctgcttctacttttgttttgttttgtttgctacagcatcttgctctgttgcctggactggagtacagtggcataatcatggctgactgcaacctcgacctcctgggcttgagcaatcctgctgtcccagcctcccgagtagctggggctacaggtgcacacaaccacacttggctaatttttttttttttttgtagagatgagattttaccatattgcccaggctggtgaactcctgagctcaagtgatctgcctgctttagcctcccaaaatgttgggattacaggcgtgagccaccacatctggcccagagcccaaagcttttctaagttgattatagtttgggcagcagaagggctgtaatggtttttattttcttgcctaaatcaaagtccattcacttatagaggagagacaggatccatcgtcgtgtggccctacttgagtctctttaccgcttgggcttcattacttccctataatccaaggggtttctctaacttgagaagcagatgctttttaagcagtgatgtatggagccaaaaggttcctggacagagggtagagggcattgagccgatggtggttctgggtcctgcactcccaattcaaccagagcagttctgctttttaaaaatcaagtttatatgttggaattctaactaagatttcatttgaaaaagcctcccatgctaaaagcaagctgaaacccactgccctggatcagggtttctcaaactcttgacattttgggctgtcagataattatttgtgggatgggagctggggttgggctgtcctgggcattgaagaatgtttagctgcatcctcggcctttaccttcaagtacccccccaaggttgtcacaattaaaaatgtctccagacattttttgccaaatacagatgctcattgatgtaccatagaattgcatcctgataagcccactgtaagctggaatcataaccatcattagccccgattgtactggacttaccaattgttcagtaaacccattgtaaagtcgaaaagaaaaattgtaagctgaatcatcacaaattggagactgtttatattttctggggcacaaaacctctactagttaaaaactactggtataaagcaaaatgatgatttaattttcaagtcacaaacttgtcatccctttgtatgcaaagcactgaggaaccacaaataaactcaatccctgagttgaaccagattttcatttatgtggaggtaagacaagagtaacaatacaattagagaaatgtcacaaggctacacatgatcgtcatgtgaaagttgcatatttaataaagcaacattcatgccattatgttgtttcatgttcattggcctttgcaacttgtcatatggtttctggctccatgctgccatctggtggcattgaactaaacgtgcaggggcagtcaaacatcaaaatgctgccgtcaggtgacagcttgagggtaggtgcaccaccaaacctagttctggaaaaacaagaattttccccaggggacaactgagataaagcaagccagtgatggatctgggactgggactggaggactgatttagggaattctgtcaatctctaatgccacaaacttctgtgaagcctctcctgtgtgccaagcactgggcttgaggtgaggtggatcccaagaggaaaggtgcagacagtcgcttcccatcaaggggcagagagcagacctggtgcagtcactgtgtctcagaggcgctgcttgaggtaagtccaggtgttacaggatgcagaggccagcccaatgcccgagaggtcctccacagtcttgaggaacaaatgggggctaggcagaggctgtggccagggaattaacagaacaaggcacatatgagaaatgactcatagctcagtccagctagtgcacagagtgcggtggggagcggtgaggggtgggactggagggagaggcttaagggatacattagggaaccggtcctcaggaactgtgactccattcctgtgctgacacatgccgtggtcatgttttgcagaccattgacaagtgctcagtgatctgggtgatcagcgacatagagcgagtttctggggggcaagcccacgaagaccttctgaatgagagcatcaaagcctgccagcggggcttctgtagggacgtggccctggtggtcaccaagatggacaaactccacttgccagaatacctaaggtattgtgctgggcttgcaaggatgtgggctccagtcaggggctttcctctgtgggtcctgactacagtagcatggagcttgactttgtaacgtggttagagggcttcaggaagtgattgttggggaggaaagaaaaggctgggtgacttcctgggacatcaggacccttggttgggttgtcttaggaatctgaaccttccagggtagctgcttagtgccaagctggtgtcccctacacagctctgggggtgccactcacatgtaccagatgcagatggtgtacctcctgcactgtgtgatgtgatgatcccacctgctccacagatgtagaaagtgtagatgcccccataactagggggtacagcctataatcctatctggtagggtacagcttttttttttttggcacagagtcttgctgtgccgcccaggctggagtgcaatggcacgatctcagctcactgcaacctccgtctcctgggttcaagcaattctcctgcctcagcctcccgagtggctgggattacaggcgccggccggtccacccagctaatttttgtattttagtagagatggggtttcgccatgttggccggggtggtcttgaactccggacctcaggtgatctgcccgccttggcctcccaaagtgctgggattacaggtgtgagccactgcacccagcccagggtacagctttgatgtttcaggtttttgtactcctgagctttttaaaaatcattaaatttttatttttattttaagttccagggtacatgtgcaggatgtgcaggtttgttacacaggtaaacatgtgccatggtggttagatgcacagatcaacccatcacctaggtatcaagcccagcatccccagccagagactcctgaactttttaactcacttggaacaggtcctcaaaagttttagaacttcgggagaaggtagatgcattctctaagagttgtattataacaaattacaatgaaaggtatgcatttttgggcttaatagatgttgatttctatggagagctctgttgtccctatagttaggaagactataactaaccttctatattgggacaattttgagagtgagagggggtatgattagtccttagaggggatcagcgggtataaactgggctttcctggatccatggggtgtgtgctcacgggatgtgatgtcacggatgcgtctcacctccaacaagagctcctttacagcccctccaccatttcctccacacccactgaagcttaggtctgactgctgtctccaggaattcccttgctgtcatggtctgggttggaattgcagcttcatttttttcctcctgcatttctccccatctcaccccagcagagaatatctccagccctccctttccaatgccaacactaaaattaacacaattaggctgagtgtggtggctcacacctgtaatcccagcactttgggaggctgaggcgggcagatcacaaggtcaggagattgagaccatcctggccaacatggtgaaacccatctgtactaaaaaatacaaaataaattggccgggcgtggtgatgcacacctgtagtcccagctactcaggaggctgaggcaggggaatcgcttggacctggaatgtggaggttgcagtgagctgagatcgtaccactgcactccagcctgggcaacagagtgagactccgtctcaaaaaaaaaaaaaattaacataattaaatctaatttattaatgataagcatttattgaacataggtaggggctgtggattcagaggcacattgcccagtctttgagctcaccatctaaaagagggttaaaagttatacatgaagggacaagccaggtgctatgggaacccagggtgagagggctgcatttttgactgggacagggagtgaggtcacagaaaatgttcacagctgacaaaacgctggctggccgttgagaaatgaaggcacttttttcaagtggatgctggagatgggtcagaagagagagcattgggtcaaagaaagaacttatgaaaaggcacagacacagggagtgtgtgctgcttttggggaaagtcgaaagactgcagtgacacatagtaaaaattaagtaattgttacatttttctaatttcatttcagggaaagaaaggcaggaaatgtaagtatgaactagttttttttatttttatttttaaattattatctatttattttttatttttttgagacagagtctcgctctgtcacccaggctggagtgcattggcgcgatctcggctcacggcaacctctgcctcccaggttcaagcaattctcctaattcagcctccagagtagctgggattacaggtacccaccatcatgcctggctaatttttgtatttttagtagagatggggtttcaccacgttggccaggctggttttgaacccctgacctcaggtgatccaccggcttcagcctcccaaagtgctgggattacaggcgtgagccaccgcgcccggcctgaactaattctttttaaataatactttttatgactgatattacagttggctcttgaacaatgtagagattagtgtgccaactccctgctcaattgaaaatccacacataatttttgattccccaaaaacttaactactaatagccactgttgattggcagtcttaccgatagcataaacagtcgattaatacatattttgtgtatgtattatgttctgtattcttaaaataagtaagctagagaaaagaaaatgtcattaagaaaatcatggcaggacttggtgactcatgcctgtaatcccagcactttggaaggctgaggtgggcggatcacgaggtcaggagttaagaccagcccaaccaacatggtgaaaccccgtttctactaaaaacgcaaaaattagctgggcctggtggaatggacctgtaatcccagctactcagtaggctgaagcaggacagtcacttgaacctgggaggcggaggttgcactgagccgagatcgcgccactgcactccagcctgagcaacagtgagactccatctcaaacaacaacaacaaaaaaaaaaaaaaaaaaggaaagaaaatcataaggaagagaaaatacatttacaatacggcaccgtatttatcaatagcataagtttacttcatctgtttacaagatgaatcgtacatctgaaatgacaggcaacagcagctgcagacctcaatctacggcacatatgaagcgattcaactttttcttgtaatgtcatgacttttctctgctacttgggagcccctccaggatcactggacttcacatgggtccgatggtgttattcaagatttagggtattgctctaaacaggctgaaaaatacatgagaactgcaagagctcactttttattgccatacgcaatttactggagcagttgttcacatggagatcattagtatcacatggtgtttggcgctttaagtggatatttgcaacacttgagctcaccacaccagcaacaggaggtggctctgaagttattacagtagtatagtatgtactacagttaattttatgcagttatgatttaatactgcatcttaatgtttgtttacattcctcttgactgccaatggtgccatgtagtctatagatgtttacagaagttttgataaattttaacttttcatgatagaatcgtgtgcatttcgtggtagtacattatcaaatataaactgggatctacatctattttatgtattcatgacacctttttgttaattttttgatacttctaggctacagggtttgtctgtgagttttttcagattgttgcaaatcttcaaatctttttcaattattgaaaaagaatccacgtataagtggacctacgcagttcaaacccatgtagtccaagggtcaactgtgtattttttttttttttttgagatacagtctcactctgtcgcccaggctggagtgcagtggcgcgatctcgactcactgcaagctctgcttcctgtgttcaagcaattctcctgcctcagcctcccgagtagctgggactacaggcacgtgccgccacgcctagctaattttttgtattcttagtagagatggggtttcactggattagccaggatggtctcgatctcttgagcttgtgatctgcctaccttggcctcccaacgggctaggattacaggcatgagccaccgtgcccggcaactgtgtataattctaatacagtgcatgcatatttgactgtttggaccaaatgaaaatctgccaaaaaaatgtgcatcttgccacctcatcactgttgataacgctactctctgcatgcttctatttcctttcacaacctagcaagctattcagagtcagcgagaggctgttttagaaagaaatgaaatgataaaactacaaaggactagaattctcaaggaaaaactgaaggtgagttaataggtttctctatgtgtttttctgtatcccagcaactagattttgggagacaaatgtatgcctggtattgtgtagttgcaagggccaaagttttggaatagacagttagtttcttttgttttgagacgcgggtctcactctgttggccaggctgaagtgcagcggtgtgatcttgactcactgcaacctctgcctcccaggctcaagagatcctcccacctcagcctctcaagtagctgggactataggcatgcaccgccatgtctggctaatttttgtattttttgtagagatgggattgcaccatgttgtccagactgttctcaaactcctgggctcaagtgatccacctgccttgacctcccaaagtgctgggattactgacctataggagacagtttggatttaactcagtcctactgcttcagttacctctctgaggcaccattttctcatctttaaagcagggagataatgatatctatctcccgtgattgttgagagggtcgaatgagcatgtggtccacagaggagtaggcccaggtgagtctgggctctccatacagtggaggaattgttgagtgctatgggacacggaggaaagatgccaggtcacactggtggcaggagaggtgggactggggaggtgttcaaggaaaactcagcctctgagcagaattttattttattattattattttttgagacttagtctcactttgtcacccaggctggagtgcagtgggacaaactcggctcactgcaacctccgtctcctgggttcaagtgattatcctgcctcagcctcctgagtagctgggattacaggtgcatgccaccatgcctggttaatttttgtatttttagtagagagagggttttaccatgttgaccaggctggtcaccatgcctggttaatttttgtatttttagtagagacagggttttaccatgttgactaggctggtcttgaactcctgacctcaggtgatctgcctgccttggcctcccaaaatgctgggattacaggcatgagccactgcacctggccaattttattattattatttttaaagatggggtttccactatgttgcccaggctggtctcaaactcttgggctgaagtgatcctcctgcctcagcctcccacgtagctgggactacagctcggcaagcaccacagtgctctgcagagcagaattttaaagaagctgtagtctttagtaaggtgaaaaagtcgagaaggcacttttgaggcagaagcaagaacaccgttcacacaggctgctgtgtttggcgaatgacaggcaagtagcttggaaaggctcagagggagagtgtgagagggagtggacagggataaggcctgagctgcacttagtgttctcctatttttactattttatcactaaagtaggtacaaacatacaacttattattattatagtctttttttttaacttttttattttgagacagagttgcgctccgttgcccaggctggagtgcagtggtgcaatctcggctcactgcaacctctgacccctgggttcaaacgattttcctgcctcagcctcccaagtagctgggattacaagtgcctgccactatgcccagctaatttttgtatttttagtggagatgaggtttcaccatgttagccaggctggtctcgaactcctgacctctggtgatctacccacctcggcctcccaaagtgctgggattaccaacgtgagccaccacgtctggcctataatagtcttgtacaactataaaactaaaaccaagtttaagataaaatataaacaacacaacataagggatatatcagagtaagtaccatgtgacagatgatatgtttggctgaaacaaaatcttcggtattggattcaatagtaaaaacatttggccgatgaccagctctatattcaatttctttctgtattttgccttcaataatattgatacagaaaatgtctgttgtgcaacgtggaattgaaaatttcaaagcttttgtttctagcgcaatatcattaggcctcatacttaagccaaaatattctatcaggcaattcttgaatgccagttttaacgaggcaaaacttagtacagctggtcttggtctgttgaattgttcttgttggtattaaataaatatgcattgtatgagtgcctgatcatattatccctggaaatggaaacgtagaatacttcaatacacaatttacaactatgccagtaaacatgccgaattggtttgtatgagttagggcctgggcagcaatacatcagtttgcagggtgactatagctgtcaccgctatggtgcaagttcttctgaggcctaaaacccacacctctgatggcaaggtgatgccttcattctccaaccactttatttcagtttgaattattgtgaaacctttacttgtactacatgccgttgtttggaactttttttttttcccagatgggtctcactctgttagccaggctggagtgtagtggcacaatgataactcactgcaacgttgaattcctgggctcaagctatcttcctgcccgcactccgcaccccctgaccaccaccagcctcccaaggagctaggactaccggtataccggtatgcaccaccacatccagctaatttttaaattttttgtagagacagggtatgttgcccaggctggtctctaattcctgggctcaagcaattctcctgcttgggcctcccaaagcactgggattacaggtgtgagccacaatgcctagccttggagcaaatttagttttaatcacagaaaacatgagacagaagttctttataaggcattctttgagtttccatcacttttttttttggctgggtgtgggataggcagtcactttgcatacacctcagtatcaaaacacaacccaccttcatctacatgtggatgtctccctttcctaggtcccatgaagcacttaggtgttgctttgcaaaaaaatctggaattactgtctacaccaaccatacttccactaacatcaagtatatgccccacgtttccatttccaggcctttcgatgtaacggcctggaaaatgctgacctttcaatgctgaatcataacataatcttttaaaagacatattaaatggcagttaagtaatgcacacaactcattagaaggaagggcaatgtgaacagctgtgaccaagttcacccatgtgcagtgtatgaacctcctaagcaccacagctgggtagcttggaacgacagaaaattattatctcccagttctggaggctggaagtccaaaatcaaggtattagcagcgccatgctccctctgaaactgcaggaaggatctggtacagttctgtctgcttgcttctggtaattcctggcttgtggcagcacaactccagtcttcatatgccattctcctcatgtgtgtgtctctgtatccaaatttcccctttttttaaagacaccagtcattggattaggggcccaccctactccattatgacttcatcttaatacatttcatcctcaatgacccaatttccatataaggtcacatttttaggtagtggagattaggacctcaacatgtgaattttggagggggatacatttcagcccataacacacaggcagtgacaaccaccttgtgactgccacctggcctgcagcagttgcaagatgcacctcaatttcaaaaatattaaacggggaaacaatgtgcctcttagtattgataagctgtagtcacatatcagctgaagttaagtggttgaagattggggatcacaatgtagttatggatttgagttactagtttgagattcaaggctgagacacaggcacatagatccttccaagatgcctgatttgggccccatcctatagtaacgaggctttctagctccacatcttttcttactacctggtatgttatggttcacttgaccttcccttaaattttgccttgacccagtttggttttttttgtttgtttttgtttttgttttgttttgttttgttttgtttcgctcctgttgcccaggctggagtgcaatggcgctatcttggctcaccgcaacctccgcctcctgggttcaagcaattctcctgcctcagcctcccaagtagctgggattacaggcatgggccaccaggcccagctaattttgtacttttagtagagacggggtttctccatgctggtcaggctggtctcaaactcccgacctcaggtgatctgccctcagcctctcaaagtgctgggattacaggcatgagccaatgcacctggccgccttggctcagtttttactataaactgtcacacgactttttattttaacctaattcacaaagttttactgcctgatttgacctgacaggatttttgtgcccctactaagactgttaatattcttttatatgttaggtaaacttttaggacttgcccaagtggaatttacagactgaattttgacagtctcaggcatatattgtttgaggtggttaatgcctttactttaacataccttattttatttactcagttttaggatcataatgagctcatagcttttcacagaactattgtgttcattctgatgctcaatgtgtcactttttggccagtgggaaccctttaagctgactccctttagcattactccctttagcatttaaaaaacattcttgctgtctagctacaacaagatattcaggttcactttatttttccctgccccaagatatggaacaactactccccaggaatctggggtttcttttagcgagaataacattaaaaataata

SEQ ID NO: 425 - DNA, 17956 bp, Homo sapiens
  source 1..17956: mol_type = other DNA
cggggcgcggcggcaggaactttcccggggacccctgcgggaaggcctggccagtaagcgcgcctctttggcccgaatcaacatggaaacctaaggaaaaacgtctgacctgcggaggtagtttgggtggctacttggtgttggacttggctaaataaataccagaggcagataaaacaagcgaggggcctaggtcaagagttccaagtttgttcctcgataaaaaacgacaaacgcggtcgggggcggtgatgcccgcctgcagtcccaacactttaggaagctgaggcggggggatcgcaggagttcgagaccagtctgggcaacataatgagaccatccccaccacctcccgtccttaattttttttaataaaaaaaatctttaagtgagaaatgcatctgtaatgtccttattaaccaaaaacgcctaagggataaagaagcacacgctccctagccaacgctagaggaacacaccccgagagctggtgctgtaggacccagttttcccgcgaaaacgctgccgcgcagggggtcagaccatctggaccaaggggggccgagcgaggcctacttctggtttacgcacgggcgctgaaagaagcggcactgtccccccctgccgatgcgcagtggcgcctcccggaggcggagccacgtacgagcgccgctgtgattggtgaggccccgccaggggcggagacgaccttgccgccggcgggaactctgggtctcgcggtttgggagcgctactcgccaggtggactcggagtccgcgagcgtcgtcggcaagcggccgcctttccacggtaaccgcgcgccggcggggagggcgtggcgcggagccgacgggaacgtccgcgctgcggagcagggcagggaagccgggaggcgggcccggcccgagcttgtccttgtcgcgcaggtactccgagcactatgtcgtccccggcgtcgaccccgagccgccgcggcagccggcgtggaagggccacccccgcccagacgcgtgagtcccccgagccgggcccactacagcccccggcgccgccccgtctgccctctcgccgcagctggcagcgctgggtgggtgcgcgggacccgggcgctcagcctcgggctgggcgctgccgcttggtgcgcacagacacccacagcaggctgtggcctgggtgctgcttaattcgattgccatttgcctctgtttggtttggttcagtggtgagtcataatgccccaaggaaaagacaaatccaggaaggccggccctgaaagttaatggctgtcttttctgttttgtgtgacacaagctcggagtgaggatgccaggtcatctccctctcagagacgtagaggcgaggattccacctccacgggggagttgcagccgatgccaacctcgcctggagtggacctgcagagccctgctgcgcaggacgtgctgttttccagccctccccaaatgcattcttcaggtgcgtgtctgaagatcttggttttgctgtgcttgatacacagctgatgctttatctgctcaggtttactggctttataacagttggcataacgcctaaagcatcccctctgcacgtgactgagcatgttcttaaccagaggagctgaacggagtgcagaaaatagtagttttagggcttagtgagcagaggaagcagcttctctggtgcttttttttaatagaacatttaagagtgctcagaatctcagccaccgcaggttgcaataaatattcagtttgctgttgcgattagatggtatagatcaacagacaacatgctgtaatttcaggtttgatatgccaccagaatttcctaattttgtttttatagctatccctcttgactttgatgttagttcaccactgacatacggcactcccagctctcgggtagagggaaccccaagaagtggtgttaggggcacacctgtgagacagaggcctgacctgggctctgcacagaagggcctgcaagtggatctgcagtctgacggggtgagtatgcagtctcctgaaaccatcttatggcgggtatcatgtgggtaactctgttttcatgattctgtcatgtttttctgtgtaggcagcagcagaagatatagtggcaagtgagcagtctctaggccaaaaacttgtgatctggggaacagatgtaaatgtggcagcatgcaaagaaaactttcaggtgagctacatgtattaaaattcttactttgggctctgaaaatgttgggagaccgtgtttataatctatatctaagtagccataatgactagaagggccacctgtggtggctcacacctataatcccagtactttgggaggccaaggtgggaggatcacttgaggccaggagtttgatagcagcctgaccaatatagtgagactccatctccaaattaaattttagaaaagaaaaaggaagaaaaatattatttatttctgtctcctgatagtgacatactcataactttgtgtgtttttagtagttgcctgttcccaaatgctatatgcctaatacagttttctctccacttaaagagatttcttcagcgttttattgaccctctggctaaagaagaagaaaatgttggcatagatattactgaacctctatacatgcaacgacttggggaggtaatcaaatactctttaaattcaagttacgtgttttaaaatagttaaattagcaaaatataacttgttcatttttattttctagattaatgttattggtgagccatttttaaatgtgaactgtgaacacatcaaatcatttgacaaaaatttgtacagacaactcatctcttacccacaggtaagaatttagctttgaccttgatgaattttagtaacagtctagaaagaatgtttccagataacagaaattcttcagtaatgaagatagtatgcgcaaacactttaagaaactgagtatcatctcctttggcccggtgtggtggctcacacctataatcccagcactttaggacgccgaggcaaatggatcacttgaggtcggaagtttgagaccagcctgggcaacaaagtgaaaccccatctgtactaaaaaatacaaaaattagccagacatggtggtgcatgcctgtagtcccagctactcgggagtctgaagcgatagaatcacttgaaccccggaggcagaggtgcagtgagccgagatggcaccactgctctccagcctgggcaacagtgagattccatctcaaacaaacaaaaaaaaactatgtatcatctcctttaagatgaacatttttttttcacattttaatgttcctgaaagtgggacttgtattactatcaatgacaggttatggtttacttggcagtgtttttcatgtagaaaaatgatgaatcttaaaactgatagcttcttgggtttcatgaagtaagttatcttaaatggaaatactttaaatgaattacatacttcctgctgctttgaaagaatatattgtactgtagacttttacttctaagcctcaggtcagtttctattaatgaagtatcagctctgttgactctgggtgtagtctttggaggcaagcagacttggtttttgaatcttggttttgctgattactggctgcataaccttggtcaagttccttagccaaccaaaagctgtttcctcatctgtaaaatgggaaccatatgttaagaaatttgaataaatatgatttaacttactttggtatcgccaggcacggtggctcatgcctgtgatcccagcactttgggaggccgaggcaggcagatcacctgaggttgggagttcaagaccagcctgaccaacgtggagaaaccccgtctctattaaaaatacaaaattagtcaggcgtggtggcaaatgcctgtaatcccagctactcgggaggctgaggcaggagaattacttgaatcccagaggcagaggttgcagtgagccaagatcatgctgttgcactccagcctgggcaacaagagtgaaactctgcctcaaaaattaaaaataaataaataaaaaacttactttggtatcacttcattatagaaggaaaataaagtgtgaggtcaaaatctttttcccttctaatagaaagcaaagaatatgccagtatacatcaagaaggcactttcgtataaattatgaaatttaacccaattgaaaatatgcagaaatagatagttcagcatacctaaatttgaaaacagcacgtgcatgattctgtagggtaatactttggggacatgacatgttgtctttttatactttgctaatctgacatgcctttattatatttaacactgagatatgaatacaaatacatcttcatatttgtttttacaggaagttattccaacttttgacatggctgtcaatgaaatcttctttgaccgttaccctgactcaatcttagaacatcagattcaagtaagaccattcaacgcattgaagactaagaatatgagaaacctgaatccagaaggtaatgtatttttcataggattacttttgttgaaggaaaatgccttacatgaaaatagccttgttttcattgagaaattatgaaagaagtaattggcggtggtagtcaaggtgacggattataaattgacaataatatagattcagttatcctatatacttatgaaccccctatactttttaaatttaattgaagtttctgatataagagatgtgactattggccgggcacagtggctcacgcctataatcccagcacttcaggaggccgaggcaggcggatcacctgaggtcaggagtttgagaccagcctggccaacatggcaaaactcctttactaaaaatagaaaaattaccagggcatggtggcacacgcctgtagtcccggctactctcgggaggctgaggcaggagaaacgcttgaacccgggaggcggaggttgcactgagcagaggctgtgccattgcactccagcctgggtgacagaatgagaccctgtctcaaaaaaaaaaaaaaattagattttaaagatttgaggatcacttgaggccaggagtttgagaccagcttgagtgacataagagactccatctctttttaagaagaaattagcaaggcacagtggctcacacatgtaatcctagcactctgggaggctgaggtgacgggcttacttgagcctggcaggttgaggcttcagtgagcagtgattgcaccactgtactccagtctgggcaacaggttaagaccccatctcaacaacaacaaaattgtagaggtctcatgaatcagtggcaggatagggtgatcttcacggctagcagtggctaaatacaggccagaacagggtagcttgtctgaaaccagcaggggaaattagttgcgggcagtgggaccttcaaagggaaaaagttgtctgtcaggaaaggttcaaataatagaggaaacgagcaagagtgaaagatcagagcatctaaggggttctcctgtgtggataataatgactttaaagtatagaggactttttctctaccaggtgctcttactaggcttgaagtacattggcacgttcagtccttggctctgggataggtgctgataccaccccattctataggggacacaaaatgtacacagaaaggctagggtcaggactcagtccaggctgtctggcttttttcctgacacagcagggtgtcatacaggaggccaggtgagtgaggcaggaggcagggagcagggtaggcagacaagaagggaacgagggatgcctgctggacaggggccctgaggaagaagggccagaggttcgctgggcttgagagtctcctgaagacatagcctgcagatgactggacacagaaaggtcgccctaggcagagtcttgggcacctagctcctgtctgtgatcccagctattcctggacctccacacctcaggtcaggtgtgctgacctctcttctcccctcacagacattgaccagctcatcaccatcagcggcatggtgatcaggacatcccagctgattcccgagatgcaggaggccttcttccagtgccaagtgtgtgcccacacgacccgggtggagatggaccgcggccgcattgcagagcccagtgtgtgcgggcgctgccacaccacccacagcatggcactcatccacaaccgctccctcttctctgacaagcagatggtgcgcagccaccctggccccccaggctatgctttgcctgtctgtatcctcaaaaggccaactataacttgtccctcggaccctgagcctcacttcccgaatggcatccatccctctctggtcttgtgggtttcgttagtggcctatgggctaaatatgcagagcacgcaaagcccctgcttcagggcactgtccctgtgctgttgccagtggcactgtctgttgttagagacactgtattttcatggcctaaaatgcttcaaacgtttgagatgagaatacttggttaaatgtcattctgctttttccattggtaaaggattgaggaatttttctgaaattttttcacaaattttactgtctaagaagtttggtcttttttctctatattcatgaaattttaagatgaagttattaaaatgacagaaaaaagtgaggggaaggtagaaaattgcttatttaccgtgattgtgactgtaaagatgtgggaggacaggatttgagtttttctgtgactgcgtgtgcatggtttctttaatgttgcatgggatggagagctggagacagaaaggcaggcaccctgctccgcaggagcacatggcctcctattctcagaatcatgcaggcccccaaagtggcttagagaaaagcccagcatccttaggcctctcagagggtacctggtttggaaaggccttcctcgaccctgctttatgaaaagcatctcagcttcccccaccgcagctccctacattccttcccctgttttgttgctgtctgttgcagcaacttctttagaagaagtaatttctaaggaaataatgagaaacatggacaatcatttatgtggggatatgcactgcagccttatatggcaaaagcagtacaaagacatgcagattttgtccccctgccctctctttgtggcccacatgttctctgtttgctgaccttcagatcaagcttcaggagtctccggaagacatgcctgcagggcagacaccacacacagttatcctgtttgctcacaatgatctcgttgacaaggtccagcctggggacagagtgaatgttacaggtaagagtgtaggtttgcaccagcacttgagcatgtctggcttgctttcaatgctgtgctttagtgagtcattggacttggtcacaggtccagttctacctccagttgtcactgcttgtctttgagactgtggggtatatccctgctttatctgccacctttttaactgagtaccatggcccagcagtatgaaattgttcagttcttcccaaacttgaatgttggagctcatggttcgtgtggtcactcgcctcttgatacctcagtatcctggagctgtgtgtgtctcaagtcagtactgttggcatcatgagagagcagcctcagacaggcttgtatgggtaaagttttgagttatgccatcagctcagagaagtattactcaccaatgctggagttttaagtaatttttacttaatttcccaaatgtatagccaagggttaacatttgtttgttacagagaaaaatgagtcagtgacttgtttccatgtgtagaagctgaggttcagggatgcatagacagcagtagctcagatgccacggtaaatcagaacccaggacccaggtctccttctcttgctgccacaagagtgctctttgcacagcaccatatgagtgtggcagtcctccttttgatgctgtagagtcacaatggattttggttgggggcaagggagtgttgatggcagcacggttcttcattgatgggcaaggtggcgacggtcgcggagtgcctgaatctgctcctgagcggagggcctggggcacaccacgcatcggctcttgtcttcagtgaggcagtgctcaccctgtttcttccccagtgtgaagtcccgcagttatcactggcaatcttccgtcgtaaaagtacttgaagtcatggagaatttgaaagaatgcgtagtttttagtgagtgacgtgcgcatttccagtcctgctaccctgaaacctttgataaagtatttagtccaatatttttgtttcctcacctacaaagtggagttaatgtgatgatacatgtgtgagagtgtttggggccaaggggctgtggaaagtgctgtgtagatgtgaaataagtatcaatgctgctctgtgagataaatcattccgggccactttaaacataatcttccatccctagcctatattggagtgaagaatagtgtgtattctaagaatgtgtgtaaactggtttgttgtgttaaacaagaattacactgacccactgaataaacaaggacagtgctctgtgccattgcgttgagatagctgtaacggggaaaggccaggctttctccaaaagctgcaggaatcagcctggagttaaagccttctggtttgaaatccagaaaagacgaacatcagatcagacctctgtatgtgaggagcctggcttccagaagaatgcatgatttgcatgcttttgtcgggggtggtgggtaggttggggggacctagtctagttttaatgactggaggattttagcattttgttgcagtcaagtaagtgctaggcagattctgtacactcaacttagggaagtaaaaatactgcttattaaaaacaaccacgaacccagcattgagctagaagcacagcagctccatttcaccctcagggtgactgtgcccgtgggcatgctcacgtagctacagttgccctggagcactgctgactagtgggcccaggtgaacacgtcctcgggtctatcatttgcagaaacctgggttctttctcttttgttttgttttgttttgttttgtttcattttgttttgttttgtttttgagacggagttttgctctcgtcacccaggctggagtccaatggcaccatcttggctcaccgcaacctccgcctcccaggttcaagccattctcctgcctcagcctcccgagtagctgggattacaggcatgtgccaccacgcccggctaatttttgtatttttagtagagacagggttctccttgttgattagggtggtctcgaactcccaacctcaggtgatccgcctgcctcagcctcccaaagtgctaggattacagacatgagccaccttggttctttcgagcttgtccgtttcctgctgctatttccctgcttgctcatagcaagcgggagctttgcaatgtgggcctgagtcctgggcttgggagggtcatttaagagacggtggagctcaccctttccagggccagcccgacgtggtgcctcgctctgaagtgcacctgttgcctacgctggttgctgagccactcggaggaagatatgggaaggtaaaagtgcatctcctggttgtgccctcaggcatctatcgagctgtgcctattcgagtcaatccaagagtgagtaatgtgaagtctgtctacaaaacccacattgatgtcattcattatcggaaaacggatgcaaaacgtctgcatggccttgatgaagaagcagaacagaaacttttttcagagaaacgtgtggaattgcttaaggaactttccaggaaaccagacatttatgagaggcttgcttcagccttggctccaagcatttatgaacatgaagatataaagaaggtaacagtggattttaaactaggggttgggatttacaattctttgggatcaaatagtataaacatccactccgccactcgagccatccgccataaaggacagagttgtggcctgttagagcaagtgctggcaacctgacttgccattggttgagaagaatcatagcattgtctatcctcatctctggtctaaacttaggtttctaaacagaagaggccacacagtgtcagaatagggacttgcatggccaccattctggtgtaatgataggtgctgatgaactggtcagtgataacttaaagcatatcaagcactttcacgagcctttttataccttcctgtgatttcttaattgtagttctttataagagagaaaagtacctctaaagtttaaactacatctcagttaactgtgcagaaaatgaatgtttagacatgtctctgattatttagggaattttgcttcagctctttggcgggacaaggaaggattttagtcacactggaaggggcaaatttcgggctgagatcaacatcttgctgtgtggcgaccctggtaccagcaagtcccagctgctgcagtacgtgtacaacctcgtccccaggggccagtacacgtctgggaagggctccagtgcagttggcctcactgcgtacgtaatgaaagaccctgagacaaggcagctggtcctgcagacaggtgctcttgtcctgagtgacaacggcatctgctgtatcgatgagttcgacaagatgaatgaaagtacaagatcggtattgcatgaagtcatggaacagcagactctgtccattgcaaaggtgagtcgccttctccaccgtgaacatggacgtgtttaaaatatgtggacccttgaaagacagggtctgtggaactgtgctgtgctaccttggttctaacttggggagattgataagtgctttccacatcatatttcagctaaatctcaacatgtcttctacagggtgtcacgttttgtctttattgctgtactagccttgaatttgtcctaaagctcttgcaaggtgcctgcttcctgagaaagatgtggttatagcacacattcatctaaactcagtccttggcatgaatctgaggacagggcttatccaggtgaactgctgaagtcagtaaaggcaacatggctcaggcaatagaaactcagtggagggaatatgggtttagtaggtggccgggcgaagacggtgcttgttaattgccagcgtcagggagaggcttctaactgcactctttgctctgataggctgggatcatctgtcagctcaatgcgcgcacctctgtcctggcagcagcaaatcccattgagtctcagtggaatcctaaaaaaacaaccattgaaaacatccagctgcctcatactttattatcaaggtattaaaacagatttttattttgttcatttgtagaatattcagggtgagattgaaaaggagctactaagatttcagcaactgctaatggaaactcttcactcttatcaagatgtttcaaatttggttggtcaagagttttcacgacaaggatgatgtgtgttctcatttgttttttaagcagttgggatgtttacctcccacgccgtttacacatggctgtcactcactactcttagtcctaaagccactgctgagagtcaacagagaacaattccgtacagtagatgaggctctgaaaagttagatttattaaagtgcaatcacataatcttcactcttggccccactacaaatattggacatttttcataaatggattttaggttttaattacttgcttttttttctttttttttgacagaagttttttttcccaaaaaaacagttgaatgtgttttcattcaaatctttccattgtcagccaggtacagtgactcacacctgtaattccagcactttgggaggctgaggtgggtggatcgcctgagctcaggagtttgaggccaccctgggcaacttgatgaaaccccatctctactaaaatacaaaaaattagcccggcgtggcggcgcatgcctgtaatcccagctactcgggaggctgaggaggcacaagaattgcttgagcctgggggagtggagattgcagtgagctgagatcataccacttcactctagcttgggctacagagtgagactctgtctcaaaaaaaaaaaaaaaaaaaaaactttccatcgtcaaaattatagtaacgtttccctaagggaagacttcctttgactcagctgattggtccccagccgttccctgggccgacctaaggactagggacagcacagggtgagtggggtgagtggatggacacgaaggccctttccacaccaggcaaagatgcttctccctgatggcgctcacagggtgcacattgactgcacatctgtggtgctcaagcagtctttagtacgtcgtttgtaggtgtattggtgtctcaactaggaaaacagtttttttgttgttgttttgggtttttttgtttgtttttttgagacagagtctccctctgtcggccaggctggagtgcagtgacgcgaacttggctcaccgcaaccttcgccttccaggttcaagcgattctcctgcttcagcctcccaagtagctgggattacaggcaggcaccaccactcctggctaattgttgcatttttagtagagacaaggtttcaccgtgttggccaggctggtctcaaactaccaacctcaggtgatccacctgcctcggcctcacaaggtgctggaaaaacagtatttttactttgttttcttaggtttgatttgatcttcctcttgctggaccctcaggacgaagcctatgacaggcgtctggctcaccacctggtcgcactgtactaccagagcgaggagcaggcagaggaggagctcctggacatggcggtgctaaaggactacattgcctacgcgcacagcaccatcatgccgcggctaagtgaggaagccagccaggctctcatcgaggtaaccctgctgaaaaaaggcttactgtgcctgtagcccacagcattaatgtaactgaccaatcatctcctttaaaatattaattattttgttacgaataacatactgttctcttccttgttttgagacagagcctggctctcttgcccaggctggagtgcagtggcttgatctcggcttactgcagcctgtggcctgtgcttctgggttcaagcgattctcctgcttcagcctccctattagctgggattacaggtgcccacaaccactccggctaatttttgtatttttagtagagacagagtttcaccgtgttggccaggctggtcttgaaatcctgacctcaagtgatgcgccagcctctgcctcccaaagtgttaggattgcaggcgcaagccaccatgctgggcctaagaataataaacttttcttttttttttttttgtgagacggagtctcgctgtgtcccccaggctggactgcagtggcgcgatctcggctcactgcaagctccacctcccggattcacgccattctcctgcctcagcctcctgagtagctgggattacaggcacccaccaccacgcctggctaattttttgtatttttagtagagacggggtttcactgtgttaggatggtctcgatctcctgacctcgtgatccgcctgcctcggcctcccaaagtgctgggattacaggcgtgagccaccgcgcctagcaatatactattttttataactgtttattacttcctcccatattgcaaaattgatctttccaaatgttgcaaaagggggaaatagttcatttatgtaggtagtacacacactttatatgtttaagtacttacaagcatagtgaatttaagatcaaagacctggtttcaaatagaggcaacactacacagtaatttggaaactgaaaaagtcatccagtttctgtaagcttccttttgcttgtaaaaaacagaatgagctgtcttttaggttcacttttcagcatcctggtacatgagctgaagtgcatgatggcacatttaggttattcaagcattgtgatattaagaaggttcctggtgctttgatgagctttgcatcctaactgagctcctaaaaattctaagatgaaagttacagacattatgtaatttttttgtgtgtcatagtcttgggggttgttaatgaagaaataagactgtgtcatctgtatgtgaaattgatacaacttacctttgcagcattctcccagcaatccttatgagccccattgtgccccatgtgagcacttttcccagacaggcctgattctccctatgagtgctcacagccttctcctctccccacatgccacattccttccctctgccacgccatgcccgtctctgttcttcagagctacgttagatgccaccctctccaagaattcttcccaagcatctcccagttggaatatgttcacccaccactgcacgctgcacgttgatgtcttcacctgcgatttctgtggtctgtctgtgtagtctctaccacttgatgagctccggggcccaggaccatatctgagttccgtttacttaatggaagcctaagtgttcaaaattcacccacaaaactaaagttgtcaccaaggaggtttgcttttgcttttgtttttctacctacaataggcttatgtagacatgaggaagattggcagtagccggggaatggtttctgcataccctcgacagctagagtcattaatccgcttagcagaagcccatgctaaagtaagattgtctaacaaagttgaagccattgatgtggaagaggccaaacgcctccatcgggaagctctgaagcagtctgcaactgatccccggactggcatcgtggacatatctattcttactacgggttcgttattttcagtgaacagaaaagcttttgaaaattatttcaatatgcatgtagtttatatgtcagatttaagctaacagttaaatcatttgaaacagaagttcttaaccttttttggattaggacccctttgagaatctgatgaaagttgccctttaatcttatcttgataaaaatattgattaacacacacagttttgtgtatagtttttttttgttttttttttttatactttaagttttagggtacatgtgcacaacgtgcagtttagttacatatgtacgcatgtgccatgttggtgtgctgtacccagtaactcgtcatttaacattacgtgtatctccaaatgctatccctcccccctccccccaccccacaacaggccctggtgtgtgatgttccccttcctgtgtccgtgtgttctcattgttcaattccagttttgtgtatagttttaaggagattctgtctccttgactgtctgggaagttttgttaacccattttagagaagttgtttgtttcttagcagcagctgcttgctgcacagatgtgtagactgttaaggaaagcagcagctagtggcttacagaaatttccaaataattaaaaactcattcccttcaaatgtactcagcccctgtcgccttatctttctaggtgatactactaaaggaatatttttgagaatttgaagcatttcatttcataatagcaaaaatgttttcattgatttctttttaaatcagggatgagtgccacctctcgtaaacggaaagaagaattagctgaagcattgaaaaagcttattttatctaagggcaaaacaccagctctaaaataccagcaactttttgaagatattcggggacaatctgacatagtaagtgtttatatgtattttttgtttgatagagctttctctttttccttaatattgcttttgggtttttttcctttatttattaaataataaatatagagaagaatgaagaaaaggaagatgaaccataagccatcatcaagaaataatcacaattaaaatttttggctgggtgcagtagctcacgcctgtaatctcatttgggacgctgaggtgggcagatcacttgcagccaggagtttgaaaccagcctgaccaatatggtgaaaccctgtctctattaaaaatacaaaaattagctggatgtggtgataagcacctgaaatcctagctactcaggaggcttaggcaggagaattgcttgaacctgggaggcggaggttgcagtaagctgagatcccaccattgctctccagcctgggcaccagagcggaactccatctcaaaaaaaaaaaaaaagaaaaaattgttatgcccctttcatagttgttataagtttgctttaggtatgaaatatttgggtgtccttttgtaaataagtaaggtagttgtttagtgaaaagaactatgcagtctttcagtgctggtccactttccatcgctgtgttgtgactgagagggcagagttgatagttacaacgtggactatacagatgccaagtctaccacatggaccatctggctactccactcctgatttagagcataaggcatgtgtacagccaccaaaaagagaaagattctgggtggtactttaacattataattattgtgtttctaacaggtaaaggagggacttgacgtgtacaatatttattttctttctcttccccacaggcaattactaaagatatgtttgaagaagcactgcgtgccctggcagatgatgatttcctgacagtgactgggaagaccgtgcgcttgctctgaagccttgtgagcaaggaaggctccctgcatgtcctgcttgctgcacgccacatgggtgtggtctgcatctcagttggccgccatcagtgtaaatagagcttaaagtcatggtttggctgcataaaaattttctaacttgggttcaatatttgtagtgaagtatctgttttcatttttttcacgttataaataaaaatactatgctggccgggcgcggtggctcacacctgtaatcccagcactttgggaggccaatgtgggtggatcatgaggtcaggagttcaagaccagcctagccaagatggtgaaaccccgtctctagtaaagataacaaaaaattagctgggcttgatggcatgcgcctgtaatcccagctactcgggaggttgaggcaggagaatcgcttaaacccaggcggcagaggttgcagtgagccaagatcgcgccactgcactccagcctcagcaatagagtgagactgtctcaaaaaaaaaaaaaaaaaaaaaacctgccaattttcaaacataccgtagagattattttcaggtgccattttatagtatagcagcagggcttttactctgtgtatgcacagatgcagtctggggcatggtttgtgtgctggactttctcatggccatcatcagtatgcttatggatttgatgacaggcatagcctgggcatatcacctcattggtaaagggctagagcctttcttttttatggcacttctttttttgagatagggtcttactctgtcaccctggctagagtacactggtacaatcacggctcaatgtaggcttaacctcctgggctcaggtgtatgtcactatgcccggctactttttgtattttttggtagagacggcttcgccacgttgcccaggctgcaagcgatatgcctaggctcaagcgatctgcccacctcaacttccggaagtgctgagattacaggtgtgagccactgcacccagcctttgttttattttttattttttgagaggtatgattctttctagagattttttctcatggctactattagatcaggaatgggtgattggagattattagattctaggttaacttctaccactttaccctaatacataaaactttttcctaaataaatgatggaaggaataatacttggttacctggcattatttttcagtaagaaaaaagctttactaaccactacatttatggaaatttgtaggggtaagtattttataggtcataaaaaacaccataatataacgaatctcattttctttaaatgtgaattaaatcctaacagtcatctttataaaatgaccataggctaaaatcttacgtgtaagtactactacaataaataatttctgaaacctttaa

SEQ ID NO: 426 - DNA, 32744 bp, Homo sapiens
  source 1..32744: mol_type = other DNA
cgtcgggctgcaggagaagatggcggtctccacaggtcggttcccgggccgggctgcgtgattttccgctccgacccggctctgcccctccgtctgctgctggcgcccgagcgctgaccgtgcgggagaagcccgagtgcgctgtctcgaatgccgcgctctccgcagagcgtagcctgggaccgggtgggaccggcgccgaggccccggcggccgtcgggttggcgggtcgtgctcgcgcgtcggccgcgcgccggcgggctgggggcggggtggctcccgcgcgggcgcccccgtaggttccggcgggcgcgggtccgagttgtaggctgaaggctctacgggagggaggcgaggaggcccaaggtgggcgggtgtcaacctccggcaccgaagatgggtcaggccaaccggcaccgaagatgggtcaggccaagaggtgtcctggatcagagtaggggtcccattcctttggactctccttgacatgggttggggagtagaggacgattgctccttaaaataagagcgagaggatctttcttacctgactgaatacgtgtgatctttttattatttatgaggaaaactgcagtgcaaacaaaataaaagaccagagcaagatgaaagctaattgaagaacaagtggtttcttagataagctgttcaactcctctttcctactgaatacaatgtttggtttcctgtgagcacacaagtattaacgttgaggttttagacattagaccatttcagaaatgttaaaaacgttaagctttagtttacatttaaaaatgttaacccgtgtgatctgcctttttcttttcttttctttttttttttttttttgagtcagaggctcaccctgttgcccagttggaatgcagtggtgtgatctcggctcactgcaacctccacctcccaggttcaagtgattctcctgcctcagcctcccaagtagctgggattacaggcgcgtgccaccaggcccggctaatttttgtatttttagtagagacggggttttgtcatgttggccagactggtctcgaactcctgacctcaggtgatccgcccacttcggcctcccagagtgctggaattacaggtgtgagccaccgcgctcggcctgatctgccttttcctagtcttcgttgaaacaagagtatagagcagtgtgatttaatagtttatgccatcattgcataataaaatgaattttcaaatctatatgtactgaaatggaaggctttgaatatatgttgtaattgttgctttagagtaatacctcaggatacattctgcatacattttaattaagtggtgtcttttacatctttattacatataggtgtcataggttttaagatctttagcagttctagtgttggggtagtatacatacttgggtcagctagctagtaaggcaaggattgttttaaaagtggaattttagtgttatgactttactgtgcttgctgaaatctaatctgtgctcgttaacggggccatatctttataacagttgtgcttaggacctcttatagatttttgaaaatttagtaataaaataatgcattttaatttaatacttttcattttccttttgtgggttgcattattaaacacaattttttcataacactatacatgagtgtatgttaatattttgaaaagaccaaaggttagatgatattaatggcaaatactttttgttaatcacttttagttgttttggaagttgaatataaattataaagattactgataaattattagcatattgtacatagggagtctgtattttttttttttttttgagatggagtctcgctgcattgcccaggctggagtgcagtggcatgatcttggctcactgcaccctcctcacctcaggtgatccacccgcctcagcctcccaaagtgctggattacaggggtgagccaccgttcccatctactagttttttttttttttttttttgagacgcagtcttgctctgtcacccaggctggagtgcagtggcgcgatctcggctcactgcaacctccgcctcccgggctcaagcgattctcctgcctcagtctcctgagtagctgggacaacaggcgcgtgccaccatgcccagctaattttttgtatatttagtagagacggggtttcaccatattggccaggatggtcttgatctcttgacctcgtgatccggcctcccaaattgctgggattacaggtgtgagccactgcgcctgggtttgtttgtttttttttttttttgagactgagtctctcgcttctttgcccaggctggagtgcaagggcatgatctcggctcactgcaacttccacctccctggttcaagcaattcctctgcctcagcctcttgagtagctgggattacaggtgcatgccaccacgcccagcaaatttttttgtatatatatattttttttgtatttttttttttttttttagtagggacaggttttcatcatgttgtccagactggtctcaaactcctgaccccaggcaatccgcccaccttggcctcccaaagtgctgggattacaggtgtgagccacagtgcccagcctattaattagttttaattttactattagctatacttttgtttgctttttggtaacatgggaagtaaatagtacctgtgtatttgtgaaagcagcatgatacagcttaaaatttaaaattagatgagctacatcgatgtaatgcacgtgtttgtttgaaacggagtctcgccttgttgctcaggctggagtgcaatggtgcgatctcggctgactgcagcctcttcctcctgggtttaagcaattctcctgcctcagcattctgagtagctgggtttacaggcatgcaccaccacgcccagctaatttattgtatatatattttttctagtagagatggggtttcaccatgttggccaggctggtctcaaactgctaacctcaggtaatccatctgctccggcctcccaaagttctgggattacaggcataaaccactgagcttggtctaatacacgtgttttttatttaagccaaagtatctcgataacagttgtttaagaggccaaaaagaaaaaccctgacaaatatgttttgatctttagttcagtgtgcatcatataccttagcccctttaacccttccttctactggaagagaattttggaaggaaaaaacttttaattagactgagactttttgagacggagtcttgctgtgttgcccaggttggaatgcagtggcatgcgatcatggctcactgcagcctcgacctgctggggtcaggtgatcctcctacctcagcctcccgagtagctgcgaacacaggcacgcattgccacacctggctaatttttaaattatttgtagagacagggtctccgtatgttatccagtgtagtctgaactcctggactcaagtgaccctcctgccctggcctgaggttaggattacaggtttgagccactgtgcctggccagacggagacttctaagcagaaacatttttggccatcccatctggtcttcttattttgcagatgagaaaactgaggctcaaacaagtaaaaggctatacataggtggttactagtacaggcaagactagaatccaggtcttttacccttagtctgatgcgctctccattatgaagaactctgaatttggaatatttctcagaacatgaatcttaattactccctttcacacttcccttcttagcacaatccttgtttcagactcttagatccttcttatggatgaaaggggaacgtagccctcaccagctaggttctccttttccaagagacagagttacccatgcaattcaagagtatttcacaggacagaggttaagaagctactctcgggaatagaaatttgatactgtttagtactcatgattcaaaattttattagattccagcattaataataacaattagtttagatagaaaagtatgtgcaggccgggtggggtggctcacacctgtaatcccagcactttgggaggccgaggtgggcggattacctgaggtcgggaggttgagaccagctggaccaacatggagaaaccatgtctctactaaaaatacaaaattatccgggcgtggtggcacatgcctgtaattccagctactcggaaggctgaggcaggagaatctcttgaacccgggaggcagaggttgtggtgagccgagagcacgccattgcattccagcctgggtaagaagagtgagactccatctcagaaaaaaaaagaaaaaaagcgtgtgcaatagttttaaaaaaatacaatagttttagttttacagaaaagttgtgaagatagtacagaaagtttccatgcacctcacattcagttttccctgtcaatttcctttttttttctttcgggatggagtcttgctctgtcgcccaggctagagagcagtggcgtgatctgggctcactgcaacctctgcctcctgggttcaagtgattctcctgcctcagcctcccgagtagctgggattacaggtgtgtgctgtcacacccggataattttttgtatttttagtagagacagggtttcaccatgttggccaggctggtttcaaactcctggcctcatgatccgcccgccttggcctcccaaagtgctgggatcactggtgtgagccactgcatctggcttcgctgttaatttcttatattggtatggtacacttgtcacaattaaggaaccaatattgacacatttattattaactaaagttcagatttccttagtttttctttaatgtacttttgctgtcctaggacttcatccaggataccacattacattgtaacgtgaaactttttttttttttttgagatgaagtctcgctctgtggcccaggctggagtgcagtggcgtgatcttggctcactgcaagcactgcctcctgggttcatgccattctgtggcctcagcctccgaagtagctgggactataggcgcctgccaccatgcccggttaattttttttgtatttttagtagaagtggggtttcaccgtgttagccgggatggtctcgatctcctgacctcgtgatccatccgcctcggcctcccaaagtgctgggattacaggcgtgagccaccgcgcccggcccacatgaaacgttttacatttatcacttaggtaatattaatggtacagtgaagctctagtctctgactgtagatgcctggaaaatgtctttgagttatgagaaactcagaaaaaattgatgaaagaatatgttttctgctatgtaggcagaaaacaaaaccaaaatataacctactaattgccttcttcagaagtgggtagcattgtatatactggaagaactagtttagcagtgttctgagttccctgctgcccctgacagactactgtgccaccatgggcatgtcagttaatcactaaacattgcttttcccatcccatctgtgaaaagattggacaacatcatcttgttttcctctttagatgaagatacttggatatggacagaactcgggtgtggtgatagaagagaattacatagtttaaatcataacctagaacttgggaactaaacgatagaagagctgaactatggtagtctagtgtatttccctcttgaggcttccataactggcctggttgatttttctaggtcatttgggagcctgaattctcttgataaacatgcttttgataatatggtacaacctcactgtacaggcagtcctttgaacggcagttggcagaggtaaaaatggccatgcaaaaaactacccaaagcagtcttaataattgggaaaattatggttattctgagaccttcaaaaatgtcaacacattaagaactctccctgtttagaaatatgcaggaaagggccgggcatggtggctcacgcctgtaatcccagcactttgggaggctgaggggggcggatcacgaggtcaggagatgggagaccatcctggctaacacagtgaaaccctatctctactaaaaatacaaaaaattagccgagtgtggtgatgggcgcctgtagtcccagctactcgggaggctgaggcaggagaatggtgtgaacctgggagtcgaagcttgcagtgagctgagattgctccactgcactccagtctgggcaacagagagagactctgcctcaaaaaaaaaaaaaaaaaaaatgtgcaggaaaatgaaaccagtaaaattaatatttagtatgtcataatttaaagtatcagatattaagaattaaaatgttttatttcattaaaaaaagcttgttggctgggcgtggtggctcacgcccgtaatcctagcactttgggaggccgaggtgggtggttcacgaagtcaagagatcaagaccatcctggctaacatggtgaaaccccgtctctaccaaaaatacaaaaaactagccgggcgtggtgacaggcacctgtagtcctggctactggggagactgaagcagtagaatggcatgaacccgggaggcggagcttgcagtgagctgagattgtgccactgcactccagcccgagtgacagagcgagactccatctccaaaaaaaaaaaaaaaaaaaaataaggcttgtcaagagtagcttgaggctgggtgcagtggcttccacctgtagtcccagcactttgggaggtcgaggtgggtggattactagagcctaggagttcaagaccagcctgggcaatacaagaaaatcccatctctacaaaaaatgcaaaaattagctgggtgtggtgatgtgcacctgcagtcccagctacttgggaggctgaggtagagtatgggttgagcctgggaggttgaggctgcagtgagctgtgatcgtgtcactgcactcctgcctgggcgacagagcaagacactgtgtcaaaaaaaaaattaatttgaacaatgcttgctaatgttttgaagtacattatctgtacattgtggaatggttaaatctagctaattaccaaatacattatctcacatagttatcatttttgtggtgagaatacttaatagctactgagtatttttcaagaatacagtatgttgttaactaatcaccatgctatacagtagtgctcttaaacttgttcctcctgactgtaattacgtatcctttgtctaacatcttcccaatccccacccccgtaaccccaaccatcctaacctctggtaaccaccatctcctgtctacttctgtgagatcaattttgactccatatatgagtgagataatatgtatttgtctttctgtgcctgtgttatttcagttaacataatgttctccaggttcatccatgttgttggaaatgagagaatttccttcttttttatgattggaacagtgtcccactgtatacgtataccacatgttctttatccatttgtctgtgtggttttttttttttttttttttgagacggagtctcactctgtcacccaggctggagtgcagtggcgcgttctcagctcactgcaacctccacctcctgggttcaagcaattctcctgcctcaggctccctagtagctgggattactggcacccgccgccaagcccggctaatttttgtattttagtagagatggggtttcaccatattggccaggttggtctcaaactcctgacctcaagcaatccatctgcctcggcctcccaaagtatggggattacaggcgtgagccaccgcgctcagcctatccatttgttggttgatggatacttaggttgattctatatcttgcatattttgagtagtgctgcaataaaatgggagtgcaggcctctctttgacatactgattttattttctttggctatatatgcagtagcaggattactggatcatacggtagctctgtttttaggtttttgaggaactccatactcttctttctccatatggttgtactaattcacattcccaccaacagcatgcttagattatcctttatcaccacatactcaccaacacttgttatctgtcatctttttttttttgagacggagtttggctcttgttgcccaggctggagtgcaatggcatgatctcggctcattgcaacctccacctcctgggttcaagcaattctcctgcctcagcctcccgagtagctgggattacagccacgcaccaccatgcctggctaattttgtatttttattagagacggggtttctccatgttggtgaggctgctctcgaactcccaacctcaggtgatcttcccaccttggcctcccaaggtactgggattacaggcgtgagccgccgtgcccagcctttttttttttttttttttaattgagacagagtctcgctctgtcgcctaggctggagtgcagtggcgagatgtcagttgactgcaacctccacctccaggttcaagcgattctcctgtcttagcctcccgagtagctgggattacaggcacccgccaccatgcctggctaattttcatattgttagtagagacatgatttcaccatgttggccaggctaggctggtctcaaacgcccgacctcaggtgatccacctgccttggcctcccaaagtgctgggattacaggcgtgagccactgcgcttggcctcatctttcatccttttgattatagccattttaatgggagtgaggtgatacctcatgtgggtttttttttgcatttctttgatgattagtgatgttgagaatttttttcatatacctcttggccatttgtatgtcttttgagaaatgtctattcagatcttttacccatttttacatgaggttattttcttggtattgaatggagttccttatatattttggttattaaccccttatcagatatatagtttacgagtatagtgaaccattctgtatgttctctctctcttttttttttttttggtggagtttcgctcttgttgcccaggctggagtgcaatggcacgatctcagctcactgcaagctctgcctcctgggttcaagggattctcctgcttcagcctcctaagtagctgggattacaggcatgtgccaccatgcactgctaattttgtatttttagtagagacgggatttctccatgttggtcaggctggtaataaactcccgacctcaggtggtctgcctgcctcagcctcccaaagtgctaggattacaggcgagagccaccgcgcctgccagttctctctttattgtttcctttgcagtgcaggagatttttagttttatgtgatccaaattgtctgtttttgcttttgttgagtgtgcttttgaggtcatatcctccaaaaatcattgcccagaccaatgccattgacttttcttcctgttttctagtagtttcatagattgcctttttttttttttttttcctgagacagtctcaacctgtcacccaggctggagtgcagtggcatagtcacggctcgctgcagcctcaacttcccaggctctcacctcagcctcccgagtagctgggactacaggtgcacgccaccatacctggctaatgttttgtatttttagtagagatggggtttcgccatgttggccaggctggtctcgaactcctgacctcaggtgatccacacgcctcggcctcccaaagtgctgggattacaggtgtgagccaccatgcccagctgcacaatgcccaattttgccacttctgttcaacataatactggaagtcctagaaagagcaataagacaagagaaagaaatacaaggcatcttaattggaaaagaagttaaactgttcctgtttgcagaagacatatgatgtcagtgtttattgttataaaaacttctgtcttaaaactgcttttgctgtattccataggctttgtatgctgtgtgtttcagttttcatttttttcaataaacttcctaatttgttttttaatatcttcattgacctattggttgttcaagagcatgtgtttaacttccatgtttttgtgaattttctgaagatcctcctgttaatgatttctagttttataccattgtggtcagaaaagatatttgatatgatttccatcttcttaaatttgttaagacttattttgtggcttgacatatgatctatccttgagaatgttccatgtgcagcttaaaataatgtattatgccactgttgaatggtatgttctgtgtatgtcttttaggtccatttgttctatagtgtagcttaagtctcatgtttccttgttggctttctgtctgcatgatctgtgcattgctaattgtgaggtgtgaaaatctcctactgttactgtagtacaacctatctttcagatctattaatatttgctttatatatttaggtgctttgatgttgggtgcatatatatttacaattattctcttgctaaattgacccctttgttattacataatgaccttctctatcttttttttacagtttttgatttaaaaatctattttattgggggccaggcatagtggctcatgcctgtaatcccagcactttgggaggccgaggcgggcggatcacttgagatcaggagttcaagaccaacctggccaacatggcgaaatcccatctctattaaaaatacaaaaattggaccaggagcggtggctcacacctgtaatcccagcactttgagaggccaaggcaggtggagcacgaggttgggagttcaagaccagcctggccaaaatggtgaaaccccatctctactaaaaatacaaaaattagccaggtgtggtggcgggcgcctgtgaccccagctacttgggaggctgaggcagagaattgcttgaacctgggaggcagaggttgcagtaagccgagatcacggcactgcactccagcctgggtgacagaacaagactcctgctcaaaacaaaacaaacaaaaattgggcgtggtggtgggctcctgtagtaccagctactcgggaggctgaggcaggagaatcgtgtgaacctgggagtcgggagattgcagtgagccttgattgcgccactgccctccagcctgggcaacagagcgagactgtctcaaaaaaacggcagggcatggtggctcatgcctgtaatcccagcactttgggaggctgaggctggcggatcatgaggttaggagtttgagaacagcctgaccaacatggtgaaaccccgtctctactaaaaatacaaaaattagccaggcgtggtggcacatgcctgtaatcccagctactcaggaggctgaggcaggagaatcacgtgaacctgggaggtggaggctgcagtgagccgagattgcgccactgcacttcagcctgggtgacagagctagactccgtttcaaaaaaaaaaattagccaggcatggtgccatatgcctataattccacttgggaggctgaggcaggataattgcttgaactcaggaggtggaggttacagtgagccaagatcctgcgactgtactccaacctgggcaacagagtgagtgagactctgtctaaaaagaaaaacaaaaataattttatctgatataagtgaagcaattcttgggctttctctctctctgtctctctttttttttttttttgagacaaggtctccctatctaggctagagtgcagtggcgtgaacatggctcactgcagccttgaactattgagatcagtgattttcctacctcagcctcctgtgtagctgaccacagatgcatgccactatgccttgctaattttttatattttttgtagagatggggtctcaacatgttgctcaggatgctttcaaactcctgggctcaaacaattttccctccttggcctttcagaatgctgggattatagggtcttgttctctcttgatttccatttgcatggcatatctttttccattccttcaccttcagtctacatgtgtccgtacaggtgaggtgagtcttttattggcagcatatagttgggtcttgttttttttaaccattcagtcactctatgtcttgattaaataatttaattcatttacatttagagtaattattgatagatgagttaatactgccatcctgttaattgtttcctatttgttttgtagctcctttcttcctctcctatggtcttctttggtggttgattttctctagtagtatgtttttgattcctcgcctttttattttttgagacagtgtgttgctctgacctggtcatagctcactataacctccaactcatgggctcaagccgtcttcttgcctcagcctttggagtagctaggactataggtgtgtgccaccaaacctggctaattttattttcttgtagatacggggtcttgccatgttgcgcaagcgggtttgaactcctgggctggagtgatcctcctgcctcagcctcctgagtagctaggaatgcaggcatgtgccacgatgcccagctaattttttttttttttttaatttttgtagagacaacgtcttgctatattgcccaggctagctttgaactcctggcctcaagtgcttctcccaccttgggctccagagcactggggtttcaggcatgatccactctgctggcttgttattgctttttatgttttatctattataggtttttttttttttttttaagatggattttcactcttgtttcccaggctggagtgcaatggcgtgatcccggctcactgcaacctctgcctcctgggttcaagcaattctcctgtctcagcctccttagtagttgggcttacaggtggccgccaccacgcccagctaattttttgtatttttagtagagacagggtttcactgtgttggctaggctggtctcgaacccttttttttttttttttttttgagacggagtctcgctctgtcgcccacgctggagtgcagtggtgcaatcttggctcactgtaagctctgcctcccaggttcatgccattctcctgcctcatcctcctgagtagctgggactacaggtgcccaccaccacgcccggctaatattttgtatttttagtagagatggggtttcaccgtgttagtgaggatggtctcaatctcctgacctcgtgatctgcccgccttggcctcccaaagtgctgggattacaagcgtgagccactgcgcccggccggtcttgaactcttgacctcaggtgatccacccacctcatcttcccaaagtgctgggattacaggtatgagccaatgcgcctggctctctttttttttttgagatggagttttgctctgtcacccaggctggagtgcagtggtgtgatcttggctcagtgcaacctctgcctcctgggttcgagcaattctcctgcctcagcctcctgagtagctgccattacaggtatgcgccaccatgtctggctaatttttagtagagaccgggttttaccatgttggtcaggctggtctggaactccttacctcagatgatccacctgcctcagcctcccaaagtgctgggattgcaggggtgagccaccacgcctggcatataggtttttgctttgtggttaccatgaggcttacagaaaagatcttacagttacaaaaggttattttaaactaataacaacttagccttgatggcctaaaaaatcctttatacttttaccctactctcccattttgaatttttgatgtcacagtttggatctttttttttttttggagacagtgtcgttcttgtcacccaggctggagtgcaatgatctgatcttggcttactgcaaccttcgcctcccgggttcatgtgattctcctgcctcagcctcctgagtagctgattacaggcggctgccaccacaccccactaatttttgtatttttagtggagatggggtttcaccatgttggctaggctgctctcgaactcctgacctcaggtaatccacctgccttggcctctcaaagtgctgggattacaggcatgaaccaccacgcccagcctgcatctttttatattgcatattcctttacaaattattgtagttactttcaatagttttgtcttttaaccttcctactaaagatacaagtaatttacactccaccattacagtattagtgtattctgaagttgaccttgtgtttacttttcccagtgagttttatactttcagatgtttttgtgttactcatcagtatccttttctttcagcttgaagaacttcccatagcatttcttgtaaggcaggtcttgtggtgataaactccttcagcttttgcttgcctgagaaagtctttatcctttgtttctgaagaacagctttgtcctgggacagacagctttgtctaaaggacagattttttcctggtcgcatttttttttttttttaaagagagacaaggtctgttgcccagactggtcttgaactcttgggcttaagtgatctgcctgcctcagcctcccaaagtgctggggttacaggtgtgagcccagcccctgcgagcgctttaaatgtatcatctcactctcccctggcctctaagttttctgttgagaagtctgctgctaggtatattggaagtctcttatatgttatttgcttcttttctcttgctgccttgaggattctctctttgtctttgatctttgacagtttggttataacatgtcttggagtagtcttatttgggttgaatctggttggagacccttcaacctgtagccatatacttataactttctccatatttgtacagtttttttgctactttttctttagatatacttttttttttttttgagacagagtattgctctatcgccaggctgtagtgcggtggcgcgatcttggctcactgcgacctccgcctcctgggttcaagtgattctcctgcctcagcctcctgagtagctgtgactacacgcacgcaccaccacgctcagctgatttttgtatttttagtagagacggggtttcaccatgtttgccaggctggtcttgaattcctgacatcaggtgatccacctgcctcggcctcccaaagtgctgggatcacaggtgtgagccaccatgcccagcctaacatgaaacttgatagaagtggatatgaggcattcaaactagaataaacagtaacattcagtgttcaggctgggcgcgcagtagtggcttacgcctgtaatcccagcactttggaaggccaaggcaggaggatcacttgaggtcaggagtttgagaccagcctggccaacatggtgataccctatctctattaaaaatgcaaaaaaaaattagccaggcatgatggtgcttgcttatagctccagctacttgggaggctgaggtgggagaatcacttgaacccaggaggcagaggttgcattgagccaagattgcgccactgtactccagcttgggtggcagaatgagaccctgtctcaaaaaaacaaacaaaaaaaatcaatgtttgaaagtttgtttcaaacgtagttcactttttcaaaggctctttttcaaagagctgattaaaataagtttgacatatgtaagatgggacttcaggactgggtttgggagtgctttattcttgtttataaagtcttagctgatttgtgtgagagcagatggtattttcagtaagctggaactcagcagctgtttcaaaccttagaaggagataaatccttgtggctgtgtataggtacttttaaatagaaatagaaaaaacagtttaatagaatatatgttatggattgcctggactctagaccaagttcattttatagatgagcagtagaaatacagatatgaaatggcttttgcaggattttttagctagatgttgagtccagagctggtatcttgatttaagactcttggctgggtatggtagctcatgcctgtaatcccagcactttgggaggccagggtaggtggatcacctgaggtcaggagttggagaccagcctgaccaacatggagaaaccccgtctctactgaaaatacaaaattagctgggcatggtggcacatgcctgtaatcccagctactcaggagactgaggtaggagaatcgcttgaacctgggagatggaggttgtggtgagccgagatcgcgccattgcacaccagcctgggcaacaagagctaaactccgtctcaaaaaaaaaaaaaagagattcttaaatactgcttctgtatcacactgtatcctacgtatgccttggttgcttttatttcctggaaacccagtgatgttattttacagataaatgctgttaaggatcaagacaaaatacttgatagagtctaaaggcattaatagaatattaaaactccatgttcttttaaggtgtgaaggattttattgaaatgagtaacaaaaatttagaaaaagcgatttcagtggctaaatgctggtcaatattcacataaatcttttttgtaagcacatatttggtattgcaggtaaatacatatatattatttgttcccttactgatttttttttttttttttagaacgagtcttgttctgttgcccgggctggagtgcagtggtgcaatctcagctcactgcaacctccgcttcctgggttcaagtgattctccagcttcagcctcccgagtagctggaactacaggcgtgtgccaccacgcccggctagcttgttgtatttttagtagaaacggggtttcaccgtgttagccaggagatggtctcgatctcctgaccctcatgatctgcctgcctcggcctcccaaagtgctgggattacaggcgtgagccaccatgcctggccagtgattcttataaatctgtgattttcttttcttttcttttttttttttgagatggagtctcactctgtcatccaggctggagtgtagtggtgcgatctcggctcactgcaacttgtgcagggttcaagcaattctcctgcctcagcctcctgagtagctgggattacaggtgtgcaccaccacacttagctgattattattattttttttttgtattttagtagagaaaagggtttcaccatattgaccaggctggtcttgaactcctgacatcaagtaatctgcccgccttggcctcccaaagtgttgggattataggcgtgagccaccgtgcctggcctaaatctggattttcttttttttttctttcttttttttttgagatggagtcttgctctgttgcccaggctggagtgcagtggcgtgatctcggctcactgcaagctccgcctcctgggttcacgccattctcttgcctcagccttccgagtagctgggactataggcacccgccaccacgaccggctaatttttttgtattttttgtagagtcggggtttctccgtgttagccaggatggtctcaatctcctgacctcgtgatccgcctgccttggtctcccaaagtgctgggattacaggcgtgagccaccgcaccgggctctggattttctatctgaggtttatctaagggaggcgagggaaagggaggttattgggagtgttttaagtgtttgatagaaacgtatctctgtatcagaggtagaatttacaacctgatgagttatcctaaacatttcagtattgcagctgttattcctaaagtgaccctttagaatatttagtactgttcctttctttttttttttcattttattcttccttttacctacttccccaagtaggctgcctctagataaaactgtatattatcgggtaggaagaacttggttccaggagttttgggactgggaagattggacaacagctatgtaacccgggcttcttattctctctagggcttatgaagtggttactaaaatctaaagttctatggaaaagggccagtttcctctaggatttgaccacacctttgagggatgcttcataagaaagctgaacttctggtggatggagatgtaaatgaatattgagtttggtttcagggagctgttgtttcaagacaactttactgagatataattcacataccatacagttgtctatttaaagtgtacaattcactgatttctggcatgttcacagatatatgtaactgtggtcattttagaacattttatcacctcagaaagaaactctgtaccctttagctctcactgttctatacctccaaacctcagcccctgactactataatctgtctcaatagatttacccattctgtactttcatatgtgtagatttatatattatgtggtcttttgtgactggcttctttcacttagcgtaatgtttttaagggtcatccatgttgtagcatgtatcagtatttacatgtttttatggctgaagaatattccagtgcattggatacaccacatttttgtttattcattcatcatgttggtggtgttttccaccatctggctattgggaataaggctgctgtaaacatttatgtacacgttccacccccgccccgcttgagtagatacctaggagtggaactgctgggtcatgttaactatgtttagctgtttgaggaactgctaggctgttttccaaagggagacttcttttttttcgagacggagtctcgctctgttgcccaggctggagtgcagtggtgtgatctcagtccactgcaacctcagcctcttgggctcaagtgatcctcctgcctcagcctcccacgtagcttggatgccacgtagcttggatgacaagcctgcgctaccatgcctgtctaatttttgtgtttttagtagagactggattttgccaagttggccgggctggtcttgatctcttgacctcaagtgatctccctgccttgaactcccaaagtgctgggattacaggcatgagccactctgcccgggcccaaaaggagaccattttatattcctaccagcagtatatgaaggtcccagtttctccacatccttaccaacacttattatctgactttgattgtagccattctagtgggtgttaagtggtatctcattgtggttttgatttgcatttccctgataactagtgttattgagtatcttttcatgtgcttactagtttttatttatttatttaattttttgagacaggttcttgttctgttgtccaggctggaatgtagtggtgcagtcttggcttactgcagtctccacctcctatacccaagtgattctcctgcctcagcctcctgagtagctgggactgcaggcacgcgcctttatgcctgggtaatttttgtatttttagtagagatggtgtttcaccatgttgcccagggtggtcttgaattgcttggctcaagtgatccacctgcctcagcctcccagaattgtggcattacaggcgtaagccactgcacctggccctttactggctatttatatatcttctttggagaaatgtctattcagattctttattcattttttttttgtttttgagacggagtctcgctctcgcccaggctggagtgcaatggcgcggtcttggctcactgcaacctctgcctcctgggttcaagcgattctcctgcctcaacctcccaagtagctgggattacaggtgcccaccaccacgcctggctaatttttgtatttttagtagaaatgggatttcaccatgttggccaggctggtcttgaactgctgacctcgtgatctgcctgccttggcctcccaaagtgctgggatttacaggcatgagccactgtgcctggcccctttactcatttttatttatttatttatttttgagctggagtcttgcattgtcatccaggccggagtgcagtgtcatgatctcagctcactgcaacctccatctcccaggttcaagtgatcctcccacgttagcctccagagtagttaggattacaggtgtgtgccaccacacccggctgttttctttttttttttttttttgagacagagtttcgttctcgttgcccaggctggagtgcaatggcgcaatcttggctcactgcaacctctgcctcctgagttcaagcaattctcctgcctcagcctctcaagtagctgggattacaggcatgtgccaccacacctggcgaattttgtatttttattagagatggggtttcaccatgttggtcaggctaatctcgaactcctgacctcaggtgatctgcccacctcggcctcccaaagtgctggaattacaggcgtgagccactgtgtccagaccaacacagctaattttttttgtagttttagtagagacggagtttcaccatgttggccaggcttgtctcaaactcctgacctcaagtgatctgcctacctcggcctcccaaagtgttgggattacaggtgtgagctactgcacccgacccctttacccatttttaaattgggctgtttgtctttttattgttgagttatcggagttctttatgtattctggatacaagtcctttatcagatgtatggtttgcaagtattttctttcattctgtagattgtcttcactttcttgatgttgtcctttggaacccaaaagtttaaaattttgatgaagaccaattaattttttttctacttcatttaaatgcagattctggctttttgtatgtagctcatcatctagctggtactttgttttaaaaacaataatgttcaggccaggtgcagtaggaggccaaggtaggcagatcacttgaggtcaggagtttgagagcagcctgggcaacgtaccgagatcctgtctctacaaaaaaataaaaaaattagctgggcacaatgctgtgtgcctatagttccagctcctcaggaggctaaggcaggaggatcacttgtgcccagaagttcgaggttgcagtgagacatgattgtaccactgcccaccagcctgggcaacagagtaagaccctgtctctaaaatgaacacacaaacatcagagaaccatgtttcatgcaggatatggtcagaaactaaaatataaatgaataaaaacaacctgatgaagtactgtgaattctagttgatgctctggttgtgattactgtatgacagaagggcaggagtctgagctcttcttgccaggtgaggtttaatctcactaaaaaaagttcgatagccagataccatgcatactgtaaacagttttattctttggaagtagtataattatgccagaggtttttcaatttatggattggaatgttcttgaaaagtacagacagtgcattgcttggtgtactgctcttcatgccattgtcatctgctacctaaattattgattgttgtttactaaacagtactgatgtaaatggttatgtcctcagaggaaatacttatgttattgagaagtctttaattttctcaagtttttacctcataaacagtgatttggagagatatctgtttattttgcttaatatggctttctgactgtggaagccagctacagcttcctggactcacaggtgagcagttatgcccatttaatagtctccgttagaagacctcacatcttttaaagtgcatgccatcctaattttacttagaaattaaaactagagaggaaccagaatatattagcttacttaactttcttccactccctagtgtattctaagggaagtctcccttgatagttctgcaataaacattcttagctacctcactggagaatgtgaagtaactgctacattcattggcttatctcattgggatatctgtagtgtatccaggtgaaatcttctgcaataacttactgcattatatttggatgtattcacttacatggttgtcttccccacgagatagtaatgtcctggggaaaggattctgtgttcagtatcagcaacatctgctgtcagtttatacatattgagagaaagattaaaaacaaacatttgccataaattcaccaggtgtttatcaagtgcctgttgtgtcatcattttctatggtacagtttctttctatgtcagagatttaataatgagaaaataaaggactcaagtaaaacctagcttttcaggctgggcgcagtggctcacgcttctaatcccagcatgttgggaggcccaggcaggcagatcacttgagcccaggagttcgagaccagcctgggcaacatggcgaaaccctgtctctactaaaaatacaaaaattagctggatgtagtggcatgcgccagtggtgccagctacttgtggggctgaggtgggagaattgcttaagcctgggaggtggaggttgcagtgagttgagatcgtgtactccagcctgggtgacagagtgagaccctgtctcaaaaacaaaaaacaaaacaaaaactggctaggcatggtggctcactcctgtaatcccagcactttgggaggctgaggtgggcggatcacttgaagtcaggagtttgagaccagcttggccaacacggtgaaaccccgtctctactaaaaatacaaaaattagccaggagtagtggtacatgcctgtagtcccagctatttgggaggctgaggcgggagaatctcttgaacctgggaagtggaggttgcagtgagctgagattgcaccattgcccttcattgtggctctgggccacagagcgagactctgtctcaaaaataaaaaaccaaaacacaaaaacaaaaattagccaggtgtggtggcaggcacctgtaatcccagctacttcggaggctgagccaggagaagcacttgaacctgggaggcagaggttgcagtgagctgagatggtgccactgcactccagcctgggtgacagagcaagactctgtctcaaaacaaacaaacaaaccccccccaacaacaacaacaaaaaaacaacttagcctttcctttttgtagattgtaatatttcactgttttatttttagtttgcttttctgaagtaaaactactaaaagaatattttagttcatatatattcattaaatctaaaatcatgaagccgcttattttccccttatctagctgagttaatatctaacaaatagattctaaatgaactctccatataggtggtgattttttggcagtggctgggggtagggtggttttggttacaacctaaagagtaacagtagtatgattaatttctcctgtatgtaatgtattctccacaccacagaattgagatactttgcaaatcctctaatccagaggtttttccacttgtgtttgaaagtgtagtacagatgcttcagatgtacgaagtttgacttgaatttgtttttttcttttttgagacggagtcttgctctgtcacccaggctggagtgcagtgatgtgatcttggctcactgcaacctccgcctcccaaattcaagcgattctcctgcctcagcctcccgagtagaggtgtgtgccaccactctcggctaattttttgtatttttagtagagacgggggtttcaccatgttatccaggatggtctcaatctcctgacctcatgatccacccgccttggcctcccaaagtgctgggattgcaggtgtgagtaaattttgtttttataaattacatttttttctgctatatttcatcaattctaaaacacattgaaatatccgaagtggatatatgtgttgtagtttaattggtagagtgtttaaattttttaaaattatggtatcatgtagttggttatgccatcttagatttgatcaaagacagtatttaaaaaaactgttaagatgcccacattgaggtgaatatataatagatttcaaatactggattctacaaacatactgacgtgttctcatttgttaactgaatactaagcaattgtgatcaatttaaacttaaatgtattctattgaaatatatttttaatctcatacaattttttgaaatattttagaggctaaagttgaaaattggtttatctggtaaaccttcatttcagcaaaagaatattaccttctgattttttttggtgaattatataaatatagtttttagtattaaatctatttgtataaattcacagtgtctgaatgatggatgtatttcaaatttaaagttcagaaaaagtgtagctgggcatggggctcacacctataatctcagtactttgggaggctgaggcaggaggaccccttgagcctgggagtttgagaccagcctgggcagcctagcaagaccttgtctctactaaaaatattttaaaaattagctgcgtgtggcggtgcatgcctgcagtcccagctactctggaggctgacgtggaaggatctcttgagcctaggaatttgaggctgtagtgagccatggcgacagagtccctgtctcaaaacaaacacgcagacacacatgcacacacaccccagcatatgctttgatgtcaataattgtgtattattgacattattgacattattaatgtcaacaaatagtgttcttgagagtggggttgtaactgatgtttttgaaacagccagtgggggttatgggcccagttaggattctggaacagttttcctgagtgtagaactgtggtggggcttatgattcatactcatttctttgctggatgagtgttaaaagcggataggatggcagacccactcagcaaggaattccactgaggatgccttgaaaggagcaggggcataccatccagagtacaagacagagtaaagttatcacatgaaggactcatttgcttgaaaagacttgacttttcttagtgtcctcagatattctaacaactttacaaggcaaaaagactcagtgattttttttattctttttccattttttttttcctgagacggtgtctttctctgttgcccaggctggagtgcagtggtgtgatgtcagctcactgcaacctctgcctcccaggttcaagcgattctcctgcctctgccacctgagtaactgggattatgggctttcaccaccacgctggctaatttttgtatttttagtagagatggggtttcaccgtgttggccaggctggtctcgaactcctggactcaagtaatcctcctgccttggcctcccaaagtgctgggactacaggcatgagccaccacacctggctcattccttgtttttttaaaataaaatttattgtgtgtatttaaggcatatatatcatgttatgagatatataggaaaatggttactatagtgagtcaaattaacatattcatcatcttacagttacctgttttcctccctgtggcaagagcaaaaatcctgactatagcaaactcttattaaaagtcctcatggctgggtgcgggctcatatctataatcctagcactttgggaggccgaggcaggctgatcacttgagcccaggagttcgagactagcctgggcaacatggcaaaaccccgtctctacaaaaaatacaaaaattaccttgcatgttggcatgcgactgtagtcccagcaacttgggaggctaaggtgggaggatcgcttgagcctaggtggatgaggctgcagtgagttttgattaagccactgtgctctagcctgggcaatagagggagaccctgttgctaaaaaaaagaagaaagtcctcatgctgttcattagatctgcagacttgttcatcctacatacctgctactttgtatcccttggtctatagctccctatttcctttccagctccaaccttggtaaccactgtttttattctgtcttaatatttgacctctgttttcttttccttttttttttttgagatggagtctcgcactgtcaccgggctggagtgcagtggtgccatcttggctcactgcatcctccacctcctgggttaaagcgattctcctgcctcagcctcccaagtagctgggattacagattcccgccaccatgaagccaggctaatttttttgtatttttagtagagatggggtttcactatgttggccaggctggtctcgaactcctgaccttgtgatccccctgccttggcctcccaaagtgctgggattacaggcgtgagccaccgcacttgccctgttttctttttttaaagattcctcactcccaatgaattttaaaagtcaattgtagtttgtctttggatccatactgatgtatacatgagagttttttttagaattatgatcaaaatatatgtgctgctattaggtctcccccaccccccctttttttttaacttatacacaattaatataattcatgtagtttaaaatgactttatataatattttaaattatgtgacatagtttgcctgaatgtataccaattggcttcttaagtttttgcactgccaaataaacatttttgttcagattgcttttccaacccccctcccttcatttatttattgctgtgtaacaaattacatcaaaactttgtggcttcaaacgatgattgatttttttcttataatatgggagttgactgggtggttcttctgctggtttcacttagagtcactcatgtggttgcatcagctggtgaagggataggcttgttgcccgggacgccttgctccccctccctgcagcctctccaggtggccagttaggacttcctcacatcccggtggtgtcagggtgttcagaattcttacatgatggttggcttccaaaagaacgaaagcagaagttagcattcctcttacaaggtgagtgccagaactggccttagcattgctgcttccctatttattctttttttttttttttttttttttttggaggtggagtctcactctgtcgccgaggctgtagtgcagtggcacaatctcagctcactgctacttctgcctcccgggttcaagcaattctcatgtctcagcctccagagtagctgggactacaggtgtgcaccaccatgcccagctaatttttttttggtatttttagtagagacggggtttcaccatattggacaggctggtcacaaactcctaacctcaggtgatatacccaccttggcctcccaaagtgctgggattacaggcatgagccaccgcgccctgccactgctcccctcttctactgataaaacaggtaggaaggtttgcgcagcttcaaggggaggaggggtgtgcctgggcctggagggtggaggatggctcacagcactctgcaggcattctgcgccctgtttttttgtcctgaggggaaatttcacaaagtagcatttaagtcaaatcacaatacatatttaaaaattattgtttttttttttttgtgtgtgtgtgtgtgtgtgtgtgtgtgtatatgtatgtatgctttttttttttttttttttttgagactgggcccgggttcaagtgattctcctgcctcagcctcgcaggagctggaattacaggtacatgccactatgccagagctactcaggaggctgaggcaggagaatcacttaaactcatgaggcggaggttgcagtgagctgagatcatgccgctgcactgtagcctgggtgacagagtgacactccgtctcaaaaaaaaaattggaagttgtataccttgtaattattacttttctccccttgcctttcttttttttttttttttttttgagaccgaatctcactctgtcacccaggctagagtgtggtggcgtgaacaaacatggctcactgcagcctctacctcccaggctcaagtgatccttccatgttagcctccggagcagctcagactacagctgtgcaccaccatgcctggctaatttttgcatttttttgtagagatggggttttgcatgttgctcaggcttgtcttgaactcctgggctcaagcgatcctcccaccttggcctcccaaagtgttaagattacaggtgtgagccaccacacctggccaattaaaaaaaaaaatttcttaggatagggtcatgtctgatgttcttaagtagtgctccaaatgaaatgaaggaatattaaaggaggaggaaaatcagacttcacttactagtgggaggaatagcaaagaatttgtggccatctttaatttggtatagagtataatgattcttgactcaaaaaaatatatattttttgagacagagtctcactctgtcactgaggcaggagtgcagtggtgcgatcttggctcactgcaacctctgccacctgggttcaagaaattctccttcctcagcctcctgagtagctgggattacaggcacgcaccaccacgccgggctaattttttgtatctttaggctagagacggggtttcatcatcttgtccaggctggtcttaaactcctgaccttgtgatccacccgccttggcctcccaaagtgctgggattacaggcatgagccactgcctggccgactcaaaaatattttttcaattgatgttgatacataatattttacatattttgtgggggtacatgtgatctttcattgtgtgcatagaatgtatagatcaaatctcagggtatttgtggtatccagattcttgactcatgacagatagttaatatatatgagctggccaggcgcggtggctcacgcctgtaatgccagcactttgggaggccaaggtgggcggatcacaaggtcaggagtttgagaccaagcctggccaacatggcgaaaccccgtctctactaaaaatacaaatattagccatgcatcgtggcaggcacctgtaatcccagctacttggaaggctgaggcaggagaatcacttgaaccctggaagcaaaggttgcagtgagccgagatcgtgccattgcactctgtcctgggcgacaagagcaagactctgtctcagaaaaatacgtatataggttatgaagttttaggaagtgacattttgggcatcacagggattggttgtttcttttagaatcagtctatgaaaggataaggctttagaaataatgtgtttcagcagggattctgactagggatagaggtgggggaaggaagcaaagtgataggatttctcctttcttttgcctcttctccccagggcagtgggttgccttcctgtactaggctcttgtgtgttggtcattgagatatattggggtagacaaaaagttgtatgtataccactgatacagtttagtagaagtatgcaaagtataaaaagaaagcactttgctcagtcatctggttaggttcttagtagagcaaaactctcgctttatgatgttacctcctccttcttacgcttctccttctctaattgtggtttctgtgtcttgatgccctgctgaactttaagctccacaagagcaggactttgactatcatggctagatcatgggcctagccacaattctttggctcacagtagacatttggtgctgttaaaatggaaataaataaataaaaccaaagaattacaacagtaaaatgaaccacaactttgtctcagttaactgagtgcttaacacttcttccctgatcatcctgtttcttggtcttttataacagctgatacttttctcctcctcttacctcccaatccattcccacgttgcagcaaagtgaagtttatgcttaaaacccctccctgaatcctcattgctgcagataaaggctgaattgctaagggtgcccttccaggccatttctgactctttgctctcatactcagttgcagtccccaaacattgcccagcattctctctctcttttgtaatgtcctccccacgccttttttggctccacccgtccaatcctcccttttctttttaaataaaatatttcaaacaccaggaaaatacgtgaatacacatatacccaccctggctattcacattctaataaattcttgcttcagattgttttttggaaacagaacatttctagtacatttaaagtcctattttcacttcttagtcctaggccactttctctttgcccagaggtcatcaatatcctgatttttattatttgtatttatttatttattttgagacagagtcggactccgtcacccaaaatggagtgtagtggcgtgatcttggcttactacaacctctgcttcctgtgcaagtgatcctcccgccttagtctcctgagtagctgggactacaggtgcgcaccaccatgcccagctaattttttttttttttgagacagagtttcgctctgtctcccaggctggagtgcagtggcacaatcttggctcactacaacctctgcctcccaggttcaggtgattctcctgcctcagcctcccaggtagctgggactacaggcgcacgccaccatgcttggctaattcttttgtgtttttagtagagatggggtttcaccatgttggccaggctggtctcgaactcctgacctcaaatgatccgcctgcctcagcctctcaaagtgctgggattacaggcgtgagctaccatgtccagccacccagcgagttttttgtatttttagtagagacagggtttcactgtgttgaccaggctggtgttgaactcaagtgatttgcccatctcagtctcccaaagtgttgggattacaggcatgagccaccacacctggcccaataatcctgattttttttttttttttttgagacagagtcttgctctgtcacccaggctgaagtgcagtggcgtgatcccagctcaccgcaacctctgcctcttgggttcatgcgattctcctgccttaggagaatttttagtagagatgggtttgtatttttagtagagacgggtttgaccatgctggccaggctggtctcgaactcctgccctcaggtgatccacctgccttggcctcgtaaagtgttgggattactggcgtgagccaccgtgcctcgcccgacccctgatttttaaatatcttttccactaacacctttatactttttgctacatatgtatatatgtataaaaactatgtttatttatagcttctataccagtttattctaatctcagcagtgaatgaacttccaatatctacacgtttgcccagatcaagaattatcagacttagtatttgtcagtttggtggctagaataagccgttatgattccctgattactgatgaggttgaacatatttttatgtttgttggtcattactgttttctgtaaaccttattcctaatatgttctcattgttctctagggttttcttttccttgttgatttctaggaggaattatttctgtattttgaataacgttcttgtcttctatatgttattcacatcctttttcagtctgtggcttatcttttcatttaatctgcctataattgatttttatgtatactatgagatcagattgggttctaattttattttttcatattggtaaagtgttccaacaccattaacttttcctactttttttttccttctcttttgagacagggtttcactctgtggcccaggctggagtgcagtggtgtgatcacagatcactgcagtcttgacctccctgggctcaggtgatccccaccttctgaatagctgggaccacaggcatgtgccagctaccacacctggctaatttttgtattttttgtagagatggggtcttgccatgttgcccaggctggtttccaactcctgggctcagttgattggcctacctttgcctcccaaaatgctgggtttacaagtgtgagccgccaccatgcccagccttttctacttttttttttttttttcttttgaaataacttcagatttgcagaaaagttaacataagtagtacgaaggattcccatataccttcatgcagatccatcaaatgttgatgtttaacatttttgcttgctcttgtgtgtactctctcttcccccctcccttcacattcgattttgttttttgggggaaccattcaagggtaagttaacagatactgtctcttcacccctacattcttcaactaggacattttcttacaatagaattatcaaaatcaggaaattaatgttgatagaggactattatctaccagccctattcagatttcaccactactgttctttaaagcaaaataatgataataatatttttcctgataccaagattgcatttggttgtcatgcctctattctctttactgacttttagtgttgcctctactaagaagcacattttcatatatgatatgtctgctttggggcttttctttttcattagtctgtccatttctgtactgattccatattttcttaatgatttctttagctgatgaggaagtcttaaaatctaggaaagtgtcccctctgttttttctttttttgttttgtttttgtttttgagacagtctcgctctgtctcccgggcaggggcttgatctcggctcacttcagcctccacctcctgggttcaagcgattctgcagcagccttccaagtagctggttgggattacaggtgtgcaccagcatgcctggcttatttttgtatttttagtagagatggggtttcatcatgttggccaggctgggttttttttttttttttttttttgtgtgtgtgtgtgtgtgagacagagtctcactctgtcacccaggctggagtgcagtggtgcgatctcggctcactgcaagctctgcctcctgggttcacaccattctcctgcctcagcctcccgagtagctgggactacaggcgcccgccaccacgcctggctaattttttgtatttttactagagacagggtttcaccgtgttagccaggatggtctcgatctcctgacctcgtgatctgcccacctcggcctcccaaagtgctgggattacaggcgtgagccactgtgcccggccttttttgttgtttttt

SEQ ID NO: 427 - DNA, 32744 bp, Homo sapiens
  source 1..32744: mol_type = other DNA
ggggcatttccgggtccgggccgagcgggcgcacgcgcgggagcgggactcggcggcatggcgggctccggagccggtgtgcgttgctccctgctgcggctgcaggagaccttgtccgctgcggaccgctgcggtgctgccctggccggtcatcaactgatccgcggcctggggcaggaatgcgtcctgagcagcagccccgcggtgctgggtgggtaccggcccgagctgggccgcgggtgggtcctggcttcccgagtcgttctggagccgggcagcccggcgcttctctgtgtttagatgacggtattttgaagtacagcaattagattcttgggggaatttctgtgtatgtgtataaagggatttgtcatactgctttttaccccctagtattagaggaaagatattttaaagccaaagttggtgaaaacgacccctaatatggcaatcattgctatgcagagtggggggcagggcaagagaaataattttttttttttttgagacggagtctcgctctgtcgcccaggctggagtgaagtggcgcgatctcggctcactgcaacctccgcctcccgggttcaagctattctcctgcctcagccccccgagtagctgggattacaggcgcgcgccaccacgcccggctaatttttttgtatttttagtagagatggggtttcaccatgttggtcaggctggtctcgaactcctgacctcgtgatccccccgcctcggcctcccaaagtgctgggattacagacgtgagccaccgggcccggccaagagaaagtattttctttcacctgaatctcgcctaatcccaccagtaccttttccaaacccctctatttgccgttcctactttgagaaaaattgaagaaatgtaattgaagtcatgttcttttaactctttagcaatgcctgggtgggaactttttcccctttgtagtaaaagtgcctctttttagcattttaaatattcaaatacttaattatgtggatctcctgtattccttctttaaaacacgagtatgcagaccttgatgttgtgccctattaaaaggtgagattttcttccggagggtctagtagtgaatatggtgtaggaataacttaaacagtttaaactagatgctatatgtggcacggtgcggtggctcatgcctgtaatcccagcactttgggaggctgtggcagctggatcacctgaggtcaggagatggagaccaacctgaccagtatggtgaaaccttgtctctactaaaaatacaaaaattaactgggcatggtggcgagcgcctgtagtcccagctattcgggaggctgagacaggagaatgtcttgaacccaggagaaggagattgcagtgagccgagattgtgccactgcactccagcctgggcaacagagcacgactccgtcccaaaaaaaaaaaaaaaaagatgctatatacatgtatcctatatgtactctatctgttgtcaagaatatattaacaatggggaaatatcaaacaaaaaactaacattgcgtgattactttctcttctcagggtttcaaatttagaattcatttttgttcgtttagtaacttgtttctaaagcacttccaagtttaccttccatttatgccatatctcctttcacttgagagattccaggggaagtgtattagttccttattgctgctgtaacaattaccacaagcttagtggtttaaaacagcacaggtctgttactcttacagttcccactgtaagggggattctgtgagtcagaatcccacacaggtctcaccaagctagaaccaaagtaccagacagggctgctttctttctgaaggctcttggggaggatccattgccttattcattcaggttatataggattgaggtccctgacattccatacttcttgaagctgtcccctttccttggatcacagctcccttcccttggtcttcaaggccagcaacagcatgtcaagtccccctaactagaggtttggaatctcccgctttcccaacttcctgtctctctgacccactcttcttcatctccttactttaagggcctgtgtgattacattgggctctctggataatccagtatgatcttcccattttaaggtcagctgattagctaccttaattccatctgcaagctcaatttccttttgctatatacatttaacatattcacaagatgtgaccccagggattgggatgcaggcatctttggggccattattttgcgtactgcatccctgtggaacattgtctagaattttctgctttgttttaatacagcaaccttgggttagtgttttatatttataaggctgccttgaaaaccgttgcaaccttggccaggcgcggtggctcacgcctgtaatcccagcactttgggaggccgaggcgggctgatcgtgaggtcaggagatcgagaccatcctggctaacacggtgaaaccccgtctctactaaaaatacaaaaaaaaaattagccgggcatggtggtgggcacctttagtcccagctacttgggaggctgagataggagaatggcgtgaacccgggaggcggaggttgcagtgagccgagatcgcgccgctgcactccagcctgggcgacagagcgagactccatctcaaaaaaaataataagaaaatcattgcaacccctttaggagtggtttacatgatgctcttggcactctcttaacttgtttacttatttttttgaacagcattacagacatctttagttttttccagagatttcggtttgcttgtatttgtccggaagtcactcaacagtattgaagtaagttgacaattttggttttgcttttcttgtatattcctggagtgactcctcttacccatatttacaatatgtatctctttcattacagtttcgtgaatgtagagaagaaatcctaaagtttttatgtattttcttagaaaaaatgggccagaagatcgcaccttactctgttgaaattaaggtaagaattaaaaaacataccttattacattatatatcaacatctgttttaacttatggtgtgaggaacttggatttttattttaaagataaaacattttcctttctcattggggaatttgcttatttctgcttcattgtgttacaaatgaagtgggctcttcattaggtttttttttttttttttttttttggagaaggagttttgctcttgttgcccattagttatttagatttagtaagctaaggcctttgtgagagaaactactttgataattttttttaataactatcttaatacttttttttcctgaggaggtggcagtggcaccctgggctccctggggccctgatggcctcttgataacttcactgcagcctgggcgacaagagcaaaactccatctcaaaaaataataatttttattttgtatttttttatttttattgtttatttgtttttattttgtgagacagggttttgctctgtcatccaggctggagtgcagtggtgcaatcatggctcactgcagcctccatctcgtgggctcaggtgattctcacacctcagcctcccaagttgctgggaccacaggatgtgccactatgtccagctaatttttgtatttttttttttttttgtagagacagggtttcgccttgttgcctaggctggtcttgaactcctgggcttaagtgatcttcccgtctccgcctcccaaattgcttacaggcacgaaccacactgtaatcctcaaagggattacaggcatgaaccacactgtaatcctcaaagggattataggcgtgaaccacagagtcccgtgaatactttcaggctggagtgcagtggcacagtcttggctcactgcaacctccgtctcccgggttcaagcgattctcctccctcagcctcctgagtagctgggattacaggcgtgcaccaccgtacctggctaatttttatatttttagtagagatagggtttcaccatgctggccaggctggtctcgaactcctgacctcaggtgatcgcctacctccgcctcccaaagtgttgggattataggcatgagccactatgcccggcctaatgttatattttccacagctaaatactgaattttggtattgctcctcttggagaagtagtttcaggtattgctgagtcttagtttttatatcttattgatgattttggttattttttttttaaaacctagaacacttgtaccagtgtttatacaaaagatagagctgctaaatgtaaaattccagccctggaccttcttattaaggtaattatgtttctaagtacacgtattttacattaaacatgtaacttttaaaagaaaatcagagttttgagttgtgttttgggtgatgtgtttggggaaggataggatctaatcacattgatgtgtgggtaagatgcacattctccaaccatcacctgacaataccctggctttttgttttcagactcttctgggtagtaaaagaagaattctgagttgtgaggagaatgaaggaggaaaatgactaaggaatttattgctctttcatttatcacccttactggctttggcaaaacctaatgctattaggaattgctgaaagatcaccttatatctctgaggtttttcctaaaaccttagcaatgggaaagagttcatatgttttcttttttttttttttttttttttttttgagacggagtctcgctctgtcgcccaggctggagtgcagtggcgggatctcggctcactgcaagctccgcctcccgggttcacgccattctcctgcctcagcctcccaagtagctgggactacaggcgcccgccactacgcccggctaattttttgtatttttagtagagacgaggtttcaccgttttagccgggatggtctcgatctcctgacctcgtgatccgcccgcctcggcctcccaaagtgctgggattacaggtgtgagccaccgcgcccggcccatatgttttcttttctttctttttttgagacagagtcttgttctgtcattcaggctggagtgcagtggcgcaatctcggctcactgcaacttctgtctcccaggttcaagcgattctcctgcctcagcctcctgagtagctgggattacaggcatgtgccaccatgcctggctaatttttgtatttttagtagagacggggttttactgtgttggtcacactggtctcgaactcctgacctcgtaatccgcctgcttgggcctcccaaagtgctaggattacaggcgtgagccactgtctggcgggaatcagttgatacgttgcagttaagtggttgttggggtcactgtgacctgtttctgttttttttgtatttgtattttagaattcctttgtttctggttgctccttggttttgtaggcttctgggagaaaggttctagtcatgttgttggtttcttgggaacgtaacacacctagagcattcttcccctgatgttcttccaccatacccatctcaacctctaattcccagataagctgggtggatgtgaatcctgtgagaccaagtgtaaatccttgagacacacctaattctgaacctttgctgtggacagatgcactgagatagaggaatcccgttatttccctctttagagagaatgctaatttgtattgtgttttttttcttgattcccgcactacattgatgtactaatttgtattcttttagttacttcagacttttagaagttctagactcatggatgaatttaaaattggagaattatttagtaaattctatggagaacttgcattgaaaaaaaaaataccagatacaggtgagatgcatttacatgttattttcaaatagtttagcaaattaatattaacaaattattagcataagacttaggttttctctaccaaggtcttattttacagtcgaatactttttgctgaaaataaaccaaaatggaaccaaacaaaaacaacatgtgaagacttcccttcacaaaaatgttaatttttacaaaattattcctgtaaatagaaaactcacaagatatgacaaatatgattaatacatttgcataaaacttaggaaagaatgcagtcctaaaagctttatattttatatctcttactgtaaaatcaattttgaactttattttattttattttcttcatacattttggttagtttaacttatttaaatgtagtttgaggccttcacttgtctaaaattttcttttcagttttagaaaaagtatatgagctcctaggattattgggtgaagttcatcctagtgagatgataaataatgcagaaaacctgttccgcgcttttctgggtgaacttaagacccaggtatgatgaactttatgacattctgcttccatagatgtggttgtgtttttctcttgtaatgacatcttcttaaatcttttcttttagatgacatcagcagtaagagagcccaaactacctgttctggcaggatgtctgaaggggttgtcctcacttctgtgcaacttcactaagtccatggaagaaggtattgcttggcttcacttgattttctttattcaaaaactgtaagtctaaccagcaatgcctgattatttctttgaactcttaaccaatcctgaatttacatacagtagtgagaaataatctagagggacctgtgggccctcccgagttcccctgatgatgacatctttcccaactacagcacaacagcaaggtgggcattaacattgatgttgtccactgagctttgtcagatctcaccagtttaacgtgcacacatttgtgtatgtgtatttagttctgtgcagttgtttaaaattttatttattttttttgagacagaatcttgctctgtcgctcaggctggagtgcagtggtactttcttggctcactgcaacctctgcttcccaggttcaagcagttcttcacttcagcctcctgaatagctgggactataggcacgcaccaccacacctggcaaattactttctttttttttttaaacagagtctcgctccgtagcccagggtggagtgcagtggctcgatctcaggtcactgcagcctctgcctccctggttcaagtgattctcctgcctcagcctcccgagtacctgggattacaggcactcgccactaaatggcaaattttttttgtatttttagtagagatggggtttcaccatgttggccaggctggtttcgaactcctgacctcaaatgatctgcctgccttggcctcccaaagtgctgggattacaggcatgagccaccgcacccggcctaatttttgtatttttagtagagatggggtttcaccatgttggccaggctgttctcaaactcatgggctctggtgatccgcctgcctcaacttcctaaagttctgggattacaggcatgagccattgcacctggccctttttaattctttttttttctttttataattgagacagggtatcattatgttgcccaggctggtcttgaactcctgggctcaagtaatctgtccaccttgatctcccaaagtgctgggattataggcatgagccaccacacctagcgagttttgtgtaattctgtcacgtgtatgtaccattgtaatcaaggtattgaacagattgattagcacaagggtcccaatgtgctactgacttagagccatagttaatctcttcccccatcttggccacctgataacccttcatctgtctccatctgtggtttcgtcatttcaaaaagttacacagatgaactcatggtatgtagcttttcctgtgtggcttatttcacttagcatagtgtctttcaggtttgtccatatcctgatatgtcagcattgtctttttttttgaaggctgaatcatattcctgtgtgtatttactgcattttgttgattcattcatccgtatatgggcacttggtttgcctctacttactggttattctcagtagtattgccatgatcattgttgtacagaaatctgttggcagtccctgctgttgattcttttggatatatacttagaattgtgattgttgggttgtatggtaaccttagttttaattttctgagaaatcgtcatactgtttttcacagtagctgcagcattttacattcccaccaacagtgcacaagggttgcagcttctccacatccttactaacttgtcattttctgtgtttttggtagcagacatcctaatgcctaatggttgcgaagggatatctcgtggttttgatttccgtttccctgatgatgagtgacgttggttgtgcatcttttcatgtactcaccatttgtgtgcctttagagaaatgtctgttcagatcttttgcccattttttaggttaattggtttgtttgactttttgttgagttgtagatatcattttctttctttctttctttcctttttttttggagacagggtcttgctctgtcacccaggctggagagcagtggctcaaacatggctcactgcaccctcaacttcttgggctcaagggaacctcccacattagcctcccaagtagctaggaccacaggtgtatacctgatattaaaaaatgttttgtagagacacggtcttgccttattgcccaggctggtttcaagctcttgggctcaagtgatcctcctgccttggctccccagagtactagggttgcaggtgtgagccactgtgcctagccagataccagtttcttaacagatacatgatacatgagttgcaaatattttctgtctccctttttcttttcttttttttttctgagacagggtctcactctgttgcccaggctggagtgcagtgatgctagcatggctctctgcctgcctccacctcctgggctcaagtgatcctcctacctccgcctcccaagtagctgggaccacaggcatgtgccaccacagatgggtaatttttgtactttttgaagagacatggtttccccatgttgcccaggctggtctccaaccaagagatctgcccaccttggcctcccaaagtgctgggattacaggtgtgagccgctgcacctggcccttctctcattttttgagttgccttttcactgtgttgattatgtcctttggtacacaaaaatcccttgttttgctaaagttcagtttttttattttttttatttttttaagagatggggtctccccaggcaaaagtacagtggctactcacagatgcaatcatggctcactgcagtcttgaactcctgactcaagcagttctcccacctcagcatcaaaaatagctgagactataggcaccaccatgcctggctccttttatattttgcagagatggagtctcgctgtgttgcccaggctggtattgaactcctcccatcaagtgaccctcccacctcagtctccaaagcattgggattataggcatgacctgccacgcctggccaatgaaattcttttctttttttgaaaggacaaatataactttttatcctgaaataatcttttttttttttttttttccggagtcttgctctgtcgcccaggctggagtgcagtggcatgatcttggctcactgcaagctcccccttccgggttcacgccattctcccgcctaagcctcccgagtagctgggactacaggcacccgccaccacgcccagctaattttgtttttgtatttttagcagagacggggtttcaccgtgttagccaggatggtctcattctcctcacctcgtgatctgcccggctcggcctcccaaagtgctgggattacaggtgtgaaccactgtgcctggccgatcctaaaataatcttaaggggagggaaaaagctcctttgctcttccttatcacttttttttttttttttgagacagagtttcactcttgtcacccagcctggagtgcaatggcgcgatcttggctcactgcaacctctgcctcctgggttcaagcctttctcttgcctcagcctcccgagtagctgggattacaggcgtgtgccaccatgctcagcggatttttgtatttttagtaaagatggggtttcaccatgttggccaggctggtctccaactcctgacctcaggtgatccacctgcctcggcctcccaaagtgctgggattacaaggcatgagccaccacccctggcctccttatcactttatcttcaagtaattaccaaatgtttggacctactttgtttttcttccattaggttgaaacttacaaaattacttatatccaatgatttttttttaacctatgtaggcagcagtttcattttaagctaatgtttctacccatgccttcttccttgcttatcaagattgttagagtagccctgtgtaattttccttcgtgtcttctctctcctctctcctgtatcctatggctcccacttcctcagcttcttttcaactgtcacccctcttaggaagcatttatgattcccctgaggtgagcacttcctctggcctctgtactcccctctgtgacagcacttacggtcatattttaagtttgttaggtcatatgtttaattctctcctttgaccctgttggcaggtgatgttgcttatttgtctttatgtttacttggcttataaatcagcactcagtgaacatatatagtggaaggaaaatagtagcacttagtgctcatttattgtgtgttaaggactattctagacgtgttgcaaggcaagttcctgtaatgactcttcatggcaggtaaaatgtctctgttgtatagattagtaaactgccactcagacaggttaagtaacttgccccaagttacacagtgacttgcgtggttaggagaataatggccaccagggtgtcccatcctaatccctgttatgcttcatggcatagcggaattaaggttgctaatcagctgaccttgaactgaagagatgatcctggatcatccccatgggcttggtgtgatcacagggtccttaaatgtggaagagggaggcacagaggaggtcagaggaaggggatctggaaggcggcaggagccaaggcatgggggtgcctctggaggctggagaagtgagaaaagggttctcccctagagcctcttggaaggagcacagccctgctgatgccttaaatttagctcaatatgagaatcatttcagacttctcacctttagaattataggtaataaatctgtattgttttaaactattaagtttgtggtaagttgttatggcaacactaggaaactaatatagctaacaaatggcaagtctgggatttaagccttggtctgaggctaaaatttatactttttttgtgatgccatgatcatgtgacttcaagcactaaatactaattcatgggtacatatatataaggcacccagggccgggcgcggtggctcacgcctgtaatcccagcactttgggaggctgaggtgggcggatcacctgaggctgggagttcgagaccagcctgaccaacatggagaaaccccgtctctactaaaaaatacaaaaaattagctgggcgtggtggcgcatgcctgtaatcccagctactcaggaggctgaggcaggagaatcacttgaacctgggaggcggaggttgcagtgagctgagatcgcgccattgcactccagcctgggcgacaagaacaaaactctgtctcaaaaaaaaaaaaaaaacaaggcacccaggaaatacagactgtatgaatgacttataaaaataattgtaaggccaggcaaggtggctcccgcctgtaatcccagcactttgggaggctgaggtgggcagatcacaaggtcaagagatcgagaccatcctggccaacgtggtgaaatcccgtctctactaaaaatacaaaaattagctgggcatggtggcacatgcctgtaatcttgaacctgggaggcagaggctgcagtgacccgagatcgcgccactgccctccagcctggcaacagagcaagactccatctcaaaaaaaatttttatatatatacatatatataaacgcgtgtgtgtgtgtgtgtgtgtgtgtgtgcaaatatattttttttgagacagggtctcactttgttatccaggctgtagtgcagtgctgtgatatgggctcactgcatcctcaacctcctgggctcaaatgatgctcccaccgtggtcctccccaagtagctggggactataggtgcatgccaccatgtcctgctaatttttattttatttttctttttgagacttgagtcttgccctgtcacctagactggagtgcagtggcgcgatcttggctcactgtaacctctgcctcccacgttcaagtgattcttgtgcctgagcctcccaagtagctgggattataggtgcgcaatgccatgtccagctaatttttgtgtttttagtagagacggggtttcaccatgttgcccaggctggtcttgaactcctgggctcaagcaatccacctgccttggcctccaaagtgccgggattacaggcataagccactgtacccggccccaactaatttttgtattttttgtagagatggggtttcaccatgtcggtcaggcttgtcttgaactcctgagctgaagcaatccacccgccttaccctcccaaaggtgctcagattacaggcttgaggcactgtgcctggccatgggtgccatctatctaaagagtgatgaacttggtgttaaaccagtaattgaaatcaccaagttcctaccatcatgagctcagtctagtggaggagacagatgaacaaataaagcagctctgctgattttggggttcagcagtgcccagaggtggggtgtagtgaagaggaatgccagaatttggagaggtggagcacacgacccacgggtactttctgaggatgtaacgcagaagtcgtgatcagaaggaggagagggagacagctggggaagtgctgggaagagcagtcattccaggcagcagctgctcagcacctggccccatgctcggccagtctctagccctgtgcttagcctgcgtgcagtggtccgagggtccacaagagctggtgtgtcaagagtgtggaggtacacaaagtgggccagggtgagatgggaaggacgcagggttggtgtttgacagttttctgagctgggatctcattccagatggaatgggagccagagcttttcaaaaaggagtggatgtgggccaagagatgtttcacaggggtctgcctgactgctgttgggtgtgggatgtgagttagtgtaggattgagagactgtgagtgagggactgagggctgtgcagtgactcctaagctgaatgggatgggagagaccgggttttttgtagaaacctggccttttgtgttggatatatttaactagagacacttaggaagcatccaggcttagatatcaggtgtgcagttgtgcgtgtaacaggggatcttgcagcagaaatcagacttcaggctatacatttggaggtcttcatcacgtaggtagtatttaaagttaggagtgtgagcaagatgaggagggggtgagagtgcagagaccaggcggagggtctcaagagagtgctgaggaggcagtgcagggctgcctcgcatccggtggagtttggggaggaggaggaactggcagtaagtggtgggttcagctccacgagaaccacatccattgaacattggagaaatgggacctctagagtgaagagcgggaggaagtggaggccatttgtagaaaacatgctagacaaatcttgtaatggaagagagtaaagaaatgggctgtggctgatgggagatgtgggggtaagagaggggtttttttttgaggcagagtcttgttggagtgcagtggcacgatcttggctcactgcagcctctgcctcccgagttcaagcaattctcatgcctcagcctaccaagtagctgggattaccggtatgcgccaccacacccagctaatttttcctatttttagtagagacggggtttcactgtgttggccaggctggtctcaaactcctgacctcaggtgatctgcccaccttggcctcccaaagtgctgggattacaggtgtgagccactgcacctggccaagagggggtttaaaaagtagaagtaggccgggcgtggtggctcacacctgtaatcccggcactttgggaggctgaggcaggtgtatcatgaggtcaggagttcaagaccagcttggccaagatagtgaaaccccatctctactaaaaatacaaaacaattagccgggcgtggtggcaggcgcctgtaatcccagctactcgggaggctgagacaggagaatagcttgaacccaggaagtggaggttgtggtgagctgagatcgtgccactgcactccagcctgggtgatagagtgaaactcggtgtcaaaaaaaaaggatagaattttcacacctatgttcctagcagcaagtccatagtgagccaaagggccagaaccacccaagtgttcatccagggatgaatggataagcaaaatatggcacgtagacacaatggaacattacttagacttaaaaaggcaggaaagtctgacacatgctgcagcatggatgaaccttgcagacaggatgctaagtggaataagccagccacgaaaggcaaacaatgtgtggtttcactcacacgaggtacttagagtagtcagattcacagagacaaagtaaaatagaggttactggggctgggggaggggaaatgggagttagtgtttgatgggcacccttctgttattgatggtgaaaacattttgggtatagacaatagtgatggttacacaacagtgtgaatatgtttagtgccaacgaattgtatctgtacacattgtttaaatgataaatatgtctgttttaccacattgaaaaaaacagatacaagaccatgcttctacagggagtgggccactagagggaggggctgcaggagagtggactgtggagggcagagcctggagaagtctgtccttgctaagtccccaccctaaacccactgtgtactgtgggtgtccttgtgtctgcacacttgcgtttattaacatgactattttctatctgaatgaccttttccccaactagtacctattctttcagtcttagaacaaatgctaccatatctggaaagcctttatagaatactcatagtcagaagaaatctgcttgtcatgaattccaaagtagctttttttgtatctcatttatgccaccattctgcaaccatacagatgtttctctgctttaaggcctctctgaccacattctctctccacctcctatcacatcatcatcagggctctgtctcaaatatgtcagtccttgcaatgaaaagcaaacagttcttgagtctctgctgattacaagtcactgttagaagggtagagaaattagtgatgaataaagcatgactctatagctacaatgaataatgtggtgggagacagttatgcaaataattgtgatgtcagtcaggccaggattagagcctcatgttatagttatgtgcctgttttatcttcccttttagttaataagtatgctgaggtcaaagatcataatttatttgtatttgtaattgtcataatatcttggcatgtactatgtttttttttctgttttttttttttttttaatttttttcttacatgtactaggtgttgaataaatgcctgggtgtattggggagaatggtatgtttggccatgagtaagttactttatttaatcctccagactatcctaaaaggtatatacggtccctattgcaaataagaaaattgaggctctgagagattatctaacagagcttttaagtgatgagttggtgtttaaatctcttagagcttgtaagtgataggttggtgcttaaaccatgtctttgttattccagattttctttctgttttctcgcagtcataaccgtgcagcagtaataacttgcaactttagctggatggaatgatgaaagatgtttctcctgaattcacaagagattaatggggttaatataggtgtcaagctgtctgtaaagtgtgttatgtgatactgttattacgatttgtaacaggcttcttggtatttccctagatccccagacttcaagggagatttttaattttgtactaaaggcaattcgtcctcaggtaggattaatattactattaatattattctaatgcctttacagtgcagactttcaaatactgatggtgaatttttcttttctaaaatagattgatctgaagagatatgctgtgccctcaggtaggattctgtttataatgaggtataatattttagattactaaattaacatctcaagtaagcttttgcttaaactttgaatgaaagcaaatgtgataacatctgtgatgtttcacacacagttatttacagggaggctttcggtgacttagtaagctctggttgaaatgctgatactcaggttacatggttgaaagcactttattttagggtatctttcaggggatccaggctgtttgattctgactttgcctcaatgaatcctgattccacttctgacccttgttttgggatttgtcagccaagttatgggcctgttaattggtagtgttagagctctgacaggaatccctgggttactgtagtgtaatggtactagatcttcctgagcacagtgttgactttgacatatccctgcaggtttgttggttttctgttctgtgttatgtcgtctgattttaaatataatggcatttgcatttgcagctggcttgcgcctatttgccctgcatgcatctcagtttagcacctgccttctggacaactacgtgtctctatttgaagtcttgttaaagtggtgtgcccacacaaatgtagaattgaaaaaagctgcactttcagccctggaatcctttctgaaacaggtaccacaaattcaactgtcatttaacaatatttctttcacacacagaattaaattccctttgcatgcatgcatgtttgaaaataaatacaagttgatctgtagcttctgtagtatttaaagcagaaagatgttgatcagccagccatatgggaggcagccagactgaaagagagctagggagatgccagatttgattagggcctcagagcctagattgagacaagtgtaatggagcaaagacgtggtgaggtgatggccggaagggctgggaggtcagggctggagagtgggtggagggctgaggggagccccatctctcctggaagaggagggctagctgtctccaggggatagatgcttgtgtgtcaacttgaaaacaaggggtgcctctttgccattgtggattttccacctggataggaggtggttacagaatctgtacctgcgtatgtggaagcttgtctggtcggctgaggagaccgtgcttgtcattctgagcactggtctccaggatgtcctgggtgtccagaggtggctgcaggggcctggccattaaggaagtggacttctggggttgctctgagggaaaggactggagattcacaacaaatgttttcttaggggccctgctgtacatgggtaaacagtagctgcattcacagggtatccatgcaaacctgtgtgaacagtgtggcagttgtgttagcctgagagtcacagccgggatgtgtggaaggagaagagagagcactggcatccttttttcatgtctgggcctgccttccaaaaaactgagccgatgggcctcatctttggcctctgcctctgccgcctgtccctctcgcctccttagtctccctgctgtacttggccttcccgtcagacttgtgttccccctgaagtcactcttggctttgaggttaccttggtccttctcataaaactcctgttacgctgaacttggctggccttacttgctaagggaaataaaaatcagaggaattattttttactgattcatatgaatatgtttggatctcagtaaacatttactgcgataaacatcttgacagagagaatttcatgccttgttagcaaggaggagtgtccggaatgtgtgcagagggatcatccctggtggcaccctgggggccttgttccctagcgatgcctgcctttcctagcacagggctgggtggggcgtgggcctgcagggaagccggccagccctccctccactgcgctggttgtctttaatgagccacgcagacatctctgtttcacatccttgccagagacttttcagtcccccactccaattcttaatgaaaactacattgaatagattttagagtttcattgaggaaatatattctacctgctaatctctacctcgtgagaaagttatttgagcttagtcaggggagaagttcaagagaactatcctcaatgctgccctcagggctgatgcctgttgcaagtttgggagtttgcaatataccctcaaatttgatactcacatctatggtttattacagctaaagggcccagataaaaatcaaccgaaggaagcggcacacagtgcagagatgaagaaagtaccaaatgtggatcttccctggtcctctccccgcagagtcagggcagcattcctttcccagcatccatgtgtggagcattgactgggtgctcccccaaacctctgtgtttggggtttcccttggggccccaccctgtaggcatagtgggttgttgggtctcggcttccagggatgctgtgtgacccaaagctcccattccgagtcacattgttaccaggtgtggtcagctccaccctgagtcccattattagatcatcccttgtgacctgaggccccaggcaaggagaggcaccctctttccctccttcttcagaatagggagtgaggagagaggaagaaagagggaaagaggactttacataaaggatacataattttttggccttttttccactatgttgaatatattttcctcacagtgacatctatatgatgtgttttttttgttgctgtttttttggtttttttttttttttgagatggagttttgctctgtcacccaggctggagtgcagtagcgcaagcttgggttactgcaacctctgcctcctgcgtttaagcaattctcgtgcctcagcctcccaaatagttgggattataggcacctgccaccgtgcctggataatttttgtatttttgttagagacagggtttcaccatgttggccaggctgacctcaggtcatccacccttcttggcctcccaaagggctgggatgacaggcgtgagctactgcgcccggccaacatctgtgtgattaattttcagtggcagtgtaatatatgatatttatgagccatagtgttttaatctgtcctctgtctgctactgttgaataattattttcaagtctttaatactatatccaggaaatagttgaataaagatgcgttaaaaacatgcttactgggaatacaataatagaaaattagcattatagtatataatatttgctattctgtaattaagtaaaatgctgttgtttacttcttgagaaacatttatgatatgttttgtgaagaaggaaattatgaaacagtatatacaatgtttcattcttctaaaacaaataaggagcaaagttccccgaaggtcaggcgctaagacctagtggctttagggggattgggaagtgtatggataagttggcagtggaaggtggatttttttttctgcctttgataattgtctagatagatttcttccattcttattctgggcagtctttgtgctgaaatggggaatgctctttgaatacctgtattagttcttgcatttaggctcttgtctcttggtttggtaaataatgatctatttgcttctcagacgacattttccccttgcatcacttaatttaagctttatagtttgtagcttatttttttgaaaactgagatgctttgtctttctgattgttctgaactctatttattgatgacgtctgaagtcactggtcccctgacagctctctttcaccctgtgggtgacaggtgagattgttctgaactctgtttattgacgatgtctgaagtcactggtcccctgacagctctctttcaccctgtgggtgacaggtgagctctaaagactgctctttgcttcctcagagagccttaattcaaaacctgtttttggttttttttttttttttttttcagacttatgtgtatccttggtctcttagtcccttctctaggaaaaatgtatcacatagccttatttaagacacttttctgaacctgatagagactaagcaaaatggaagcaaagggtctttatgattaaaagcaattgcgtgtaactataacagtacattagtagcatctaaacagttctagtttttccatgtttgtatagattccattgctattaaatatttccaaaaaaataaatattatgtatttgcaggtttctaatatggtggcgaaaaatgcagaaatgcataaaaataaactgcagtactttatggagcagttttatggaatcatcagaaatgtggattcgaacaacaaggagttatctattgctatccgtggatatggactttttgcaggagtatgtctcattaacttactctattttgtcttggtttcacgtgattgtttaaaggaatctaattcattgcattttgaatagtgtctaatacttgtaacaatacagtagacccttgaataacatgggcgtgaactgcacaggctcacttacatgcagatgtttttctaccatacggatcaaaaatacagtgtgtgctggatgtgaaacttatatagagggctgaccttttgtatatgaggcttccacagggtgactgtgggacttgagtatgcatggatttaggtatactgaggaggcctggaaccaatccctcccgcatgtactgagggtcactgtattagtattgtttattaacagttaagatttcttcagtgtctgctgtgtactagaattctttacatgtggtatctcaaaatctcctaacccttaggagctcagtattactctgttttgcagattagcaaactgagatgcagagaaattaggaaacttgtcaagagactcagaattgacagaaccaaggcataagtccaagtgtgaagaatagaaacaccatgtttcccctctgtgctatgctgctccttattcctaaagtaaaattgtagttgatttcacaacgttttaggaagagaagttaaaaaaaaagtttatatgacagaaagagatatatttaagaatattagctaggtgtggcggcccacacctgtaatctcaccatctcaccgctttgggaggccgaggcgggcagattgcctgaggtcaggggtttgagaccagcctggccaaggtggtaaaaccctgtctgtactaaaaatacaaaaattagccgggcatggtagcacatacctgtaatcccaactgcttgggaggctgaggcaggagaatctcttaaactcaggaggcagaggtggcagtgagctgtgatcgagccactgcactccaatctgggcaacagagacactatctcttaaaaatttttttttaaagaaaaaatattgagaataaccctagttatttcctcttagtggaattctgtgacttctgctttgtagaaaaaacaactgatttcttttttcttcctacaatctctccctttttttcttctttctttttttctttcttttttttttttaatttttgagttggagtttcgcttttgttgcccaggctggagtgcgatggcatgacctcggctcaccacaacctccacctcccgggttcaagcaattctcctgcctcagcctcccaagtgctgggattacaggcatgctccaccacacctgggtatttttttttttgtatttttagtagagacagggtttctccatgttggtcaggctggtcccgaactcccgacctcaggtgatccgcccaccttggcctcccaaagtgctgggattacaggcatgagccaccgctcctggcctctccctttttcctttctttttcttttttgcctctcaggctggagtgtagtggtacaatcataactcactgtagccctgacctctagggctaagcaatcctgctgccttaacttcccgagtaactgggaccacagacatgagccaccatgcccagcaaattttttaatctttcgtagagacgatatctcacttcgttacacagactgttcatgaactcctggcttcaagcaaacctcccgcctcagtccccaaagcactggacttacagctgtaagccacagtgcccagcctttccctttttcttaatcttcatctccatttgtctctgttggcgactttaaatatgcttagggcagaagaaacagaatggcagaaggctctgagctaaaagattgcatgagattttccctttacacagtgatctatccccacttgagcttgtccctgtggctagagcatgataggcaggagaggggaaatggatctgaagaggtgcaccatcagatcctcggggagcctggactagattcagaagtcctagaaaagaagccttggaaaagtctgaaattgagcaattacattagcgcatttgtgagtctgaaaaaatggctctggtgtggtagggtgtgtgacatggagcatcttccagtcatgtatggactcctggcctctcctgtaggtggacagccttggggcagggactgcctctcatttgtcctcagtacccactgtctaaacagtgcctagaacatagctgacaaccaataaatgcttcctgtgtgaataaatatttaaaatgtggttacagattattatacaaagcatctttataatgagatatattttatttatttatttattttttgaggtggaacctcactgttgcccaggctggagtgcagtggcgcgatctcagctcaccgcaacctccgcttcctgggttcaagtgattctcctgcctcagcctcttgagtagctgggattacagttgtgcgccaccatgcctggccaatttttttttttttttttttaagtagagacggggtttcaccatggtggtcaggctggtctcaaactcgtgacctcaagtgatctgcccgcctcggcctcccaaagtgctgggattacaggcatgggccgccgcacccggccagatactgtattttatatctgtatttcttcttaattaaaaagcttgtggctgggcacagtggctcccgcctgtaatcccagcactttgggaggctgaggtgggcagatcacctgaggtcgggagtttgagaccagcctgaccaacacggagaaaccctgtctctacttaatacaaaaaaaaaaaaaaaatagccaggcgtggtggcacatgcctgtaatcccagctactcgggaggctgaagcgggagaatcacttgaacctgggagttggaggttgtggtgagctgagatcacgccattgcactccagcctggacaagagcgaaacttcgtctcaaaaaaaaaagaagccttgttaaacttgtgtttataatcacatggcttaacatgacaccttaaatattattttgatcttgataagattgatgaagacttctgttttaccttttctaaagccgtgcaaggttataaacgcaaaagatgttgacttcatgtacgttgagctcattcagcgctgcaagcagatgttcctcacccagacagacactggtgacgaccgtgtttatcagatgccaagcttcctccagtctgttgcaagcgtcttgctgtaccttgacacagtaagtgaactaaactgagcacaattttaagtatttaatcttcatttcttcaaataatttgatggagtcatacaatacatttagtgtaggcactgttgggaacaacatgacagttttagttagtactttgtggcaatagaattattgtcatgaaactcgattttttgttatccagaacaggaaaaaaatatttgtttctccttccatctttctgaaagatttggaattgttgcttgggatagaattgcacctcaagacaatttttactctgagtgtgtgttttttttttaaggcaatcacagtaatacatgttaagcagcaggttagatgacaaaccatgtttttcttttaataagtatctaattcagttgtaattactttgaatatttgtattattcctgtattcattgattacctcctctaactcacggtttgctgattatttccggtaggttcctgaggtgtatactccagttctggagcacctcgtggtgatgcagatagacagtttcccacagtacagtccaaaaatgcagctggtgtgttgcagagccatagtgaaggtgttcctagctttggcagcaaaagggccagttctcaggaattgcattagtactgtgggtaagtttgcaatttattgtatttatgagtaatgatggataattaacacattatttgatataggtaaagagaatctggttaccaaattcttttgtatctttgacacaacttttgaactcctaaattttggtagaccaaaatcttttcctttttttcatcctattacctctgaattttaatagttctattaatagaactattaattttaatagttttttttcattttttttggtgacaagagtctcgctctgtcccccaggctggagtgcagtggcatgatcttggctcactgcaaccactgcctcctgggttcaagcgattctcttgcctcagcttccagagtagctgggactacaggcgcccgccaccatgcccggctaatttttgtagttttagtagagacagggtttcaccatattggctaggctggtctcgaactcctgaccttttgatccacctgcctcagcctcccaaagtgctgggattacaggcatgagccaccgcgcctggccaatagttttaagttttaaaattaaagccgtgaatgaacttagaaaataaattgagaggtaaagttgggttccaaaatataatgactgtttgtttttttttgtgagttttgattctgtttttcagtgtttccttcatttttgttttctttttcttttttcagtgcatcagggtttaatcagaatatgttctaaaccagtggtccttccaaaggtaaattctgaatttaatgtttagaaaattaatctgttatcactgaaagctaggaatgttgctgaggttttcgaatataattttgcaaaagtggccgttcttttcttagttattagcaatgccttacattttgaaaagtgtaggacataatacctctatattttgttaggtgaatacacttctaaggtatgaaacatctttaagcataactttaggttttatacatttttgtaaatcagaaatgttttctctcttgaaactctaggacaaattgctaagggaggcatatcttagttcccagaaattataggacatatgatgagatgaaagattgaactatgtacgaaagcaagataaatgatgatagcacattcagtggatattgtattgaagtacttgttggtgtatcacagttttagtcacagaagaatcacatatttttccgttatctatttatttatttatttattttttgagacagagtctcgctctgtcacccaggctggagtgcagtggcacgatcttggctcactgcaaccttcccctccaaggttcaagcgattctcctgtcttagcctcccaagtagctggtattacaggcgaccgccaccttgcccagccaatttttgtgtttagagtagagacattttgccatgttggccaggctggtttcaaactcttgacctcaggtgatccgcccaccttggcctcccagagtgctgggattacaggtgtgagccaccgcacctggccttagctttttaaattatgcttttttaatacgatgtcttccttaatcatatggtctcctatgggtggcagtttaatttagaaaattctgaaaaccagcatgttctggcagcagtgctgcttctgagaatccatcactacatattgtcatgctgtctttctggccagggccctgagtctgaatctgaagaccaccgtgcttcaggggaagtcagaactggcaaatggaaggtgcccacatacaaagactacgtggatctcttcagacatctcctgagctctgaccagatgatggtaacatttaccattgaaagccataaatgtaccttacttcctttattagtctccatagtttagacataagacttatttcagaattatattttactaactttcaaaagtttaaaacagtgtacttcaaaaataaaaaattaaaaccgtatgaatcaggaagttagaatgagagtggaaataaatgaattgaaagaaacacagacatagaactcctttaacattagttactgtagctgagtcctcattttagctttaaatagcaggatggtatagctcatgctaagctgttcttcctaacaggtccagcctgaggatggatatatatgtatttgtacgtatgtatgtatgtgtacgtttatatatgtgtgcatatttagttatgtatgcacataagtatatgtgcatgtacttacatgtacacagacataaaagatatagtgtctatatatgcatattacacatatttgtgtttatacatacacatccacagattaattggggtaaatgctttgacaaggattggcctaaatcttctcacttactgctgtatacagagtaagtatttgttacatgactggataaatgacatctgactgaaatgatgctgttataataatttaggaaggtatcttgcaacttgaaaacttccaggtaaatctgctgcagtttatcatcactgtttccataatacccaaaccggcacatacatctgtgtatgtgtcttaatgcttataaaatactaatacatttttgcacaagattttgaagtttattgtttttctttatttaaaggattctattttagcagatgaagcatttttctctgtgaattcctccagtgaaagtctgaatcatttactttatgatgaatttgtaaaatccgttttgaagattgttgagaaattggatcttacacttgaaatacagactgttggggaacaagaggttagaaatttttatcagtagtaatttttcatcatttttgtatcagctgtctttgcatataaatatttaggggacaatagcacatttgtagaggagaactggagaaaatttggttcttcaggattattatgtgccactgatgcatttctgttggatgtaacctattgtatagaaaatgttgttactagatggttcaaaaagtaatttatatatgttaattttttttttgaaaaaattatttactaggttcatttgtttcttattccttagcaatagtaaagagtgacagaaatcttattttatgtagaaatgactttgtatgggatagggaaacctggggttgctcttgtttatagttaaggaaactccaaattgtggtacaaggtgttaaatgtgttcctgatataggaaaatatagataataggaagagaaataagaaaatgccctccctttttttcacacccaattttcctagcctgagttaaagataagtcatggcttaggcctggcgcggtagctgaaacctgtaatcccaggactttgggaggccgaggcaggcagatcacgaggtcaggagattgagaccatcctggctaacacgatgaaaccccgtctctactaaaaaatacaaaaaaaggccaggcgcggtggctcatgcctgtaatcccagcactttgggaggccgaggcaggcggatcacaaggtcaggagatcgagaccatcctggctaacacggtgaaacctcgtctctactaaaaatacaaaaaattagccaggcatggtggcgggcgcctgtagtcccagctgctcgggaggctgaggcaggagaatggcatgaacctgggaggtggaggttgcagtgagccgagattgcaccactgcactccagcctgggcgacagagcgagactctgtctcaaaacaaacaaacaaacaaacaaacaaacaaaatacaaaaaaaatgagccgggcgtggtggcgggcacctgtaatcccaggtactcaggaggcagaggcaggagaatggcgtgaacccgggaggcggagcttgcagtgagctgagattgcgccactgcactccagcctgggtgacagagtgagactccatctcaaaaaaacaaaaggataagtcatggcttaagtctggagctgccctgctctggtccgaggcattggtggtaactggactccatggtaatttggctggtgagaaagaactaagatcctgggaaggtgtcttgcttgctttcgactgcagtgattgtttcagaccagatggtgctgattcgagttcatgcgtcagtacctccactgcagtcctgagaagttagacaagaggcaatggggaggatgtgcagaggaaacatgaagggacacagtacaagccggtggtcacatcagctttattgcacttggagtattctgtttttcatgcgggatgataggtagcaacactgatgtgtggtttattgctctctgtgctttgcaaatgtctaaaataattttattaaaaaaaaaaaaaacttgcccaaagggacttcctggaactgtgtcagctgacagacctgcattttagaacatgtgtgttcattgctgtcttcagtggcttccctttctcctctgttccctgcccttccagcttcattccaacagatcaatgaccacctgttagcacttcccagatatatttggtctccagcctcctcctcccttgttggttcctgctctgtatttctaactacttgtgcaacattttaatttgaatacacagttgtgtttggtaacacaaatttggtgacacaaacttagcgtgtttaaaactgatcttcatgcacttccaaaataccacatttttcatttatctttcttactactgttaataatttctctatttctctttttcttcacttgaaatctctaggtcacctattaaaattctatctctgtcaaggcattattgctagctccctcaagaagtgctgcccacctctggcattttcctatttgtcccattctctcatcacttcctgtgagtccttttggttaacgctttctgcaagtcctgcccttcttatcagaccataggtcttgagcacccatcttggtctttctcgctgttgcaatctttcttcgtagcatcaggccttgaccatgaagtcagttggaaagttatttgttgagtgattcgtgattgaatggtacaatgtttctttgctacaattactctttaagaatggagatgaggcgcctggtgtttggatgatcccaacttcagatccagcggctaacttgcatccagctaaacctaaagatttttcggctttcattaacctggtggaattttgcaggtatttggtaaaattctaattatttaagaatgaaaatgattgttagttattggctgtaatataggaaattccttatatagatgtaagaaatgaaataataggccgggttcggtggctcacgcctgtaatcccagcactttgggaggccgaggcaggtggatcacgaggtcaggagatcaagactatcctggctaacatggtgaaaccccatctctactaaagatacaaaaaattcgccgggcatagtgtcaggcgcctgtagtcccagctactcgggaggctgaggcaggagaatggcatgaacccgggaggtggagcttgcagtgagccgagactgcgccactgcactccagcctgagcaacggagcgagactccgtctcaaaaaataaataaataacaaataataaaagacaaaatctgtaatcgattatatagatctttaaaatatatctaagtgtactaggttacagttttcattttttatatttaaaagatcctcaggtagagaaaaatggattatagatataactaaacattttaggatacctcaaaatgttacgtgatgggtttgtagcttagttgttcgattatgtcccttacaattttaagatcagaatgatacaaatttctaccttcaatttctaatttgtttttacagagagattctccctgagaaacaagcagaattttttgaaccatgggtgtactcattttcatatgaattaattttgcaatctacaaggttgcccctcatcagtggtttctacaaattgctttctattacagtaagaaatgccaagaaaataaaatatttcgaggtgagtctttcttgcaggatgttgaatcttgcgtttttttaggtcatgagtatatataaatgtatcataaaatatgtgattgtggcctatgcagttttaaagtctactaattttattctatgtgtttaaaaaaattgatatgtgaatggcagttggatagcactctaaaaagctagcagcattttttgccctgatgctcaaacacctggctaattatgtaagattaacaaggcctctcaaagtatggtcccaggaccggcagccttgagcattgctttctgcatcacaaaccttgggggcaggtctctgctgccctgctaagcaccaccaggtgattctggcacccagtgaagtttgagaacaactggattagcattctcgacgctccagtcagtcacatgaggagcccacctgggtaattacagggtgagatgaggaagagggaatggacttagctgtgtgcttggcttctcactagctgccaccttccctcctcttgttctgactagcctgtgccttgaaatgtctgcagagctgattctgcctcctgtcttcattagatgttggtaacttgaaatggattcacccctctgaagacaggctaggaactactggattgggatacagtctcccgattcttgttcagtgtactaacttgctgttttatttgacagggagttagtccaaagagtctgaaacactctcctgaagacccagaaaagtattcttgctttgctttatttgtgaaatttggcaaagaggtaatttttaaatgatttatcttagtgttatcatgaactgtttttaaatgaatatctattgaaaaaatcctagtgatcataaataattattttaagaattggggctgggtgcggtggctcatgcccttaatcccagcactttgggaggccgaggtgggaggatcacaaggtcagtagttcgagaccagcctgaccaatgtagtgaaaccgtgtctctactaaaaatacaaaaattagccaggcgtggtggtgcacgcctgtaatcccagctcctcagtaggctgtgaggctgaggcaggagaactgattgaaccctggaggcagaagttgcagtgagctgagattgcactactgtactccaggctgggtgacacagcgagactctgtctcaaaaaaaaacaattgtgtcaggttaggaggctgggggaggagaatcgcttgaacccgggagatggaggttgcagtgagccgagatagtgccactgcactccagcctggggaacagagcaagactgtgtctcaaaaaaaaaaataaataaataaataaataaaaataaaaatgtgtttgctaaatctggagcgggactaaggtcctaaaaaaactaattagaggaagttattgtgcttcaaaagtccctcagccaggcactttggttcgtgcctgtaatcctagcactttgggaggccaaggtgggtggatcacttgagggcaggagttcaagaccagcctggccaacatggcgaaatcccatctgtactaaaaatacaaaaaattagccaggtgtggttgtacatgcctgtaatcccacctacttgggatgccgaggcaggagaatcgcttgaaggatggcagaggttgcagtgagccgagattgcaccatgcactccagcctggctgacagcacgactctatcttacaaaaaaaaaaaaaaaaaaagtccctcaagctctcttaacataattcagttgagtgatgacaactcaagatgaaatagattcttgtttttccatgtagtaggtattaagcatttcgacaaattaactttcctggaggttagtgtgtaatttgtaagtgaatgtggtcatgtcaataaaggctacgtgccaatttttgtatttgagaatagggcaaatactttttagttgattttcaaatgtaggctctattcagatatacattactgtcttctttcttgttaaggtggcagttaaaatgaagcagtacaaagatgaacttttggcctcttgtttgacctttcttctgtccttgccacacaacatcattgaactcgatgttagagcctacgttcctgcactgcaggtaggcgttgtcttgaacagagccatctcttcatcgctgttgtgagtcccagagcacatagaaacaccatcctcttgccctggcagtcccagcaggcgtttcctcacaggcgtgcccgggtcagggtctgcttctgccacttactggctttgggacttagacccttggtgactctgaactgcacttggaggtcgatgtgagagttaaacctgtgtgccttgaaaggctgcggtataccacagccacagagacagctgcttgctttcctcctaattacctggactgaactctccagcggtgtcgggcatccagtaataaaaaggagtattaa

SEQ ID NO: 428 - DNA, 32744 bp, Homo sapiens
  source 1..32744: mol_type = other DNA
gccggagtccccacgcgaggatgctgcggtgagcgcggccgggacgccgcgtcgggctctcggccgcccagcggcgccgcaggggaagccaggccggcagccgcgcgctccccagccggccaccaatcccgccctccccggctcctccggacctcctcggcaggcggcggcggggcctgcctgtgcgctctgcgcccgcccgcgcctaccctccatggcgtttatccggaagaagcagcaggagcagcagctgcagctctactccaaggagaggtgcgcgcccagctgaagaagggcccagccgggggcctagtcggggccggtcgtggggacgccggccggagatctgagggacgggaggcggcgtgggggccgggcacggaggcaggggccggacgcgtgtccagggcctgggctgggggctgtggcggaaacctgaggtcggggtgagaggccgggggcctggtctgggccggagcctgccggggacaggaactggatgacgggccaggccagattccaccgcggagccgaggcatgccgagctatccggcagtgcaggtcccggcggccgcgggcagctcacccggaaggccgcgcggggtccgggcgtggatcccggcacgcgagcccgggcgttcgcaggggagggtgagtacgctgcccggcgggcaccccctttctaatccttccccttaatcgggtccaggcactcggcgccggcgccgcagagttggtcgccgggcggcaccgagcaggccggcgaccacccactcgcattgccgcgcctttttcctgccgactcctttagacacaggactagctccatgccctggaaggctgggaggggggccgccggaaaggcctgattctgaggaaagccaaggtcctgcctcccaaacacttgctccccgcgcagtggaccttgtgttggaaagctttgcagtcgaaatcgcggtgcggcagcggagcactcattctcaccagcatcccagtaaggatttgggatcccttgagctaaaatggtctcacagcagttccctttcagatatgctggacctgtccccaagggaagtctcataagaaagctcacttcggctctatgtatagttcccagggcatttttggtgacagaaacaacttgctcggtctgcagctcagatgccaaaaggaaaggggggctgaatcattttacagacacactgttttgattgtgagagccacagatcttccagtgctgctagcctgtcacgttgtctcatcagtgaataccagcaaagcaggttacacgtgggaatacaagtgcagacttcaagatttgtctacacttgttttataagggttgactcgacccctttgatccagacattcatctttctctaatctgtaatgttggtctaaccagtgtgtccacagtacgaaatgtcatttttctactgtagagaagaagatacgatacacagaaaacgtatctcagatatggctttcaaaaatgtttttggtgatgtgattaggttttagtcacagaaagggttgtttattaaataactgagccctaactatgtaactcacacttggggatgcccttctgactgaatttgtaatgcatttttcttgtggaaagagcttgagtggagattctttgtttagtaccaacaatattaagacttgttggtgctctgtattgagtgggtgaacattcatatttaaattgtgagaactttgacacacttgaattggcatcatgttgtatgatatgagtcattcgtgccaatactcatattggcctttttgatatacagggaaacgttttttccttggttctggctgttatttcgatgaagtaatttgtgttcaatttggctagctcatacagctccgtggtgtcacacaaaccttgaaacctgtacttgcatttccatgtatatgctgctttgttagaattcattgattagacaacaacgtgataggctggcagtgttcagagagaactctagctcttggcaaccaaaacatttatctatccagtcaggaggcatcaactgttcctgagcatcagtcatctgaaaaagttggcgccatgtgttttatatttatttgaattataacttgctgagtgcccaaattgtttagtgctctgccccatggctttgcaacctgggctgatgggcatactccattcaatgcatagaatatgcatttgaatgacaggaatctgtctcacatcaggtatgcactggaatcaaggagtctcttttataaatcttagaattcattctgaaacagaggaatattttaaggcaactttattaagccccaaatttaccatttctgcccagatttttccgggtttatccccttgcatcaataaacacaaattagcaaatggattggattcgtcattggctccagcatacccaggaaaattgttacttttcttggaaaacttgaagaggggttgtttcagaggttacccatgagaggcctcaacctgttcattgtaagttcactggcggctctcatgctaattaagggattttagatttccagagctaccaaatattgaccccagaaaagaaacttgaaatgagcatttatttctcttattgttaggttgatgtactttgatattcctgcaaaagcagaagcatagagactgactaggagattcttgcattggtggtttaaaccaaggtggtggcagaataaatggaggaaagtggatggattctagatgtttttaggacgtgtgattgacaggtcttggtgtggtgtattgtctgtgagaggtgataaaggaagaattccagctaggattatctgataaaatacagcacacccagttaagttcgaatttcagataaacaatgaataattttttagtataagtaattgcgatagtatatgcaatatttggtatgtacttatactaaaatttttttagtataagtaaatgcaatagtatatgcaatatttggtatatacttatactaattttttttatttttatttttttgagacagagtctcgctctgttgcccaggctggagtgcagtggcgtgatcttggctcactgcaagctccgcctcctgggttcacgccattctcctgcctcagcctcccaagtagctgggactacaggcgcctgtcaccacgcccggctaattttttgtatttttagtagagacagggtttcaccgtgttagccaggatggtctcgatctcctgacctcgtgatccacccacccgccttggcctcccaaagtgctgggattacaggcgtgagccaccgtgcccggcccttatactaaaatttttaaaagtatattatttatctgaaattcaaatgtaactgggcatatgatatttttatttgctaaacatggaaattctactctcagacttctggtttgaataactataaagtggtgccatttattgttgatgtttataaataaatgttttggtaattttaaggattagaaaacagacacttggccattcgaaataagtatacttatatcctggttaagatttaggtggcaggccagacacagggctcacgcctgtaatccccaaattttgggaggccaaggcaggcagatcacgaggtgaggagttcgagaccagcctggccaatctctaataaaaatacaaaaattaaccaggcatggtggcgtgcgcctgtggtcccagctacttgggagactgaggcaggagaattgcttgaacctgggaggcggaggttgtagtgagccgagatggtgccattgcactccagcctgggcgacagagcgagactccatctcaaacaaacaaacaaaaaaaagatttagatagcaggaaccatattgattttattgttttttaaaaatgtcctgtgcaggtgttggtgagggtaaattgaaaacattttttattttttattgtttttttttattgagacggagtctcactctcgcccaggctggagtgcagtggcacgatctcagcccactgcaagttccgcctcccgggttcacgccattctcctgcctcagcctcccgagtagctgggactacaggcggccaccacagcgcccggctaattttttgtatttttagtagagacggagtttcaccgtgttagccaggatggtctcgatctcctgtcctcgtgatccgcccgcctcggcctcccaaagtgctgggattacaggcgttaaaggcaattcacatgtcttccttggatttgtcagggatggcaggtgtatacattgggttagtagatgaggatattatacagactttctatttaagacatttctattttaatatgaaatatattaaaaggtgggaagatcactcgagcccaggagtccaaggttacagtgagctatggtcataccactgcaccccagcctgggtgacacagtgagaccctatcgcaaagaaaaaaaaaaaaaagacatttctattttatgatttagaagtagactaaagtaggcaaattgttaaatttttttgctttactatccaccgtggagtgttgggatgacagctatttcttgggtaatgtagaagtttagatacttgcctaggtgccatggcttacacttgtaatcccagccctttgggaggccaaggcacaaagatcgtttgaactcaggagtttgagaccagcctgggcaacatagggagaccttttctctatttaaaaaataaataggccaggtgtggtgcctcatgcctgtagtcccagaactttgggaggccaaggtgggtggatcacttgaggtcaggagttcgagaccagcctggtcaacatggtgaaaccctgtctctactaaaaataaaaaaaaaaactagccgggtgtggtggcacacacctgtaatcccagctactcgggagactgagacaagagaatcgcttgaacttgggaggcagaggttgcagtgagctgagattgtgccattgcactccagcctggtcaacagagtgagactttgtttcaaaaataaataaatacataatagaaaagaaatttagatagttgagatatgtttccttctgaggaagagtcatagttttatctctgtaatgtcatagaataaattcttaattgtgctttgtaagttccacagatttccactcaaggatggaaattagtgatcttgaattctgtatttggtgcctgcatattacattaatagtttaacaggcactttgagatttcaactttgtttcagacattccatgagtgtataatattcttgattatgctagtattaactttctttctttttttcttttttgagaaggagtttcccttttgttgcccaggctggagtgcaatggcatgatcttggctcaccgcaaactccgcctcctgggttcaagcgattctcctgcctcagcctcccaagtagctgagattacaggcatgcgccaccatgcctggctgattttgtgtttttagtagagatggggtttctccatgttggtcaggctggtctcgaactcccgatctcaggtgagccaccacgcccggcccaactttcttttactcaatatgtttgtttaatcaattgtgtctatatttattttataaaaagcacttggcaagagggcaaagtgattgtggtacttcggtttaatctttcatttctaaggcttatcatcccagtcttttcagatctgtttgtgggatataccaggtgttgaaactggagatcagtggagataaagtcaggacttaattcgtcaggaatgccgataggtcccaagaaatctatccgactgtgacttaaagaaatagggtttttttttctcacatgaaaaacagcgggagaggaaataaatgttgcaaatttcttggttaatttagactctatattgactttacccaaaatgtattactagcctacccacttactttccttttatctcaaattaacctcttccaaagtgtctaccattgagaagtcacaggaatctatccataaatggattttgagtatgtaagctatataatattcattaaaaatttttttagtgtgatataaaataggaatggtcatttaaggaattcagtgctatttttcttctaaataccattgtcatttcatcttttaaccatcagatatttagaattgtgtcttaaaatgtccaactcatagattttgaaaattatctttttgttattttttttaacttgtattcagtaagtaacttagaattgttatcttcttggtgagttgaattttttatcaatatataatgacctctttacttctagtaattttttttctattttgtctgatattaatatagctatatcagttttcttctggttatttgctttgtatgggattttccattgttttacttttcactattctgtgtcctaaggctttaggcctgtttcttataaatagcttatacttggactttttttaaatgattcattttgataatttttatcttaatgaattagtttagtctgtttacatttattattacaaatatatctgaattcacttttattttttagttttgttcttttattttgccttccttcccttcttcctttggattaaataaggcccccttgctccctttcatttttccccaaagagtatggaagttatatattttatttgtttttctaatgcttatccttaaaacataagcatattaaatttaagatctgaagctaatcattatctttactctcctctctaccagtgtaagaaccttggaacacttaactgctgtgcccccatcctcagttatagtctgttattgtccggtattttttatctctattttaaacctacagattgtacattactaattgcctggttaatgcttctgtagttttacatgcatatttaccattgtttttgttcaatattccttcttacatgtcatatcctcgttacggaattattttctctttcctgaagaatatcctttagaagttcctctgatcagggttggatgatgataaaccacctctgtttttgtctgtctgaacatatccttattttccttttgctttgaaaatccgttttgctagatgtttaattctcagcattttgaagattatccaaacaaaggcaaagggccagggaatatgcatcagacttgctggagtgctctggggtgttgggggggtacctcacagagaaaggtcagtgatagttgtgccttgtccccctggggtaacgttcagctacctggctgggccaacttcagacttcaggagaaaccagcactccagggagtgaccaggggccagagtacagtaggaccatactgtgatggaaccttggctcactcatcccagctcagcatgtgtggctgcaggatatccttacctccttgctggcttgattggggctaagtctgtataatgtggcagagtttgttcttgattggggaaacaccagcctttttcctggcatggtcaggggaccagggttcaagccttgtggttgatgaggtttgattgccttaaacacaatcatagcagttttccctgaaactttgcaggaggccaccttctcttctgggagaccagcctgcaacaaaccaatattgttaagtctaattgttctttgtaggtaatctctcttttctctgactgcttttaagatctcctctctgtagttttttgctgtctagatatagatttttttttcttcatctatcctgcttgagcttcctaaagctaaaagttttggaaaatttggagccaagctgaactaaggctagaacaaatgttctctgatccaagtccaacctcttttccactgtaccatactgcttctattttaaatactaggttgtgggctactggccagtgcttatttttatggtatccttgaagtttagactgattcaggaatgaatgaagcctgttttatgtagatatcagaatcttgttagtcaaagtgttgtccacaggccagcagcgcatgtgtgcctggagcttgttagaaatgcacattctcaggcctcaccctgaagctgctgccttggaatgtgcattttaacaagatccccagttgattgtgtgcacactaacctttgtgaagcgctgcgctagataacagtaattcagcattcatcttgattttttatttgtttgttccttccaactgaacttccttctttaacttcttgatagtacatataaaaaggctgagggaagcctcctgccctgcagtatgacacttgatgaggaaactggaggactttgagagcatagatgacatttttaccatttcttctcataaattgctgggacttgaaaatagaattgactggctttatggatggtgtcagtgaaagggattttgatatctgaaccatcttggctggaagtcactgcatctcacatagtcagggagaatgtaattttctagagtccagctgagtgatagaaagctttaacctaattactgaggggaagggctaaaaaggccagatgaaatagtgaaattgtttaaattcatgagaactctttctgggagggaagaagggccagtaatttataggagaaaacaactggtacaggaactagaaatgatacttagtccctcagatgtctctctgcaaatgtgtagaacatggataataaaatgagccaggtcttttaacaaaaaaggattaatgtgtgttttaggtgtcactggagttgggtaagatgagacccaagattggaatctagtgttgaaaagctgcagacctattgaaaaggaaagacctgccaggaggtgaggcagtgggctctgaatgttaagaaggtatacatctgaaggggaatccatgaaaccccaggaaaaaatcccagagaacacaattggaaagaggaacaaagataacatgattgtgttcttttgttacaggccacgttaagtgggtggaagaaatggtggctgtgtacctggtgtaaatgggaaaacaggaagtggcaatagagatactggctgaaatgcttagtgaaatctaagtacagtttattgacttcctttcttaaagttttaatttatcctaaacttgagaactttacttaattctgaatattaaagacaaattattaaccaagtagcaatgaaatgaaccatcataaaaagcagtcatatcaagttgtttattgctggagctcaggagagttgagagggatcctgtcatacatagaacctagaattttaagaaagcagatattgaaagttccaaggaacaaaaaagataggtgctgttactggacagtttggaaagcatattgacccaggaagtttgtgaaactgtcaaaaatacaattaagaacatctaatccaaatgatcttttgtgaggagttacagaaaatcaggcaagcttgcatgttggaaggaagctaaaaaagaaaaagaaaatcaggctagcaaataaagaatggttgtacaggtagtatttctctgagtttataattattagttttaatataaaacaagaaggttatacatagttaatttcaaaaaggttaaagccccaaatgagtggaacctttgaaaaatggtacagattaaaaaaataaaaacaaaaaaacttccaaagttgcccttggaactaggaagtactgggctgctgcctaggcctagcctggtaccaggtgtaacattgatttatgacagggaaagctcttattttgtactctattaataatactaatcttcagactgaaagaggatgaactttcgcaagatgggtgaagatgcaaatggtacccaagtgcttatgtctcctggcgtaaaatcctgggagagtttgagtgtagaaccacagaattatttcaatgatctaggaactttgaaaggtgctgaaagaacatgtgtgcataaataggtttaatgcaaattctagatcagacagattatttataaaccactagaagaggaagttgttgtcaccagtccccagcatgaacgtcatgctgctaattcaagagaggtttaatgggctcacagttctgcaggctgtacaggaaagaaggatggcactggcatgtgcttggcttctggtgaagcctcagggagcttttactcatggtggaaggtgaagtgggagcaggtacatcacatggcaagagagggagcaagagagaggaggaggaggctctggactcttttaaacaaccacaaccggatctcatgtgaactaactgagcatgaactcacttattaccaaggggatggtgctgaggcattcatgagggatctgcccccatgatcaggtcacctcccactggaccctactttcaacattggtaattccatattaacatgagattcggaggggacaaacatccgaactatatcattctgcccctggccccctaaatctcatgttcttcttacattggaaaatacaatcatttcttcccaatagtcccccaaagtgttaacttatttcaacatcaagtccaaagtcctaagtctcatcttacacctatctctttccacctatgagcctgtaaaatcaaaacagttgatctactttcaagatacaatggtggtacaggcattgggtaaacattcccattcaaaagagagaaatctgccaaaagaaaggggcagtaggcctcactgaagtctgaaacccagtagggcagtcattaaatcttaaaactccacaataatctcctatgactccttgtcccacacccagggccagcagtgtaagaagtgggctcctaaggccttaggcagctctgcctctgtggctttgaagggtgcagcccacttggctgctttcacaggttggagttgagtgccagcaacttttccatgctgaggttgcaagttgctgatggctctaccattgttgagtctagagggcaggtggcccccttctcataactccacttggtggggactatatatggggactccagcccacttttccccttcatactactgtcgtagacgttctctgtatgggccccatccttgtagcaggcttctgcccgggattccaggccttttcacacatcctctgaaatctaggggtaagctgccaaggctccttcatgcttgcattctgtgcacctgcacacctaacaccacatggaagcttccaaggctaatgtcttgcaccctttggagcagcagcatgagctgtacttgtgggcctttgagccatggctggaggtggaacagtgggtctgcaggaagcagtgtccctaggctgtatggggtagtgggaagctgggcttggccccctaagcccttctttcctctcctaggccctctgtgatgggagggacatcctgaaaacttctgaaatgactttgaggccttccccattgttttggatattagcccttggcaaccttttagtcatgctcatctctctagcatgcaattattccatagcttactccatagccggcttgaattcctctcctgaaaatgctttttctttctctaccacatggccgggctacaaatttcccagagttttatgttctgctttccttttaagtgtaagttccaactttaagtcatttatttgttcctgtatctgattgttggcttttagaagcagccagaccagttctgaaaccctttgctgcttagaaatttcttccgccacataccctacctaagtccttactcttaagttcaaccttccacagatccctagaacatggacacaaatgcagccaagttctttgctagtttgtaacaagggcgacctttgtttcagttcccattcatttcctcatttccatctgagaccgtgtcagcctgaccttcactgtccatattcctatctgtattttggtcacaaccatttaaccagtctctgagaagtttcaaactttcccttgtcttcctggtctcttctgagtcccccaaactcttccagcttctgcctgttaccctgttccaaagctgcttccatgtctttacgtatatccataataaaatgccctactccctggtgccaattttatgtcttagtctgtttttgttttgctataaagaaattcctgaggctgcgtaatttacaatggaaagaggcttagttggctcatggttctgcaggctgtacaggaagcaaggcaccagcatctgcttggtttctggtaagcctcagggagcttttactatggcagaaagtgagtgggagcaggtgtatcccatggcaagagacagagcaagagagagaaagggaagttcccagacccttttaaacaaccagagcttgagtgaacagattgtgaactcatttatcaccaaggggatggtgctgagtcatgagggatctacccccatgatccaatcacctcctaccgggcctccaccttcaacgttgggaatcacatttcaacatgacatatggagaggacagaacatccaaactatatcactgtccagtgtattactggggggatgtttccaatggtgggtagtaggactgcgatcttgccttgtctataacagttttcttaatttcttctttatttcagaaatcattttcagaagcttcttaaaaatggtccgtttaattaaatcaactctctagtaggggcactgtagtctagcttcattcaaggctggtgttggggtattgagagtagaggtggcaaatacacagcactcctgtgctttcctttgcctctgcacacatcacgaaagtgtcatggcatcacagcacttcctcccaataagtttgggttacacttcttatcacagtgaagcctgttagagaaagcattgactaacaaaaccttctggatccactgtaaatactgttcatcagctgagtgttgaataattgttgagtggaatgcaaggttactccagctattttaagttctagttaagtgttgtacagtaggctttaaaatttaggtgatgtaagaataggaaaacatctttttaggaatgttgagttgctcaatgaggaaacttctctaaagagaatgaaaccacacctctgtaaaggaggattaaactaggaatatgtaggggcagggctaagagtcttctaaagaaataatttacagtcagatacaataccaaaggatgagaccatccaattacaaaacggtgattttaatttttttttttaagcatggactcttttactccgtaaaatgtagtttgaaaatcattgttctaaaaatcatgcaacttaattataataatttttacatagaaaaattttaaagcgggtataacaacactttagtaaaaagaaaacatagactcagaaaagtttcataatcctttacttcaaacaatatgatttggttatatcccttcactgtgtgttttacatttcttgcaaaatatgcatattgataaattaaggaggctataattaattcacttaccaaaatgactttagttctaaaatagctgatatgattatattttaataattatatggaagaattgtctctgaaggctacttgtgcatcatagaaataaaattatgccattgtcttattgaagaatacttactctattcttccctctctataagagaaggagtgaggcgattaggaaagagaaggaaggatgtgtaactccaattctgtcttgtgactatattgaaattcagattaagtattgatagtgtgcattttgttttgcactctggcagtttaccctgtaattgattcttgttcatggatttagatatggaggacaggtcaataaaagttacagattaggatggtaaaattggtttctgctatcatttttaattttttgagttacttttcttttggttcagatgatgatgatgatgatgatgatgattttgagacggagtctcgctcttgttgcctaggctggagtgcagtggcgcgatcttggctcactgcaacctctacttcccaggttcaagcaattctcctgcctcagcctcccgagtagctgggattataggcgcccgccaccacgcctggctaatttttgtacttttagtagagaggtggtttcaccatgttgaccaggctggtctcgaactcctgacctcaggcaaaccgcccgccttggcctcccgaagtgctgggattacaggtgtgagccgctgcgcctggcctattatttttttttgatgagcatctcttctggtgttatgaatataacttcttctttgtagggatattaattgtagccttttgaccttttcttctgttctctgcattgtgtttagtccttcaagttgcattcttcctgcttgctttggctttgttctttcatcctagaggctgtgatcttgggctgttcattcatatttaaatgtgaagcatttaattctgtgtcactgggaatgggctatttcagttgagtttcactgtgggatgatgttgtagagacctggctttttctctgaggctgtttagttttttccaaaactaatgtaccagactcctgcctggagtgatatatggatgaagctggaaaccataattctcagcaaactagtgttcatctattccatgttttgcatagtcatcctctcttcacactacaatcctgctctccactgtgcctgatacctagtgtgcagcctcttgttccacttttttttaaatagaaaaaccacatgccagagtgcagtatggttaacccatcaggaaaagaattgggggctactgccctcattcacttttaaccaccctcatgctttacaaaccctgtcctcttggtacctgatactgcaatttcttttttttttttttttaattatactttaagttctggagtacatgtgcagaacgtgcaggtttgttacataggtatacacgtgccatggtggtttgctgcacccatcaacacatcatctacattaggtatttctcctaatgctatccctcctctagctccccaccccgccaacaggtccccgtgtgtgatgttcacctccctgtgtccatgtgttctcattgttcagctcccacttatgagcgagaacatggcggtgcttggttttctgttcttgtgtttgctgagaatgatggtttccagcttcatccatgtcgctgcaaaggacatgaattcatccttttttacggctgcatagtattccatggtgtatatgtgccacattttctttatccagtctatcattgatgggcatttgggttggttccaagtctttgctattgtgaacagtgccgcattaaacatatgtgtgcctgtttctttgtagcagaatgatttataatcctttgggtatatacccagtaatgggatggcttggtcaaatggtatttctagttctagatccttgaggaatcgccacactgtcttccacaatggttgaactaatttacactcccaccagcagtgtaaaagcattcctatttctccacatcgtctctagcacttgatcctgcaatttctgaactttttggaagtccggtgacttgaactggttttctcctgagtggtgccttctctggaggcatctgaaattctgatttctgagcactgcttattcccccggtctgctttccatttctcacagatttgttcatgtctcttctctgctttaatatctctccaatttgctttagcctgtgggttttaccatttaaaaatagttttattcacattgtagtggtgtttcaagaggcagtgaaataaacatatatgtgtaatctgccatgtttaatgtaaatttcttcctccaacacactggaacttaaggcccatctcaagtcccacacttttcatgaaagcttttgcctgtaactcattgatgtttcctggtccttatcacaaaacaaaacaaaaaaatgcctgttttcacttctttgtcatgtatttgttgctgtagccatacaacaaaattaataatttttcttaatgacttctcttgtttttaaaagtttaaatgactttcaactttaaaaagaactatatttcaatcccattcagtttggtttactcattttacttattaaacacccattgtgtagacagcatgggctggttatcacaagggaatatctaaagatctgttggctgggccggtggctcatgcttgtaatcccagcactttgggaggccgaggtgggtggattacgtgaggttgggagttcgagaccagccttaccaacatggagaaaccctgtctctactaaaaatacaaaattagccaggcatggtggtgcatgcctgtaatcccagctacttgggaggctgaggcaggagaattacttgaacccgggaggtggaggttacttgagctgagactgcgccattttactccaggctgggcaacaagagtgaaactccgtcccaaaaaaaaaaaaaaagatctgtccctagaggcatgtgttcttgtgggagtaactcagataaccatgaggcagatgttgggggcagggaggtatgacagggaagaggtggggaagcctagcattgttcagtcaggggaaacaaatgctcaaaattccctaagtaggaaagcgctgagctttgttcagataaggataagtttaacttcacaaaattcagggtttctgtaaaagagtagtacatccacctggtgagtgattttatttttgacatagtagttatttggacacaaggcaagcccagctatgtacttcccgccactgggtagagaggactgcctggcatgatatacatgcttcataaatgtttgttaaattcaagaatggaaaagctttttgggatcagacgttttaaatatattgccttcttatacttactaaaaaataaactgaaagttgttttttcgccccaaatccagattttccttgctgctgcttaacttggaggagtactactttgaacagcatagagccaatcacattttgcacaagggcagtcaccatgaaaggtaaggaagcttcggtatctccttggacaaacaaacctttctgatatctgaacttttaaagttaaatgtgtgatcatataggtgttaactaaagaaaaaattaggctttaaaaaaaattaaagtaaattttatttagacttttattgaggattataacctaggagagtcttttggagagtttttgctatgtttattattttatctcccatgaagtttttttcatcttttctcttattagggaagtaatgagaagagtgtatttaaaagttataattgtaacttgaaacctttttcaaagctaaaaagcatttgttccaattctggggttgtagatatcttaagcttgataggactccagtccatcccatcatttttttgttgcatccctcttgtagttatgcagtatcctctgctctcaattattcgggtgacaatgttataaagtaatgattataaaccacaagagtggtataaaatcagtactttcaaaatgagtcatgcgatttgaactagaagcaagatctgatttctcagtatcttaataactattactcactactataaaaacagattgtttctttgactttaccttttgaaagctatgtacagaagcatgtaatgaagctttttgtttgcttaaaatggcaacttagaattaactaagatgaaaattgttccaccaaaaaggtatctgctaatgatttccttttgggaggttacttaacaactgtaagccataacttaggaaattctttgacagtagataaatccacttatttttattattcttcaggtttatccttaacggatcaaaaacatgtggtatttgtttaaatacaagctaaagtaaaactcacttggtttttttgtttagtagcttatgacatatctattttcttggcattcaatcaaattagacaattattcatccctgaacacagcaccttgctttcttatctctggaattttgctcatattcttttccctaattccatatcttttttccttccaacattcttctatcgtatatcatcatagtgccttgcttaaaattaaatgtacttgtttattattaaaatacaactacaggtagcaaactgaaacctgtttttataattttaaagtaactattagggcaaaatggtacagccccatgtaggtgtatttggtaatatctggtaagatgacatgtgcattaacctattgatctagcaatgctacttctaggataccatttcaaagagaactggcagttatataaatggacatatgcacaaggttattatagcactacttgtactagtaaaagactaggaacaatcctacaggagactgactgaactgactgataagaaatggccacatgatggagtactatgcaggttcaacaaggaatgaagttctttgtaatgctatgaagtgatctctacatgtattaagtgtaaaaagcaagggacaggatactgtgtgtcataagctacttttgtcagaagggggcagatttatcactatgtttttaaaaatcggaggcataaactaaaagctagtggagacagttatctacacagaagaggggaaggatcagaagaacaatatagagatggaatgaggacttctccaaatgtaccttattttgtaactttcgttttggaaccatataaacattttatagatttttactacactttatcttagctaagaggctgagagggcatcttttgtagatttttaatatagaattaaatttaaaaagaaacagtaaggccaggtgtggtggctcatgcctgtaatcccagtactttgggaggccgaggctggtggatcacttgaggctaggagtttgagaccagcctggccaacacggtgaaacctcgtctctgctaaaatacaaaaattagccaggcgtggtggtgcacccttgtaatcccagctacttgggagactgaggcaggagaattgcttgaacttgggaggcggaggttgcagtgagccaggatcatgccactgcactccagcctgggtgacaaagcaagactctgtctcaaaaataaatcaatcaataaataaaaataaaaaagaaacagtaaaccctaaaaatcaaagagaaaatgaaacagttcaggtgtggtggttcacactcgtaatcccagcactttagtaagccaaggcagtacagtacgatctcttgtggccaggagtttgagaccagcctgatcaacatagcgaaactctgtttctatttattacaattatatattaaaaaaagaaaagacaagaaacaaatgaatttaattataaagttggagttagccacagaaaattattttaatcaactttacaatataataatttgactgtgtatctctggtaagatgaaaaagtattgcaaagaagttgaaaaagaatgtaaagtaattgtaaacttttccagttgcaatattgttgttattagtatactattagtattattattttgaaactattttatacatgcatgtatatgtatttatataattggataaaacaatttaataagtatggccaagactcagattttccagtataaaagaaaagagacatacatgtaatattaaagaaataaagcctttttcatgcactttcctccttttttccagctttattgagatataattgatgaataaaaattgtatatatttagggtatacaatttgatgttttgatatacatacacattgtgaaatgctgaccacaatcaaagtaattatcatatccatcacctcacagttaccttcttttgtgtgtgtgggaataagaacatataagatctactctctgagccaatttcaagtgtatgatgtggtatggactgtagtcaataactctacattaaatctgcagaacttatcctggataatggacaacttgtgcactttgcccagcatctccccatttcttccaccccctttaatttcgtgaagtttaacttactcttgcctgaacaaagctctgagctttcccacctaaaaaattttcgtaagttccattcttgtctcttctttgaattaaactcttttagagtctacgtgaaatcatgtagtatttgtccttctgtggctggcttattttacttagcataatgtcctccaagtccatccacatggccacaagtagcaggatttccttttttgaggctgaataatattccattgtgtgtatgtatgtatgtctatttttatatgttttatattcatatatatatcatattttctttattcattaatctatcaatggacacttagattgatcccaaatcttggctactgtaaataatactgtaatgaacatgggagtacagatacatcttcaacatactggctccatttgctttggatgtatacccagaagtgggattgctggatagtatggtagttctatttttagttttttgagaaacctctgtactgttttctttaatggctaaaccaattcatattcccaccagcagtatataagggttctcttttctccacgctcttgccaacaactgttatcttttgttttttgataatagccatcctaacaggtgtgaagcaatagcttaatgtggttttgatttgcttttctctgatgattaaggctgctgaggatcttttcatatgcttgttggccatttgtatgtcttcttcttcttcttcttcttctttttttttttttattgagacggagtctcactctgtcacctaggctgaagtgcagtggcgtgatctctgctcactgcaacctctgccttccgggttcaagcgattctcctgccttagtctcccaagtagctgggcgtacagcacgtgccaccatttctggctaatttttttgtatttttattagagacggggtttcaccgtgttagccaggatggtgtcgatctcctgatcttgtgaaccacccgcctcggcctccgaaagtgctgggattacaggcgtgagccaccacacccacccatttgtatgtcttcttttgagatatgtctattcaggtcctctgcctgtcttttaataggctatttgttttcttattatactatcaagttgttcgagttttttatgtattttggatattagccccttatcagaagtatggttttcaactattttctcccattccgtaggttgtcttttgactttgttaattatttttcttgatgcacagaagctttttgttttatgtaatcccatttgtctatttttgcttatattgcctgtgcttttggagtcatccaaaatactgcccagaccaatgccgagaagcttttctgtattttttctttcagcagttttacaatttcaggacttacatttaagtcttcagttcatttcaagtagatttttatgtatgggatgaggtaagggttcacttttttttttccacggggatatctagttttcccaacaccatttattaaataaactatcctttcttcattgtgtgtttttggcacctttgtggatgattagttgactgcatatatgtggatgtattgtgttccattggtctgtacagctgtatcatgctgttttgattaatgtagctttgtagtatattttgaaaccaggtagtttgatgccaccagttttgttcttcttgttcaagattactctggaccaggcatggtggcttgcacctgtaatgccagctactcaggaggctgaggagggaggatcacttgagaccaggagttggagaccagcctgagcaacctagcaagaccccatctctaaaaaaactaaaaattagctgggcatggtggtgcacacctggagtcacagctacttggaaagctgaagcaggaggattgattgagcccattttgaggctgcagtgagctataatcatgctactgaactctagcctgggtgacatagtgagatcccatttcttaaaatgaaacaaaacagattgttttgggtgttttgtttattttgtgggtcaatatcaatgttaatttctttttttctgtttctgttaaaaatgccattgggattttaatagggtttgcttttaatttgtagattgctttggaaaatatggacattttagcagtattaattcttccagtctgtgaacaccagatatctttctatttatttgtgtctacttcagtttctttcatcagtgttttgtagttttcagtgtacagactttttacctccttggttaaatttattcctaagtgttttgtttttcctttggtgcttttataaattgaattgtttctgtaatttcttttttggatagatcattgttagcatatagaaatgcaacgctgttttttgtatattgattttgtattcttcagttttactgaatttgtttattggtttgaatagtttttttgatagaatccttagggtttttgtatacatataaaatcatgttatttgctaacagagacagtttaacttttccaatttggatgcctgttctttcttttacttgccaaattgctctggctaggatttccagtactatgttgaatagtagtggtaagagtgggcacctttgtgttgcttttctctttaaatgacagtatttcttacctctatcttttgaaaaggcctagaaataactcagttgcaatcagcaccaagaatctggtctcttaataccacttcccactgaaaggatgggggttctttggagaaattgctgattctaagtcagaggcaggaaatctgtgagatgaacctgggacatcctgtcatactggcaagtaaggaaggtatcaaagactactgtaaatgaattaaaaggatgcaggggcaagtagacgatgctgacattgggccaaaaatgcgacaatgtaagcatcagaaaagaataacttctgcaatggattgaaatgtttcataaatgttaaaattcatgagtacgtaattttataaatatgtgtgtttgtgtgtgggtgtgtgtgtgtgtgtgtgtgtgtataatcttaatcagttatcctcgaaggataggaagacaacaactcatttttgtaacacttgataaataaaggtaaagaatcaagcatttttgttattttccttgtacaaattgtacttcagggtagccaaattgctgataagtaaagttgttcttttttgtcaaattctagctcataacatagaaggaatgataaaatttcaatgcctaatggaagaatggattcacagcagggcttggcaaactacagcccttgggccatatctgagctgccacttgttcttgtaaagttttactggaacacaggcattcccatttgtgtacatactgtgtgtggctgctttccctataacagcaaagttgaatggttgtgactgagaccatatggcccacaaagcaaagatatttactatctggctctttacagaaagtttaccagcccttgatctagatagtaattttcaatagctgctaaaacctttaggtgagagaagctgctgggaaattttgtaatggctatatggagattgacatcacctgatcctctgggtgcctctggatgtgaaggcagtacccgtgtactacctctgaaagtattctttgaacactggctgtatacatgatgacattaaagaattattaatttcttagagtgtgttaatgattggtcacttattaagagaggctgtcttcagagatttttgctaaaatatttgtggataaagtatatgatgtcaataattttctgtgttattcagcagggtcccagggggttatacacaagacaagagtgaccacatattgacaattgtagagctaggccattggtacatgggagttttctattctatttgtatatgtttagaaatttcataaaagtttttatgttactattgggtaattttgggtattagaaaagtaaatgcagttaacaacttggaaaaatgatatgaaatggtataaaatttcaaaaaccctttgagaaagaattgcaaactaaatcataaccttcagtagaatgggccttctcatctattcagtacatgtatattgagcactgagaatagaaagccaaagtaaatatttactgctcacaaaagaacaggcagtgttactctggggtgggatgagtgtaggcattctcagtctgtaagactatttctcagtgtgatgtttctggattcattaagtttctagccaatagatgctgtaaactatatggagatacacatataaaccaaagaagtttaattaaaaactttctaacatttgaattgtaaatgccaatatgaaccactattctgtgttttgttttaccagttaatttaaaaatagagacgttctctttatatgcattattgatcttttattatgtgatgctttagtaacctgctttctagttaaaatgtactatgattatcttgtgatttttgttatgctcatcaaacaatctgttgtacttggatccctaggaaaatcagaggctccttaaaaatatgttcaaaatcggtgatttttgaaccagattcaatatcccagcccatcatcaaggtaaatacattttaaatatgaacagaaacattcctattttttgtgtatgtcttacctttcttgatttttataatatttctctcaattttatccagattcctttgagagactgtataaaaataggaaagcatggagaaaatggagccaatagacacttcacaaagtatgtcattttcaccactgtttaattttacttcaaccaaaaagctgtatatatttaatgacttttatctgtattttagggcaaaatctgggggtatttcactcattttcagtcaggtaagcacataataaatattttttcctaatctgaatgaacattcttatatatgtgcatgaatgaaattacttgtagagatatcagatgaagaccatggaatagaaatcaaatgcttttagaattcagtcattgagaaatatagttttaaaaagatgtgatccctaatgagcttcttcatgtttattaagtgtgtgatatctgtgggcttgcggttttgtccttggagctctcacgatttatgatttacgaggcttgaaatgaagggatgcagctcttcccgtagcttcctagctatttagaaggtgagagtccattgccatgccacttaaatgatctcagggacttaggacaaccaaggcaatgacttgggattggtggtcttgtatcattatgacccttgtggtaataaccttttgttcattccagatttattccctttatatttatgcacccaccactgcactcaatataggcatgacagcattggcaataaaaggtcaattaaaacatgctttttctcctgtcatattattaattagtatgtagatttaaaaaattgtaaataagaagggactactttcttttggctctgggtttcatctgcttcatctttaaagcgaaagggttagcagatgttgccttgacagctctcgttccttggggtgttgaagtgttcagagaagaattgttctgggatgaataagggataagaaaagctgtgggaacaaagatgcacggacttgctgacttcaaaacttgacttaaatcctctcatgcaacagaccagagtgtccctaggaggcagatggggaggggaagagcatgctcccagcactttttctatcactgaagccttttgttcacagaacacttttaacatgtgttgaaagttattttatgaaagctgagaggtagcagatgatttgattttctacatctaccttccatgattctattaattttaaggaagaaaacatttcacaggcttcctcaacttcatgttgttttaactggtatatgtgaagacagtgacaaccatctactgctctggggaccaaacatcgttattaataattctggtccacctccatactctcatgtctatcgtgtcattttacttcatgacctggttccacaaagcccatatcttgaaaggaagaggtactttttgacttgaagatagggttttcattataaaactatacattttagttattttagtaaaaatttaataactttgagcttaggaataaagcccccaaattcctccacctacttttttaatagtttatagaagaggtcttgtatgaaaccagctcaaaaccagcccgacacaagctactctttcaagcattatttaaagcttcctgtgtcaagtatacaaccaggcaacttttgggttttttgaatatatactaggtcacaagatctcagaaatatagtacggtgctttatatttagagagctttgcttccaatttttttgttgctgctaaagaagggtgtgtgcatgtttatatgaataacagattcgactcatggattcaataagtattatattcagggctctggcaatctagggaagaacaagatatctgaagccttttgctccatggactttacttttcagtgggggagacagacaataaacaaatgtctcctctaatgtcaggtggtaacaaatgctatgaagaaaatgaaagcaagacagaaggatagaaaatgataaggaatgttctcatgctgctttagaaagagtagtcagggatgcctcactgagaagaggccacttaccaagagactcagaaggcttaaggcattgagctgtgcaattatcacaaacactggtattccaggtacagagagtggtgggggagaagcctgaaggtgggcatgtccttgacaggtgggaggcacaggagtgtgagtgctcctggggtgcgtgagtcaaggagaacactcaagggaggctggaataggggcagggaccgtgtcatgcggggccttgtgggccaaggtaaggacttagaataaagcgcagagagaaatgccactggagagctgaaagagaaggggtgtgtctgatttgtatgtaagtctctctgggggctgggtagagaacacgctgtacaaaccagggcaagagtggaagcaaggagacctattggggtgttccaggaatccaagtgtattgaaccacgatggtgagaggtggtcattgtctaggtatattctgaagaaaacccaacagatgtgctgacggattggtcgcagggtataaaagggaacagtcaagaatgactccaatgagatagacagtagtgccctttatagtgataaagagagttgggaaggagcaggcttcaagtaggatgtgagatttaagatggccatgagaactccaaggggagacgtccagcaggcatttggatgcatccatctgggtttcagagaggaggcagaggctagcaagacatactggggagctggaagtttctagagactttttaaagccctgtggctggataagatttcctggggactgagagtggacagagtggtgtgagaactaaggccctgcacctctctaatttaagagattgggaacaaagcaaggtccaaaagtagacggaaggagtagccagtgaggttggagagaagcaggagcaggtgtccaggaagccatgtggaaaactgcttcaggaagagccatcagctctgtcacatgctctgagaaggagagtcaaggaagacttaagaattgattgtatggtgacgtggagatcttatgcacttcatgtgaccatctaaaagtgatttcaataatatggtagggatgaaaacctgtcatgggcccaagggaaggtacagacagcccttgcaatgaattttgccacaaaagggaacagaaatggcaaaaggaggatgtgagattaaggggaagtatgtttgtgggggtgtgtgtgtgtaaaagggagagagtgcagtatataatcctaagagcaaagcttttgaatatctgacaggtttggggaggtgttcacattctgtgccctagtagaggggctggactttgagagctcaggtaacttccattgttgcaggaggaaaagcagtgaggaaagtacaggtacaaggagattgatggctctggtagatggtgtcacttattccacatagttattaatatactatgtaaggaccagtggcccagtgcatgtgaaaacaccatgtgcccagatgacctctaagttttctttatgttagtgaacatatttcctaccacagtaactttgttttacccgtttcttaaaaaatcagcacttggattagcctccttccctgtctgcttggttacttggtgcaagtgatggcattcataaaatgtcttctgtatttatttatcttgtaattgttgctatcttgttgcctggatgattctctttttaatttgatatttgttattttaacaccagtactttaaagccatactagtactaatactaaagcaaatacttctggaaatagagattatataacaatgatttaaaacttttgattgataatgttctgatttgtagttactctttacaatgaaacattttggttattattttacaagtattgctttttcttgctcaggtatatttcattaaagaacataatgttgttgcaccatataaaatagaaagggtaagtaaagcttttcatgtatttccagcaatttatatagtcattttgaacaataaaattttgtgactctattaacatctttaatcaaatataataataatgagtatttaaaagcttcttacctggaagttataacaaaattacccaagggagccacagattttatttcaagagaattcaattaactttttgacttaaaaaaaaaagtgcctaaaaaaaaaacacccaaatgattaggttagaaattaaaatcagaatatgcattatttataagattatttactgggtgttactgagaatttatttaccagtacgttactaaaaaatttagttttaaaaatattctagaaatatttactggttataacatactcttatttgagaactcaataataatttgtaagtactcttaattaggtagaaactatgagtagacttggatacaatgtctggttccctgggacctttcacttaagcatagacatttcatttaactattctgtaatttaattctttatgcttcagcttaatacatagtagagggataactcctactaaaagagagtttttacaggacctaaggacagggctagtgctccttataatgacatccgagtgaattaggaaaagccaccatttgtgggcaaacatagtcccacaggctgaatctgaatttcagtttcaggccagtctgcaatctcttaggcggcacaaattgtatactcagtggcctctgggttttacggacaagaaatacttgcatgtgctgattagtcagaaagtataaatactgagatttaattattctcaagtggtgcttttggcattttgggcaggatggttctttattgtgtggggctgtcacttatattacagctctttcccctaacaaatgcctctcgtacactgctccccttgtttttgttacagcacctccacacattgacaaaagcctttgggggcagtaggaaaccctacccccaagttgagaaccactcacctggggtgcccttcctctaaaggctctcgtgagagccagctgaattgcatacctgcacatggttcattgaaagattatgtgaaaggaaataaaagtgaggttgtctgagtaaagaaaagctcttttgttccaatgtgaattataataccaaagcattctcagattaaaaaaaaaaaaagggtgaggtggaatgacagcagcaagatggcagaataggaagttctagcccctccttcctcctgtgaagacactgattcagcaacacatggacaaattccctttgtgagaaatctggaaaccagttaagaggatcctgcacccccggtgagcatgaaactaaccacatcaaagccggtataaaaatttgtgtcactatctggccatcctctgtcccacacagcaccacatgattgggaagaaatttcccagcctctagcttctccctggagagggaaagagaaaattggactatacatccagagttctgacttttcaggggagctgcccaagggactggcttctgtctcttctgtctcagagtacagatggaaccctgcatactctagatgcctggagccactgataacaaaagagagctgggtagcacgctactgcttcaaaggacctgtggtacagcagacatctagacacgagagacagcaaaggagtccaagcttctgaaaaaaatgaaaccaataaatttctctaattaggaatctacatgcataagtccagagaagacacttccatagaaaaggtttgagaggcctccagcatctctagccaggctgattaatgaaggtctctttctctgtatgaagccagtccttagagactggagaggtaattgtttttgttgttgttgttgttgtttttaatgtgtggatattagcacaaaattagagggagcacaaagaatcagagaaaaatagtccaatcagaggtacaaaataaattttcagaaaccaaccctaaagaaaaggggctatattaattacctgacaaggaattcaaaactattgtcataaagatgcttaatgagctcaggaaaattatgcatgaagaaaatgagaattttaacaaagagaatattaacaaagagaaaatataaagaagaactgaacagaaattttggagaagaatgtagtaacttaactaaaaagttcactagaggagttcagcacagactataaatcagaagaaaaaatcagcaaactggaacacaggtcttttgaaattatccagtcaggggagctaagagaaaaaagaatgaaaaagagttaagaaagcctaaagtactaatgacacaccgtcaagtggaccaaatacataatatgcgagtccaagaaagagaagagagagagaaagaaacagaaagtgtatttaaagagataatggccccaaacttgccaaaacagaggaaggagatggacatccagatttaagaagtcttccacataggaggacttcagagatgtccttaccaagacacatgataatcagattatcagaagtaagagttaattttgaaagcagcaagagaaaagtgtctggtcacagaagaaagcccccacaaaatgatcagatttttcaccagaaagcttgcaggtcagaaaattggatgataaattcagaatggtaaaaacaaaaccaaataaaacaaacaaataaaaatgcctgccaacaaagaacactgtatctggcaaattgtccttgaaaaaaatggagagataaggactttcccagataaacaaaagctcagagtttaccaccattagatctgctttataggaaatgctaaagtgagtccttcaatttgaaacaaaaagatactaaacaccaacatgaaagtgtaggaattataaatcttgctgataaaggcaaatacagaatactgtagtgctgtaatggtggtgtgtaaatcagtttaattctggtatacaaattaaaagacaaaagtataaaaaccccataactagaaatctgtgttaatgaatacacaatataaatggatgtaatttgagatatcattaacataaaaggagacaggtatctgaaggaatagtttttgtatgtgactgaagttaagttgttaacagattaaaagagattattataactgtaagatgttttatataagacccatggtaaccacagagaaaatacctatagaagatacactaaagaagagtttttccaatattatcatgtagaatttttatggtttcaggttttaggtttaagtctttgatccatcttgtgttgatttttgtataaagtaagagataaggatccagtttcattcttctacatgtggcttgccagttttcctagcaccatttattgaatagggtgtcctttccccactgtatgtttttgtatgctttgtcaaagatcagttggctataagtatttggctttatttctgggttgtctgttctgttccattggtctatgtacctgttgttatactagccccatgctattttggtaactatagcattgtagtatattttgaagttgaataatgtgatgcccccagatttgttctttttgcttagtactgctttggctatttgggctcttttttggtgccatatggattttaggattgtttctgattgacaaaggtattttgatgggagttctgtgaagagtgatggtggtatcttgataagaactgcattgaatctgtagcttgctttaggcagtatggtcattttcacaatattgattctacccatccatgagcatgggatatgtttccatttgtttgtgtcatctatgatttctttcaatagtgttttatagtttttcttgtagagctattttacctccttggttaagtataaccataagtattttattttattttttttgcagctgttataaaaggaatggaattgttgatttgattcttagcttggccgttgttggtgtatagcagtgctactgatttgtgtacattgattttctatctggagaatttactgaattcatttattagatctaagagctttttggatgagtctttagagttttctaggtaaatggtcatatcattggtggacagtgacagtttgacctccttttttccaatttggatgccctttcttttctgtctgattgctgtggctaggacttccattactatgttgaatagaagtggtgaaagtgggtaaccttgtcttgttccagttttcaggggcgtaggcaaagaattcatgactaagaacccaaaagcaaatgcaacaaaaacaaaaataaataaacgggacctaattaaactaaaaagcttctgcacagcaaaagaaataaccagcagagtaaacagacaacccacagagtgggagaaaattttcgcaaaccacacatccggcaaaggactaacatc

SEQ ID NO: 429 - DNA, 29691 bp, Homo sapiens
  source 1..29691: mol_type = other DNA
gctgaaggcgggggcggtgccatgacgcgcctcgggggcggtcctcgggcgcgcaccgctctcttacactcgggcctcagaagtccgtgccagtgaccggaggcggcggcggcgagcggttccttgtgggctaggtgagaggccaagggggcaaggagggacgccggtgccaggtcccgggcgcggggacttggggcagaggtgtgacggtccctgggccacttcacagactgcatcctggtcgcagccgttttcgcgaggcagcggcgacgccctctcctcagggggctccgcgcccctccctgcgccctgctggctgggggggcaagtttgcgggagcagcgcgctcttcctgccgcgaccccgcgcgtttcgggttcctgcccgggctggggctggggctggggctggggctggggctggcagagcccggaggcccggctgggtgaacgccttcagcccccgccccagctctggggttcttcctgggaccgtctctcgatccttgttttctcctcgataagatctcgacataagaaagagcctctggccacggttcctcccagtgctcggcgtttctagggctgtgcttaatcgcccttcttttgggttattcggaaagtcctggatttgaaaggaggaaggaagtgtttgtttattgggcgaagccttgacttttttggaagggggtggggagaggttgttcgctttgagctttttcctggagaagttggacctgagggagaaacgtttccagtagggtgtgtttagaaggaaatacccctgagatctgacccctgagatatgatgactcagagccttcctttcaggatttccttgtaataatgggaaagggaaggcatatggatgtggaaagttttcacttttaccaaagtggtgattattgagtcatggagtcttctaatgtgtccatttttgaaaggagtttgtagattatctagtctgtataaccacatacacatttactgttatcttttccattacgtacattgcttagaaagtacgctcggcttaccaaactcttaacatccgcttgtttcaaaaagaaatcgttgattaaagcaggaaatttaccttgaaaaacaactgcgggccttttaaattaaattgatttctaaatgtgtatgtgattagttaaaactcaaatttgttcagtctttttattttcctgtttaagattgagggataacggtagaaaatacgtccttttgtcttctgtgttaccaacttaattctataaaatttgtgccttaaatggtacataaatattataaatctagtggtttgtggcacagaataaaaagaagtagaatgacttttaaaatggtcagtaaatagtcactccattataaattaaatttaactttggagacattaacttttagttttgggcattataggaaaagatgtaaaaaggggaaaaagatgaacaaaaggggaagaatttgctaatggttgccggttaaatgtactgtttaattaaagagtttcttaaaatgagcgtgacaactattttccctgtttttgccagatttgggaactttttataggtattaaatgccaagagattctaaaaaagaaaagcgcccccaaataactttgaaatactttctacttttagcaatagttacgttagcatttattaatttcttttcaagtgctgccaacatgttttgtaaatgtattgtttttgagtaggtaaacagtcacttgtctcaaaatttaagcagcataaaaaggtataaagtaacaagtcttctggcaggcaggcaacttttttacatttcttaggtattctaggcaaattttatatctacacaggcaaacatataagctgtatttgcctccttgcttttaacacaaacgttaacattttatatactgcttcacattttgctcttatttttccagttagtgatcatattttggagcttttctaatatcagcatatatagctttcaagtcttttgctgttacactcagtgctgcagtgaatcaacttttacatatgttgcttcctttgtgcacatatatttttacacttcaggttttgagacctgaagtgatactgcagagttggagggtatctgaatttagaatttcggtaagataactgcaaacccactctgtatggtaattgtactagtttacgctcccattagtagtatgtgagtgtttctcaaaggcttgctgtcagagaatgtcaaactttggatttttgccaggtgagaaatggaatcctatgggtaaggattaattattctattacagtggacttcatatggacatacttcttaatggctgatcatcagaaacccccaggatacttattaaaaagaagagttcctaagtccttccgtgaaatctgtgtctgcccaggaagctgtttttataataactagagcctcgggtaatttggctctgatgattagccagattgagaaacattgctctggaagactgcttaggatatattaaattgtgtttctagacctcatgtatgagccatctggaatgcttactatctgggtccaatggacactttattttttcattttttagttttttttttttttagagatggaatcttgctcaggctggtcttgaactcctgggctgaagcagtcctcctgtctcagcctctgaaagtgctaggattacaggcatgagccatacggttcctggcctgataattttattttttacatttttcattcattttatgaatagtttgcagaagtgaaattaaagacataatgaaacacaactttactagaaattttaataactgcttcaacaaattatcactccaaattttcctggttttgaagatatcagtagttgaaataggcaacatcttcgaattcaactaattgcttatcaactgtcatataattttttaaaaaaatcaatgattctgccgtcctaaatttttattatcccaagatgtttttaatacagcggttcccgacatttttggcaccagggactggtttcatggaagacagtttttccacggacgggataggtggatggcttcaggatgaaactatatcacgaggagcgtttaacctagatcccttgcatgcacaattcacaatagggttcctgctcctgtgagaatctaatgctgccactgatctgacaggagctggagctcaggtggtaatgctggctcacctgccactcacctgctgtgggtggcctggttcccaatgggccaccgactggtactggtccatggcccgggggttgggaactcctgttttaatagcttagattaaaagaagcaaataaacattatttcaccttaaacagtcacatgtcatttttaagggaggccagttgtagttggtggtttgagaaggggtgaggttaataactcagaaaatgatgagtattgccattctaggtgatattatttggaaaactttgccagtgtttcctacttcattaatcagaatattgtgtccagagagcgaataaactagaattccaaaatatcacataagtatttaagttgagggccttcgttctgtacacatatttaaagacttcaaggaggttactcttatattgccctgagggggttgagggacaaatgggaaacttggtactgaggcagacaatatataaatacatatatatataaaatgtatgtattatatataacatatataatacatatatattataatacgtataatacgtattataatatattctaattatatataatatatattatttatgaataatatataatgatttatatattatatataacataatatatattgtatatcatactattatactatatcttatatactatattataagtatataagatatacttattatatactatattatatagtatagtatagtataatttataccatatattatatattatactattatatacaatatagtatatattatatacaatattataatatataattataatgtatattataatataatatagtattattatatattaatattatattatttatatattccaggaaaatgatattaattttaatcaatatttatatttaaatatttatatttaaaatatttatatttagatatttatatttaattatatataaatataaaatatataaatataaatatataaaatatatagatatataaaaatatataaatataaaaatatttatatttaaaatataataatataatgtaatataatatatattatatataatacatataatacatattatataatacatattatatatgttatatataatacatatgcacacacacacatatataatatatatatagccttttggtgttctgaaaaagtccgaaactatcccacccactgaaagatctcttaatagaaactatttgtgagttacttctgaggcctgagatacattgggtgtaggggcctttcataatgcatgaagtgagtcacagagattgcaaataatgtagtgtgggccaaacctggtcaaagggtatgtgggcagtaccatttctttccaaggaattaggccagtggaaaaaagctgtagtggtcaggaaggtttgatcaaacccttaaagagtagtgggagttttatcttcttagtgattactcagctcgaaggaaagcctagaaacaaaattctttagtttagttcgtacaataataatgtttgataagagttgcaagtgaggtaaaatgagattcttccactgatgtaatagttactttcagaatcctcttaaacctcattattggtcattataaaattccagccacaattagaaggatttcccagagttagctttgtggttcttgaaaaagggctgtgtttctaacagttcccattaggtcaaagatttaaatataatgtacaagtgacttaatggagcccttcagaaaaataaagcatttatcattttcctggaaggctttttacactgttaggttcaaaagtacggacttgccctaagaatattttgatcttttcaataagtgtttaaagatatcttatttactgttgttttgatgacatttgtcaaaatactaacatttggtatcttctttttaaaaagttttttttattggtgagacagggtctcagtctgtccacccaggttagaatgtggtggtgtgaccacagctcactgcagcctcaacctcctttgctcaagtggtcctcctacctcagcctcccaagtagctaggactacaggcatgtgctgctgtccctggctagttttttatattttttgtagagatggggtttctccatgttgcccaagctggtcgcaaactcctgggctcaagtgatccacctacctttttctcccaaactgttgggattacaggcactgcgcccagctacatttgatatctttgaggatgaggaaaaagtgtttatgctgtgtaaataaactaaattgagtcctgccttcaagtagtggagataaacatgtactagctataatctgaggcagagttgagaggagttgggaggagcaaataatatccaactgaagccttcaaagtcaccctcttttaagaagtgacacttgacctatgcctcaaggctaactaggattttgattggtggagaagtcctggaaggacattcctggaagagaatgcaccttttacaaaaatatgcaggcatggaagcatgtgacctgggtggcaaatagtcagtggtttgcagctacaacattttaatacgtggaaagaaatttaatgaaatgggtcaagaaagtaaaattgaggaatgctttgtgatttaaaaaacagtgagagttaattaagatcagtacacttaaagcaaacctgaaacttactttttcagaagtgtaaattacggtaatatttgttatttaaaaaaaattttgaaagtccatttttcttctaggcttgagttgctggtgtgtgaattaactcaagagttgttcagacaacttcagttaatatttatttgaagagaaacttctatggagagaaaagttaggaaaccacttcatttttcatgagaacagtgggattttgaagttagccaatgacagaatcaaaaaaagaaatcaaaaatagaaataatattagatggccaggtaacattcttttcagtgcattttggttgttgatattgcaacttgctttgcattttgtatattatatatcatatgcattttgtttatattgatagaatggctgaaagtttaaataaggcaaaaaattgtgtttagggaaaggctgctaggaaattgatcctttgaacccaaagaagataattcactttgttctcctggattaatacaattaaatcatatttgatagtgctctctcaagaatgtgaatttttttttttttctcacaaacccagattctgtttttcccttaaggactgtaccaggccactactattcaccattgtactggagattatagccagagaaattagaaaagaaacaaaagatgtgtaatagcagcaagaaggtgcaatagaaagctcatatgcttcttctccccacagaaatactgattcaataacaatacacacaccagacctctttgtgagaaatccggaaactagttaagaggctcctgcattctaggtgagcagtaaaccagctgcagtgaagatggtaggaaaattcatcctacttgctcaccatagttcattcccctggctcagcatggcatgagcaagaggaaactccaggctcctggtttttccctgggcggggaaagagaagactgaaacatctgtgtgacattcagatttttcagaggtctgcccaagggtctggtttttattttgcttgaatataagttctgacaggaaagggcaccaggttgcggggtcattgaaaacaaagttgacagtttagattagcaggcactcaccatggtccctccccctccctcagcatgaaaccagcaggagaaaatcctcaactcttggcttctccttggggagacaaaagagttggaatgtgtgtccagtgtttcaccttttcagtgggctgagggactggcttctgtcttgcttgtcttggaaagctgacaggggctggtgtattccaggtgcccaggagccactgagaacagaagacttgttgctgctctagaggacctatggtagggcagacagaggatgatacagctcagcagcttgtccctacgtgtggcatgaaaggtgttggagagagaatagtggagtatgtgtccaacattccagcacttcagagagctacccccaagggactggcttctgtttcacctgacttggagcacaggcaggagtggacatactctaaaagcccactgatgggaaagggcaccaggttggaggcctctgaaaacaagagagctgggtggcttgcagcagctccagagaacctgaagtaccacagacagatagcacagggagcaaaagattatgagatcctgaaaaaggaaacgaacaagttcatcttgagaatttatacacactggtcgagaagaagcatcctcaggaaaggttcaaaaggcatgcagaatctctagtcaggccgatcagtgaggatctttctctgtacagagccagaccacaaagactgggaggggtgatattttttcaaatgcttggatcccaacatgatgttaaaagacacacaaagaaatagggaaacatggcacaatcaaagagtcaaaatatccaggaacctactttaaggaaacacagatatcttcattatctcagaaggaattcagactaaccaccataaacatgttcagtgacccaaggaaaatgctgcatgaacaaaatggtatcaacatagagattgaaaacgtaaaaaggaaccaaacaaacattgtaacagatgcaatatgcttctttgaccaaattgaaagatttactagaggagtttagcagcagtgtttttcaaggagaagaattagtgaacttgaagccaggtcatttgaaattatccagtcagagaagcaaaaagaaaaaaaataaaaaaagaatgaagacagcctagagtactaatgggacagcatcaattttatcaatgtagattgtatggaagttccatatgttggaaagagaaaggagcaaaaagcttatttgaagaaatactggccaaaacttcccaaactgaaggaaggcagtggacatccagattcaagaagccaaatggactccagagtagaacaatccgaagacatctacatggaaacacactgtaatcaaattgtcaaagaattttgaaagcagcaggataagaacaacttgtcatatacaaaggagattctgtgggactctaagtggatttcttagcagaaaccttgcaggtcagaaagaagtgggatgatatagtcaaactgctggaagaaaaactgccagcaaagtactgtatgtggcaaaacttttctttaaaagtaaaagagaaataagattctcaaaatctgagagagttcatcaccactatatctgacttaaacgccaatgggagtctgttaaatggaaacaaaagtatgttcaacatgaaagtataaaattaaatgataaagctatggacaaatagagacctgcatattattgtaatggtggtgagtaaatcacttatttctgatatataagtctaagacaaaagtttaagtgcctgtaactataaaaatattaatagatgcacaacataaaagatgaaatttgtagcatcagtaatgcagtatggggatggatgagaagaagcagtattgtatgcagttgaaattatcagcttaaaataggtttattagaagatgttttatgtaaactccatggtaaccacaaagaaaatacctatagaaaatacacacacacaaataaggaatcaaagcatatctattaaaaaaaaaaacagtgaaacaaaaagcatgatggcaagagaggaaaggaaggacaaaaaagtttcaagatagaaaatcattaacaaaatgtcattgtaagtccttccctatcagtaataactttaaatgtactaaactctccaatcaaaagacatagaggggatgaatggattaaaaaaataaaaccaagagccagctatacccagtttataagagactcacttcagatttaaggatactttttatttttttacagaaatggatatactgattctaaaactgatactgaattgatagggatttagaatagccaaaacaatttcgaaaaagaacaaagtgggaggattcacattaactgattttaaaacttaatacaaatgtacagtactcaagaatgtgtggtactggtataaggatagacatatagatcagtgaaatagaattgagattgcagaaataagtgcatacagttatgatcacttttcaataacgatgcgaagacaattcaaaaatgttattttcaaaaaatggtgctgaaataactgggtttccacatggataataatgaatatggatctataccacacaccgtgtacaaaattaacataaaatagatcaaagatataaatgcaggaattaaagacataacattttttgaagaaaacataagggtaagtcttcataaccttgagttgggcagtagtttcttagatgttatatctaaagcataagcaaccaagaagaaatatagattcaaatttgtcagaattaaaaacctcatattgcaaaatgcactgtgagaaaaaatgaaaagacaatctacagaataagaaaagtatttgtaaatcatatatgatagtggtctatgatatggtctgaatgtttgtgactgtgtccctccattcatatgttgaatcctgtaatcatcaaggggatggtattagagttaccatatgacccagcagttgcatgcttagctatattccaagagaattaaagatgcatttattaaaaaagtatataaacttacatattatttgctaacaatgcaaatgctcattggcatttttaacagcattatttataatagccaaaagtgcaaataacccaaatgtcatcagctgatgacagcataaatataatgtggtatacatacaatggaatattattctgctatgaaaatgaatgaaatactgatacatgctccaacacagatgaaccttgaacatatgctatgtgaaagaagccagatgcagaaggccacatattctaagattctagattaagtatccagagcaggtaaaaacagaggcgggaaagtgtatgttgcctggagctggaaggagggtagaatggggaggcatgagttttcttttggggaggatggaaatattcaaagataggtagtggagatgattgtagaagtctgtgaatatactaaaaaccattgcattatatactttgaaaggctgaattttagagtgtgtgaattaaatttaaaaaaaaaactatctcatactgtccaactaggagacagagaccatatagtgattttaacagtggaggtttaatacacagaattactagttataacatgattgaagaaatagaaattgacttgtaagaagtaaagacaacttttaagaatactgtaagagcagacttaataagtagccactaactctagggctgttcccatactggggctgagattcaggtctggttgaagaggggacagatgtcactggcagatgctgaagttgccggataccatgcttctggaacttattctccctctggcattctgaaccttggaatttgctgcagaagccacgtgaaggggttgagaaagctgctcagggagattccttggtggtggcattctgctgcagagttactcaatagagtgctggggtgagcttctgcatgcttgtgaaactactcctggcaggagtctggctagagtagtacgttggaaccatgaagagaaaagctcttcctcctacagtgtacctccagttgcctctactgacaaggcttaacatcatgccagctggtaacagagcaatgttgaaagagctcagctccattttgggagagaaagcaataagaagtggatttggaaatgggaggtaataaattgatacctgaatcaagaatcttacgttaaaccacataccagtttagcatatattctgttttattgggttgagtgaaagtatcaggtattcatctcaaaacagctaaataaaatttaaaatatgcattcatataatacatttagagaattgtgttttaaattattacaaaaagcaatttataactaaaaaacatacttctacttaatacagaagtattttaaatgaaaagtaaaaatttccctcttattcctcactcctttaccatctgtcttctgaagaaaaatctgttagcagttgatatagtttcttctgtatacatatatgtgtgtatatatttttcttagtaatagaggttcatgtattgatactgcatatgatctgcttttaggcttttattgttagaaggaaatgtagctgtgtaatgcccaagggcattgtactaagggtagtttcctagtcctggctaagttgcaagtacttgtgtaagttaggagtaagtcacataactattctatttgattttctaaatttgtaaaatgaagggacttttacttgaattttaaaaatcggtgatggatatagttcaataatactattaggggaaggagaggtagtttggtaattcttaagtatcagctaacttttagtatggcctatatattcttattttttaatatgttttgcaatttaaatgttttttattgagttaaatagttctacttgtttatgtgtctgtggttagctgtgtatactatttcaatttctatgacattagagtaataaaactttctttttttctttagaagaatcctgcaaaaatgtctctctatccatctctcgaagacttgaaggtagacaaagtaattcaggtatgatagtttaaatacttttgtcaaaacaaacacagtaacatgcattctacttataggtgaaataaagcaagatagctaaatagcagatatatttgttcatttttacacttcataaacctttttttagttttattaattgcagactgaaaagtttacagaaaaattagcaattttttttttcatttcactgtgaattaataggcatgagatttttttaattcgacttacactttttacatttctggttaaaatttaattatatgtaacatatttgagttgacaaaatatactccaattttgtagatattcatagttttgtataaaattggtatatttttcttttggatctttaggtatgaccactctttaattctatgtctcttaactgaagttaaaattacagaaatagtggcgtacatgctgcttttagaagagcagtcatgtaagagcacagggaaagtgtagtgatttctttcctttgagagatgagcagcagacatttcacttgttcattctctaaatgactgtgtagagattgcagtatttctaattgcattgagttgaaaatttttatactcctttgtataagtattagctttgaagacaaatgcttctgcttaagaacaaagtgaggaattgggaccaattctggctaattgggaaatttttggtaattattttaattgggggtaatttgtagtatatgatgaatttgtttacggttagctttcaacttgatctcttatcaatttagaatttcttcagccgttgtttattgttttaatttgacaagataaacgaaaactccttaccctgaagatcattttattgggtccctgtcttcaatttactagaaagtgagatattcaatttacttactgataattgaattatgaacaattattttctatcatagatccagtatggatattaaaatgaggtttgtaaaatctctaaaatctacagttcagctgccaaggctttgatgcctcaaagtttcaagtggcctattcagtcatcttttacatgttcctatcacttctttagtattttgtcagtattttcttcatgtggtttttatttccacatagttcatctaaacaagcacttttctttttaaaaggcctttatctgaaatatttagctttccagaataactgcttagccattaatatgacatcaatacattaactgataaggatttttagatggacctgtaagaatgactaatctgttctttgttttcatcctttttttgttagctttttatggaattgaatgtaaattcaccatagtcagatatgagctgaggcttttggttttgaaaacagcagcagcagaagagttgatattgacaaatattggaatgaaaaataaagagggctacaatctgtatcatgctgccctctttaagcagaagtgaattacatagatatttacattaaagaacgttttatgttcagagcagaaagcagctgggagatagaacagtgaataaggagtgggaaacatggttcttttattacccctgaatttaaaaatattcctaatttagccattaaactctttggctgtttttgttttgttttgttttgtttttttgcatcattttctaaggtggatgatactcatgtttgtttttattcttaagattctcctgaaacggtattatgaaggaaggtagtattcattttctcatctgctggcctttaacaccacagcaaagctaaattacagcaatgaaccaaccattcatattttgtaaactattctgcagtagccactaggctgtggcttttagcatcatacagtccctagacctttttctctccattccaaatcctgacaagagcctgtggtttcctctacttatgcaaagtaagcttttaataaataatgatatacagaaccagagcttatcagtttcctaatatggtgggcagaatttggcagcagtgacgctacaagcatgttttttccacatcctttctgttaatggcagaaacaataggccctggcatgctccttggggcaccccaacccctttttttagtagtgtcacatttcaaagtaagtttgaaataagtagctacatttaatggtttacagtacttaaaattgggttacatccttttgtttcatttttactgcaaataacataattaaatttaactttgcagggagctttctatatgtattcttcagtattccttggattaaaaacaatagcaatgaaagaacagaaattcataactacatacaaaggagaagtattttaaattaataagctgtgttttagagcaattttagattcacaacaaaattgatcagaaagtacagtataccttctgtcctcacacatgcacaacctcccccagtatcagcatctgcaccagagcagtacatctggctcattaatatcacctgaagtctacatatttacattacatcacattagggttcactgttggtgttatatgttctgtggattttgacaaatgtatagtgacgtgtatatagtcatgtgttgcttaaagacggatatgttctgagaaatgcctcattagacagttttgtcgtgcaaacattatagagtgtacttccacaaatgtagatggcatagcctactacacatctaggcagtatggtatagtctgttgttcctatgctacaaacctgtatgatcccacctgtatgatacagtaatactgcatgttactgtactgaatactgtaggcaattgttacacaatagtatttgtgtatctaaacacagaaaaggtatggtaaaaatacaatgtaaaagatttaaaatggtacatctgtataaggcacttaccatgaatggagcttccaggactagaagttgcgctgggtaagtcagtgagtgagcggtgagtgaatgtgaggcctaggacattattgtatactgctgtagactttatcaatactctatacttgggctgcactaaatttatttaaaaatttttctttctcgaattataaattaaccttagcttcctgtaactttaattttttaactttctgactcttgtaataacatagtttaaaacacaaacattgtacagctgtataaaatattttctttctttatatcctgattctataagcttttttcctattttttaaatttttagtttttaaaaatcgcttgtaagtttgttaaaaactgagacacacactcacattagcctaggcctgcacagggtcaggatcatcaatatcactgtcttccacctccacatcatcccactgaaaggtcttcagaggcagtaacatgcatggagttgtcatttccaatggtaatagtgccttctggaatacctcctgaaggacctgcctgagactgttttacagttaactttttttgtaagtagaaggatatactctaaagggtataacacaggaaatacataaatgagtaacatagtcatttattattatcaagtattatgtaccatgcataattgtagatgctatacttttttatatatgactggcagtgcagtaagcttatttacaccaccatcaccacaaagtaatgagttgttctgtgtgacggcagctatgatgtcactagacagtaggaattttttagctcttttataatctcatgggaccactattgtatatgtggttcatcattgaccagaacaggcagcacatgactgtataccattgtagcattagacagaataggttcactgctcgaaaaattctttaatgcctgttcttccttcccttctagaaactcctggcaaccaataatttgcttttgcttttgtgttttctttagcgtcaggatgtcgctctgttgcccaggctggagtacagtggcacagtcatggttcactgcagcgtccatcctcctgccacagccttctaagtagctgggactacaggcatgcaccaccacacctagctagtttaaaaagaaaatttttttttcccccaaaacggagtctggctctgtcaccaggctggagtgcagtggtgcgatcttggctcactgcaacctcctcctcctgggttcaagcaattctccctgcctcagcctcccgggtagctggaattaacaggcatccaccaccatgcccggctaatttttgtatgtttactagagacagggttttgccatgttggccatgacaaacatgacaacatgccatgttggtcagttgaactcctgacttcaggtgatctgcccacctcagcctaccaaagtgctgggattacaggcatgagccactgtgcctggccaaaacaattttttgcataggcagggttttcctatgttgcccaggctggtcttgaactccaggcctcaagcaactctccagcttcagcttcccaaagtgctgggattaaaggcctcagccactgtgcctggcctaatattttattatctccacaattttgcatttttcaaaatgtcgtatagttggaatcataaagtatgtagccttttgagattggcttctttcacttagtaatatccacttaagtttcctccatgtcttttcatgtctttatagttcttttttttttcccagtgccgcacagtattttttttgttagacatgattcaagaagtaatataacaagccactagctccttttagctaatcggtggtgaaagaactttcaaagttcaacacatgttcaatttgtggattgttatttataattataaagattttcatgctgtattttgtttaaatctagaatgtttaacaaattatgaaataataaatattaaaggatgactcaacaagtatatcagaacatataattttagtaccattcaaagctttcataggctttacttatttaaactaagctttcatatctccaagcatctttgggaatactcttgacattgattttagggctaggttgagatactactatgaacttcatttttaaaatgatacatttccaataaagtaaaaagttggtagagattggtcatacaacttattaccaaacttgtctctaatgacatatagctatttcagaaagtcagatctaattgtaaaggataaagtatttccatcagtgagatacttcatatgatgtaggccatcaagacagccctgagaagaggatacttgagcatgagtagcattgataaatgctagagtgtcagagtgtgtcagagtgattttggcaagtttgtttaacagttacaaattacattaccttgtcatcatcgatttatgtcagtgataaactgtgctattttcataatttctgatattttaaaagtatttagcataaaccccttcctatacttgctgcaatgaagataaagatgatttcagtgggacatgcttagtattaattttttaggtgtttttctgatatgtgacttttatatgaatatgggtaaggttttttcttatgcaaataaaatatttttacttggactaattagtaaaagaataatgaaaatgtaaaatttattcattttagaatgcactttgaaaatattaatttattgtggcagcactatgaagtgctggttataagacatgtagaatggtacttctacaatttttttgtgatagccttaaaagtatttagaatatcaaatatagttttgatttgcagatttcctttggaaaatgtattgctgatgtgtttgaaattaaactttcttacataaatcttcattgttttagtttctttttggaagtactggatttagcttataaattatataagaatataaagtaagtatagcatattgttagaattttcttcttttctttttcaggctcaaactgctttttctgcaaaccctgccaatccagcaattttgtcagaagcttctgctcctatccctcacgatggaagtaggtttatactttgagttcattctctgtgaacagaaatattgttatcttcttttgctcatataaggaatccaagatttttttttggacaggctgcataaaattggtagttaagctcaaatagttatgaataagaaaaaaaagtttacttcaaaaaataaccctttttctaattaagatagtgaactgtggatatggggatgtatttcatggcttaatgaaaattaattttagactgacttgtaaatccctaacgtggctgattcatttatgaatgaattatatatatgaattcacatatgagaactatatgaattcacatttaagaactatcatgctgctgctgttgaactttctgaattgtcttctgtctttcctatgggagcttctgaaatttccaaccacctcctctttgggaagcctcctaaatcttaaggcctttattcattctctgtatcctgtctttggtccctttttcttcaaggttcagagggattcaggacagagctcctaaatactatgacttaagatacaaaataagtgttaaataagtttttgtggcctgtcattttgtcttacaacagtttataacattgtgcctcatagaaaattcattttaagtcacagataatttaagtctcatgtaaaaaagagcttttggaaatagtatataactactaataagtgaaataatgttaatatttaaaaataccatttccaggatttcattggaatgtggttaaaattattaaaatgataagacactaaataaatttacaagcttccaaaaaaaattgttcataagaatcattccatatccctgtttacagaatgagttataaagtagctgacttgacaaatagatattttggtcagttgttctgaattggagaatcagtggcattcttactaaattcctaatcaagtaagtttattttaagaaacaggaaaggcaagatagtttatttggaaaagttatttctacttttgagtgtttaggaatctctggttgtttcagttcagatgtcttcatattttacgaattttaaacattttctgtattttccatttctcattattacagagatggggagatgcctttccaaattgctactttaaattcattctagattttataacttaagtgtaattttgttaatacgcagaagcccataatgagagaagttttcattttgtgtattctgtaagtgctttttaatttattcatttactttttagatctctatcccagactgtatccagagctctctcaatacatggggctgagtttaaatgaagaagaaatacgtgcaaatgtggccgtggtttctggtgcaccacttcagggggtatgtatagtgtaattaattttgatttatataaaatcatactttacatgttagtataagctttcctctttgtggctaactcacagatatactactagcattgaacctcacttctcagaaattttagacttccttttggatatcatttcttatatagtctacttcattttgtgctacactgttttgagtttattaggacttagattcagataccttttactagttcgttctcctttgtcttctgcatttagtcagttactaagtcctattgattctgtttctgtttcttgtattcattttatctgttttttatccattctagtcctactataaccatattcagggtttctatacttctagccttcattattatagtactctcttaaatttcctctagtaacttatttcagacagtactaagccgctgctaagttaatcattctgaaatacacatataggtctatcatatctttgttgctcataatcttttttttttttttttttttttttgaggcatagtctcactttgtcacccaggctggagtgcaatggcgtgatctcggcccactgcaacctccgcctcttgggttcaagcaattctcctgcctcagcctcccaagtagctgagactacaagcgcgcgccaccatgcctggctaattttttgtatttttagtagagaccgggtttcaccatgttggccacgctggtctcgaacacctgacctcaggtgatccacctgcctcgacctcccagagtgctgggattacaggcatgagccactgtgcctggcctttgctcttaatcttttaacattctttttgaaattcaaagctccatgtaattagactccagagtctagcttaattataatgggtctgataaccttttattaaggttattgctatgaccatagcactttgtaccacttattataattgtagttaaatctgtgtctgtcttgttgccatatcccaatgcatatacagtacctggcatttatgtatttaccaaatatttattgaaaacttgcttgtgttagtggtgatgcagttgggaaaacaaataatagtaggtattttaagaggttgaaaaattgaaaaaaacataaatggacatagatgtaattgcagatagctagctgcttctcctaggactgggataacacaggagagagattggagttagcagaacctagaagcttgaggaagagccccacggagctgggactcagaccttggatgaggggacactactagtgcctctgaggggttgtaatgaggctggttctgggagtgtcagtaaaagttgcagactggaaccaactgctgctgccagtgtaaagggccaggcttacacagtactgacaggagcaggaggcacacaggaaggaatgaggtgcttgtcattccagtcactgacaaacgaaattataatttgcacagttaggcccagcatcaccaagtagagtctagaagggtggatttggagctgacaaacagtagtttaatatctgttaccacctactcctttgactactcagtatatccacacacttgtacaaacatttgaatttcatgtgacaacaacaacaactttatagtttctccttgaaagatgaatttcttcataaaatcaaagttcaaactttataaagggctccataataaataccttaggctttcatggtcacttatgatctttatcacatattcttattgttatttgtttatttacaatctttaaaaatataaaaatcatttttaactcaggggtgtacaaaatgaagccatgtacccttcaatataaatgaagttgctctcaccctttctctagaaagggatgataccagttaatgtggccatctctgggcagtcatcatggtattgattactatatgatactaattacccttctaagtattcacattcccaacagaatatttttaatttaaaggcaaaagtgtaaagttaaccactaccaacaattcatacataaaggtaaaaagaggtatagaggaacagaaagattaattgctgtatttacagaaaatatacaaatacaaagaagaacagagtcatagctgctctgattcttattttagtaactgatcatgaggctgtagttaaaatttagaacttcctttgttcactacatggatgcttagatccctttgcccaaatacctagaagggtgatataaccttcatttttgtgtctgcatctccagggttcttcagtgcgccgccttttatttttcttctgttctattttaaattaatttgttgctggagatttctgttatctcttcatatctagtgaatttttcatttcacatattttattcttcttctcttgatgttccatctggatcttcctctccccagctttattgaggtataattaacaaatataaattgtatatattcaactgtatatatcaatacaacttgatgtattgataaacacacacaaacacacattgtgaaatgattaccacagtcagggttattaacgtatctgtcatctcacatggttacatttcttttggtgtgtggtgagaacacttaagatgtactcttagcaactttcaagtataccgtacagtattattaattatagttactatgctgtacattagatctccagaacgtactcatatgataactgagaaagtttgtacactttgaccaacatttttctcattctttgccctgcccaaccccagcccctgacaaccttccttctactctctatttctgtgagtttgactcttttcagattccacatataagtgggacccagacagtacttgtctttctgtgtctggtttatttcacttggaataatattctctacatttattcatgttgtccaaatggcaggatttcctttttttagtggcctaatattattccattttctttttggttggggaaaggttccacttaaaataaaccagttttgattaggaaaactggaaagaattagaaacttgaaacatggtatatgacacaggtccctaatgtaggtattctggggcattctggtttgtgcatatgatttgttaatccatagatggttactagaggggaagagacataatagttgactgtcttatgtgtgccagtgcccatacaacatgcacttttcatttaatcctgtcagtaacagtgaggtaagaaatttgccccttttatggaaattctgaaaggataagtagattgtcaaagatcgtgacatcatgaaccgtctggaaaatgtttcaaaagtatatggcctttaagttcaaagataataaatttgagatgaagacaagccagtataccggtgaaacaaatgccagtgaattcaaagggcaacagagagtcattgaatctattagagatgatatgtgtgggaataagttagtgaagaattagtagtagagccagtgccattttcatagacatcaaactttatcggaaggaaattatttgtggattgctttttggaaagccaaaactgagtaagttccagttaattatcattgtttttttcaaggagagtgtttctagatattgacacattgtatatggttttgtcagcagttggtagcaagaccttccagtataaactatatggtggctcctgtaactggtaatgatgttggaattcgtagagcagaaattaagcaagggattcgtgaagtcattttgtgtaaggatcaagatggaaaaattggactcaggcttaaatcaatagataatgtaagtattttaaatacctatttgaatttgtctaaatctcttacataataagtgattaatgttaaaataatttgaaatggaaatgctttaattataatagtgcatctgtagttgagaatattttaaatctactaacttaaatgttttcaattggggatgttctattttgcagaggcatagttgggacttctgaccacattactttgaaagatgtttcttttctgaatattctaactggaatacatttcactggcctacatatattatagtttgtataatagaattgtggcaattaaatagagcagatgtgaaggttaagaaaaaactttccaatgagagtcaatgtcagtgtgcctttttttttttttttttgagacggagtctcgttctgtcgccaggctgcagtgcagtggtgtgatcttgactcactgcaacctctgcctcccggatgtgtgtgcatttttaaaccaaatgatcagtatttaactggtgagatggtttttgcagatttgttattaacatccttcacatttgaatttaatatgtcattttctgagtaaaaaaagatggaatattctttctaattagggcagcctttactttataattacctctcaccttaacatactgaagatatgaaacagggttactctctgaggaaccatttataattgtgaaggacatgttgagtctttaccccaatttatagttttagccattaccttattggattcggtttcagtcatacatctctagcttagtgcatccagcctttccacatagaaaattataagtgtggtgcactgctgtaaatggaggaggctgatcttggcaggaggcccccgccctgcctgcccacccagggggctgaggccatcgatgatggccttgctcacttgtatgtcactcaaaatacatctgcgtgcttagttgggatgctctgactttgctgccctttctccagaatcttcagggaatagagtatactgctgctccttccgccaggattgctcttgtgttctttcctctgtcctaaagagaaaagatacttttcataggccccttggccccactgtaggtaatagttgcagtggatttgttcacttggccaaagggcatttgttcatttatggggtgctacctagttcttgcttatcattctacaatgtaacagatgtgtgatagaaatatgtgacctagcttaggattgtagaagtagatgcacttatattttaccaggcttattcttcttttatacttacctatttatattttgttcaacttctgattgagattttacataagtaaaaatatccatgtgagtgtagttattggttaacagtatttgagttttctgtatttatttcattgtgtgttctttataagcctgtgcatgtggatttaatatgcccatctttttagtctaacaaataaactttaatcttacttgattatacacaatttagcaaatgggtaaaggaatgcttcagctcaaaaggtagaattatgaccttaaactgtcatttattaagctgtaaaagaactcatcaaactttctaacatgtgactcgcttttcccctaaatatgattatgtactgataatttggtattctatcagactcagacgcttgcatttattaaagttgtcctactgtattttccttagttttgtattccaagttgaagggggggattgtggttggtcaggtgggtcatgatttggtatagaaattgccattgaaatctcacttttttgccttattctttggagttgctgtcttgataaatttttcagtttcttttgaggtgataacttaatatactcatatagtttttcctttttttctttttctttcttttttgtcactggggtagagttttcaacataaacagttgtttcctaattttccagcgtttaaaaccgtatcatagtagtggtaaatgacaaaaattattttcttattatctagggtatatttgttcagctagtccaggctaattctccagcctcattggttggtctgagatttggggaccaagtacttcagatcaatggtgaaaactgtgcaggatggagctctgataaagcgcacaaggtgctcaaacaggcttttggagagaagattaccatgaccattcgtgacaggtaagctgttactaaacagctcaaatgaaaattcaatactagttttccatttttttgggctttcagagtttgtgagtatattattttgttgcagaaaatgatcaaatgttattgatgagccttatagtcttgcagttgtgtggtgcagatttttcttacattgtttttaaagcattctgatacgataccttatttcagagtttataggacaaatctctctagaaaatagaaaacgtatgttggagaagtaactgagttgcagggcatctctgggctcactttccaacttactgcttagatacatccagcctagggtgttcacacacagtggtccctcattgtgagggtcagagcccatgcagacttccaagtagtatgggagttctgaaaaccgtatcaagacttttgggtagttatgaagcagtagttttcaagaacatggaatattctatttagcagctcattcatttagaacttaaacatttagcacatgaaataggggcctccatttattttcttgtctactccatacccaattaagggtagacgtatattgcattgttacagtaagctttgagtttttgttccttctcagtgaaacttctgttttatctttgtgtttccagtttctcattcagtttaggtatttcgtaaatgtttcagatgaatgtcctttttactttctatctaagcagagtttcaaagagtaagttgtactaacaggaagaaatgcctcttctgaatttaataatgtaaacacaagttgatcctaaaacccttatgataacatgataacagagtttatagagaatcaagcaaatgtgactgctataacaactctagagggacagctggatgccttttaataatagctgcatgcctccctttccaaaggggcttgaggaacttaagtcttactgctgctctagtttttcttttcaaagatagcaatgtataaaattttcaaaatcaagatgtgagaaatattttaaaggttttaaataaaagaaatagtcctaaaaatgatttggctctagaaaataccaaaagttaataaaaaataaaaattatctttaccactgtgatttagttaaaaagcctatgtcattcttaatgctgtaaagtctaattataaaagaaaaacatattgataaaaccatataaagcagttgtcttttatacttaaagaaggaaatgttgattagtaaatcagtcaaaccataatgaataaacttaaaaaaaacttttacacaaagatgttccgtgaatgtataaaatcagagccataagttgctcttattagaaacagtgtttattataaaagtatccaatatggcaacatttatgctatatgaaatccattaaaatgtttagcttagaattaagtttttaattgaaccaattatgtttgtaggccctttgaacggacgattaccatgcataaggatagcactggacatgttggttttatctttaaaaatggaaaaataacatccatagtgaaagatagctctgcagccagaaatggtcttctcacggaacataacatctgtgaaatcaatggacagaatgtcattggattgaaggtaaggaacagactttgtgccatgttctgctgcagttttagaaaatgtctgtcttttgactgtatttaggtggcgctgttttcatattgacttaggtgggagatggggaacgtggggcctgaactcttggtctggccagtcaccggaattatttgggctgtcatctagaactacagttcctataacaagtgggctggaataaatgatctcagaagtacctcacactagaattctgtggaaatatgggcaacaaagatttagaatatgaatagtggcccagcatttctcaatccaggaatataaggaaatgaataatagttttggttcatattaatactttatttttatagtttttctcctccacaaattcctaaataagtctgtcttaaggtcaaaaagttttaagcatgacctcctcatttcatagaatttgatttagaatacacagttaataagaggagatggtaatattgtatatggggaaaattatctaatattcagaaaggaaaagtttttttttggttaaaatattcaactcagtttacttaagcaatttggttactagctgtaaaatagtgtacaattaaacttggtaagaaatactagaaaaaattagaaataccaagacatatattttgtatttctttaccaagactggcatagttttgtatttattaaataaagcctctgtggaattaatttttaatatgtgtttttatcaggactctcaaattgcagacatactgtcaacatctgggactgtagttactattacaatcatgcctgcttttatctttgaacatattattaagcggtaagtaaacaattcctcaacttaatgcatatggtcatgtgacttaatataagcactatactttaattctcagccctttggttcttttacccaaggaatggatactggtgttttatctagaaatttgaagtaagttatttaaatcagagggttggtaaggatgagctcttacaacttcccaagtacggaataaaattcacatatactttcctcagtttttataatgcctggtagaaaaaaggtatgcaaggagaagtgggcatgctttcagctttcaatttgcagtgcaattgactgcagttgcactgcctaccacccctctgctcagtataaatatagttgtggtggttcgtaatggagaattcttgctggtggaatgctaagagtaagtttcccttctctccagaatctcaagaggcagatagacaagtgtggtgtgttggtgctatctgtgctcaggaactgaggattagaaagccaagtgatcagaactgaaaagaggcaacaaggttccttctatagagcttttcatatcctagcatctaccatagctgtttttgtcaagccagcttggaatcctttcagaagctctattatgcatgtgaaaatgagatttaaaagattcataaacataaccattgtaatgaaatttttgtgttggcttctggatagaatgcacctagctacccttggagggggtaaaaaggagttattgtcatgactaatttttctagggttctcttttcttaaatcactgatggatccctctaccccaactcatcacagccttgtcattttctttctgttttttaaaaatcaccatgtttaatgcacaggaattcatttgtatcctaacttctctagccaaatacagatagtctttcccactgagtgtctgtcaacaactagattaccagagatgcttctggactcatttaaaagatctttcccttctctccattcatatttgatgctaacaggtgctaaattggaattgggaattttcttggattaatgtagcattttgaaaaacaaaaaccagaatctcggtatataataaaagtacctctcttgtaggatggcaccaagcattatgaaaagcctaatggaccacaccattcctgaggtttaaaattcacggcaccatggaaatgtagctgaacgtctccagtttccttctttggcaacttctgtattatgcacgtgaagccttcccggagccagcgagcatatgctgcatgaggacctttctatcttacattatggctgggaatcttactctttcatctgataccttgttcagatttcaaaatagttgtagccttatcctggttttacagatgtgaaactttcaagagatttactgactttcctagaatagtttctctactggaaacctgatgcttttataagccattgtgattaggatgactgttacaggcttagctttgtgtgaaaaccagtcacctttctcctaggtaatgagtagtgctgttcatattactttagttctatagcatacttgcatctttaacatgctatcatagtacatttagaatgattgcctttgattttttttttaaattctgtgtgtgtgtgtgtaaaatgccaattaagaacactggtttcattccatgtaagcattaaacagtgtatgtaggtttcaagagattgtgatgattcttaaattttaactaccttcacttaatatgcttgaactgtcgccttaactatgttaagcatctagactaaaagccaaaatataattattgctgcctttctaaaaacccaaaatgtagttctctattaacctgaaatgtacactagcccagaacagtttaatggtacttactgagctatagcatagctgcttagttgtttttgagattttttagtcaacacataatggaaacttctttcttctaaaagttgccagtgccacttttaagaagtgaatcactatatgtgatgtaaaagttattacactaaacaggataaacttttgactccccttttgttcatttgtggattaagtggtataatacttaattttggcatttgactcttaagattatgtaacctagctactttgggatggtcttagaatatttttctgataacttgttccttttcctgactcctccttgcaaacaaaatgatagttgacactttatcctgatttttttcttctttttggtttatgtctattctaattaaatatgtataaataaagttacattttagtctgtcta

SEQ ID NO: 430 - DNA, 3612 bp, Homo sapiens
  source 1..3612: mol_type = other DNA
cctttcccgcgcgaccggcgagggaggaagaagcgcgaagagccgttagtcatgccggtgtggtggcggcggcggagactgcgggcccgtagctgggctctgcgaggtgagagtgatcgcggtcttaggtccaactcctctacgtgccgggttcctccgccatatgggtgcccagcgcggcccctgtcccttccccgggcgcagcggagcgggcggctgctgcgtaggccaaaaggctacgctcccggtgcccccaaggcccacgagctttccccacaagccatttgcgcagtcgcgttttgtgagtaaccacctggaaggcttagctgacctttctccgtcaacaccggttcgctgtcctctgctcagaaactgggcaagggccttctgacttaaggaggtgcctgcaagggaccgtcgggaggcttcgtgctccacccggtcttggccagatctctcttgtgtccccagcaaagttgtgcgtgcggccttggcggtttcaggctcttaggcagcttgttttccttaaaagggagcgttttataaataggaaggtgattatcccttaggtgtcaggacgacccttagttaaccgtactttgtgagtggctttgaaactgtaatgagcgcagtttactgagtcattactagtctcgacccattcgtagagctagtcagtatttgttcctggaccttccttcgtaatacgcgctaaagtcaaggcatggaggttggagaacaacacgtgcaagtataggaggcccttaggctaaatgcctgctacacacggagatgcttgtatttacatagagatgtgtatttctggacataatacagaagaaaccggtcagcaactgggaggctgggaaaacctgttagctattcagaaacttttttttttttttttttgagccagagtctgttctgtcgcccagggtggagtgcagtgacgcgatcttggctcactgaatcctccacctcccggggttcaagcagttctctgcctcagcctcccgagtagctgggattacaggcgcctgccaccacgcccggctaatttttgtatttctagtagagacggggtttcaccatctggccaggctggtcttgaactcctgaccagcctgaccactcgtgatccacccgcctaggcctctcaaagtgctgggattataggcgtgagttaccgcgcccggccatagaaacaaattttaaaatttcatcagtgagacttcgtataggtttttttttttcttcaaatttgaaatgcattgcttcgtctgaaataatcattaactgtcaagaagacgaatgtcatggcttatccttgaaatattttaggtattattatttttgaggcttcagtagcttgaattctgttttcactggtaagtgctgggacttctaaaaattttcaaactaaataattgataaaattggtagtgcaggaaagttctgaagcataatacaaaagaatccaccgatacatttgagaactataatattaccaatactagggtatctattgtttacatttccctgcttcctattcataggtacccaccatttggaattttgtgcccatcagtcttttgggttttgtgggggaggggggtggtgtggatagctttgtggggttttttgttgcttttttgagatggattctcattcctgtcgtgcaggctggagtgcagtggcgcgatgtcagcacactgcaacctccatctcccaggttcaagcgattctccttcctcagcctcccgagtagctaggattacaggcacccaccatcatgcccagttaattattgtatttttagtggagatggggtttggccaggctggtctagaactcctgacctcaggtgatccacccgccccgaccccacaaagtgctaggattacaggcgggagacaccgtgtccggcccattttttaagctttgtaaagacaggattatgcatgtagttgtctgtagttcctgtgaatcataatattaaactgaaactttttttgtttcagttaattttttttgaattattcaaaaccagtagtttatattcctaatactgattgtgtgaaacattttcagcatttcagcacatgaaaatgattgtttttgcaagctccaaccttgtatgtcttcataaatcatttcgtattgctgcctggctcaatgatttattctcctgggctgctgtatgacatgattttttgccccagtccatgttctttgcagtttttagttaacttgggacttaattttacaggaatgtgtccagtaaaaatgccaatataggtatccctgctctgaaactgctaggtttgccgttataatgtttttaggtgaaggtcttcacgttagtttttatacatctaacctggctcatagctcatccttgtcgagctgtgagacagaaaagcaacggctgtgtactcactatgaccattatgtcttaaaatcaaaactgccacagtgaaggatatcatgaaatgtttccaccattttcctgccagtgctaatggctcctgtttccagtttggaataagctcatttgtggaaatactaggtactaatgagacaaacatactcagttacagaggtttgggtttgtcagtactgactatcaaaaaagcagaaacaggtaatagaataatagtacttttttattaaaaagtggtttgggagtctgaaaggtaggttgcaagtacagttcctaaaggaatgagattctcttcttggaccattcctacatataagatgcccaacaaaatgcaaataaaaatgggaattcgaaatgtaatatttaatttccaggtgcaagaaagcctttgaggtgaaggtgtatgaaagtcatcataacagatgttttccaaaaacttgtagaaggttgtgaaaaaactactaggatcacgcggcatgtattgaggtacctaaatttaattaatgttagttatgtgatgtattcttgacagataggtttaatagctggcacaatgatgacttaaattactttttgccgtttacccagctgaggttgtctttgaagaaataattttaagactgagatgccagtactgtacattgattaattactgacatgtatgtaaggcaataatttaattaagggtgaatattctttgtttttagcatataggttgctgtagatgaatgttcttagctgtcatgtttaaaaatacttctgcttcgttacctcaagtaagtgatttgtcaagcaactatgtctgctgacagttcagaaagtatctgataaacttaagggtgggggcagattcttgttgaagttgcttttgcatgtgtggtattctcaacattagttttttgaggggcacttgtgaatattgaggttatatgagaactttgagtatggaatgattttcactgtggtttctgactttgttttggaggtgtggcatgcagcattttggaaggaaaattgaagacgtgttcaagaaaacatgaacagaagcaaatgatgaaaatgagcattttacttgatgttgataacatcacaataaattatggagaaaaatacatatttggctaacttttaattgctgaacaataaagtgttttcttttaaatcaactc

SEQ ID NO: 431 - DNA, 32744 bp, Homo sapiens
  source 1..32744: mol_type = other DNA
ggaggcggccgcggcaccagggagcgtcgtctccctggtgcgcatgctcgcccccgctgcgggctagctgttgtgtttttttttttcccccgggcggcccggcggctgcgtactggctgtgggatgggaagtgaagccccagcgagcggctgcagcggggccgtgaggagcagccagcgggaggcggcggcgagtcggtgagcagctgggaagagcagaaccggggcggagcacctgcaggcgcgggcggcggccccaccatggcgattcgcaagaaaagcaccaagagccccccagtgctgagccacgaattcgtcctgcagaatcacgcggacatcgtctcctgtgtggcgatggtcttcctgctggggctcatgtttgaggtgagcccgccccgagtcccaaccgcctgccccgccacctccagcccgggcccgggctccagatgccagccccggcttctccgcccaggacgcggggggctcgggcccggggtgggtgcagacccccagtccctgaggtgcaggccttccctgccctgccccacgtcggcggcagctccccggcggccggcccggagatgcaaagtcccggtgggcctcatcgcggcccgcagggggtggggaccgccgcgtcgcccccttcctgacccgccgccgccccctcccgcaggctgcgcggcgcagttcctggttcccgcgaagggttacgtggcagccggcgaggggcctgcgggcgggggcggcccctgcgctgccgagctggctcggggcgggtgggcggacttggggggactgccagcctcggccgcggtgagcgtcagccccgcgagggccggggaaggccgaggcccggcccccgggtctgaggagtgccggcctggagaccacaggccccgagtgacaggggagcccccggtagctccgagattggggtgagcgagaaaccggagtcaggcatctgctttcgacttgaagggcggtggccgccgggcaccggcgcagtggaggcgcgccagattgttttcatttttgtcttttaaactgatattattaccagttaacgaactttttgccctgacgctttaaagaaacaaggtctgatggataaatcgaggttctgaacagcggtgccaaggaatcgagtaattttgtttcttgaagtaggagaggatgggaatgtcaggagtgtgtaaattctcttcccacgtatctagtattttgatgacttatttaacagctgttgaatgtggatgataaactttgcaaggtgaacgagtaacatcctacgtttttcccctcgctccccaatacacacgctcattcctttgcttttttccctttttaatttttctctggagcctttatgtctcagtaaatatacaaattattttgctcctgccttgttttgtctcctctctcctgcatgtaacaagtgagagtagagattttggagtatttttacgagtctgtatttccagagtctaggatagtgcctgggacataggagtgcttaaaaaaagatgagcgacgttaagaatccttgagaaaacctaatggaatgatattaccagtgaccaaaaggtgaatacattttctttttaatggagcatatttgtttttttttttaattttaaaattaaataatattttaaccttattttcgcctctcatcaaatgggcttttctggatctagatacagatattatttactcctgattgtgtcatgcatgtttgaaaccactgctaaggaggtagcaggtatagttaaagggtaggtagaaggaaactaacattctcaagctttaagtctgggctgtgccacctacctactgggtgacccaagtctgagcctcaatttttctgctctttatcaggaaataatatcacctgtactgttctcctcacagccattttttgcaagtatcagatgatatggtgtgaaggtaaatacagtgctaggcctggtgctctggcttatgcctgtaaacatcccaacactttgggaggccaaggcaggagaatcactggagcccaggagttcgagaccagcctaggcaacatagggagaccctgtctctacaaatgattttttaaaaattagccaggagtgatagatagcacgcacctgtggtctcagctgggcggctgaggtgggataattacttgagcccaggaggtggaggctgcggtgagccaaggtttcaccactgcactccagcctgaaggacagagcaagaagaccctgtctcaaaaaaaacccaatgttaaacatttgtattcactttctgaatttgatacttgcatgtactttctgctttgaccttaaagtagtactttaatatatgtagtatattcaattttctgtaacttgtcataaaccatctccacatggtaagaattcctgactttaaaaacatattttaggggtactgtgacctgcaaggtatatttgcagtgctttgaatgaaatgaaatataaatcagaaattctgacacatagtataactttgattttatataaactattttacattctcttactatatttctagggaagtccaccacctataccttgcctcacatgttagtgatttttttaaacagtggattttcacctttatataaatttataaaatttgaaaatctaaatagacaaaaatactaaatagaggtttttaagtcaattcaaaagtgagtgttaaagtgatacacaaaagtgaagtttgtgcgagttcttcctttttcttaccatatattaaggtgttaggatttcaaagcatgttatctatatataggactttgtagactaggttagttttgctattcgacttttaaaacaattgctgctgaatctcaaagttaacataattatagaattacagtacttgtgctagaataatagagaaattgatttttttttgcagaactgttaagcctgttgtgcagatacattgaggaaatgtcagaggatttatggtgacattgacaaagaaattcagaaagaaagaaatactgtattactagccaaaatgaagaagcaatggagatacactgtaaaagcatggattctggagctgaagggattcatgttcaagttagggctctgcagcttgctaactgggtgacctagggcagctcagaactgaagtttcctcatctgtaaaatggggcttattgggttactctgacaaattaaccaatttgtattatgcctagttcaatacttgacttccaaaaggtgtgcaataagtggtagctattattattctttaaaaactcaccaaaattgggaaatagaaagcatttttatgtgagagaagggcctggaatctctttagttagcatctaaagagattatacatactgaaaaggctaacaaagtagtctgtttggcagtaatgtaagagtttaatttccagggaacttcacattaatcaaaaattgcttgtaaattttggaatcatagttttattacagtaaatatctgtccacataattcaaatcatagtatacaatgaatggcttcatatttgagttaggaaaaattgaatggtcaaaaaatgttagggatgcttgggaagctttctgaaagtgagtatgtggaggaggggtgaagaattaggggttcacaagagaagtatttcttttaaggagtgtataaaggaaagatattcaaaaggaaatatattcaaaaggaaagatattcaaaatctgcaagttctttatgccatacagattttggggacgtttacaatttcaacaatcttgaaacagttttcaaggtttgggttttttttttctttcctttttttctttctttttatgacaggtaaggtgctcaggtcagaacaaagtttgagggagagacacatctcacatataagcgtgaaaccccaatcatcacacttgtgaactacaaaagggtctctcttttttttgagacagggtcttgctatgttgccttggctggaacttgacctcctgggctcaagtgatcctcccctctcgccacctgagtggctgggactacaggcacgtgccactgagccccactggaagtggaatttgatattcagaattgtctttacttttcaaggatccagtccatgtagtgactggtcacatcttcctctaaaacaagtgcaaagtagttaacatctctatataacaagaaagataccaagccccaaccggtgacatttaattaaagaaatgttgtatttatgacattgcatacagcatagaattaggtaattcattacagtttctggtaacctatttaagatgcatctgaataagtctcttttttcatttttccatttttgtaaatggagagcagctctgtaaatgttcaaactgtcataaactcaggtatttttactttcgagtgcattatatatttctgtagcctatttatattctaaactaacttatcttactactaattaattgtggtgtgagtttaactgcagcaatgctagcagggtgtgaggcttaggaggcctggaaatggctaggagcaagactgctagcttaaacttgaaactttttggagtgtgtagtttacatttttcctcttcttcttctatttaaactcacatgctaaaccagctggaggtcaaattttaattttatttggaagcctggctaaaaggataatctaatttttgctgcttttagaatttgatgctaaatttatctttgaagaatctcatttgttgtttgtaaaggactctttttgagatggagcctcactctgtcacccaggctagagtgcaatggcgtgatctcagctcgctgcaccctccgcctcctgggttcaagtgattctcctgcctcagcatcctgagtagctgggattacaggctcccgccacgatgcccagctaatttttgtatttttaatagagatgaggtttcaccatgttggccaggctggtcttgaactcctgacctcaggtgagccagccaccttggcctcccaaagtgctgggattacaggtgtgagccatcacacctggcctgtaaaggactctttaacaaagtgttcttaggtgtgacagtggtgacttcatattacaaactggaaacagggatgtggagtgtttgtgtgtaaaacagattgtgtgtgtgtgtgtgtgtgtgtgtgtgtgtataaaacatatatatagtgtgtatatatagatatatattgtttagactatatatatatataaaaaatctaaacaaagatagcaaaactaaatgaaatgtagtgaccactcaactttactaaaaataatcacatgaaagtagtgttgccctggagactcatgtcatcgttctgctctaatgagtccttgttaatgacccaaattttaatagagtagccttagtagccttttctactcaagagaccttcatatctaacccagttcggcaactcactttactggccgtatcctgcagtttgtcatgcaagcctgacttcttccacttcctgaattctaggataacagagttcagctacaacctacgttttgttcacctccctcattctagtactcataagtcagtgctctacctagtccaagcttttgtggtaccacggccccctttccctttctccagtatattagccccctcattgttttgcctttcttcctgcaatctttactccactattggccttttcggtgcctctcaattcccagagaaagtcatactcatgctagtagataatattgcaaatcaaaggtttctaacctcagacattcgcatccggtatctttttactttccctggccatctcctttccctatgggaactatataaatagtcaccattcatgtccccattatgcttaatatgtgacattgcttttttctcacacagggaaaataaaagtttatcaagcacggatttcctcattttcctgtcttttgaagttatgtgtcccatccattactgccttcttcccatctaagaggaaaagttgttcaagagtgcaatactcagtccttacaattttgttccctgtcatatgcctccatccgttattctctttctatcctgtgtgtttaacttctcccttttccctgttgccttcactgttgcccccacacaagctcaatctctcctatcctgaaaacaacataaaatttgacctggcatctactggataccaccttgtgcctctgtgttcttcagtccactgcaatgcagctcctgctctcactacttagttggaatcactcaagctgtgaccactgatgacttcttaaattgtccagtctatcgttctctttcctcccacatctcttttgaaacttttgactttattaaccacaccttttagaaatgtttcccctttggcttttgggactacaagctctttttatttctttctctgtctctctaaccattttttcttagtttcagtgacttgaagttttgcttttttccctgttctctccatgggtctgatgttgtcctacttctctacaaatactgtgcactctccatatatgatttatgtattttcacagcttcagctattatctgtagaaagagactcccaaatctttatttaagctaggttctccctactgagttctagacttaggttttagctgccttactgctcatctcccagaaatctcagctgtaggcatcaataaataaccttgtactctttcttctagcttaccaaaccttattttgccttatgagtgcctcctgtatcccacagtcactgtcttagttcaggtctcattatctttcatgtggtctcttgcagaagtttcattcttggctgcatgctcactccggtttgtacttttaactgatatttattcagcgatattgattaattacctaatatgtaccaggccccatgctgggctctgaaatatagtgatgagtggaaacaggcatgatcccagttctaatggagcttactttctaatgggcgagacagaaattattaatataatcaaccagagtatgcctttgaaggaaaggaacacagttctctgagataatctaacaaaggaaatgacctactctaggaagacagggagacttccttgaaaaggtgtaatgcaactgagatctgatgggaaatattttccgaccgtattttagatagaacagcatgtgcagagaccctgtggtagaaggtgctgcagaggcagagagaggagtcagaccatagagtcctatggtcacattctcctagaaagatgggaatctagtgaaggatttttagcaggtagggagggggatgtggtaacatgatgagaaaatcattctagttgcaatatggagaatggatctgaaggggcctgggataccacttagcaggtcacagagagcaatccttctaaaaggcataaatgaactttcccgtcctcaacattctccacttgtgcgaaagtgaaatctaaactacttagctcaaaaaacagagtcctttctagcactcaataatgtttctagtcttttctaacgcttcctgatgtgcatcctgtgcctggccttgtgttcactgctacttgatcttgccacgctctgtttcttctatctgtactgtcctcttcatccccctttgtgaacctagggaacacctattttccagcaaaacacagctccttcatttcattccaccccagaaaaaaaaccaacaaagctcattgtttatcccaagtacccacagtgcaagctattggcacttattctacagtattataacagtttatttacctgtacttttcacaccacggagctccttgtcattagggattattttatccatcttcatctcgtccttttttgtctagcactttgcctggtgcctgtaaagattgggtaagcattccatttttctgctctgaccagtttacttttaccagtagtcaggtcagttaaacagttattgaccacttaactctgctgggtgtgtgggatactaacacacccacaccacagaccctatatttgatctgcttttctcatgctaactgtgcttctctttattttattaatttacacttgaaatttgtcttaataggaactttttattcattgtatagggctagagtagagaatcatcatttgtcaaataactgttttctggaactgcagaaaatgtcttttgaaatcttaaaattaaggatgaattacacaattttacctaaaccgcagaagagtactctagtgaattacattagctccttggcaatcagtaatttccattgtgtctgtcaggattccacaggaacgaggaggcccttggtgcttcgatttagggacagattttataatgtttttgccccgatctgttatttgggagagggtcacaaattgacttgatctttgtttttccttctttgtagataacggcaaaagcttctatcatttttgttactcttcagtacaatgtcaccctcccagcaacaggtaggtaatttacgctaagaattttctacgtaaatagaagttcagttgaacaaacttggaaattttcatgaatgctaggtcctgcgttaattaatcgtcagagatctcatccatgatgtgactgaatgttattgtgatgattttataatacaagatctgatgtttttgattgactttaccctgtatatgttttctgtttactatatatttttgtgaatggacttgaaattccataaaataattttgttttgctttctctgctttctgattttttcctaagaaaattataagaaaagatctttttaaaattgtttaaatgtcattgttcattcaagacttctaaaagcacaatggcagatttagtttttctgtaagttacattttggacctgtaatagcaatcaatccttctaagattattttcactttttcctgtgctctacttttaacaattattttgattccagaaaatgtgttagtaagctctaggaattatctggtaatagcatccaaactattaggttttatttcaaaaatcttatttcttaatctatgtaaaaattaggtgtttcttggaagttgattgtaatttaatacagtgatataattaactagcatgggtgagggatggggtattttttggttgaggcagtaaacctgcacagttttttatttagaatgtaagataatatagtataccacatttagttggggttttttgttgttgttgctgttatttatatgtgtgtttttaagagatgacagggtcttgccaaatgtgttacctaggcaggagtgctgtggcgtgatcgtagctcactgcagcctccagcttctgggctcaaatgatcctcccaggtcagcctcccaagtaggtgggactacaagggcacaccaccacgcccagctaatttttcaatttactatagagatggagtctcactatactacctaggtcagtcttgaatttgggcctcaagcaatccttgcctccctaagtgttgggattacaggggtgagccactgcatctagcccctgagttgggtttttgttcagttatgtacagttttgtaaatatttaatttagtgatttagttatcaggttactcaaaactacaatactgttttgaaatttgaatatgccagagaagaataaagctcttttatgtatatgttccccataaacataaagtttgagaataagtgtcagcaattcacaagtatttgataaagatttgttttgaaaaattatagcaattgcaaggattaaaaacaactttagtagttgcctttatctctgctgcttatagatcaaaactaaatcaaatacaggtcaaatcagctttttcatcagaatcataatttagtgtgtagttagaaagtagaagtagaaagtttcaaaagccctttgaaaaaaataggtcagtaggctaagtataactttatcaacctaatttatacccctgggataatatcagtttattgagtgtggcctcctcttccctgttttttggtctttggtggctgtgactaacatgtgtcaagtctttgtaagtaatttctaaagctttagatttctagatagttttgattttcattgcccctctaagactcaagatgtccaagaccacgttatttatgatgttaatatagaacttttttattaggttattcttctttgtttccataactatgttgtacttaatgctgtttttataaccttgtgtatatttttgtgtatttgtgtcctttttggtcttcagaagaacaagctactgaatcagtgtccctttattactatggcatcaaagatttggctactgttttcttctacatgctagtggcgataattattcatgccgtaattcaagagtatatgttggatgtaagtatgcagtcttagaaatctatactttataaagtactagctctccataatctgctagtcatatattaaatataatttataatttattcttaattactaatggctgtttttatttttagaaaattaacaggcgaatgcacttctccaaaacaaaacacagcaagtttaatgaatctggtcagcttagtgcgttctacctttttgcctgtgtttggggcacattcattctcatctctgtaagtatgtcctcttaggttgttgttctccttccttatctaagattagaaactctgctaatgaaatagtattaagttaagagtttcagtgataaatctgttttaggtatttttttatacagcaaaaattctaaactatgtttactgtttcagaaaggcttattcatttttagtcactctgaatgttacttttatatctttcttttttttttttttttttttttttgagacagagtctcgctctgtctccaggctggagtgcagtggcatgatctcggctcactgcaacctccgcctcccgggttcaagcgattctcctgcctcagcttcccaagtagctgggactacagacgcacgccaccacgcccagctaatttttgtatttttagtagaaacaaggtttcaccatgttggccaggatggtctcgaactcctgacctcgtgatccacccgcctcggcctcccaaagtgctgggattacaggcttgagccaccaagcccggccttacttttgtatcttatagtggtttacagatacctctgtatcagcaaaaagcgtaggttacatgagttgtaatgttcacagtcatttcctcctttaaaaacagccccagtgttttccaagcttcttaaatgttgtataacttttcagttatggcaatcaaaacctttagttgtatcactctaactaatgagaaaaagaaaggcagtatttgctttaatattagtgataacaatcccttaaatttatatggtgttccatagtttacatacttttgagtttgtcagacacataattctttctaatcactgtattagagatgaataacagtgagttttccagggtaaagcacttcatgttggaagtagactaaaactcagctttttattccattgctcattccattttactgtgctgctttaataatactttataggtaatatgtaaattttagtttaaaaactattatacatttttttaaaaaaacataaaagttatacttctgtgggaaaatactcttacaaaaatcactttagattttatttattttttaatctttttttttttttttttacatatgcagtaattctcactgagtagatctgattatctaagaaaaaaattggggcagtattttattgacgtaattccataaaactcggtagcaccctgatcctttgtctcctgtcagatgctacaaacttttcctgaaatcttctgattacctaagacaaaattcttctctcctggtcactgttgtgcctcttattggtggttttatgtttgtttgtgtacgtgtatttttattctatgggattgaaagattttttagggccaggaattatgtcttacctgattccatatctcatttctatcattgattttcattttgctcaagtaaccaactcaaattggcttgaaaataactaaaacaactaaggattttgacattagtgggttctttgcaacctggtatgggacctgtaaatgtttgagaaatgaaagtaatgccttattttccaagaagtttgcattatgctcacaggttaatttttatatcttctttcttaggaaaactacatctcagacccaactatcttatggagggcttatccccataacctgatgacgtaagtcatttttagcagccctttctttgttaaggaccatggtcatgtcactattaatcagaattcattcttgttattctctttaggaccttaggcaaatgcataaaatagatgaaaatatgtctttgacagtcccactgccgtaagaaaaaaaaagctgtgtacctttttttaatgtttctattctaatcttttcaacatctttgtaagcttgagacaactgattttaacataacttaatttggtactcgcttcttttcccttcttttcactcatactttctcctttttatgactccatcttctctatatttttgctccttttctttgtccccaccccctgtctcttttcacatcttcctttctttctcctattataagcttcttgaggttaggaattgtttcttttttatttctctagtctgtacagtgctgctgggttaaagtgctcagtggttaccaagacgtctgaataattcattattcgagcccagctctagtacaactattctatattaattttccttgctattttagcctgtattggtcttttgtatccccaaatttgtcattttggtagaaatttgatgtagtgtctatatattgttttgattgttctataattgtctcatttttgtaagtcttgtattgtgcccatacccactaagactatatgtgccttggtagcggtaaaaactattttatatccttcattgtgccaggtacattgcaagtgcttgtcacctacacagtatttagtaaatacattgtgatgtgagaattggagaagggagaagatacgaaggaaagaagggaataacctgactgtgggtattttaagtctagcagtaatacccactctactgaatcatactctgatttctaaagttttattagttcaacgaactttgtaaatattatatttatgtgggactgtattctctccaccccgaccaccaagaaattaggttggctttgtgttttctattttagacttctggaggagaaggagcagggagaataaagaggaagcagaagggctagagggatataatgtcaagaggagagtattggttctagactgattatgatatagctcctggagagcccttgtgtgccttattctgactgtctttaatcctagctctgcctccatttatttggggctttctccatgttccaaccaggtacagttaccatatttgcctaagaaaaaaaaaaaaaacagaggatatttgaaattgggattattccagtttcaggtgattattaatctatgagcctttgcttttgtgtcagtctttttccccttcttgtcttgatgaaactgtatagacatgtgggttatgttttcagtagctaacatgacatactagtcagtattaatgaactaataggggctctgactcctcccaactggcttacatgtcaatagctttctgcagatagtatctttgcctgctgtttaatccaggggtcttgtccaatggtgggactgtcacagggagatggggaaagaggttgttgaagagttgtttaaaggtgcacagatattgtatggaatgatgacacaaaggtagttacttagtatatcctgatttccagtatttgtttacttttttttaaaaaaattatgctttaaaaggtactcttcattttcttgtgttgtacagatttcaaatgaagtttttctacatatcacagctggcttactggcttcatgcttttcctgaactctacttccagaaaaccaaaaaagtaagctgggattttgtagtgttaaaaaatgtcttgtcatttttttttttgaaaaatttttctaaaattaagtattttcttacatgtttgcccttcctccattcttcttacctcaactcttaccccatcattctcccaccaaccctctttccacaaagcctaaaatccttaagcatttcttgaaaaaaaaaaaaaaaaaaccttcagtcagtattttagcttagattttttacatttgatatgttaatggcttgtcttaaaattatgttagtggtaatgtaaattaaaatttaaactaatttttaaatgtaatatttgttttatcttactgatattcttagcaaattatttcacaagtgagccaaaaaggattagtcacattacaactaacagttctgtgtgtaagtcctaaagcaaaattcagtattggaaaaaaaagtaaaatatatttaaatattcaccagcaaagcctctcttgaaatgggtagagcattccctttttagcatgtggaaaggatatttgtttgttttatttgaacaaataagtaaactgctggagcactgcaaaatcctccttcctagttttaccctcagtgcttctgaagtcgggttccatgctatcacaaaagtcgttttctttaccctctcccttctgaaacctgtattggctccctattactttaaactagagtaatgctgctcaactgtgccctgagagtttctcccatcgccaccatcttttctcggggacctctttctctgcttactccttatgcttcatgcacactgatagtctctagttttgtaatcccagcacatcacttctttttcctggaacacctcttccctcggataaattaatcaagtactttcatttcccttttttctgggagttttttttttttttttaattctcatatatgaaatcctatgtgggattttacttcaaaataataccaggtgaaggaaagtgaagagggatatagatgaaacaagtttgatcgtttattaataatgattgagttacgggtatgtcagaatcttttctgtctgttgtgtatatgtttacatttttccgcatttaaaatttcttttttttttttttaatcccctttgagaaacctggagtgaaagtgtgacagccagtctggtgactagtttatctttgcctactcaaaagccataaaacactatttttatgtgtgctacaaatagttaattcatggactaggcacttgatttcctactgtttcgtgtctgtgttctgtgtatctgtcgttactcatgttgtctgctaggattagaaaacagcaccaaattaaaggccatatgctatggtacttaagttctttttatgctgatttcttttataaagtagattgtttctccagctatattgataaggaataggatgaagaccttttatttttaaacccttgatttagaactgtcttcagataaaattgttaggcccagattccagtagcccttccatgtttagtaagctcctaatgtgaatcatagatattgtggagctgtactgtccaaaatgctaactactagtcacatctacatgaacttaaaaaacaaaaacgaaattgacttttttagccccagtagccacatttcaagtgcttattagctactgtggctagtatgtaccattttgaacagaggagatatggaacatttccatgattgcagaaagttctattggacagcgctactgagagtatcatagtttcttgatgtcttagtagcatggctcagatatttaaagccttcttaaggtatttgtatactcatgaacaaatacctctggatttcattattaatccatgtctatatcttcttcattgactatggtaagtaagaagggacatttcaaagtaattgttcattttagttcctgaagctcttttcttatcagttcctgccagatggcacttctccagaaatgcagtctaatttttatggaataatttgcataactcagaacttaactgaaactatttttaacacctgcatatgacagttgaaagtaactgtttcaagtaattaacataatttgaaagtagcagctgcatatgtgttaaacagtttcttaaaatttactctatgaaaattatttttggaactctttactggaagaaactagtacagtgattgttttgaaccaatcatacagacaaataggaaagaaaggaacgctgttagtagcagttcaagaggtgtgttagtcacaaataacttagtttctttcaaagataaaacttaaattacatatactgtgtatataaacagttctccattttgcccatgagaagattcaaaatatttcgtagacagcttgaatatatgagcttttagggaagtcatgaaatagccaaatgttttatttctaatattcaattttagtttaattatacatacatataattatacatacctataattgcatatcatataaagtattagaaatagtattttcccccttcctacttcatgaaagtttcattacacttttcatatgcaactttgatgttagtatctgtcattcatcatcactagaaccacttttttttaatctgatgacattttttccacatcatgacgtcatcttctgtctcactggttccttcattagaccttataaacctttaaaaatgacattgattgaagttttcgggtgtatgtgtcttacgcaaacatttatttgtcaagataattaatacagagctctataatgcagagctttgtaaagatttaattataagatgtaccatctggggtttggggggagatctttgccttatatttggggcatatatttgatattcagctttgtttatttttcagtatagagtagtcaagaaatgtgttttttataaaaataaattttttgaagtatgttatattttttaataaacagatgttggaataacaactgaaaatggcacttgaagttatttacgattttataatttgttatgatttcacccagccttctctgttctctcccttcccccacaacccatgtaaatgtgtacgtccagagaccattgtgctggtgctaggcaaggctttgttgtcggcctcagacatgtgaacaccgtgccatcggggctgtaaccccagaggaaatggagaacattgagggaggctggcctaccacaggaatactaaaaagtagccattttctagataaaatttatcattttaaaaatcatggtaagccaggcatggtggcacacacctgtagtcctggctactggggaggctgaggcaaggggatggcttgattccaggagtttgagaccagcctgggcaatgtaatgagactcatctctaaaaataaaataaaactcatggtacactacccctacttccatgtattttttgtaatcatttgggaatacctttatgtagggtgtttgttaagttagccacaattcctaccaccccttgtggtattctactcatctcttttttttttttattattattgttgttgttatccccattatacagagagattaattagcttgcctaaggtccctcagctagtaagtgacacaagtatttacccattctcttactaatttactttttctgtggtaagctttgagtgtacaaacactgctttagagacactagtcaatttgtgcaaagctgaatggaccattacttagaaaaaggtttcttgataatcctttttgaaagcaatagatactatttttaaaacttttgcataggcatttgatggttgtgaagatagaacctagtgatggcattttaccctctattattattgactcggttgactatccaaaaggaaaggctactgggcacagtggtgcatgcctgtagtcccagttactcaggaggctgagatagcaggatcacttgagccctggagttggaggctacagtgcagcataattgcacctgtgaataaccactgcactccagcctgagtaacatagtgagaccatgtttctattttttaaaaaggaggtatggggctaagatacaaagttgaatctgaacttaggaaagaaactctatggatttttccttagctaatgtcaagcacaactgcgctccacctaattgggttgaaatttaaagacaaaagatcagaaatggaatggctttttgaattatagtttgtttgtaatttataatagtgtttttagtcttgtcagagaagaaaagagtaggcagcttaggttctctgctaattgaccagtgtgaattttaaaaacttacttgtatttcttttaaattaaaaaaaaaaaaatcctcctaagtagttacattacattatagtttttccagcaaattagtttttttttttttttacattgccttacccaagtttttatgcaatgaaatgagttcaatcagcagttaaaaactaaaacgcttccctcataagttttaagggttttcttggtctgttttctcctctgaaatgtggagcattgagtaacacatatgaaagaatatggcaatattttttatacctagtcatttatgtgccaccttcctgctttaccatattcacatactactaattcatacttttgacattttaattattaaggtatattaaataacaaaatattttgggtttttgttttgttttgttttgttttgagacaaggtcttgctctatcacccatgctggagtgcagtggccacaatcacggctcagtgcagctgcagcctcaacctgccaggcttaagcaatcctactacttcagcctcccaagtggctggaagtacaggcatgcaccactatgcttggctaattttttgtatttttttagagatggggtttcgccatgttgccaaggctggtttcgaactcctgggctcaagcaatccacctgcatcagcctcccaaagggctgttattacaggcgtgatccaccactttatttaaaattttagttacagttaaataaaagtatttcattgtgtactgtctgcaatcattttgttcagtaccaatgtacacaccacactgggaaacactggcatatatatagtggcacttctacatgcattgtacatcaaattgcattgataatactaagtgagcttttctgagatgattataacgggagaagagaggttcccttgtggttgcatgttatctcaacaccctttctccttccttttgtaagctgaaatatttcattggaaatttacaaattatgtagagaggatcttaagaccgtctattttcagagatacttctctcttccattggaagaatgactgtaaacttggtatcaattttcctaagagtcccaaaatacagtactgtaaattgtaatattcagactgtcttatgttctacctaaaacttgatctttgcgccatgcttactagagaagagttttccatttcaaaactagacttcaaaaaatctctactcctcaaaagatttggtgaagtagctctcagtactgaaacacagagaaatggaggaccagtagacctgcactcaactgtgctaaatgcaagagataagtttagtgaggctgcagaggaacacagttcagcctgccagcagcaacccaccatttccatcgttctaattagtagctgtagaacatgaatagtactaactagactaatataatccttgtaaatatacatacgaagaaaactgctacaacaaaggaaattagaaatgaggtataggtgtttcattagtcagtaggctggcctgttgagcttatcactgtcagtgttttgtaaacatttttactgcaaccaaagatgaaaaactttttacatcataattcattgtgtgtttgtgtgtgtgtaaaatgtggaatacaattttcataatacaatgtgctatatactctagcattttctttttctttttttttctttttgagacagcgtctggctctgccgcccaggctggagtgcagtcacaatcctagctcactgcatccttgaactcctgggctcaagcaatctttctgcctcagcttcccaaatagctaggactacaggcacatgccaccatgcctggctaatttttaaaacatttttttgtagagatggggtctctctctgttgcccaggctagactcaaacgcctggcttcaagcaatcctcctgtctcagcctcccaaagtgctgggatgacaagtgtgagtcatggtgcctggccacattttctattttatttcatgttttaaaagatgctggtgtgacccctaaattgatttcatgatccactagtaggtcttttttttaaaagacagagtcttgctctgtcacccaagctggagtacagtggcatgatcatagcttactgtaacctcgaactcttgtgttcaagtgatgctcctcctgtgtctgcctcctgagtagctgggactacagttgcataccaccacgcctagctaattgtagtttttgtagagacagggtcttgctgtgttgcccaggttgatctcgaactcctggcctcaaatgatcctcccacctcggcctcccagagtgctgggattataggcatgaaccatcacacctggccccactagtgggtcttgacttgtgttttctaaaaatactgtttctgagataaccagctcaactagataactgtgggagaaaaaaagaagtaaaaataaaatctaggtacttgggcttgcaaagtaattgaggaaaaagaatatacaattaaggaatagtataaatgagaatacaaaatgttaaacttgttgtaatgactgacaagggactaaagcatgagctgaaaatgtgaatcctattttaggtaaacagaagtgtctctactactatgaacataacaattttaatattagaggaacatcaaattgtcagcatgtaactatgattaatattgtgtcatttaatacacattagaaaaaagagccatagatcttagctctaaaagggattttgagtttatctgattgaagcaaatctaagtattcacattttatggatgaaataactgaagccagcagaggttaagtgacttgctaatgctatatacctaattgaggatgagagattgcggtggggtgggagcagaatagctttcagatctcctacttctacatttttcacttactcttaaagaacagaaatgagccaagcacagtgggtcacgcctgaaatcctaaccctttggaaggccaaggttgggggttctcttgagtccaaggttttgagaccaacctgggcaacatagcaagaccacacctcttaaaaaaagggaaaggaaatgttttagcatgttttaatctataatgtatttttttacaggaagatattcctcgtcagcttgtctacattggtctttacctcttccacattgctggagcttaccttttgaagtgagttgggatatttcatgggtgtgtaagtaggctgggcagatagtatgctgacctgtcttaattgataattaatattcccatttttaatttgctcttttaacagcttgaatcatctaggacttgttcttctggtgctacattattttgttgaatttcttttccacatttcccgcctgttttattttagcaatgaaaagtatcagaaagggtaagttgtttagccattctatttctcgtgtactaggtatttaaagtcagtgcctaacattgccaagatccatgctttaggccattatattaactttttaagcgatcagtagccgctttaaataaaacgaaattatttagcaattcagactttgtattttactctctaaaatggaggctttctcagctagagagatactgtattgtatcttgcaattttgaaggcttcttgggtttacttttctgttataacttttactttgtttgttgcatggtttttcttttggaggagtgatagagaagtgaactctcagaagaaagtgaaacaatagataattagccttatagataactaaaatatattgatggtgaaattgaactgaaaacagaattggagaggtgtaacttgtaaagagtgcaaagttgtcttaaaaaaagtaaaactgggactctttttttattattttattattattatactttaagttttagggtacatgtgcacaatgtgcaggtttgttacatatgtatacaagtgccatgttggtgtgctgcacccattaactcgtcatttagcattaggtatatctcctaatgctatccctcccccctcccccaccccacaacagtccccagagtgtgatgttcctcctcctgtgtcgatgtgttctcattgttcagttcccacctatgagtgagaacatgcagtgtttggttttttgtctttgcgatagtttgctgagaatgatggtttccagtttcatccatgtccctgcaaaggacatgaactcttcattttttatggctgcatagtattccatggtgtatatgtgccacattttcttaatccagtctatcattgttggacatttgagttggttccaagtctttgctattgtgaatagtgccgcaataaacatacgtgtgcatgtgtctttatagcagcatgatttataatcctttgggtatacacccagtaatgggatggctgggtcaaatggtatttctagttctagatccctgaggaatcaccacactgacttccacaatggttgaactagtttacagtcccagcaacagtgtaaaagtgttcctatttctccacatcctctccagcacctgttgtttcctgactttttaatgatcaccattcctaactggtgtgagatggtatctcattgtggttttgatttgcatttctctgatggccagtgatgatgagcattttttcatgtgttttttggctgcataaatatcttcttttgagaagtgtctgttcatatcctttgcccacttgttgatggggttgtttttttcttgtaaatttgtttgagttcattgtagattctggatattagccctttgtcagatgagtaggttgtgaaaattttctcccattttgtaggttgcctgttcactctgatggtagtttcttttgctgtgcagagctctttagtttaattagatcccatttgtctattttggcttttgttgccattgcttttggtgttttagacatgaagtccttgcccatgcctatgtcctgaatggtattgcctaggttttcttctagggtttttatgtttttaggtctaacatgtaagtctttaatccatcttgaattaatttttgtataaggtgtaaggaagggatccagtttcagctttctacatatggctagccagttttcccagcaccatttattaaatagggaatcctttccccattgcttttgtcaggtttgtcaaagatcagatggttgtagatatgcagcattatttctgagggctctgttctgttccattgatctatatctctgttttggtaccagtaccatgctgttttggttactgtggccttgtagtatagtttgaagtcaggtagcatgatgcctccagctttgttcttttggcttaggattgacttggtgatgcgagctcttttttggttccatatgaactttaaagtagttttttccaattctgtgaagaaagtcattggtagcttgatggggatggcattgaatctataaattaccttgggcagtatgaccattttcatgatattgattcttcctactcatgagcatggaatgttcttccatttgtttgtatcctcttttatttcattgagcagtggtttgtagttctccttgaagaggtccttcacatcccttgtaagttggattcctaggtattttattctctttgaagcaattatgaatgggagttcactcatgatttggctctctgtctgttattggtgtataagaatgcttgtgatttttgtacatcgattttgtatcctgagactttgctgaagttgcttatcagcttaaggagattttgggctgagacagtggggttttctagttatacaatcatgtcatcggcaaacagggacaattagacttccacttttcctaattgaataccctttatttccttctcctgcctaattgccctggccagaacttccaacactgtgttgaataggagtggtgagagaggccatccctgtcttgtgccaaaaactgggactcttaaatgagaattgggcatcctgttctttataacacagcttttttggtttgttttgtccagcattttccaaaattattctgaatactagtagttctgaggaatattaatagttcttatacaagaaaagagataagctaaacagaaaattaaacatttatttcctggattgttttagaaatttaaataggctaatatgtgttatatctctctgagtgtgatatatagcctttcccagatatttgactcaaaattcttttttgcagaataagaaatgctattttaataggcttttacttaataggaatctagtttcttctttatttatttatttatttttttgagatggagtttcgctcttgttgcccaggctggagtgcagtggcgcaatctctgctcactgtgacctccaccttctggtttcaagcaattctcctgcctcagcctcccaagtagctgggattacaggcgtctgccaccacgcccaacttaggaatctaatttctaatagaatcttgtttttgagatttcaggaatttgacttacggcctttttcttgcagattttctctgtgggcagttctttttgttttgggaagacttctgactttaattctttcagtactgactgttggttttggccttgcaagagcagaaaatcagaagctggatttcagtactggaaacttcaatgtgttagctgttaggtacgatcaatttaacatttttttcactttatacagctagataatatatattatcagtttctctacattgaatcatctaaaaaaggatgaatatgaggttggggaaaatactcatttgattttatttcatacccgttgctattttacatgtctaaagtgaagtactaaagcatttaacttttaggataaattattaatgcaatgattattaatacaattttctcaactgagtgggaattattactaaatactatgaaagatgatagaatgtattcagtggcattgttttttatacactaactttttatgtcttaatatttcttagaatcgctgttctggcatccatttgcgttactcaggcatttatgatgtggaagttcattaattttcagcttcgaaggtggagggaacattctgcttttcaggcaccagctgtgaagaagaaaccaacagtaactaaaggcagatcttctaaaaaaggaacaggtttgtattcagtaagcaatgaaaaactcatggaagtagaaaacttttaaaaaatttgttgttggatcttatttattagttttaaggtgtcttataaagaaaatactattctgcttttcaacaaaattagaggcaaagtaatcttactgcattccacaattgggtgatcccttgggtgaggaaactcagttactcccctcaaaagctgtccatcacatttctctttaacaagttttccatgcttggttaccttgagctactttagaccaaactttatgggcaggtttaaactaaacctgaggatggtagtttgttttcaagcatcttattcacattttaaaaagctcttcacaacctcttcccatctgcccatttgtcccaagtggaatagctttttttttataacttctgattgcttgattctttgtctttaaagccttcatttaacctcttttttccttatggtttttgcaaaaattgaaaatgcatcgatattacagttaattttttcagtgtgtatgtggtattaggcttagaactataacacaggaagtttttagagtatgtccactctggtttactcctttgtaagtattaatacctgataatttacatcctccagccctgcctttttttttttttttcaagtttgtcccagcaagtcttggccctttgcattttcttaatacattttagtacaacttgatctaggtgcagtggggggtgcctgtagtccagctattcaggaggctgaggcaggaggatcacttgaacccaggagttcaaggttacagtgcacaatgatcatgcctgtgaagccctactacactccagcctgggcaacatatgcctctttagaaaaaaaaaaaaaaaattatacaacctggtcaatttccacaaaagttgctgggatattaagttgaaataacatcaaatctgtagatcgatttagggataattgactatttcaacccattaacatgatatatacctctgtttatttaggttgtctttaatttctccaagtaatatttttaatagctttaatgggatgtaattcacataaagtttaccctttaaagtatacatttcagtcatttttaatgtatgttcacaaaatcgtgcaaaccactatctaattccagaatatttctatcactgcaaaaagaaaccccatgccccttagcatcacttcactttgcccccttcattctgctccggcaccctctaatctattttctgtctctaaggattggccttttctggacatttcatgtaaacagaaccatgtgatatgtggttttgcaaatggataatgctttgaggttcatccatgtcatagcatatagaaagacttcatttatttttacagccaattaatattccattgtatggaaccttttggatggatgtataccatattttgtttatccattcatcatttgatggatattgagtgccttttactttttggctattatgaatcgtgatgctgtgaacatttaggtgcaagtttttgttcaaacatgtgttttcattctctagggtacatacataggagtgggatttccgagtcatgcggtaactatgtttaacattttgagggaactgccaaactgttctttgaagtggttatactattttacactcagtttagcatcttgatactcagttgtccctgtgccatttgttaaaaagactccttcacttgaactgtcttgatacccttttcaaaaatcatttttaagaaaagtttatttctggatcatgaattctatttcatttattcgtatgtcgattcttatgccagaaccacactatcttgattactgtagctttgtagtaagttttgaaagcaggtaatgtgagtccccattgttgttgttctattttatgttttggttattctgggtttcttacatttccatatgagtttttatttaagtgacgggatcttgctatgttgcccaggctagacttgaacttgtaggctcaagggattctcccatcagcctcccaggtagctgggactacaggcatatgctgccttgcccagccattttaatatgaattctataatgagcttgtcagtttctgcaaaaaagccagctggggttttggtatggattatcttcaatttgtaggttgctttgcagagtatgaacatgaatgtctgtttatttagatcttttaatctctttcaattatatttatcagtgtatacatcttgcagttcattaaatttaatcctattttattctttttgatgctgttgtaaaatagaaccatcttcttaattccattttcagattcttcattgccattgtatatgaaatacaattcacttttgtatattgatcttgtatcctgcaaccttgctgaatttatttattcaaataggtttttttttttttggtgggcaatctggatgctttctattgcattttcttgccaaattgccctgcccagaacctccacaacaggtgttgaatagaaatggtgagagcagacatccttgtcttgtttttgatcttaggggtaggcatccatccagtcttttaccattaagtatgatgttagctatgggtttttcataaatgacctttatcaggttgaggaagttcccctctgattcctagtttgtttttatcatggaaggttgttagattttgtcaattgctttttttcctgcatctattgagataaccttgtggggttttgtcatttttttctgttggtattatagattagattgattttcagatgttaaaccaacgttgcattcctgggataaatttcacttggttatggtgtatgatcctttttatctcttgatggattttggtatgcaagtattttgttcaggtttttttgtgtctgtattcataaaggataattggagtatatttttcttgcaacatcgttgtctggttttagtatcaagataatactggcttcatagaatgaactggggagtgttttttccttttctgttttttggaagagttcttcacttgatcttagccaaaatgccaagaagcaatggaagagttgttgaaggagatattttataggtttctgtatagggatctcatacatttttcattaaatttattctcaggtattttcttttttaagctaatgtacatgctctttttaaaaaacagttttaactatttgttacgtagtagtgccatttgttttctttaagatactatccaggtactgaaaaaagtcttcctaattcacttattctaaagtttacactaaaatatacagttacagcgtctataaatattataccttttcattttcttcctgtattacactagctaggactaaaccataatattcaatataagaaatgaatactcttgttcctcatataagagggagacctttcggtatttcattattaagaatggtctgtagatgccctttattcagttctcttctgtacatcatttactaagagtttttgtccatgacttgtggaatgttaagaaatgctttttctgcaagatttagttagtcatagagtttttctttactctattaatgttgtgaattgcattgactacattgactatcaatgttaaaataattctgcatttctgacatgcatccaagttggtgataatacagttgtctccctgggggaatacattccaaaacccccaatggatgcctgaaaccaggggtagtttcaaactatatagttacgtgctaaataatgacatttcagtcaacagctgtacaacatatgtgtatacatgactcatttatgacactggtcctataagataatgctttatttctccaataccatttctatgtttagatatgtttagatacataaatagttaccactgtattacagttgcctaaagtattccatacagtaacatgccatgcagatttttagcctaggagcaataggctataccatatagcctgggtgtgtggtaggctctaccatctagatttgtggaagtacattctgtgatgttcatacaatgatgaaatcgcctaacacatttcttaaaacatagcctgttaagtgatgcatgactgtatatactatgttttctcctaattagctatgataaagttttatttataaattggtcacatataacagcatattgtagcaaaagttaattgaatgtggtatttttctctctcaaaatattatacagtactcatctattttcagaccatggttgactgtgggtaactgaaaccgtggaaagcaacactgcaaataaggggagaccattgtacatcactttcgctgaattccctttttcagtatttcattaggatttttgcatctttgttcatgtaataatagatcagcctgtattagcccttttttgtaatatgtcagattttgacctcaaggttgtgctggctgtaaagaaagtgttgggcagatttgtcctttgtgtaatatcagcattatttattatttaagtgtttggaagtgttcaccaactaagccctctgacctagagtcttcttttttttcgaaacagggtcttgctctgtcgcccaggctggagtgcagtggcacgatcttggctcactgcagcctcaaccttgtgggctcaagcagtcctcccacctcagcctcctgagtagctggggctacaagcacatgtcaccatgccactactttttgtgttttttgtagagatgggatttcaccatgttacccaggatagtcttgaactcctctacccaagtgatctgcccaccagtctcaaccaattggctgggcacccagcactttgggaggctgagatgggtggatcacttgagcccaggagttcaagaccagcctgggcaacatgacgaaactctgtctttacaaaaaatacaaaaatgaaccaggcatcgtggtgcatgcctgtagtcccagtacttgggaggctgaggtgggaggatcccttgatcctgatgtcacccttggggtgtcacttcaccagctggaaacctttttggctggtggcaccttctgcctgagtattgcttgcatccgctgggctcattccacccacttggcctgacaggctgtgcttggcttaagctaccggcccagatcctacacctgtcaagcatgagccagacgtggagcagcagggggtgtgtgggcaagcacacacaaggtctagccactgcgcacagccagacacacaggctgctgccacggggcaggcagctctaggcaccagcaggtgctggctctgtgtgaggctgcagctggaccagatgtactgcatgcggcttccgctgcagggacccatgactggacaaggggagtgtggtggcatctccagagcttggagatggtgggaaccactgaaccccaaagagggtgtcatagccctggctcagggagcccctagatctgggcttcccagaggagcacagctcttctctctttcttgtcatccacaacgtggtgagcagaggggcatgtttcagccttgtttgtgctatagccctttcagtcccaccattcagcaggtcccaagttcttgtcctgcatccaggaagaatgaggtatgcagacaactggagggtgagcaaggcagagaggaggttcattgagaggcagaacagttctcaggagacctgaagtggttagctcctatccacagtctcatcatctgcccaagtctggctgagtccaggatttttatgagcttcaggggggaggaagtgcatgctgattggtccatgggtgggcccagaaaacactgtaagttctcactccagtccatggaactggtggcctggcccccaggtttcaggctgtccctggcttgaagaggggggcttcaccagggcccacccctttctgcccaggaacctgtctgcctcctgctgccatcaacctgccatccgtggtgcctaggctggtcatgccaaggggtgcctacagacccacaccaagctgccctcagcccccctcggcctccctctcgtgctcatcagcacccaaagtcctgacagggccaagggagcagggagctgccttgggaactttggacctgctgaatggcgggactaaaagggctatagcacaaacaaggctgaaatatgtccccctgctcgccacgttgtggatgacaagaaagagagaaaagcccccagatctaggggctccctgagcaggcatatcagtgctgctctaatcccagggtcagtctcaccttcactccaaaactagcagacgccaggagcagcagagtggccaggcagtgggagcaggcacttccaagcctgcagaggtagtagggcttcctgaacaccgaagaactacagctgggtggctgccactgtgcccaggagtgcgggactcccaccactccaactttgaaagggatggggctcctgctagctatgtggagcacacagccctggatgcacctctcacactacagccaatgtcatggcagtagccactccacaggggctgccgctgccatcactgagaagtggaggttgcagtgagtggagatcatgtcactggactccagccgggataacagagtgagaccctgtctcagaagaaaaaaaagataatactattgttcacattttctgtttcttagtcgtttctcttttggtaaataatgtttttcaaggaatttgtctagttcatataaatttgcaaatacatcggcataaaattattcatatgactttcgttatcctgttaacacctctaaatcaggagtgattcctgtttttcatttcatgttgttagtaacgtaagccttttatctttccttccatcagtcaaaaccaacatttgtctttttgtgttgattttcctagttgtctcttttctggatcattgatttctattctttccttttcattgggtttaatttgcggttttgtttgtgatttaccttcttgagatggatctttggagcattgatttgtatctcttgtgaattacattcagttaatggtaaacttttcctttcaacactgctttaactgtatttcacaaggattttttgttttgttttggggtttttttttgtgtggtttttttttttttttcttttttttttagatggagtctagctctgttgcccacgctggagtgcagtggcgcgatctcagctcactgcaacctttgcctcccgggctcaagtgattctcctgcctcccaggtagtcaggattacaggcacccaccaccacaaccagctaatttttgtatttttagtagagatggcatttcaccacgttggccaggctggtcttgaactcctggcctcaggtgatccacccacctcagcctcccaaagtgctgggattacaggcgtgagccaccatgcttagtctgtatttcacaggtttcaatatgtctttttcattattattcagttcaatgatatctgtgctgggattccacttgtgctg

SEQ ID NO: 432 - DNA, 32744 bp, Homo sapiens
  source 1..32744: mol_type = other DNA
aaaacgaaagaagcccacagttgggacgaggattccagttttgcgtcaccgtcaaggcgggaaagttcccggctgtcggttggagggtgggtcctcgccccgccccgccccctcgggccgcccttccgcgcttccgggaggcttgtcccaagctcacggacccctcgctgggtgccggttaagaccccgctccccgtcgccagtgctatggaggcggcggcggcggtggtggcggcagaggcggaagtggaaaacgaagacggcgacagcagctgcggggatgtatgcttcatggacaaaggcttgcagaggtaaagggcgctccgcagccaggagcgacccgcgcactccccagagccggggccacgagtggctggcggcgacaccagagtggaggcgcggcactgctttaccaagaccataagtgaacgcagtctggctttcggcctccccgctcctccaaaacttacctgccgaagtgccaggttgaatgagccgtggatgccttcccgcccgtgtctcctgcccagcgtttcacacgactctgcttagcctagaaactgccccaggaccttgtcctccaccagcttctgaccactctttccttctgctggttttccttacttactggtggttattcctttgcttgccgtttaattgctggttttctcgtgttctctcgtctttcctgttcttacctctgaaaaaaacctgcaggatagtatctctggcagctatgagcgggcagtcgctgctgcctgttagttttgcctcagttctccttgtctgcattcgaaatcatttgtccgttacagaacattgcaatacatatattcatatactttttgaaagtactaaacttactatatttagttcatcgtttccctctctcttgaagccctgacttgtgcaaagcatatgaggcacttggttctgtaatactgtaaagcaggtctccacctgcatttcaggctctttagtctcgacccgtaacatttctccacttacactttatttacctgtactgagctacaggcaattccatagcagacttctctgtgcctttgcacatgctgttcctttgtagcgtgtcctctacgcgaactctgctactgataattaagcatcttgttctggattctgatttaaactttgccagatgatcccaagaagatgctgttcaagggacattttacatttctatttaatactagctgccatttactgaatgctatctgttgtgtgcatgttatatacattatcagtaatcctcacagcaattctacaaggtagtaatttttctcatttacaagtgatgaatgagactcagaatctattgacaatttgttcatctttatacacttcatgaagaattaagttcggattcaaacccattttccgtctaatttcactatgctttttctatctcacattatctgcacattattaatgtcgagaaactgaaatgtgtcagaaagtaaatgactgtcattaagagcatgtgttaacagcataaggtctggcactaaataagaactcaagtaaatgacacagcaggataagtgggaaatgccccagatagtcacatttaaaggttgctagtttgaaatttgcaaatgcttccctgctgtcagagttaggtttcctacagctgtaagatagctgctactcaacctacagcagatgcccgtgacattgtgtgttcctgggtgtatctcccatctagcaactccaaactgtgtatgctgtagtttgtgttcctggaactactatcttcaggagaagcttcagttataaatagtaattggagtgaagagatgagttctgtttaggggagatccattaactttcaacaagggaggacagggactttttcaataggaattgcaataacatggtttgtttttgaaaatgcaatagactgtggattaaatagctattgcacacaaagaagaaaataaagttataatctccagcatgagatctggatttacatatgctctgttagctgcaagaatttgggcaagctatttaatttccataaatttaggtatccttaagatacccactgcttagagttattgtgagaattaattgaggtaagaaaactgaggctcaggttgtcatttgctcaaatcacacagcaaaaccgtgatagaatgcagattcaaactgggatattaacattccaaagcctttacagttattgactactattcagcactgccttcaatatatgctgatgactgcacacaggagttagaaatgcccactgtcacttgcctgccttgagcggtttcttgtttgtataaataatccaaaatacttggttgtgttgtaagaagcaccgtgttttgtgagacatttcaaaggtaccacaaataggaaagatttcattctagaatgaatagagcacatatttagtatctacgtgctgtttggttaattttagttatttggtcatgcttttaaaatctatttttatagtatatattttcttttatagcatatcagaattatctttagattcaactcttcatgccgtcaatcttcattgcaataacatctccaagatcgaagccattgatcatatttggaatttacaacatctagatctgtcatctaatcaaataagtagaattgaaggactaaacacactgacaaaactgtgcacattaaatttgtcctgcaatttgattacaaaagtagaaggtttgtaagtgattttcatttaacacttagcgtaaggaaaatgatttaggtccatttttttccccaaaagaatggaataaatatcagaaactcttaaaaattgagtctgaaactcattatacaaaatattttctccaaaaaagtgtcaattttttaaaaattctgttttttctaaatgccaataaaattgatttcgctgttaccagactggatttacttcagaacagtctgaaataacattgtaatgctatatctctgtaattaattatttaaattttataaaggctttattttattttactttttttttttaggacttgaagaactaattaatctgactagactaaatgtatcttataaccacatagatgatcttagtggtaagtagaaatgcttatgttttctgtatgctaaatgttgtgccacatgtgataagttaacagctcagctaaacatgttggaaatctctgaatattaatctaatttttagccaaagagctcatctagagagcgtattccagtcatgattctattttgttggtaccaaaaccacagctgagtacaaaatagaagttaaaaccaaggtaatcagtagcaggaaaaacttaattggaaaggatccagttgaagggaatatgttttaattttagccaattaatcaatgtactgttatatagagaagaatagttccaatagaactttccacagtggtaaaaatgttctaatctgtgctgttcaatatggcagccagtagccaaatgtggttattgagcacttgaaatgtagctagtgcaacttaaggactgagtttgtaattttatttaattttaatttgaaaataaaaagccgcatgtagctaatggctactgccatgttgaacagtgacaatatgctgcattccaaaggttgttgcaagttaaggaacaaataaaatgagattttctttttatctgtaatatagctaaggagattttaaaagtgttgccttttttaattgattaaagtgatgtagctgataagttgaacaaagtttcatgactattcctagaattatctgttaaaactcgcagaattcctctaatatcttcataatccttatcaatatttgaaacaatctgattcatttgtcgactcttctcccccactaaaagaacactaccctatgccagttgcttagtatacaaaaaataaaaagacctagtctgtacccttaagctgaagtaacaactgtatttcaattttttaaaaccttttttcctcttaaagacatgaagtattagaactgagtttgtttttgccgggtgtggtgtctcacgcctgtaatcccagcactttgagaggccaaggcaggcggatcacctgagatagggagttcaaaaccagcctgaccaacatggagaaaccccgtctctactaaaaatacaagattagccggacatggtggcacatgcctgtaatcccagctactcaggaggctgagaggggagaatcacctgaacccaggaggcagaggttgcagtgagctgagatcgcagcattgcactccagcctgggcaacaagaatgaaactccatctcaaaacaacaaaaggaactgagtttcaaccctggccttgtcattactatgtaatgtttagcaaggtgtttactgtttagatgcaatttccttatctaaaaaatgtgaatggataagatagttaattctctcagtatgtatttatgaagatcactatatggaacagtgtcttatagtgatgaaaaaactaacaataggtaagataagtcacagggcttacattatagtggggaagaaaaacaacccccaaaaaatcagcaaaagatttgaacagacacttcaccaagaatatatataaatggcaaataaaccatgaaaaaaaattggttggaatccttagtatttaatgaaatgcaaattaaaaccacaatgggataccgtttcacacctagaatagctaaaatagtgacagtgctggtgagattgtgaagcagttgaaactcgcatacattgttggtagttttaaaatggtacaaccactttgggaaggagttttgtttttttttttttttaatttgaggtaaagtctcgctctggggtgcagtggtgtgatcctggctcacagcagcctctgcctcctgggttccagcgattctcctgtcagcctcctgagtagctgggactacaggcgtgttccaccatgcccacctaattttttgtatttttagtagagacggggttttgccatggtggccaggctggtcttgaactcctggcctcaagtgatctgcccacctcatcctcccaaagtgctgagattacagtcttgagcctgtactggctatcactgtgcctggctgagtttgacagtttgttataatgataaacataacacttaaatataattgtgcagtctgactcttaggtatttaccaaagagaaattaaaatgtggccactcaaagacctgtacatgaacgttcgtatgattacatagctttttatatgatttttccattttggagaaagttctgaggcaggaagagaagctgtaagtgcttgaagggtacactggcattgtacaattagtacttgtccatgacagctgcagctgaagtccaaggtgggccaggcagaaatagctactgctacaaaatgttctagataagcttgtgcgagaaatattaccagggaattaaatgaatgctaatgtatttattttatattcaaaccagcaaaattgaagtgtactacagagtttgcttatgtctgctaatcaagactgatgtgtcgagagagcctaaagccattgctttatcctttttctcatatgagtgtgtgcatccacctggggaagttcttttgattcattttcttttgaagagaaccagagcccaggaacctcagggactaaagcctcaaagaaatgttaaacttctgtttcttcaaagcaacaattaactttactgatagcctattcattagatatagctgttcacagcaagatctaatgctgcccgtttgcctctaaaagtataacctatctagcaattatttctaattagctattggaaagactattgctgtggcatttaaagaattatgttcctattgcaggattgattccccttcatggaattaagcataaacttagatatattgatctacatagtaatcgtatagatagtatccatcacttacttcagtgtatggtaggattgcacttcctgaccaatcttattttggagaaagatggagacgataatcctgtctgtcgactgccaggtatgaataattaatttaatattttttctaacagttaatattgagagcttctttattttcctgaaattggcattcgtgacctcattttagtcttcagctttgcaacattttctatattggggaaaacatggttacaaataaaattagtgtattaagactaatgactgttacagaacacaagatgaacagttcagtgatgctcctatttaggcagtttcatatttgataagtgaatgcctcaaaattatatcattatagtatattcttttaataatagtataatactatgcagccacaggaaagaatatagaatctctttttctactaatggacaattatgtccaagatacattaagaggaagaaaagcaggttgcaaagtactgcacacagtaggccaccatttgtgtgaaaagggtaacacacatacacaaacatttacgtacatacatatatatgtatgcacgcatgtgtgtgtgtgctcagtatatacataaaacatctagaagaatatacactttaaaaaaatgtataatgttagctaactcaaggaaagggaactaggtaactggagattaagaaatgagaaaattttttactatgttcctttcgaatttcatattatgtgaatttattacattattaataaatgattttgttttaagaaagtttaatatatagagatgctggtgctgctgaaatgctatttgagctaattgggaatcaatcaagttgacaaagataaagcagaccagactaccatttctagaactcacttatctcatattgcttaaccaaacaataagagaaatgtgtagaatgtgaatatacattctaaagatcagcttgagtacaagttagctacagaggcttcattttattattcatatgcaactataagaaggctttttgcagcatggaaacctgtgttggtaattttatttcactgaagaaaatctgatacatttgataattgttttcctgaggtggaaaatatttcctattcttttccatagtctccctgaaaatcaggacagatttgaaagttttctgaggaaaccctttccttgaaagaaaaccatatttctaaagccttgcatttttcttttctctgctaaaccctcaagttggattttttttttttaataatcttatctcaagaacctctggtttctacaatttgaatctttgtttttcactttttttcctaaattaggtacttctctcaatacagtcaccctcccttcagaattgagaggtaacttattgctgaaatgacttttcttccctcaagatttctaatactaatttgccagacttctttcttactttcggaattcttccaaccactttgttggtctttattagaaatatacttagttttaaaattacatttacacaggattaaggtgctcctgttagccttagtaccaaatgaatgttaatttgtcagatatgattgttcttagggaaaataaacatattattcttgattacttgatagttcacctgctttaatattagttatgtgtaatttaaaagggaagaagggatattctgctaatgctgagacctcgctagggaaattctggcattttggtcattatccacatcatcctgctttaagttcatttatgttgtttatattaaccatattaaaaaataaaagacatgtttagcttccttcctagaataaatttctactagttttatgcattatatatttaaagtaattttttagagatagttattttaactttttgaacttcatcaggagggttatttgagagggatggagagtggaggagaagtgttttgtttcttttgtatgtaaggatttaatgattacatgctgcagaagttgaataagtaacaagtttattatttgctttctggaactattccgggtgatgtatctggtagctgataaatttagtttattctagaaataattgactttttttaatatttcagttttcattttgaatgatttgtttccaagggtacagagcagttattctccagactttgccacagcttagaatcctagattgcaagaacatatttggtgaaccagtaaatttgacagaaataaattcatcacagctgcagtgcctagaaggtcttttggataatttagtttcttctgattctcccctaaatataagtgaagatgaggtatagtatttactttttttttcctaatataaaaaataccttcaaatttcaataagtgaatataaattaaaaggattttggtttgtttctgtgtcatagatcattgatagaatgccagtgataacagcacctatcgatgagttagttcccttggaacagtttgcaagtacaccaagtgatgctgtgttgacgtcttttatgtctgtgtgtcaatcttctgagccagagaaaaataatcatgaaaacgatttgcagaatgagataaaacttcagaaattagatgaccaaattctacaacttctaaatgaagtaactatttttcctacttctctatagacatgtttattgaagaaaacatagttaagaaaatgtaaaataaaaattatgtactagctgaccaacctattttagtgcatcagtgttcgtgtatttttgttttcctctacagaaatagggttctattattgcataatggtagtaaaaggtaacataaatttttcactcactttacttgtcttcctttacatcttcattatgtaatttctttgtcttgttctgcagtactttacattacttctattacacccaacttttatttccaccgtaagcaagggagaaactctttggactcagtgttacttaacgcaaaggaatactttggcctctactatctcttcagtggtttaatggtcaaaatcacttctacaacttatagctaaatggcaggttaatttacatagttcctgtatcaatttcattttctagtagaccatcacctaatcaatctatactttcctgagctgttaatccttctttaccctgctactgaatctctagtttttagaatctgtgaactatgtgtatgaactacaattcctagaatttactgctattcaggtctccaaccctcactccagcattctcactatcatccacagtggcagtggttctcttgggtaccactactatctgactgcaatagattattactttatttgccttctagctgggtgtaggatagaaagatagtggtatagttcaaagaggctattagtcatatgttagttcaacttaaaaatttttaactaagttattgttactaattttttttttttagagtcagggtcttactctgtcatccaggctggagtatggtggcatgaacatagctcactgcagcctcgaattcctgagcccaagaatcttcccacctcagcctcctgcgtagctgggactacaggcacatgccactgtgcctagctaatttttaaattctttgtgtggagactgggtctcgctttgttacccaggctttctcaaactcctggcttcaagtgatcctcccacctcagcctcctaaaatagtgagattacaggcaagagccaccacgcccaacctctataactaaattttcttagtcaaaattttttcgcaaattaggaagggggaaggagtggaaaatgcttatgaaatggttatggttcaggaggtttttaatcctgaactattatttatataacataatattaataatgctggataaacaagaggtctgccttaggtgagtgaaagtcaataaggctgtgaggattctgtgtttcagaaatccatagagatttcagtttgagccaataaggagatagtaatagaagtgagacaagaatgctggcctacatattatttgacatcattgatactgtatggctggacttttggactcctccatttcctcaggtttcatcttttcatcttttctaatggctgactcttctaccagtgaaaacttagattgaagtttaatgtctttaatttgaagtgaacatttcagtttctcataggctgatctcattttattctcatgacagcccaatcaagtagatagagattaatatattattgtccttgttattgaaaagaagatccagagtttaaatcatttatttaaaagtactttatttgcaagatagttgagctccaaattcatatagctccttatgtccaatcaaattcttcaactatgtcatgcttctcacttatggtgctagttctttctactttgttaaccaaaaacaggagtctagctatctggaaagaaaggtgattcactgctatgtatatttaaaatgtttaagaaaatgacttcttgttcactgtcttacttggggtaaagagtaaacatggagtttgaatttcattgagctgttcgtacactcaaatgatttcatctcgagtatcaatttataaagtcataatattactgcaatgtgctgtactataataaagacatttattttccttaatcatgggacttaaaatcataattaaccctgccgaactgggaaattttatgtctgtgaaaagctgttttgcctttattttagtttttctccaacattctattatgagcatttttattcttcagcaaacttgaaagaatttcttagtgaacatcagtatatccaccaaccagattctacccttaacattttactacatttattttgtcatgtagctatctattcgtgtatcaaactatcttatgacacatttcaaagtaaattacacacatcaatacatttcttcctaaatactaagcatgcatatcattaattagagttaaatattttttaggtgttttctttaatgtgaaatacaggtctgcatatttcctgaattgagaatacatatatctgttatccaaatttctgtgaaggttaacattatcatgttcccttatggcctctctgacaagcagtcctccactgcctccagaggcaatcacttttcttattttttgtctaccatatattatttaatatttgttttagaacctaatataaatagaatcattcagtgtatactcttttgtgtagggcttctttcactgagcataaccttgtaaaaattaatccatgctattatgtatatcagtagttcttatttctatgtagtatgccattctatgaatatattacactttatttttccattgtcttgttgaaggttttaacctagcttataacctgggttattagaggtttatgagtagagctgcaatgaatattactgtataatctttttgtaaacatgtatctttgtttctcttcactaaacagctataagtgcagtttctgggttatagggtagatgtatgttgagttttataagaaattgataccttttttcaaagtggttattctattttattcccactaacaatgtatggctgttccagtttttctgccacctcaccaatatttggtgaggttagcattgcttttattttagtcattctagtgggagtatcctgatgtttgttgtgattttaatctgcatttcactaatgattggttatgttggacagtttttcatgtgtttattgaatatttatttatcttctatgaatgcctgttcaaaatttttgcccatttttaaattgggttgtttatccaggttgtaggaatttgttgtatatgctagacaccagtattttgtcaaatatatctagtgtgaatattttctccctgtttgtggatctcatattcatttccttactggtcttttgataagcaatagtgtttaattttgataaagtccaatttatcatttttttccctttcatggtcattgttttctgcaactttaaaaacttttgtgcataccaaaataacattctcctgtgttagcctctaaaagttttaatggttttaccttttgcatttagatctgtatacatatatggttcactcttttccatatggattttcagttatctcagtaccatttgtagaaaaggctcttcttttcactaaatttctttaatgaatttcttgaaaaaaaaaatcaaatcaacttacaaactgtaaaatctagctctgggttctttttttctttgtcagtttgggtaagctgtatttttcagttaatttgtccatttcatctcattatcagcataaaattgttaatattcccttattatacttttaatttctataggatctataatgaaaatctctttcattactgatattggcaatctgtgttttctctatttttatttgtttgccttgatcagtttagcaaggggttttgatgatcttttcagagaatagacttttggctttgttaatttgattaatatttgttttctgtgttcttgatttctggtttttatttttcccctctaccgtgaatttactttgctgtttgttttctagcactttttttttttttttaatacagtcttgctctgtcacccaagctggagtacagtggcctaatatcagctcactacaacctccatggctcctgggttcaagcgattcttctgcctcagcctcccgaatagctgggattacaggcatgtgctaccacacccggctaatttttgtaatttcagtagagacagggtttctttcaccgtgttgcccaggctggtctcgaactcttggcctcaagcgatcctcctgcctctgccttccaaagtgctgggattacaggcatgaggcacggcccccagctgtaacgtcttaatataagtacttaggtcatcgattttagacatatctcctaatgtaaccttttaaagccgtaaacattcctctgagcactgctttagctacattccacaaattttggtatgttttgcttttgctattgtacagttagaaatacttttctaatttcctttgtgatttcttccttgatccaagaaatatttagaaatgtcttttattaatttttaaaccatttgtcattctgtagatatgttattggtccttgatttctgatttacttccattttgttcagagaacatattctgaataatttctgtctttttaaatttattgagtttttttttatagcctggcatatggtttttctaggtggatattcattgtgctcttaaaaagaatgtgtattctacaattaagtcaggatgattcatagtattttcaggtgaaccatgtctttactcatttttttgtgtctgttctatcagttgctgatgcttggttttttgtttgtagaggtgggggggttgatctagttctatcaattgtggcatgaagaagtgttgaaatctctgtggttgtggatttgtgtttctcactttagttctttatttgcttcttatgtttgaagctctgttattaagcacatacacatttatgactgcttggtctttcggatgaagttactcttttatcatcatgaaatgttcctctttatctaacagccttattgagatacattattcacttaccatgtggttcacccatttgaagtgtgcaattcagtggtacctattagcagtcattactcatttccttctacctccaccctcaaccctaagcaaccacaaatctattttctttctctatggatttgcctattttgaacatttcatataaatgaaatcataatatttagccttttgtgactagcttctttcacttagcataatattttcaaggttcatccatattgtagcatatatcaatacttcatttctttttattaccaaataattattccattgtatggatataccacattttatttatccttttgtcagttgatagacatctgagtagcctctacttttggttattatgatatttctatgaatatttatgtataagtttttgtgtggacatagattttcatttctcttggctatatccccagaagtagaattgctgggtcatatgtttaacctttggagcaactgccagactttccaaagtaactgcgccattttacatcttcagcagcagtatatgaaggttcagtttttccacatccttgctatcttgttcttatatgtcattttcattgtagccatcctagtgggtgtaaaggcatatctcatcctggcatccatttacttttaacctgtttgtgtctttatatttaaatgggtcttgtggacagaagaaaagtgagtcttgtttttaaatcccatctggccatcacttcttttgaagagtctgttaaaatttactgtaattattaatgaagttggattagggtctaccattttattgttatttgttttctgtttgtctcttttatattcatttttcttcctttcctactttctgttggataatttttagaattcagttttttttgttttgttttttgttttgttttgttttgttttgttttgttttttgagacggagtttcattcttgttgcccaggctggaatgcaatggcgtgatctcagctcaccgcaacctccaccttctgggttcaagcaattctcctgcctcagcatcctgagtagcagggattataagcatgtgccaccacgcccagctaattttgtatttttagtagagatggggtttctccatgttggtcaggttggtcttgaactcccaagctcaggtgatccacctgccttggcttcccgaagtggtgggatagaattcagttttaattcatatgttggttttttagtcacaattctctaggttttgttttggtctggatgctctaaaaaaagacttgaaacagtctacttagagttaatactgtatcacttcaagtaaaatgtttaaacattatttgtatttatctgtatataaatcaacttgtgatgctctttatttcttcttgaggattcaaatttccatctggtgttatattccttcagccaagacttccagcctgaacttcctttagcaaatgttgtagcgttacatctgtggatactagtctgtttcacctttattcttaatggactttttcactgaatgtagaattctcaattgacaatttttttttctttcagtactgtgcctggcctccatagttttgattgcaaagttaacatgaattcaaaatccttgatttcttgtatgtaatatgccatttttctttggctactgtcaagaatttgtctctctttgtttacagcagtttgactgcattgtgcctaaggatggttttctttgtatttatcctgcttggggtttctctatgcttccttaatctgtaattttatgttttcacctaatttgggaaatttcttccaatatttcttctgctccattctctcttctctttttcagattccatgtagactttttgatattgtctcaaaattcactgaggctctgtacattttgtcaatgtttgtttttctgtattcttcatatcaaataacttccattgaactaggttcagcttcatgtactctttctttattgcctcactctactattaatctcagtcagtttctacttcagacattgtatttttcagttatagaatttctatttttagttctatttctgagctgagttttcttgttttttcatttatgacaggtgtatttcttattatctcattgaacatcactattggatcgctattttaaagttcttgtttgcttattcaaacgtttgagtcatctcaggtttggtgtccattttctcttgagaataggtcattttccttgttcttcctacggcaagcaattttgaagtacgtcctggacattgtgaatgtttcgttgtagatactctagatttggttatagtccttcaaagagtgttgacatttttgttttagtaagcatttaacttggtttgactcagattgtatgtttttctcttaggtagcagttcaaagttcatttcatttattttgttctttgctgggccacttgcagtccacttcatactgccctctggttcttcaggcccagaagtctggtttttcctacctgaggtttagactctctgcatgatgctgattgtgatacattctcaggctaaaaaccataaaaaaacagaaacactctcattctggtccattttccaagtgtcagctcccctctaggataatcctagttttgttcactttataaggccttcaagtagtttttatttttgttttgtttgtattttttccagagtttataattatctgcaggaaagtcaacatggtagaagcttgcttgtccataccagaagctgaattccctgtctttaatatcaaacatttctagtttataaacccttaatcatataaaaagatataatatttcagaagatttccaatttcaatcttttttatactgaacttttaacaaattttgttggctttttaaattttagacttctaattcaatagataacgttcttgagaaagaccccagaccaaaaagagacacagatataacttctgaaagtgactatggaaacagaaaagaatgcaatagaaaagttcctcgaagatcaaaaatcccttatgatgccaaaaccattcaaactattaagcaccacaataaaaactacaactcttttgtaaggtacttgttttagttttagaaatttaaggcacacagaagttaataatgctggcttctctcttgaagctatctcttggtgatatttgttactttactaatgttgaagatttgatttttcagccttgcaggttctgatctggtcagtacattcatgtaaatgtatataaaaggatccttttctctgtgtctgtacctaagttgcaaaattaatgtataaacctgaagatatctcatactataaagaatactgactttagaactggaataccttagtttaatctaggtttagttcaatcaaaaacaatgtatgtggttttagtttaatttgaactaataacattagttcaaattccactgcattcatttacagtgggaaataagactagtacacctgagtctacatgactagccttttctctctttgtaggcagatctagatggaaagtcaaatcctagtcagatgatactgagtttaggattaaatgtgaataagatgattgtgtttaatgccataaggacaagggagaccaatatctgtactttcataattgggatcaccatgacaagtggttcagaaatgactactctgggatggttacagtaaacttttgcctctgtaattctccttttgcaaagcatattttgttgttttgttgttgattaattcttccatacctacccaattacattttacatgtatatatacccacacacacagaggcattcagttcacttcaaacactgtacttttttccaggacataccctggaatttctttggtcctaccaagtgatagaatctattaactttgatccattgtatgtcgattttaaacttttaactctcaaagagtagttctatttactgtcttttcaagttcttgggtatcatcttaccacagtactttttaaattattctgatatatccaagaattctaccctacctgaaaatgttgaaccctgaacatttatgaaatcattatcttttttaaaatcttaaggcactcattaatcaacagagcacacccattataaaatttatgaagcagtttgtccaagttactataattttattaatattctttttaaaaagctgtttgcatatacaactagaaatgttaatttagagaaaagtaatgtgaacactacttttttgagttattttctatgtttcattctttacagttgtaatcgtaaaatgaaaccaccttaccttaaagaattatatgtaagctcatctttagcaaactgtcctatgttacaagaatcagaaaagccaaagactgaaataattaaagtagaccaaagtcactcagaagacaacacttaccaggtatgatttaagagttaaagaaaaaatgagtatgaataattttaaatacagagtcccagaaaaattatgcatgcttttattagcaaaaagtgtttgaattttattggagtgatgaaaatgggttattttttccttcctgatttccagattttatgtaatgttatttttgaacgaatgaaaattacatttttttatgatcagatttaagtgaaatcatttgttacatgcttctggaggaagaaacagttatgaattttttaattcttattccttaaggtagtgcttcctactttttttgggtgtcagacccttttcagtatctaaaaaaatttacaggtcttctcaaagaagcctatttttacactcaaaaaaatgtatatatttcaaggttttcatggactttcctgaaactcaattttggaccactggatcccagattaagaggtgttcaaggccgggcgcggtggctcacgcctgtaatcccagcactttgggaggccgaggcgggcggatcacgaggtcaggagatcgagaccatcccggctaaaatggtgaaaccccgtctctactaaaaatacaaaaaattagccgggcgtagtggcgggcgcctgtagtcccagctacttgggaggctgaggcaggagaatggcgtgaacccgggaggcggagcttgcagtgagccgagatcccgccactgcactccagcctgggcgacagagcgagactccgtcaaaaaaaaaaaaaaaaaaagaggtgttcaaaaatgttttaattctttaaaatttgcttaacatttctcatgttgagaaacttcagtacttgtggtttcattattttatatttttcattaacttccccttatattacttgtgtattgttctttcaataatagaattggtacattttaggctactggtttcctccccttattctcaactatagaggctttaatattgaaaaataataattatcattatgactttggacacacttcatctttcttcttacttaacctattgtgcctgtgtttcccaagttacatattcatttttctcatgaaaaatcaatcttttctgattcaacccccgccccaagtttgttcgagattagatccttaccaatctttatattcccttgcgtgccttggtaaggactctgtttccttaatacagagtctggcatgtgggtgccatgctatgagtatatactatttcaaaaaaggaatcttatctactatggcataataatagcagctaacatttattgattggttattatgtagcaggcactgttctgcacttacctacatgctttgctaccagtaacataatttttggcccggcgcagtggctcacacctgtaatcccaacactttgggaggccgaggtgggtggatcacttgaggtcaggagttcgagaccagcctggccaacgtggtgaaaccccatctctactaaaaatacaaaaaaacagccaagcttggtggcacatgcctgtagtcccatctactcggaaagctgaggcagaagaattgctggaatccaggaggtggagtttgcagtgagctgagatcatgccactccactccagcctgggtggcagagtgagactcaaaaaaataaaataaaaagtttcactgtagctctttgaagtaggtactattattcccctgttataaatgggaaaattgaggctgtgagaagttaggtaacttttctaagttcacataactttgttgttttctttcagtcccttgttgaacagctagaccaagagagagagaagagatggagagctgagcaagccgaaaataaactcatggattatattgatgagctgcataaacatgcaaatgaaaaagaggatattcatagtctggctctacttaccacagataggtaaaaagaaattaataaacctgaagatacctcatagcataaacaatactgactttagaactggaatacattagtttcagtgtggttcaatcaacaacaatgtatgtggttttagtttgatttgaactaattttattagacaatttagcactttattagcttgttatatcaacaagaaattcaggtacatgtatttgagccctcaagcaggaaggtgtcagataaatattataagtaaagaacagcaagagactagagcagtgattaacaaactttatgtaaagtgccagattctgtaaagggcaggcattggcagcctttttctttaagcttcatgggtcatatttgatctcatcacatacttatcttctgcaatgggcttttgtatcatatagcccagtttcttaattctgatgtttttattctatcctcaccattacgtctcccattttatctgggttttttgttttgttttgttttgttgtattgcattctttaatacaggtctgtcatttcattctgtgaaaataccagttttttaaattacaataactttttttcttctgtttcctgtaattatttctaacgtcatgcttttcctcaaatgattataacatgtttagagtttcttatggtttcttacccttgaatgagcactaggtttttagacttgacatttgctaacacactttgggaagttgctcttggttccatttcttgtctgattgtgcagtggataattccccttctaaaatctgatttggataagttgatgtacacagttcacagcccagttcccgatttcttttaggcacttttgtgatactgacgtggtgttttctaccccactgcatgtttctctgataggttgtacctgtggagtataaggacaattctaatacgcaacatgcatgctatgagaacctctataattataaagctgtgatgcgttatgttatcactagcccttctaccactacccaccaacttcctgccttatttgtgttttataaatgtctgtctgaattgacacaagaagctactgggtatggatgagggaacaggatgtctcaattaagagtgctctgactacctcagaaaaacagcactcctgctttcagtaagtgcatgagtaaccaacattatgtagtgacagatttatagagatcttgtgactgagtcatggacagatagtagaagagaaaagatatgtcttccttttttcagaatggagcagtttcatgaggcaaagcctgagtgttgtaggagttgtttttaatttcaatttagttccatttgccttgtaattgaaattattcccaaattttggcattctcttatcctttgttttcagttatatgtgtatgaatttttactttattctgtattctaggtatttagtgggatattagaggacgctgtgtctagggctgctagccaaagtccatttaaactggaagactttgggcacactttatctttcttcttacttaacctattgttgtgcccgtgtttcccaagttatgtattcatttttctcatgaaaaatcaatcttttctgattcttcttttatctgtgccacccccccaccccccccaccaccacatgtttgtttgagattagatccttaccaatctccctgttcccttatgtgccttggtagggactctgtatccctaatgcagggtctggcatgtgggtgccatgctgtgagtatatacaatttcaaaaaatgaatcttacctactatggtatctttattatccaaacctccttgatgaccagatctgttcatctaattatctactaaaaatgccttgcctgtattcctcataagtttcttaagatcaccatggcctcaggtggattcattcttcttccttattttatatttcttgccctaataaatggtgccccatccagcatccagtcagtcaccaaaactatagaaatctaggaatctttgttttttgcttcctttctctttctcctatcccacaaccagttgatattaccatctttattgatacttttattcatcaattgatattgatatcatcttaaaagatgttgaactatctcctctgtatcccaaaactgttacctttctttaggcccttaactgttgcttagatgattgttccatttctgtttctctgtggctttccctgcccctacccatatacagtctagcacgctttcatatagcatatcaaacaggagttgagagcatgaacaaaggaagaccagttcagagagtactctcattgaagtcaacaattttatcatttttatatgtgtaatatacttaacaccacatataacttctgctttaggctaaaggaaattatttttagagagagaaattccaaaggacaactcgaagttatggttcacaaacttcaaaatgaaattaaaaaactgactgttgaactaatgaaagcaaaagatcaacaagaggatcaccttaaacacttaagaaccctcgaaaaaacattagaaaaaatggagagacaaaaaaggcagcagcaggcagcacaggtatttctctattttaatatatgagtagcacagattaacacaaattcatagcttctatcgtgaaacaaattatactacctagaaaacctaaaagatgtaaggccatatgcaaaaattaaattgctgttaatttaacggtcacatagcctgttgaattatgtctaaattaagactactagctcttaacacaaagcaattaaaaagaaaagttgatggaaatgttgcaggtggttaggcttttattctgagagagctggctttttaaaaggctttcaggtgattgaaggaatttcattttcatgctttctgaatggaaattatcattaaaatctgtgatgcaaataagcaatagttaatgctagtgtatttgttccttccaaggctgcactttgtgtgactgtaacatcattaatttattaaagtttgaaaatcaacttagtcaccggacactgtcatttaaaaggtacttatggaaactgacattaaaatagcaggggagactattatctaaataatgtaattgtgggtattttactcagataagactgatccaagaggtggaactcaaagcttcagctgccgatagagaaatatacttacttagaacttcccttcatcgagaaagagaacaagcgcaacaacttcatcaacttcttgcattgaaagaacaggaacacaggtaaatgaaaaatgtatcaggaatgtattggcatttaaaaaaagaaaaagaaagctactggttccccactaccagtattttttttttttttttttgagacggagtcttgctctgtcgtccaggctggagtgcaatggcgcaatctcggctcactgcaagctctgcctcccgagttcacgccattctcctgcctcagcctcccgagtagctgggactacaggcgcccgccaccatgctggctaattttttttttttttgtatttttagtagagatggggtttcaccatgttaaccaggatggtctcgatctcctgacctcatgatctgccccactcggcctcccaaagtgctgagattacaggcatgagccaccgcgcctggcccccaccaccagtatttaaagatagtgattgagcattggtgaagtctgacagaattagttagtggaaaatgccgtgttcatgtatgtatacattagaatcagccctatagcaagaactagtagctaaaaaatgaatagttgcctttgttatcagcatttgaggtataggtttataacaatatagcttattgttcatttcttcaaacccagccaaaagttggtctttatatagagagaaaatttttaattgacccccaagttaattaattagtaaattaatcagtattctttattcctctgaaggaggggtcagtgaactttttctgtaaagggtcacatagaaaatatttcaggctctgcaggccatacctaactttgcctttgtagcacaaaagtagccatagataatacataaatgaacggcatggctgtgttccaataaaagtgtatttacaaagaaaaaggcagtaggtcacatttggctgatgggctgtagtttctcaactcttgctctacagaatctgtaataatttcaacattttcagtttatctatttcagttatctatttactatcctaccagtgaaattgtatgattatcatatgttaattgtatttattccgaaacctgttttgttttgtgtctacataaattttggtgctctggggaaaattgttatcttgtatagatgagacaattataaaagattgggggaaaataatcacaaaaatctagaattttgtactttgtttcctttacaggaattttgtacttagtttcctttacttagtttcattccagtttaaagaaaccaaaaactggaaataatgggtttcacattatgagtttgagtaatgcaagaaaagtagtggagaaccgtaaagaatgaactaactggcccaatatcaaaagattagtaaataattttacactttaactgactttttctattaacaaaccaccagtgctaatcagactgtatttattgcaagtcaaagactcggccaaagtagtagatacagtgaagcatcttatgcaaatgcatctgaagaatttctgaagccatagaatgattctgaactatctcatgaagttaagatttgacatacttcccttatctccatcactattaaatacacaatcaaataaaactcatattatttgtacctatctatgcccaattactgcgtttgaaagtgagaggctgatactgaattaacaatactgaatatagaatattaagaactacgtaaagacctttaaaatgtttcttttcaggtgagtatcatccttttatctttatatgtttttcactccaggaaggaacttgaaacaagggagttttttactgatgctgacttccaggatgccttagctaaagaaatagccaaagaagagaaaaagcatgagcaaatgataaaagaataccaagagaaaattgacgtgttaagccagcagtatatggatttagaaaatgaattccgtattgctttaactgttgaagccagaagatttcaagatgtaagaattggcacccagctttttattgaaaacagaatcagtaagatatggtttgatgagaggacttgttttagaaacatagctgtattaaatgttggcttcataatcttaagtaaaatatataaattcttagaggccttagtttcctcaaataaataatagctactatttactgctcttgcaaaaactaagtaagattataaatgttatagagcactggaataggaatctgagaacctgaattccctcctattactgtagagcagggattggcaaaactaaagcccccaggccaaatatggcccactgcctatttctctttaaagtaaagcttttttggaacagagccatgctcattttttacatattatctatggctgcttttccattacaaaagcacagttgagtactttcttttttttttttttttttttttttttttgtttcagatagagtctcgctctgttgcccaggctggaatggtgcagtggcatgatcttggctcactccaatttctgcctcccagattcaagcagttctgctgtctcagcctcccaagtagctgggactacagtcacaggccaccacgcccgcctaatttttgtatttttagtagagacaggatttcatcatgttggtcaggctggtctcgaactcctgatctcagatgatccgcctgcctcggcctcccaaagtcctgggattacaggcgtgagccactgtgcccagccgtagttgagtactttcaacagagttcatatggcctggcctgtatagcctaacagtttactgtctggtactttctagaaaaagtttggtaacccctgctatagaggaataattgtgctcctctgaccagtcccaccaaacgtatagtagatcccatttcctcttgcctacttaaagatatggcttcagtaagtcttctttcttactctcttacatcttcagtttttccgctatattggatcattcccttcagcatacaaacatgctgtgatttctcttatcttaagaaaactctcttgattccatttcttcctttgactactatgttgtttctctgcttccatttacaacagaacatatcaaaattgtgcatttgctgtctttgatttctctacttctctcttctccaacctgctctcatctggcttttatctctattgctctactagcattgcgctatcaaagccaccagcaatatccacactatgaaagttgtgagtcaaatttgtcctcatctgatttgacctaggtgcaggattagacagggttgatagctttctcctcttccatactctttctttgcttggtttccagcacactgcatttcttggttttcttggctttccattacgtcacttcttttcagtctctttgtttctcttttgtccacagtttcattattgcagtgcccaagttttcagcccttaaattccttttcttttctatacacactcattctcttggtaaactcctctagcatcattatatctccagcctggacgttttgcaagaattttaaacttctatgtctaaccacctatttaacatattctacttcactgctaattttacccccaaaccttctactttgacatttctcctgtcccagttaaagacaactccatccttctaggtgcttaagccaaaaacaaagtcattgttgattactctttctgtgacactacacattcagtacctcaagagattctgtcacccttatttaaaaaatatacatgtggccatttcttaccacctctaacacagccactctggtatgtcacagtatcttgtattatattaagagctttcaagttaatcttcctgcctctatccttcccctacccccctctgtttatgccaaacacagcagctagaatgttcttttaaaatacatgtttggtaatatgactcctctcttcaaagacctccattgtcccttcattttattcagagtagtggtcaaaacacttcacaatctaaccctctgagttcatctcctactaccttccccttcatttacaccactccagtgacaacagccttcttcctattcctccaatgtatcaggcacattcctgcctagaacactcctttcccacacatttgcatggctccattccctacctccttccagtcattgctccattgttgcattctcagtgattatgccagttaaaattgaacccacatctcccaacacttcacacacttcacatccttctaaccttttacccaagcatatagtatcatctaacatgttgtataatttattatgcttgttgttatattgtcagtgcctgccacctagaatttaagctttacaaaagcaaagattttattctgtggtattcactgatgcatttcagtgctagagcaatatctggccacccaggctggagtgcagtggtgctatctcggctcactgcagcctcctcctcccgggttcaagtgattctcctgcctcagcctcccaagtagctgggattttacaggtgtgcaccaccacacccggctaatttttgtatttttagtagagatagggttttaccattttggccaggctggtctcaaacttctgacctcaagtgatctgccctccttggcctcccaaagtgctgagattacaggcatcagccaccgcgcccagcccaaataaatgatttctggctttagatttgtcactaattccctgggtcactttaggcaaatatataatcatcatcctggatctctgtttcatcatctggaaattactagattgaaacagattatctttaaatcttattcttttgctaaaactgtgatactatttccagaagcaaatattttctaattatttggagaactgctatttataatacaattttggaatataggttaaagatggttttgaaaatgttgcaactgagttagcaaagagcaaacatgctcttatttgggctcaacgaaaagaaaatgagtcttcctctttaattaaagatctgacctgtatggtaaaggaacaaaaaacaaaactggcagaagtttctaaattgaaacaagaaacagcagcaaatttacaggtaagactttgcaacattatatgttttaaaatttttttacattattttctcaagtgggttgtgataaatttaggaagtacacgaaaggaacttttaaatgatactaattatatattgcatataagaaaaatagtataactaaagaaattaagctcatgatttcacaaattgtattgctcatgagatagcaattaggtaaaataagtaaattagttttaagaaacatgttcaattaaataggtgccagtagtatagtgatacaacaaaaattgtggaagtgatactcaaatggttaaagtttgggaagcaccacttggattgctggtattaattttgtggtggtgatgctggtggttttagatatacttagatgtaataatcattaaattaatgtctttattgctgttgtctcaattttaaacattaatgctattttacccaaaatttgtttctggaaaatgacctttaacactattgatataaatgctcgtgaaaaattttgagtattacaggtatagtttctctttaacaattttagaataaaattcagattgtttaaaggagtggtatcttaaattcgactgtttatttcatgacctacatttgtctttagtaaaactaaaacttctgatgtaaaatttggtaatatttacttgtatttgcttaaataacattttttctcattataagatggaaaaaatagaaaataaagcacttaatataataattcttatttttttttttgggaatatacagaatcaaatcaacacccttgaaattttaattgaagatgacaagcagaagagtattcaaatagaacttctcaagcacgaaaaagtccagcttatttctgagctagcagccaaggaatcactaatatttggtttaaggacagaaagaaaagtatggggacatgagctggcacaacaaggtaaaattctcagattttcaaagggaaaatagcttattcttataaatgagcaaatctgggtattggagagaaaaagactcaactctgcctaaagatgccaagaaaaaaggtgaccctttatctggaaggataagtaggcatttgccagctacaggggaatgaagacctcttaggaaatgagaaatagtttattacaccaatgaagaagttatggctctggttttttaaattttgtttcccatgataatttgactactattctgaaccatgggtgcttttacaaatcagcatctgaatatattgttaaaaataattcttttttttttttgagacagagttttgctctcgttgcccaggctggagtgcagtagcgcagtctcggcttactgcaacctctgccttctgggttcaagtgattctcctgcctcagcctcccgagtagctgggattacagccatgtgccgccacacctggctaatttttgtatttttagtatagacggggtttaaccatgttggccaggctggtctcaaactcctgacctcaggtgatccgcccaccttggcctcccaaagtgctgggattacaggcgtgacccaccgtacccggccaaaagtaattcttatacagtgattttaagttatttgtacagtatacacatttaattttcttttctgatatatgcaacatttattgtgcatgcacaaattaaaatattatataaatgaaaactattttttagtaaatcctcagtttcattccctttccaatcattgtaaagcaagagatatatactggtttcttttgttttgttttgttttgtttgcattcacagatacctttaaaattatgaatagctagatatttggtctttttcttttgagacaagtctcactctgttgcccaggctgaagtgcagtggtgtgatctcggctcactacaactccacctcccgggttcaagcaattctcctgcctcatcctccccaatagctgggattacaggcatgagccactatgcccggctaatttttttgtatttttagtagagacagggtttcaccatgttggccaggctggtttcaaactcctgacctcaagtgatctgcccacctcagcttcctaaagtgctaggattacaggagtgagcagctgcacccagccaagatatttggtcttaatggagcattccttatttgttcattctctgtaggaatttttaatatgctcttgtttgtttgaatgtcataacatgaattaatattacatatctgagttacttgttctcaactttatttgtggtttcaggttttgaaataaccacaagtgtttaagaggcctttttgtttgcttcccctttcctcttcatattgtactattataagctatgtttctttatttagtttttttattattattatattacagtttgttagagtttaataagatacaaacccccaaggtgtttcaaagtatgtaattgatgatttttgtttcttaggatcttctctagcccaaaatcgtggaaaattggaggctcaaattgagagtttatctagagagaatgaatgtctgcgaaagacaaatgaaagtgatagtgatgcattaagaataaagtgcaaaatcatagacgaccaaactgaaactattagaaaattaaaagatgtaagtttgacattttattttggttaaagagcaaatggcaggtttgcaaatctttggatcaaagtatccaaaagctgtttttcagtgttttccaactgttgtaaaatttggggtagatatcatgcatttctttttataatatttgcccttttgctcttaaaaagttctacatgatatttattaatttggaatgaactttatacttcagaatttaatggagaatcttattatggcctttggaataactggaaatacccaatgtcaattaagggttaggagtcacaagaaaatgaacattttatatgtttaaaatattattttaaaggataaattaaaccatatctaattaaccagaatatgaagcatttaaagttaataaaaacaaagtgccaatttttttcttaaagtgtttacaagaaaaagatgaacacatcaaaagattacaagaaaagatcacagaaatagaaaaatgcactcaagaacaacttgatgaaaaatcttcacaactggatgaggtacttgagaagttggaaaggcacaatgaaagaaaagaaaaactaaaacaacagttgaaaggaaaggaagtagaacttgaagaaatcagaaaagcttacaggtattatatagtacagtatttcccactgagaaataaaatgtggcttaataatttaataaacccaatttatttttcaaattacttctcatattagtacactgaatcggaagtggcatgataaaggagaacttctatgtcatcttgaaacacaagtaaaagaagtgaaagaaaaatttgaaaacaaggaaaagaaacttaaagcggaaagagacaaaagtattgaactacaaaagtaagcattaggttctaaaggatttgagatctccttaatcgtaaacactgtggaatgggtgaaatacgtataaagagaggagggctaaaaatcatgtaagacatagttatttgccaagaagtttatttccatttcatctgtaaaatgaagatagcagtagcacctaccttaaatgttagataagaggttgacatttgatatatatgtgtgtatttatgaatagatgtggcttatatgaattatctagttcttagaacagtgcctgacacataagaattgctatatgaggctgcacacggtggctcacgcctgcaatcccagcgctttgggaggccgaggtgggtggatcacctgagattaggagttcaagactagcctggccaacacgatgaaaccccatctctactaaaaatagaaaaaattagccaggcgtggtggcaagcgcctgtaatcccagctactcaggaggctgaggccagagaatcacttgaagccaggaggcggaggttgcagtgagctgagatcacaccattgcactccagcctgggcaacaagagcgaaactttgtctcaaaaagaaaaaaaaaagaattgctatatgaacattttgtttttattacgatgagcattttaaactgtgtttgaatgaaagcagctagtgatattttagttgttgaaagtggaatttagaggagactgccagttgactaccagggtcaatgagctcctgaggaggctggagcacatttagatagcagttgccagcacaagctgaggatgagagccaatttttttgtttgtttttccgagactgagtttcattcttattgcccaggctggagtgcaatggcacgatctgggctcactgcaacttccacctcctgggttcaagcgattctcctgcctcagcctcccgagtagctgggattacaggcatgcaccacaacgcccagctaattttttgtatttttagtagagactgagtttcaccatgttggccagtctggtctcgaactcctgacctcaggtgatccacccgcctcggcctgccaaagtgctgggattacaggggtgagccaccacgcccggccgagagccgattttaaagagaggaaataaaatgtgtacctggctgccactgttctgtgggttccataaaatgctcaagaggaaataaggttttactgtgttaaaaaatataactagacttgttaaaaataagttataaagttggaaccttcagaattaagtagcacagcttaatgattaattctcgtgtgaagatagagtgatacagataacatggctatctatggatagcccaaaaatctcacttaaagataggttctaattatgtc

SEQ ID NO: 433 - DNA, 32744 bp, Homo sapiens
  source 1..32744: mol_type = other DNA
ttgctctgccagtccagccctaggttctcctgaatcctgcggtcccagcgtcgctccggacgctgccaacctgttctccaccgtcgctcgacttccacctctaagactcccacgtgagtgcgggcgtctcccagttcctgggccggtgaggcagcagcccagcaaccgtaccgcccgggggaaaaggaaagtcctggcctggaggatccgagcccgcaggctccgtgcggcaggtcccgccgggccctgctgctggaagtgctccgtgggcttcgcgcagctggggatcggcaggtcgcggggaggctcccgagctaggtcgcggcctggctggacccaggcaccgccgacgcctcctggaggagcccgggctcggggctcagctccgggccgcaaggccccgcctgggcctggcgctcgcgcacctggggctggggataggctgggatccgccctccttccctgggcggagagggtcgggcttgtggcccagagaagggtgacaggtcccgaaatcgctgcagcaccacgcggggagagggatagggtacccacaccacgtccgtggtgaagccaatgcccagttgagcggggggcgcgcgcttcagagcacccgagaagctggcagatggagtgggaagaggtgactcttgatttcagggtaaacaaggagattgtgagaagtagtctagcagctcccgtttctcctccagcttcaagattcttctgtctagtgttttgggttccctacaccaggattgtggaggaagcgcacggccagaacccgttgggaccgagcagatcaaccatttatgttgcacttaatgatcatctgcactttttgcatatccttagtgttgtctttgtgaggccacctctataatggataatcaaatagagggaagggcgggattgaatattgtgacttgatttcaatgtcccacaacaactgtgctagacagtttttatatgttaggttatttaacgctcccaagcacttattaaagtgatgttactctgtttcattctccaggaaactcaggttgaataattcatcaaattacacaactggtaagtggtggcattagggtttggaattcaagtccgtatggttttagggcacaggctttattgcttaatgtaaaagaacattattctttgggataagccagatacctaggtttcaaatctatgctatgagggctgttagctgtatgaccttgggcaggatacttcaccttttagggcctgtttctgcatttgtgaaatagagataaaatgtcacaaggttgctatgagaattaaattagatcctacttgtaaaacatttagcaaagtgcttgacacgtagttagtggtaagctatatatagccacatatatcctgatgtcattaataagggtcagcaaactagctctctgtgtgtgctgccagccagagccaaacagaacttgtgcaagcctagaacataggtagagggaaacagcaaaggatgggaaacgaaaagggaactgaaaacagatgacatatataatggcaattatagtgacaacaatagatgtctcagtcattgatctgtggtacccagggccactttttgcctttgcgagaattattaataggtcagttccttttggctgatgaattggaaaaatacatcccactctgggctgaaaaatttcaaactctgggactggatcattttgagactctagatgtgaggtggagctgaattttaggaccccacagaccaaaaggtgcctggcacaaaccccacaatgaagtctgcagttctctttcaggatttcttctttcaggtctagtccctgaagaataggaagggagaggaggctccaggacgggagaaacagaaggagtgtttgccattaagggttgcataatgactggacacctcttctaattttacctataactgtgaacactttatagacaatggtcttcattttcatataagtttatggcaacctattatacattttaaaatattttattttctatgctctttatgatggtatcactgctgccctgggtatttcccttgcagcatctgtttcggtacctagttcatattgtactccaacacctatcaattcttttatttacttatttatttattttataataaagatgagatcttactatgttgcccaggctggtcttgaactcctgggctcaagtgatcctcctgccttggcctcccaaagtgctggggttacaggtgtgagccaccacacccggccctatcaattcttggtatggcttatccattgtttcctttgccttctttattttttggtactatcactgggctttttttcttactattgttagagttttctcttttttcctccctttcaaatgttctttagtcagtgatttattatgctagaaagtatgcctgttagcaaaactataaaagttaatgttagatgtgaaaaatgattatatgtcatttgaccttcaaagattcataatgccaccactgctcaccaaagcatgatatttcaggtggatcttttagcaagactcaatgtcacttccattggtggtactcagtgacctgcaggagtcctaactagagcattcctttactgtacccaccattaccttcagcctacaatctagcttccttcccaccaatattttcccttcttgttcttgcttgtgagtgggaatcgtattggggttttttttggagagactatttattcttttaatataacagcttagcagtatgcaatcataactttttaaaagacattaaaattcatcagtattatggtcacatttaccaatatgaattaggtggatagcatattagtaagtttcctcataaaaaaaaagaaggaaatactacatactcattttagtaaatcattttgaaatgtctcttgcaaatggttgtattatatctagttcctgtgaaaattaccagagcaactgtgtggttttctggacacattgttatccggctatttcaccttccctggcttttagtttaccacgcctttagacttcaaggtgacggtcagtacctgttaaaagaggtacctgcaactgtaaagaggaacttacttatctgtccacattttcatgtttatgtgtcagaattttttaaaaagaagtgaaaattaagacaaatacttcctgatggtattgtcaaaacaattttataaaatatgtaaaattgcaccccaccttcagtacttcttgttctccttctttattgttccctgtagcacttactgccacctaatatactatatatgttacttatttgtcttcattgttgtctgccttcctgcagtgtaactaacctctccctgatggggatggtggcctgctttgtttattgttggctctccagcaccttagaacagtgcctgacacacagtaggcaatctataatatttgttcaataagtgttgaatgaattaatagtactattaaactgctcatgattgggaaatataaagggatttgccctaattaaaaacagctgaaacgatgtgttaagcaaccaggacatgaatattcttgaaatcaggaaatgtataaacatctcaacagcctttgcccaatatacaaactttttaaaccttgagaaccacatggttgtggttgttgctgctttaaactgaaggcatttttagattatttgttcaccgtgaactagaaaggagcacacggtgatgaattgtgaagtgcccatcttgcccaattaaatatacatgctcccctacaaagaaaaggaaaggagtcaaattttggaaagcatgcatttagagtcggggcatggtggacaccagggcaggtgagaggttctggtggctggttcaacatctgggaaattccagaaggggggaaattcttaatgtggtctgaggggaatgagaaccccaggagacttcagtcttcacaggttggtgtaccttaatatcagatccagcctgcctgctgcacagctggccagcagctttacttagtccttataatggaaaacttttcaactgaacacttgggattttcagctaggggatgcagcactgattttcattgagggtaaacggtgattcactttgtagacatgtattttatagccagctttgccaagatgcatgttccataaagtgggacagtagtgagacatcaccactgcttctttttttcttaagccagtcaaatttagcagtagggggtgtataccaactttagcaacactgatgttagtaagttcttatttttaactttttaactttaattttattttttctgcttaggtagctaataagttctgatagcccttcttttttaaaaaaaaatatttatttatttatttgtgagatgggacctcactctgccacccaggttggagtgcagtggcatgatctcggctcactgcaacctccacctcccaggctcaagcaatcccacctcagcctccagaatgactgggaccacaggcacaccccaccacacctggctaatttttgtatttttggtagagatggggtttagccatgttgtccaggctgctgttgagctccagccatctgcctgcctcagcctcccaaagtactgggattataagcatcagccaccgtgcctggcccaaccctgcttctattaataacttttattaatacctcactaaatgaacctatgatgaactgttgaattgatggacttgaaaatacaatcagtgatacttccaaaatgtatatacagtagccaagggattagaaaagtggtaaaacctgaaacatatgttaagtaaactttgtagccagttatgaatcatggaatagaacaataccaggattttagagaaattaatgaagggtctttagttgattgcttactttgtaatgataaagagaaggtaaaactgcacctactttttatttttgaagttagagtgatcacacctgttaattcctgctttcctccgttctgcatgtccaagcatcagcaatggtatcactatttagatcctgctcaagatagtttaagaatctggaaactttttgaagtgtggctaaaagctgatttattttgctgccatgatagatgctaagagcttaataatgtgagatttcatggatgctaataaaatttatttccttattgtgctgcatctacttaatagactgggccctgtggtttgtttgtttatttaagtcatctgagcacttaataacaattttgagcaaaggtacctaactagtggagaagtttctagatacatttttttcagatatagctttttttgttttgttttgaaatggaatttggctctttttgcccaggctggagtgcaatggcacgatcttggctcactgcaacctccgcctccctggttcaagcgattctcctgcctcagcctcccatgtagctgggattacaggtgggcgccatcatgcccagctaattttgtatttttagtagagatgggtttcaccatgttggccaggatggtcttgaactactgacctcagaccatccgcccgcctcagcctcccaaagtgctgggattacaggcgtgagccaccgcacctggccccagatatagcttttttgatagagatggagactgagtttggaaaactttatcctttttcttccatttctcctttttgtacttataaatattctaatgttttctattcattttaaaaaatcctttagtaccacttcctaaacaagttccatattcactgtaattaaattagggttatagtacattaatggaaaagaccttaagaattacttaaagaaagggattgactcaactcttaggtttaacagctgaaggctgggcgcagtggctcacgcctgtaatctcagcattttgggaggccaaggtgggcagattacaggcggattacctgaagtcaggagttcgagaccagcctggtcaacatggtgaaaccccgtctctactaaaaatacaaaaattagctgggcgtgatggcagcgcctgtaatcccagcaactcaggaggctgaggcaggagaatcacttgaacccaggaggcggaggttgcaagtgagccaagatctccattgcactccagcatgggcgacaagagtgaaagtccatctcaaaaaaaaaaaagatttaacagctgaaaaaacctgaagcctggagaagttacagcagttgcccaaatgcctgccattgtggtgtgactaacacagaaccaggcatttctttttttttttttttgagacggagtcttgctttgtcacccaggctggagtgcagtggcgcaatcttggctcactgcaacctctacctctgggttcaagtgattctcctgcctcagccttccaggtagctgggactacagtgcaccatgcccaactaatttttgtgtttttagtagacacagggttttgccatgttgaccaggctggtctcaaactcctgacctcaggtgatctgcccagtccatttcttttgacacctgatccagtgattcttcctttttgtttcttttttgttttgttttatgtatatttatgcttgacattattccctatcttcatttctggtatcctgtggtagtgattaaaaaaatacatctgggcatcactttgttactaaatacagaacaagcgtagtttaaattcttttaatgtgagttttttactctcagagtctggatattaagtgcagtatattcctgagaataaatgttgctgctctaagacgatctaatggcacctacacacatggcagacctgtgtgtgtagagacacactagcaaggagaacttgctttcttagccttaagtaatttacaatttaatgggttatcttgaagaggaactgctatgaggtaaataaaatataaaccattccagttcttccattctttggcaagcttttgttattctggttacgtttgtttaagaaccatataactagttttagcctcagtattaaccttgtaattttaaagttcctattttattaatttgtgtcaggctgaatattacttttgatattaacaagacttaaggaaattaatagagaatattgctgttatactaagtaactattttttgatattgtttttaattgaaaaatcataattgtttacatctatggagtttatttatttttactaatactatttttacttgacagctaattaactattaattagaggctttagtgctctgaagggattttggcataaaggggaaaatacctgggtttatgctgtggtggtgacacttactagctttgtgatcccatgtaagtaatttaacctttttgaagaaatttatatttttttcctaatatatactatgcattattttgaagattaacaatgtgctgaaaattatcaacatattctgggtcaatcaattcagacactggagtgccttatattatagtcatacctgtgacatatggaccttccaccatgtagtaatcattatcctgcctaactcacagagtttttgtaaggttcagaagataatatattatttggaagcactttgaaaattgtaaaaaaaaacaaaatctgtccagttgtatggaattattaactatcttttctttccccttattcttctactccccactttcttactgtctacccttgaatgtaagggtgaaaaagaaatctggtagtcagtagcaataatactgcaaattctttttgtagtggagtatagttttaatcgtcagtaaaagtagaaatctctggggagcttcttcagctccaagagcactttgattgttccctgtctgtaccacacaattttatactcttgtatactatttctatgtatacatagttagctaagtagctaagtatttatttcgtttttgcctcccccaaccctcacttttggaacacctagaaagtattcagtaagtaattgttttatgaatgggtctccccaatttgattataatgagctacaagcgcttctgttgctgtataatgtccctgctgtccttagcaaaataatgggtttacagtaacctggtaataaatacatttgctagtctgacctgggaactctgaggagcatagcagcctttggatttacagccatattacctgacgcccgctgctttttttttttttttttttttttttttttagtaggggaacacttattactattctgagcaacacaatttgagaaacactgcctagggtgtgttttgctgatgttgctgggccggttccagctgccccagggttgcccttgcttgctttcaatagcggtcaggcaggatgtactgcagaatagcagttagtgaatcatggtattagaaccagaaagaacttctgagaattttttacattaggccagtctcttcatttttcagctgaagactgaaggaactttactaaagggatttgtagataggcaccgacttctccttcacaattgttttaggacacattttgagtcactgacatgagcctgcgctcccctcacctgcgtaccttatctatactcaaggctgactatttcaccaaattaattttatgtaaatcccaaaaatcattattgtttcaagaagcttttcataagtaaggatgagaaagctgctttatgtcttactacttaataacaagccatctatgctgagacaatcaattaaaatccctgactcagtaataaaataattgctacaattcatagagtgtctattatatgctgagcatgctacagacctacagttgtcagggtttttattaagtttatttttctctcttagccttatttacattgaaggactagtgtcagggttttttaatatccccattttataaattaggaaattgaagttcagatagacaatttggcagaggtgacacatccaaattagtgatgggaaagaaatttgaatgacacacgctgactccagcattattgctctttctgctacaaataacctgtgccagatgtcatgcttcaggaagaagaggaagtggtaaaatatgttcgctgcccacagttcacagtatatagacggagtgatgagccacaaatacaagtaacaatagtggaaagaaaatagaatcagtgccataacagcatgaggggtatcagcagggtatcagcaacagctgtatgaatgaagtatcatttgaagtgtttgttttgttttgttttgagatagagtctcactctgtcgcccaggctggagtgcagtggtaccatctcggctcactgcaaccttcacctccttggttcaagtgattctcctgcctcagcctcccgagtagctgggattacaggcacctgccaccacacctggctaatttctgtatatttagtagagacagggtttcaccatgttggccaggctgagttcttgaactcctgacctcaagtgatccccctacctcgcccacccaaagtgctgggattacaggtgtgagccaccgtgcccggcctgaagtggatcttgaagaacttgggtgggcagaggtagctgttcaggtagattaggggtagatgttggcagagccatgaattccaggcttagttcattggactatcactttttaatcagaagtgataaaaccataatgtgaatggagagaaaatggcagtgggaatacccattaggagactattatataaggcaggtgagagatacagaagacctgaagttagggttgtgactctgggtatgggaaagcggctgtatctccatgtttgggagagatttggggttctagtaggcagaatctctatgacatctttactggataaatctaagagtaggtttaaggaggaatgggaaaagaggaagtagataagacttcaggattttcagccagggcatgggaatgaccagatgccttaaatttcacatatcaggtaccactttaaatattaggtcttaattctcagctccttatgtttatctctgttataatattgattcagaacgttagggtgactgggagaattattgatatatttggtgtttctagggattatttgcatttcagaagacgtgtttggatcaaattttgtccaacaagtaataatctgtacagtagggaagctgttgtctaatcctagggattatttgtgttttctatcctgctctttaaggagtaaaatactacatagaattcttctttagttgctcatgcattctttgccaggtgacttatcccagccaaatctttcatactaaaagagtataaaacgtttgttttatttttcctcatcataattttttttttttttttttttgcgacagggtcttgctctgtcacccaggctgcagtgcatagcttactgtggcctcgaactcctgaacttgagtgagcctcctgccttagcctactgagtagctgggactacaggtgcatgccaccttggctggctaattttttcatttttctttctttctttctttcttttttagacggagtcttgctctgtcgcccaggttggaatgcaatggcgtgatctcactgaccgaaacctccgcctctgaggttcaagtgattctcctgcctcagcctcctgagtagctgggattacaggcatgtaccaccatgcctggctaatttttgtgtttttagtagagacggggtttcaccaggttggccaggctggtctcaaactcctgacctgggataatccacctgcctcggcctcccgaaatgctgggattacaggtgtgagccactgcgcccagcctaaaattttttgtttttgtagagatgaggtctctgttgctcaggctggtcttgaactcctgggctcaagcaatcctactgcctcagcctcccaaagtgctgggattacaagtatgagccaatatgcccagctcccattatgatttgtggataaagtatactattgctctcttaaaaaattgtatatcatgtactggataattacattaaaaggaaatgaaaacagtatcttcatgaatattaccattaacaagattccagaccctagtgtttatgtaatttcttccatttgccattcagccataatgggtttcaggataacattgagaccagcacagagtcatttttcagagaggaatgctgctaatagaagaaatttgtttcctggcagcaatgcagtagtataactgtcagcaattggttaaataatcagctgtgcctggcatgttgtttttgtagcttttgtataagcatttttagggaaaaaaataatgctcttctgatatgtggtgtctctttgctgtgagactgacttcacatgtagatgtcttcattctctgttgaattcttcccatccttggaaatttgaagacttttctgctggctggtagagaatcctctacatgtttttttgggggaagctttagctattgttgctcattctatgttcatccacagggcactgcattatgcttgatattgctgacatacaacttacaagactctaaactaccttatgcaaaaaaaaatcatacaactcacatttattttacagattctgtattagatgcaaaaaaacagtatgcctggcacgtgccagatttacaaatttacttgcattatctccatttttactgatgaggaaatctaggcccaggaagttgaagttacttatacgtggtcacacagcaagtgccagatggagggttcaaccgggcggtggcgggcacctgaaatcccagctacttgggaggctgaggcagagaattgcttgaacctgggaggcggaggctacagtgagctgagatcgcgccactgcagtacagcctggacgacagagcaagactccgtctcaaaaaaaaaaaaattgggtgtgtgcattaccccaaatttgatcttgttcctgtaatgcagtaatctgttactattagtgcaataggaattcaaaggaacaccttagtatggattggaataatcaggataatcatggaatggaataataaaaaaatatgaaacatgggatagataagataggatcagaccctagaggcagatagtgataaaatgataataaaatgtgagcacttactgtatactaggcacatatataaatatataagatacatattttttgtttgtttgttttgttttttttttgagatggggtctcactctgtcacccaggttggagtgcagtggcatgatcttggctcactgcaaactctgccttccagtctcaagcgatcctcctacctcagactccagagtagctgggatcacaggctcatgccaccacacccagctagtttttgtattttagtagagacgaggtttcaccatgttgaccaggccggtcttgaactcctgacctcaagtgatccacctgccttggcctcccaaagtgctgggagtacaggtgtgagctgccgtgcccggccagctttgtttttaaacgggttttctagctacttctaagactatgcaacctacttcatttttcttagtctctatttatttaggaatcttagtattgatttttgacatatgttgaggactgctactgtttttagagagttcaatagaattatcaaaatttttaaataagatgttagttgttttttgacattacaaagggctcttctaatgataatctttgttacttcagatttgcttaggcattttatacagcacaggaatcttactgccatatttaaatataacaagataatgagtggatttgtttctgtggtcctagaacttcagctaaatctcaaagtggagggcaaagggcattaaatactatcccattgcaaggatgtttgccagcagctctagggtagtaggtaccttccctcctgcagaacctgccctagcaccatcaacctccactggctaagtggacatccagatgggaaatgcaatgcctagttccttttcatggtgacacctgcagcccctttcattccctgggttcatggatgaaggcagctcaccagcaatactacattccttctcaagtccagcccctatcatatgctccatcccatccccagtccttttcatatattgattggagactggggaaggaggggtctatggaagttaagctaactctgatatttcttagcaagtcataagggaagatgggccacaccttctctctgtagaatagtaggcttgtcaaccttgtctacacattagaatcatccaaggaactgatgtcagggttgtaccctaaaccagttaaaatctctttaagtggaactcctgcatcagtagctttgaaagctcctccagatgattccaggaagcagccaatattgagaaccactgctgcaaaatattgggagctgggggtagagtggagggaaagggggctttgggggcttttggttttagtcaaaaaatcttgaaaacagaaaatatcccactcagtgtcttgttaaataaacaaataaaaataaaacttaatctgttttgtagtataatgctatgcatacctttaagtgaagggtcaagataatacttggagtttttctgaatgataaaatttatagttaaggtaaaaagaaatttttttttttttttttttttttttagacagagtctctattgcccaggctggagtgcagtggcacagttatagctcactacaggctcaatctcttgggttcaagcaatcctcttgcctcagccttcctagtagctgggattataggcacacaccaccatgcttggctaattttttttatttttagtagagacgaggtcttgctgtcttgcccatgatggtctcaaattcctaagctcaagccatccttctgcctcagcctcccaaagtgctgggattacaggcatgagtcactgagcctggccaagaagattagtatgtcttattagccatcttaaaagctgtattttactgtcattcagtaaatgaattttatcctagcaagagaatctgatgcaggcagtatcattggaatgagctaatagacacccacatcctgaggaggtgcatataacagtctgattctggcaagttcactctataagcctattgtgacaattggtcttaagaagtcacctgtttttgttaggaatgagtgtgcttcttaaaggcactgttttacttgctttctctttttattggttttctcagaactcaagacatggctgcccagtgtgtcacaaaggtggcgctgaatgtttcctgtgccaatcttttggataaagatatagggtcaaagtcagaccctttatgtgtgttgtttttgaatacaagtggtcaacagtggtatgaggtaatgtcaaatactttacctaaaaagtaatctgaattacccttttaacaatgtgaagagtttttttaatgttaaaaataacaacactatctcatctgttaatggagttttttgtgaaagtttgtccttgattgtagaatttttcatacacatatagaaacttcctttagttgtcatgcctatgtttatgtttagtatataaagatgtgaaaatccaagtgcacctttgatctgaagaaacttttttgtttttgcggatgggtgtaggttgagcgcacagaaaggattaagaattgcttgaatccccaattttccaagacatttattattgattactactttgaagtggttcagaaattgaaatttggggtttatgacatcgacaacaaaactattgagctgagtgatgatgacttcttaggggaatgtgaatgtacccttggacaagtaagtataaatagccactgtactctattttgtctaaattttaatcaatgaatttggtggtgtttttggtaagcagcatttaatttttaaagttgaaaaacatgtaatcactttaaagacagtttatatattaatatgattggcttgaacattatagaattcatcttatattttgtatgggcaggaactatgtatttatgaaaaagcctgttaattcttttgagtaagggatgcttcatgaggcattttattaagtaatacctccgctttagctgctgcagagttctctacggttttgttatgttcaagccataaatgcattcaagataacagcaacttctctgatcttctaactagtgagactggcacctgctgactcgcaatgccccaataccatcccctttacctggcttgctcttactcaaccttattccccctgataaaccttctctgaccctctagattagtttggaatcctttcctgagctcacttggtacttactatctggtacttctcaccatactttttaatagttgcttaattatctgtcttcccagtatatgataagtttggtcagggtagggacgtgtctcatggctccccattttgctcctaggttaatctgattcataaggagagattatgaccatttgcatagactgaagaaagttttaggagggaggagtaatttttttttcaatatgtgacatttgtcactcacatatgtcttttacaagtttatttttcaaggttgaattgtttggagattatggtattttctgtatctcaaaagcaatatgaaactgatcagttttctgaaactttgataaataatatcaaagaaaaaattgaggaagtatttctttttttggggaaaaaaatcccagtgtagctaaaattcctatgaatttgatatatctttcaaacagatacatcagatgtatatctgtttgaaagaacctaagtatactatattccttaaagcaatatgacatttttggggagttaaatattgaagttgtgtctcagtagaaaaattgaatcctttttttttttttttttgagacagggtctcactaagtcacccaggctggagtgtcgtggctcaatcacagctcactacagccttgacctcccgggttcaagtgatcctcccacctcagcctcccaagtagctaggactataagcacacgccactgcacctggctaatttttgtattattttgtagagacaggttttggcatgttgccaaggctggtcttgaacttgtgggctcaagcaatcctcccacctcagcttcccaaagtgctgggattattggtgtgagccactgcacctggccttgaatcttatttattgagtgttctgaagcccatcttttacctagaaggtttcagctaagtgatttgtttatgcgatgagaatccagtcctctttttccattacaaggaacaatttaaactttcacatacataggaagttaagaaactagtgggtaggtagattgtatctgccagggtaggctccttagaagttttttccaatgagttttaaatatttagattttttttttttttttttgagatggactctcactcttgttgcccaggctggagtgcaacagtgcgatcttggctcactgcaacctctgcctcctgaattcaagtgattctcctgcctcagtatcccgagtagctgggattacaggcacccaccaccatgcctggctaatttttgtatttttagtagagatggggtttcaccatgttggccaggctggtcttaaactcctgacctcaggtaatctgcccgcctcagcctcccaaagtgctgggattacaggcatgagccactgcacctggctctaaatatgtagatgatctaaatctttaagaaaccaactgaatgtttctatttctaatgactttaagtgaaccttatactcagtcttttttgctgaaactatttcatttaaaaattcttaggttgaagggaaatgactctgtatcactttctaattctaacagattgtttccagcaagaagctaactcgaccactggtgatgaaaactggcagacctgcaggaaaagggagcattacggtaaaaataagatatttgtcttttgtctcaaaagatttagcataacaggacatgccgaaactgtccatatcagagaaatattctacagccatgctttgtcactcaatcttgaatgttgcattccatccacccatgtcttgtagttatcacaaatggaaaatgtattgtgcaaaccaggggaaacatgcagtgtagtaatcccttctttcagtttttctaagttgcccgtagaggtcaagtgcacctttagcgatacctgccccttctctgtggaagtgtctattcttacgtgagagagaaactgcttaataatctgtatcagtttggttctctactggaggaacatagtcctctcaacatgacagaaattttccctagtggattttattccagaaggatgttatattatgacatggtcaatgaacctataaactctttaccatcattttttgtgcttgctatctgctgcccatccttccacctgggcttttcattgctgattactggctttaagcaaatgaatatatgctttattgtatttcacatttcccattatataatgccaagcctgtaaaccttatcttctagagtgtctgtacagataactgctgcctggagtgatagtattttaactttagctccctctgagaatgtaaggctagttccctgagagagctatgtttcaaggttatcatgattatcaaatacatttctctgagcagctgttttgctgtagtttaaatctccaaaggcataagaatgttcagggtgttgatttttgtgggaaagagaacattatcagtagttagcttccttgttgtagggcatgatagactgatacttatttttaagaagaatgagtttttcagttacactggatgaaaaacattgatctgataatatcaatgtatagagtattctaggtatgatttattcatgcttctcagtgtttagggaacttcagtattgtgtagagggtattctcagtcttctggggttttgacatttctcttgaatagggaagatccaatttgggcaaccacatttcaaaagacattgcttaatgcagacctgggcatattttgggaaaatctttatttcacacacataaaagaaataatggtagatcttttttaatgatgccattttcttatgaaacattttagaattcatttatattagtgtaggctttatattagataacagaataaatcagtgcttaagtgtctatcagaattcctaaaacatattttctttcacttacctgatctactcatagatttcagctgaagaaataaaagataatagagtggtcttgtttgaaatggaagccagaaaactggataataaggtgggtagactatgcagatttcaaaaaggttgtcatgttttgcctcttttttaagaaaataaaaatgcagttaatatcatgaactccatcattgagcatcacatagggtactagttactttcaaattttgcatgtgtgtgtgtgtgttgtatgtttaagcagaacccatttctcttcacctctttcatctagatgtaatcaaaggatttgtttaggttaagagaggagttgaatagaagcattaatgttactgtaaaaggcatgaaagaatacagttgaattatctttaggaaaaaagtgaaaactctgtgctttattaattataggtcaattatcctctttgcattcaaaggtcaatttttttttatgaaggatgagtgccaatacataataacacaacaatttagtatatagcatggattataataattcttttatctatcttatctatctatctatctatctatctatctatctatctatctatcttttttagagacagagtctcactatgttgcctaggctggtctggaactcctgggctcaagcaatcctcccatctcatactcccaaagtgttgggattgcaggtgtgagcccctgagcccagctttttgtacttaattctataatctagtcaatattcttcattgtttgcaattcagtttgaaaacattttagggctaggcatggtggctcatgcctgtaatcccagcactttgggaggccgaggtggggagatcacttgagctcagaagtttgagaccagcctgggcaacatggcgaaaccccatctctacaaaaaatacaaaaattagctgggtgtggtggcatgtgcctgtaatcccatgtgaggtgggaggattgcttgagcccaggaggtcaaaactacagtgagcagtgatcatgcattctcacctgtgtaatggaacaagactctgtctcaagtaaaaacaaaaacaacaacaaaaaaacacttaaagaaaacattttagactataggctggggactttttttttttaattgtggaaaaatttaaatatatacaaaactagaagactctttttaaaaaatttcatgttctcatcacccattttccacaattataactcatggccaatttcatttaatctctacccttatctactttctctcctcccagacttcatatcatttcatccatcaatatgttgatgtatctctgaagacactttaaaaaatataattgtttaaagtgtgtcttacgtccttttaaatctgtaaatttcttcctttcttttatttctttcttcttttcctccctcccttccttcctttgtatctattcttccatccattgtggaatttattcaatggagaaaactgatttctttatcctacacaagtttccacgttcaagttgggcacaggtgatgcacacctgtagtcccagctactcaggagactgaggcaggaagatggcttgatcccaggagttcaaggctgtagtgcattataattacaagactccatcttttttttttttcaaaaaagaattttccatattctgcatatggctaattaaatcctgtggtgtcatttaacatgtttctctctctacttttattttctgatttctgtaacctggcaattgaatctagaagtatgatctgctggcatttttaattgttggcaagacagtttcatcaatggtggcatgtaattccatcaggaggctcacactgacttgtgtgttttcgggaagtttgtgatcattgatgataactacctggttttattattaagagtctgtaggcccggtgtggtggctcatgcctgtaatcccagcactttgggaggccgaggtaggtggcttacctgaggtcaggagtttgagatcagcctggccaacatggtgaaacaccatctctactaaaaatagaaaaattagctgggcgtggtggtgcgtgccagtagtcccagctacttgggaggctgaggcaggagaatcacttgaacctgggaggcggaggttgcagtgagccgagatcatgccactgcattccagcttggcgagagagcaaggctccgtctcaaaaaaagaaggaaaaaaaatttgtaaaatagtgatatcgtcactctatcattgcttttgtttcttagcaagaatctttctatagagagaaacttccccacattaagtatttatttactttgtggtatagtttatataggaaaagtaagttaaaatgtttgacttttcccccatatttaccatttttcaaaattataagttggttccctagcatccactaaatgtgaccagtgaagtttttatgtttgtgtgttttgttctgttttagaattgctgtaaagtaagagatttaaatatttataactgtaatggattacttctcatagatacttaagttattccaattttggcctgagggaattcctttaagcttgtttgtgagaccatttaacacaactccaggagtctttggataatttcttgctctgtgggatgacaagagcttcaaagaacttctttttgaagttctttttgtctttaataagccatgtcccaagcttattttatctagtttctgccttagactggcagattaaaaggaaccttactttattttggtggaattggtatttagagaccacagtccactgctaggggtactcactgttgtgggttattgtcattcatggtttctagggcttttcagtggacagatacagaaaagacttttttttttttttaagaaaaactaaatcatgaaattacacaactatttccaattcaaatatagaattactggccggccatgatggctcacgcctgtaatcccagcactctgggaggtgggtggaacacttgaggtcaggagttcaagaccagcctggccaacatggtgaaaccctgtgtctagtaaaaatacaaaaattagccggtcatggtagcatgcacctgtagtcccaactactcaagaggatgaggcatgagaattgcttgaacccaggagggggaggttacagtgagccgggatcgtaccactacactccagcctgggtgacgtctccaaaacaacagagataattaaaaaaaatatagaattacaggcacttattttatattcatacctcatttctcttggtttttaaatatattaacacaattgcttatctgttttgtctcacacaacgttaatagttttagaataaaaatatcaatattattaacagtatttttactgaaaagtttgagctttctttgaagttctttttgtctttaaggtgtgtatattccacttttgttacatagtcacattcttatgatttaaagaaataattcctttgtgtggttatgctgtcacagacctactttcattttgcttttgatatttagggattgcttttttaaaaaaccattttgatttaattttgttttataatcacgtaaaaaatttacatggctctaaaatctacaaaacaaggtacttaagaaatttaacatctctcctggtctaccttgcttccgctttcctccatgtagataataatttttaaaaagttgtgttttataatttaatcattctgtttcctaaatatctaagggtttttctgtgtgtatgtatactcatgtgtgtgtatgtgttcatatgtatgtgtgtatgtatgtatttgtatttatgttccccacccccagcccttgcataaacatagcatactagatgtacactttcctccactttgcttcttttacttaacatatcctggagatcagagccagggagtttaattattgttttagttctaatactagcaacttaaccttcaaacaagtattggtttttagccttcaaaataataacaaggatattctgcttttatttcattcacttaagattcttcttagagataaggttaaacacagtctttgtgtttatatttttgactgtaccaaatatcttatttgcttgacattaaactttgtgttcaagagagaaataattttattttagttcttaatttaatactgaagttaattcaggactaaagaaatcttcagctcagggatgtatctgcatatattcctgtgggattaacaaatgtcctttcattttcaaaaataacaagtcataaatgttaacgagtatgcacatttcaaaatgaagatacatgaaaatgagaaaaaatcatccatagtcttaccacctgagtttaacctctgtgagtgattcgtacatttttcctgaattttatctctctgtatgtgtgtggttatgtgtgtattgaggatggtgataacggtatttttgagcatttagtgtgcttgagcattgtataggagttctgtggtgaattacaggagaaatagaagatgtagtttgtgcccttgaagtgtttctattatgtgttccacatatctacctctggtcatttgtgtatgtaaagaaatgtgtggttttgatgaaggagttttggacatagaaggctgagatatgaagttaaagcctggatccattaattaattagatatgtgatcttgggaaaatcatttacccctctgaatccattttctcactgataactgccctgtctccatagagttggtatggctaatgtttgtgatatcatttatataaaactactcagtgatatgtgaatgaaaatggttaaaggtgaaaacaaggcaaaaacatattttatggtatatttgaccactgtattttaaaactgtcatgtttttgagaagtcagggtatgatatacaggattatgagcatttatcacaagcactttgataattctccctagtagacttccgtaagtttctaagttagggagaaaggtgatgggatgtatatttactatcaatactatagagttagacttcaggtggttgccaacatgtgtaaagtatggtcacacatggtttcatgggttcagaggagaacaaatgctttttgttgtttgttttaaatgtaggatctatttggaaagtcagacccatacctggaattccacaagcagacatctgatggaaactggctaatggttcatcggacagaggtgaatatttgaatttgaaaagcagagtggaggtgttctttgaaattattgtaatctgaattttaaaaagcttatatttataaaagtatcaatctgagttcatacttacatatagccagagacacaagatcaccatgttcatatttttttctttcaatgaggaggtgctaccgtactttatgatttttattttgaaaaattttaagtcctataaagaacactaaatgtattcctctgcacccctcacctagattcaccaaatgaacacacactcccacatacttgtgctctctgtctttctctatctctgtccctctctgtctctctctctctctctctctcacacacacacacacacacacttatgcacacatgtattttccttttgcaaaatcatcctaatggagctacagatataataactcttatctttaaatgctacagcagaccaagtgtggtggctcatgcctgtaatcccagcactttgggaagccaaggcaggtggatcacttgaggtcaggagctcgagaccagcctggccaacatggtgaaaccccgtctctactaaaaatacaaaaattagccaggtgtggtagcacttgcctgcagtcccagctactcaggaaactgaggcacaagaattgcttgaacccaggaggtggaggttgcagtgagctgagatcgcaccactgcactccatcccaggctactgagcgagactccacctcaaaataaataaataaataaatgctacagcaggtagtttaaagaacagggacattctatacaataatacttgagaaattaacatttgacatagctaaatgtaacattatttggtataccattaatcttcagatttcctcagttgtcccacaggttttgtgtgtattttgttttgctttgttttgttcagaatccagtcaaggctcaaattttggatttgactattatattcccaatagaggactcttctccctaccttccttataccttgatgccattgaatctcttgaaaatcaagaccagaatgtccaacattctggattcttctgtttcctcacaactagatccagatcaaacatttctgtcaaaaacactatgtgtgttccttttctttacattttcaggaggctcatggtgccaggctgcccagcattgatgatgtcatgcttggctacttggttaagctggtgaccgccagatctcaccatgataaggtctcatttttcccctttttaattaataagtgctatgtggtgtgaaactatgagactgcatgaattacatgttctctagcacttcaaccagtggttttagcatccattggtgatccttgcctaatcaattattgtattatgggtagtaaaatagtgatttttcaaaatctttcatcctttttagttatattagcaggcattcctctttcatctctctctttctctgcttttatttttagtatcattataaattcatggattgttataacagtgtatgctttgtatttaactcattattgtatttttgctgctcagattcatccatgtttgactagagagagctcgtagtctctaaaatggctcttggtttttctttttgacttcattcatctttgagcagtctcttaagttagagtatgttctcagttccccttgtactttttctgtcccagagctggtatgagccatgtctcttaataagccctattcctgcaagagggtagtagtatttagacactgacatctgagtgctgaatgtgctcattgctactggatatcattgttttatgccttttaagtggacacagctaagaaatatgtatatttgtgtttatctgtttattatgtatgtatatatggtattaaaattttaaattataaatgtggacttatttctccaattcaattccaacatagtttcttattctatatttaccttttcttatttcatatttgaatcttctgtgccctgcaatgaaaccctcattgctattaaaatcaataatcctccgcagttttttttttttttttttttgagacgttgtcttgctctgtcacccaggctggaatgcagtggcacgatctccactcacggcaacctccacctcccaggttccagcagttctcctgcctcagcctcctgagtagctaggattataggcatgcaccaccacacccagctaatttttgtatttttttagtagagacaggttttcaccatgttggccaggctggtctcaaactcctgacctcagatgatctgcccgtctcggcctcccaaagtgtggggattacaggtgtgagccaccgcgcccagccatcctctgtagttcctaagtgctccttgtaataggtagatatattttccaaatagttttctacttttcctcagaatgtatcacaactggacaatttattacatttttcatgtagcagttgtataatattgttctaggtagtttttttgtggaaatagttgagttgatgaagaggtggaggacgaatggtgagagtatagcaagaacctaggaagggcaggagcaaaatgttaatgaactggaagtttttctaacagctttttgaaaccacatttttataggttgttaaaaacaacttgaatcctgtttggaggcctttcaagatctctcttaactcactgtgttacggagatatggacaaaaccattaaggtaagttgaaattatatatatataaaatacttaaatatacccatgttcacctattttataaaattaatacataagatagtatttaaagaaagtaaatgatgtaagacacctacagagttaaattttatgtgtgtagaatactaaaatagaaatgtcttctggtaagtgacacagtttgaggagtaggcatgtttgactaatctgttgacctaatgcttagtcaaacagtgtcgtttctattttattctgtattttaaaaaataaaatgtccagtttaatatttttttccttttaataagattcctctgctctgctaataggaacctcgaactacattatttgcctttggtatgtctgttgcagatagaagcagatgttaccgtaagaactcagagcttgcttctgcccttagcaagggagggcagtattgatggcatttttcttccttattttcagaatgagataagtaattaattgaaagcttttagaaggctttagttttagagtatcagggaagtggagtatgaacagcaaatagcagatgtcagtatttttttaaatgtttttattcataggcatttatttaaaaaaagagtaaaaatataaataaaagaaaactcatggagtggtgttgagaatgaaaaatatatacatacatatacataaaagaaacttttgtactagaattattaactttacatgattacagatagaggtcttttttatgttcagacttcagtcgatcaaagggattttttggtttgtttttctctttttctgataataaatatggtaaaagcaggcaggataatgaggagtaagtataagatttggagtcagaccacagttcaagttttgacttagtcctttaactggctaagggatcttgggcaggtaaccacacttcttcacatttacttatttatttattttgcttattagtaggaagcttcacctggattcttcacttttataatagagttaagaatttctaccttccagaaaagcaaaaattaaattagcagaagtgaaagttttgtaaaaattttgtagaggtgccattgttactgaaaaactgcttcatttttgccgggcatggtggctcaggcctataatcccagcactttgggaggccgaggcgggcaaattgcctgagctcaggagtttgagaccagcctgggcaacatggcaaaatactgtctctacagaaaatacaaaaatgagctgggtgtggtggcgcatacctgtgttcccagctacttgggaggcttaggtgggaggatcctttgatcctgggaggaggaggtctcagtaagccaatattgcttcacactgcactccagcctgggtgatggagtgagaccgtgtcttaaaaaaaaaaaaaaaaaaactgcttcattactgagatccataaaaaattgcttccagtttgtaaagaactttaaaaatcaatctaagtatgatttgtaaggtatttgaaacagtagtgaaaatccaggtccgaaataaatagttgaaaattagctataaaaattattttttatcattttgccaaatccagacttttgcttttcatattaaaaatagtaaacatcattagatgtcagaaggcaggtaaatctaggggaaaatgtctaagccataactatttgattgtgtgtaatgatatgttaacaacaaaacaatatcttttaaacttttttgctcacagtggcatgcttacagggctattttattatagtaagtaaactgattttctgagctttctctaatgaatgtcttccattcttaaaactttcttggtttgtttttaactatacacaacttggtttgctacgtcatcactgactttatttcatttagttctgcatttctttgcaatatcaaaaagtcatacatttgtgattctcttactgttcgaaaattgcttatagggatagtaaagagttatagagcagtgaatagagtcagaatcctcagtagtttctttgccatgttgtgttatcattctagcatgtattattttcattaagatcaagtgaatacgaaaaataatcatgcatgctgccactttgcctaaaatgggagtgccttactgaatgtagtatctgtgtggtgtgtgcattctctttcatatatacatatgcccatgtgtatatatgtatacatttatttatttattacacatatgtttattatgtatactatatatgcatgtgtatatgtatattatatatccattaaatgtatatgaatacatgtatatattatatacttgcatatacatatgcatatgtatatatgcatatattgttatgcttaccattgtttaaaaagccaataatactggtctttgaattcttgaaaagagagaaattaaatgacacgaattgtcttacctcataccgtatctgaacatatgccagcattataaatatcatgtctgccttcaaggggacaagagggagctttttctatatatttattatagtgagtaatcaaaatttttagtttaaaaatattatttacatttcctgaaattttaacgtatgaatagtctaaagatatgaaccgttttagcccttcataatctttactcaaataaaatcttggccttgtcaaagcttaatcttgtcttagatataaattggtgttccctgattgcaaatctaaaatgtaaagttctgttttccataattgaaaaatgtctgtttaaaaaccatgaacttattaaaatattaagatagtttgttttctaccttatctaaatattacttcctctaaaaattatggaaattattaaatttcttttcccttggcacattaaagagtcatataaaaggtttttggtttaaaaattggatactgagtagggcaagagtcaaactgtcagacttggtcagtggccaaaatgcctgcaaagcattttcttaaaaaaataaaatccctttctgttactcaaaattgaaattctcggtcttgactgttttgattgattgatttgtagtcttcctgaagaataatgaaaacataagtagggaatgaaagacttccagttatgataagcattcatttcatagaactgaggggaaaaatagtcactttgccaagtaaacataaaaaatcctgagtattttagcttggcagttaatctaagtttgagaaggatattagcaagataaagctctctattggctgatggtaaatgcaaattgcttcttagttacaagtttttattttagattacaggctctaggatttcaaagtgtccttagcacagcgttactttacctgtgttggttaccacacaaggcataccgtcttctaagactttttatttaattcctgtaagtcttagttctgcaaaatgggcatcatagtaacaggattccaactctgtctacctcacaagactatttagagaatgtgcacagtgtacataataaatgtttgcagaagtgaaataatctgttttgagataaaatactataaaaacattggtgttaaatgttcacaatcacagtcaattttcagcttcccttgaacacttctgcttggcaatagttcatgccacctaatttttcccattgcaaagaatattctagtattctggtgaatatttactctttgactgtctgtcaacctgtcacgaaattacatgcatctcaaatactctcacctctcttctctctcctttcagagagagaaagcatttaatcagagccagatctaagactagaactcaccctgtctcacatggaaatagagtaaatatgacccggtgtggatacttcctcagtggactaagtactcttagcctggaattgttcctttcattgtaagagttgtgatcttcacaatgatgcaaatctggcttcatcatatctaacttataatacaagccaacctcaccagattgcagctaatgaaatatatttttcataattctaaagtatctaggatttaattatataaattttagctttctagaatgttgacttcctttctttctccatataatggcttttagccattgcatagtaataaggcaaagaagtggatgagaaagaagatataactccattttgccctttatcagcacttatagaaggcatgatagaggagctggaaactgcttaatgtggaattgaaacagtatttgtgtttttcatctgcctgtgatctatcttagatccccatcccaaggatagctggggtttgaaagtgtttcaatattgcttctctaggatgttaattcctactgtcccaagtagggactgcatagtacacattttcatttactttaattaaaagggcacttcatgataggttatatttattgcagccaatactttttaataaaactatattgatttttatatatttttattatatttaatttcaggtggagtgttatgattatgacaatgatgggtcacatgatctcattggaacatttcagaccaccatgacaaaactgaaagaagcctccagaagctcacctgtaagttacatccttgcatttgcatatactttatagtttggctatgtatttattactgtatttcatttttttcccatagcatcaaacggtttactatgcttttagtctatattgcataatgctccgaaatgtttagtaatcacataatccacaattcatacttggggcatgaattttattgagcagaacaccacgtaacagttactaatgccagatgaggactccaactacatggaggacagcaaagatgatcacagtgtcagtcattaggaatagaagtccaatccttttgcctattgtatcatcgtattgaagtcaaggcaaacacaatgcaggcaagcactagagggaaccacactttacttacagagagaagaggcagagcaatatcagctttaaaagtaggcattggtttccgtggccagcagttccatccagcaaccaatgcagggcagttggccccagtgtgcttatctagtgctgtagaagaatgaccctgcccctctcaagactatgaaatactgaaagctgggggcagacctgagagtcattaagcacaggcttcagcaggaccaaagagcacttatggagcctgaaggtataaatgaataagtgaagtaatctagccctttttcaatgagaattcggtttgtggaatttctttagctctaatatataataattttttattgtttttcctttctttaatttctaatactcaacaattaatacttatgattgtgactgagactccagcaagatcctgaaccatcaaagaatttgtttaacataattttgtttcacatcattgtattataccacgtgtattttttagtgtttgattcttggaaaactagtaatgactgtctgaagtacataagtggctttgtgttaaccagaagaggtgacttatcaagcatttattgaatatctcttatattattattaggcaagacagtgagaatttgaaggtataagttggaggtgattataatgtcactgtgaagaaaaaattaaatgagacacttgaaaataacacagagtatgtaactaaatttcatatagttgtagaaatttaaagaggtagatagagatcagagaagactagagtagcagtggaagttacagaggagaacaacttgagccaagccctaaagatggatagggggataggaaggggaaggaagatcattcttttgggggaaggaaatataaacaagaggaggtgttagatcaatttttaacatgtattcccagtggaaagagaagatctttgatgcatattttaccatagagttgggcttcatatatttgttttatgatgttatttttttttcttttctttgcagcatattttcgttctttatgttggtaacagctaggagtaatattttatttcctttattataccatgttatatcatagggcccaactctatggtaaaatatgcagcaaagagaaaaaagattatgccttggaacatttgcaaggaaattacctgcagaggtaaaatttatttgggagaaatattttgaaaggtatgcaattttaggagtgccttaattgttggaaatttacctgataaatattccacatacttaacatattatgtaattgtttcagagttatattttgcaacagacctacatcagtaggtagtttgattctaaaggaaaaaaagtcattcatttaaagtcacattggcatttctaatattgctaataaaaagtaacatttttgtcttctcttcctacaggttgaatttgaatgcataaatgagaaaaaaaggcaaaagaaaaaaagctacaagaattcaggtgttatcagtgtgaaacagtgtgaggtccgttggccttggctacttatttttatttatttatttattctttttgagctggagcctcgctctgttgcccaggctggagcgcagtggtgtgatctcggctcactgcaacctctgcctcctgggttcaagcaattctctgcctcagcctcccaggtagctgggattacaggcacccaccactacacctggctaatttttgtatttttagtggagacagggtttcaccatgttggccaggctggtcttgaactcctgaccttgtgatccacccaccttggcctcccaaagtgctgggattacaggtgtgagccaccgcatccgacccaagccttggctacttataatataatgagattatatttcaagttctcctgttagtatgtttatattaaacaaatacttgaatttcaggcagttgaaaatcacatgagcatctggtcacctttagcaaaaagaatcaagtagggaagaacaaaaaaatcaagtaa

SEQ ID NO: 434 - DNA, 32744 bp, Homo sapiens
  source 1..32744: mol_type = other DNA
aagcgcccaagtcgcactcccgcctcatccaaggcagcctgcgtggctcccgggagcgcgcacgtcccggagcccatgccgaccgcaggcgccgtatccgcgctcgtctagcagccccggttacgcggttgcacgtcggccccagccctgaggagccggaccgatgtggaaactgctgcccgccgcgggcccggcaggaggtaagggcagaagggaagcctcggggcctattttcccggtagcgactgcctcgggggagggcctgcgggtgattcctgcgtcgcgtccgttcctgcccggggacgctgcggaagcggtcgcagaagcggcgagtacgctgtatggcaagcgcatattcttcccgggcagcacggcggctgtgagctggaattcagcgcgggcggtggggtgattgcggcgccccctggtggcagtcctccgcgcccctcccctgactccccctccctcccagcctcacccccgcgccgttgcagcgctagggctggatggcctgcgggtaagcggcagcaggcgcctagtgggaacccccggcaggaagttagcatgggcggaccacacgggggccacacatgacttgtgaagaactactggacagtttggggaaatgactaccacgaaaaggcttactttcagttttgtttcagactccttttccacaatgtcatcagaacaatgggaaaagtcgattttttcccattcatttccagcggtgtgaaatgtgatcacatgttaattggttgcccgtggtgggtgtgaagggtcttgtcctcgggaagtttacatgatgattggcaaagatctatgtagagactaaatggactggcagggtaagagagtatggagagcgccaaactaaataaattttatactgtgaagactcacaggtcaaggcgtccctggagacctggctcttctggactccctactctttatctgccctaatctccctgccactcgggtaatgaaattatgctcccagactcaactccgcatgtctccaatatatatactgttactccaacaacttatgatttacagcaattttaaaagaaactgataaccctttcccactgattggagatgttatctttaagataaaaacaaattttcaaaaaatgtacacgtgcatcttagtctggactttgttgcattggtctgtgttgtttactcatggtccagtaccatacttttagttttatggcatattttgccatctggtagggcaagctcctattatattattcacatttttcttgatttttttttttttttgagacggagtctcactctgtcaccgaggctggagtgcagtggcactgtgtcggctcactgcaacctccatcccctgggttcaagcagttctcttgcttcagcctcccaagtagctgggattacaggcttgagcatctttttttatagtttcctgatatttttgtttatcaagttccaaacataatattgtgattgttgctaggtaatacattaagtttttaagttaatttgagggaacattgactcctttcagcattgctttccctttagaaaaatgatgtagccttctatctgtttagataacctttttttctttttctcttttttattgtattttaaattttgttgttgttactcctgaaacaccatagttagataacctttgatagccttcagtgaggctttactgaaaacacaagtttgacatatgtaaagttgactaacatttgaataacaaaggtgttttatttaatatttgtcatacctatatcatatacacttacatgtatgtgtgtgttcgtgtacatgtgtatgtgtctatcaacttatctttttttaaaaaaaaatttatctcaggagaaccatacagacttttgactggcgttgagtacgttgttggaaggaaaaactgtgccattctgattgaaaatgatcagtcgatcagccgaaatcatgctgtgttaactgctaacttttctgtaaccaacctggtatgttactaattttatttcactagtttccagtaagggggttgaaatcacaaaatattctcttggtttgtatgtgagagagagttcacaggatttgtcattttatagagctgtgtagacttttttaatgttaacaaaattaaatacttatattgtggcagtggtaccagtggtatttgttcattttgagatttgaagtttctatttcagtaatttactctttgttttagttagaaactcagaggaagtaggacatagttatttttatttgcttactaaacatttattgtttactattagtttggtgcaaaagtaattgctgtttttgccattagcagtaatgtgtttttatgtgtcagtaactgtgccaaccctgcgaatagaacaatgaacagaccttcatgactctggctcttaaagaggttatgtagctgtgtggaaacgggcatttctcatataatacaagtttttgcaatgggaattgatttgttttattagggaaatgcttacttatgccccacagctcctttaaatggctttcagtttgttttgatcataaccttgggtgataaaagtgctaaaaaaaatacataggaatatctgtactcatgataacgctggtggtaataagaaagatgagccattattttaatcaaagattgcatatatgcgatatgaatttcttcagttttatttaggttttgtttctgttcttttaggtatagaaaaacattttggaaatttctacagaaaaagtaaaattgttactgtaagtcagaaacactagcctataacctcgtattctcatgggactaatttttacaatgtggttttgatactgtaaaacaaacaaaaaaagatctaggaatgaaattgtcatgttttaaatgaaacagactgcaccaaagcaaaaaattctcaaatgtgtgtgaggggtcaggagaatccccactgacttacacaaataaagaacatgtgtgttctaggaggggtattcctgggttaagaaacttccctaaggggaaatatgaattgttagttgagtgatcttcctctcaaggcaaccgaagcagtaattgttgtctgccgtgttgggaggttagccacctgcctattgtcttttcttttgaaaactttttctctgagaagtgaatgtactgagtggtaaaagactttaaattatttgctaacttttcagagtcaaacagatgaaatccctgtattgacattaaaagataattctaagtatggtacctttgttaatgaggaaaaaatgcagaatggcttttcccgaactttgaagtcgggggatggtattacttttggagtgtttggaagtaaattcaggtaagacattttaaaattgattttaaaatggacagctttgtttcagccaaatcctaaaggaaaatgatatttctgattaatgaatttaaaacagtataatttagttcctgcttagcacagtattggactctgtgccatgggtggtgagtgcattttgtacatcacggtgatgagagtttgagtgggccctgagggacttcatgggaagttacatttcttcgattcctcattggtgaaggtataatgttaacttttggtcattgttttttcttcatttggactcaagacttaggatttgataattttctaggttacaaagcttaatgatgaggaactgataatttcataggttacaaagggtaacaataaataaaagttacaataacagtatatgatgtgagcttaaagttttaaagtactaaaaattgccatctctgcaactctgatactatgactttatttaacttattctcatttacagaatagagtatgagcctttggttgcatgctcttcttgtttagatgtctctgggaaaactgctttaaatcaagctatattgcaacttggaggatttactgtaaacaattggacagaagaatgcactcaccttgtcatggtatcagtgaaagttaccattaaagtaggttgaatgtcttgttcttatgttaaaaataagttatttgaatttaagcttacccactatacacagatttttttttaattactttaaaactatcagaactgttagttgtagatttatatatacccactccatccctttgtataccatttaggcttgagtggcttttcatataacctgtttattatctgagacaagccaaaagcaactaaaattatatttcagattttgtttagcattttaaaaagcgattctgttgtccttccaccgagaaggttatgacagtgcatactttgtgttttcagtcttaaagcaacgcaactagagattaactgccagtcttcaaagtttgcatctcatgtctttctatcaagttgtctttctccaatctccaggtgattcatctccttttaaacaggttgacctatagatttgtgggatccttttaggttaatatctatagtaaaaagccacaaatacttagattcctttattaaaaatcctttagtatttaatataattaaactagaattatgttttatagctaaagagttatcgtggagaaaggcttgccgctcagctggaactcaacttgtactttggtggggttgtctgtaatcaagggtttttttatttttgcacatttatgaaattgattttataaattcagcagtgtgattagcctccagagtactaatatatgcatataaacttacaaatagtagatttacaaatcaaagtgtccatttatggttttcagtagggatgcacctttaccagaatatttaagtgtgggccctagcacagtcctctttaagatattacttaagaaatagagtaagtaatcatacactagcttggttggtgtgaaatacaatcaaaggtagttaaattgtcttgagagatattttactacatctgtgacagacctggacacttccagcgagtgggatgctgatgaccaccttgtgaattgctccattacacacaccaacgtggtttacagagtaatttgttaaaaaaaattcctggtcattcatatgccaaaatagaaaaccttgttgttatatttttttttttggtaaattttctgaaagtacagttagcttatattttttaaatcattgaatgttagagccaaaaaggaatttaaagaccatttattcttactattagctacttaaaaacaacaacaacaacaacaacaaaaaaagcgttcagttcaacttttattttctgaagtgtaaactgaggcatggaccaattaatttcccaagtcacatgtattagagtttacccaatacagtgttgatttgcacattactggttcatgctagtttatttctttcacattggaaagtggtatctttcaggttccattcttgagagacaatctaaatctgcttgcccctatttagacaataaaataccctgtgttattgaaagcatattcatggctgggtgcagtggcttgcgtctgtaatcccagcactttgggatgccgaggtgggaggattgcttgagcccaggaatttgagaccagcctgggcaacatagtgagactccatctctacaaaaaattttaaaaattagctgggtatggtggcatgtgcctgtagtcccagctactcaggaggctgagacaggaggattgcttgagcccaggaggttgaggctgcagtgaaccaggatcacgccactgcagtccagcctggacaacagagcgagaccctgtctcaaaaataaaaaagcatatttatattattctgaatcttattttcattgcccactgtagcattttctaatgtttgtcatattttttggatgtatcatatttgaggcttatagcttaattcacatgtgagtttaagtttctttttttccactttatatgtacttattttgtgcttttaccaaaaattattttatttactttctcaaaaaggctttattgcatagttacaatctttttgaaagacaattagtctaaaaatagctcatgttcatctcctaatattgtcttccctgaagcagatatgttacatttcctcaattctgaaatatatttttaacattttaatgtcttcgaaagtggaatgcattttaaaattgaattttattttatgttgttccaccctttccaaaaaagcagttttaaaaattagtattataatcggtgacttcttataattgagtgattatactgtgatttatgttctaaaataatgcagtgaccaaagaccgacttctattttatagattgtggcttctttataaatttagagagatgaaagggaaaacattattttttatggatgtaaacagcctctttgtagtttataacttaaaacttttctttaaaaaatgctagcatgtgaatatatatattcacatgttttcttcattgtagacaatatgtgcactcatttgtggacgtccaattgtaaagccagaatattttactgaattcctgaaagcagttgagtccaagaagcagcctccacaaattgaaaggtatattatgtattttaaatataacaagatgtcacttatatgatagcattgatttttatttaagttaattccctctttaatgcttgtttcaggatgtaatagttgctgtgttatagttcggtattattaatggaaggttttttgttagtttgtaaagaaagagttccccaaatttctttgttggttattctgtatctctgaaacaaatgttaaatatgtgctaatatttaaagaaaaaaatggaaagacagtaaatggcactgaggtaacctcatggtcagaagagcacatatgtcagttccaggcatcacgccacagttagctctggaattgtgtggtgcagcagccctctttgcaagccacatagtccagaatattaacagcaccatagctttgggaatggagcttagtttttctgagctccagttactcattgcaaaattgagagtaatacctacctagctgagttaaaaagtcaggaaacaacagatgctggcgaggctgtggagaaataaggcttttacactgttggtgggggtgtaaattagttcaaccattatggaagacagtgtggtgattccttaaggatctagaaccagaaataccaattgacccagcaatcccattactgggtatatacccaaaggattaaaaatcattccactgtaaagacacatgcacacatatgtttattgcagcactattaacaacagcaaagacttggaaccaacccaaatgcccatcaatgatagactgggtatatgtccatacctatgcacatatacaccatggaatactatgcagccataaaagagaatgagttcatgtcgtttgcagggacatggatgaagctggaaaccatcattctcagcaaactaacacaggaacagaaaaccaaacaccgtatgttctcactcataagtgggagtggaacaatgagaacacgtggccacagggaggggaacatcacataccggggcctgtttgggggtgggggacaaggggagggagagcattaggacaaatacctaatgcatgtgggtcttaaaacctggatgacaggttgataggtgcagcagaccaccatggcacatggatacctatgtaacaaatctgcatgttctgcacatgtatcccagaacttaaagtaacattaaaaaaaaaattttaaatgttatgccagttaggaattttattgctaattttaatgtgttttgagctgctataagctatttggcttaatgttagttttttagggactgtttataccggataacagctgtctgcttttaaaagtaataaaaaatcaggttttcctctttgtttataatttttatctgggaagtttttttgtatttatactccagttggcaggtaatgtgatatatttggactctggaaaaatatactcagattttaaaatagaagattcttaaaattttttgagtccaagacccctcagtatgtgccaggtctgacccgcagaccctgacccagcgacagatgaacaaatgcactcaaacacaggtatccagtgaaagagtgagctagggggctgggccacccacagacactgaggagggtgctgtaaagagttagcagccgcggtcccgactagctgttgctgtggtcatttattcagtatagatataatggcaaaggctttgagtcaacacacttgtggataattaacatggttcccctcccaggagagagcagtcctacgaatgattaaaggccaggttccgagctaagtaacttatctagatcagtttcttaacatcccgttatctaacctaagctttcaggcaccgtataaaagaatctggctgctttcagccaaatcctgttccgaaactgatgtaaaaccttttggccttccaaggtttgcatctttctacattttttcccaccaccctgactgaactcctgcaaatatgaaagcaggccagccctggtggctcacgcctgtaatcccagcacttcgggatgccaaggtaggcagatcacttggggtcaggagttcgagaccagtgggaccaacatactaaaaatacaaaattagctgggtgtggtggcaggtgcctgtaatcccagctgcttggaagactgaggcttaagaatcccttgaatccaggaagtggaggttgcagtgagctgagatcccacctctgcactccagcctgggcgactcaaaaaaaaagaagttgaaagcactgatctcacctcaagaaacttcaccgacataactacaaacttgcatagtattttaacagaatcacatttttccctgaagcctcttgaggaacctccctgaggaagtacataaatcttgtaaataatgactctagctgcaaatagtgagctattcttaattctagattatacttgaggatagaggagtctgataagttttcactactagtagatatatttcatggtcttggagtttttagaattagtcgttgattcctctttttgttcacattgtcagttgtgtttaacctaaggttgtttttgaccaagttcaacataatttttttctagattcaatttttgattgtatcaatgtacatgacgactatacaacatccctaccataagattgttgaatccctcctaattcggtgttaactgggacaggttatttatcctattaacccatattcgatgatggcaattgataatacaatttttaaatatatttagttatttgccttaatagagtcctatacctatctggatccattttgatgtgcttgttgaaggcttatttgtctgagtactcaattaacagaaaaaagattcaatttataaacattagtagaaggaatgggttacgaaaaggatatgaaataaattgtggtgacgcctttgattacataagtacctctaatgttccaaaaaagcatgactgctagtcctggatttaaattaggaggcatactataatattttttccaataaaatatacagtcctatttagtacagctatgtctacatctttgcactgttaccaagaaacaggatatgacagttataacttcatgtacatgaaatgatttgcaatatctcattttccttgactgtcatcaaagtagtaaagtagatgaagtcatttttagaagaatacatttaaaaggagtgtttaatttcaataatctgtgctctaatagaggagatttgtatgtctaaatgtaaggagattatcccccagaaaggagggggagttggcttttatttgagttttacaaagtctctcatgttgtaggatggtgtattaattatttcaaacaacaagtattgttttagtgagacactcttgagagatggagtcctccatgggtcccttgcattcataaacaatttgctgaataggccaagaatgcaaagccttgaccctcctttacacagaccatttctcaagggtatgtttgcagtgagaaacctcgagggatgaagtaatgtttccttcctgtgacaaaatgtaggcttgcttaaagcttgttataataccggtggtttcccaagttcagtgttcctctctcctgtaacacacaccactgtatgtacctttcactgtatgtaccctctacgtcttccctatgggacttggtcagagaggagacctgcagcaaacatactggggctcatgctgcttgctttgctgtgactcaggagtgtttgtcttctgccagcatccatgaaacaggaacaggttaacttaccagctgataatcaaatctcagacccaacagacacattggcctgaaataatctcagtaaatgaaagtttgacagtttaggaagcttatagaagtcaccttacatagttaatttaaatcgaaggtaagaaatatgactagtattagtaatttttttcaggatatggaacctcacatttgcaaattgtggatgtcactgtagtctagccttttcaagatcaccaaaaaaaaaaaaaaaaaaaagccatatagtaaatggttctagaaattatgaacatatgcctgcaggactaatgaaataaacagctgtccagatattgaacaaataagtatgtgtggcttgggatacagtttctagagccagaattatacatggattcagaaaaattctgtatttgcaaaatcttcgtacagaagtgaaaatgatatactgtaggttagatgaaatttattgaagatcatgtaaagaatttaaatagaaaatgtgaatgggaaaaagcaaaatttctagattaatatcattttatagaatgtatgattcataatatgtaccagttactgtgtaataaaacataattatttgtagctcttaaagtttctgtataaacgaacccaaaacattttaattttttaatgatagaaattggagatcactttatatttgtagtatcgttatattcagtcaatatgcctctagcctaggtctctgacaggttactttcctattttccagtttttgtactagtttattaaattactagagtgtcagaaatgctttaaaacttctagaatgtaatgcttcagacgtaatgattttcaatgatctcttcacattcatcactagtcttttctttcttgctctcatcattacactggtaaagagaaaaaggcttatgtaggtatttgaaattctagaacatagtgttttttgatcactgtgttatcaattatctatgtatgaatgtgtctatcatatatcaaatgtaggtattactaagaataacccatgttggagtcatagccagcatttggttagcttctagataatacagttttgtatttttttgttcaagattgatcttaccaagtattggggctcaaatttatcagtgttctcaaaacaaaaccaaaatacattgttcaagttctagaattttaatacttaaatctatacttgagggaattgaaggatgtttatactttttattcacttttaaattattaagttgaatttttatttatattttgtaatgtcagtttatttgtaaatatgtattgaatgcctacagtgaagcaggcaagatagacttgtggatataatgatgagccaaaaaaagttacagtttctgccctcatggcacttagtggagaagccagctgttaaagaatgacactaataaagttagaactctggtagagccattagagaggcctaacaggctaccatacacatatgtttaggaacctggctcaaacttcatcgaactaagctacagttagctgctccctggctactgtaaactgttatctatggcataattaagaatgacagtgtgaataatagaaagctgtagataatttaaaaatcattcaactttagtgttttgggaaagcaggaagaatctcacatctactcagtcatagttttatagtcatgtttgactgtaacacacagtcatatgtgttaaacatttccttactgtttttgtctgtaactggctctgtaatctgtcctagtgttgttacattattgtgtgaactaattggtaaactagttatttgtatataagtaaagtgttagttggcttttacactaagaaagaagtataagttatgggggaatatttattaggagataaaggataaaaaggattcaaagagatattaaaattgatcctttttatgtgtccgaatgtctactaactttccagtgctcttattgtagatttagtttttgttaacagttaaaatagtttccactgttctctgtatattttaaaagtaaaataaatagaattttaaagtcggttgtttagaaaaaccataactaacgcagttgcctgcattctgtcctgccaagtgagtctgctcttgcctgcagataactcatttgagattgcagcttccagaaatcattgctttaaaacagacttacagcatctattgtagtgaaattaaaatacatgcatcagttatcaaaaaaattttaaagtattgtaactcttcaatcataacttagctttactttatgaaatatgtatgtttccaaggagaagtccaggggaaagatgtaaggtaattagttctaaagtgctggatagtgactcttaatgactgcagtgtttttaccacgttggatgttgatctctgcagatagttaactcttgatttgtgactgattgtccaggttgtgaatttctccctccctacattgtccccttatcatcatcatcatgggttagtaatttttactgaaaggaagagagacaagtcgaaatgccggtcagttatgaacagctgtagcaaaagatctgattatacaggaagttgaaactctagactgatgagaggcttaagaattatctgttgatatttctccatttcttattttcctttattttcatggatgattaagatgttcttatagcattaaattaaagagctaaaacattatattctttagtcttgttttggaaattttatttgaactgagtaaataatgtaagtttaaaaatttcctgaacttctccaaagagatctctaacaaaacactcataatagattgtgctagtagaattgaaacatgagcgttttaatagatattggctcctaagtaaacacaagatgctaatagaatttgatctttatggatgatgtttctctcaaacttttgtaattcagacaccttgtttgagtcatgtgtgtttaatgttcatcctgttatgattgtctaccttggattatttattttgagatattaatgatcaattctagctcttctttgtgtcacctgccaccatatttctagaaaacgcgattagatgctttttgtcattttgtcccagataaaattcttacttaaaaaaaatactataaaggtattatggaaattatgccttttgagtgtcagatagtcactccgtttacaatttaatagcaaacatagtagtatataattagaatatactttaattatttttacagtttttacccacctcttgatgaaccatctattggaagtaaaaatgttgatctgtcaggacggcaggaaagaaaacaaatcttcaaagggaaaacatttatatttttgaatgccaaacaggtaattatgttataagctaaattttcctaaagaatacattacaaactaggatacattattaactcttatcagtagttgttaacgtatttcattttgggattttgtgtaaaagtgtgaagtagaataaaaaaaccccaggcaccagacctgcccagtgatcatggctgtgattacggggtttcttaaaatctgtgataactggcctattcataaatatgcaagtgagaaggacaggaaacttagttttaacttctttagttagtaagctaaacctctttagttagtaagctcactaaagaagttaaatcagttgaatatgttctgtgtaccaaagtggggtttccaagagtttatgttgtagtggagaaatgcagataagcccacagttagagtgctgttaggaagtgtgatgaggaaccacagagagtgtaacagttccagggccgcagagacctgttgaactagggactttctcaaagtggaagctgaaatgacctactcaagaagtagcaccaagtcttcttgaattgtacttctatgtttcccaaatcaaattcttatgtgttcaaaaaattactacattttactttaaaaaatgtttccttccatttttagcataagaaattgagttccgcagttgtctttggaggtggggaagctaggttgataacagaagagaatgaagaagaacataatttctttttggctccgggaacgtgtgttgttgatacaggaataacaaactcacagaccttaattcctgactgtcagaagaaatggattcagtcaataatggatatgctccaaaggtatagaattattctttattagtaaaaaactgcaagtaggagattttatgtttaaccttttttgttgcttttcacctaacaatgtaaaagtagatacaagaattttttttttttgagacggagtcttgctcttgttgcccaggctggagtgcagtggcacgatctcggctcactgcaacttctgccttctgggttcaagcaattctcctgccttagtctcctgagtagctgcgattataggcacccaccaccacacccagctaatttttgtacttttagtagagacagggttttgccatgtaggccaggctggtcttgaactcctgacctcaggtgatcctcctgcctcagtctcccaaagtgctgggattacaggtatgagccaccgtgcctggcctattttttatttttttgagacagggtcttgctctgttgtccaggctggagtgcagtggcacaatcttagctcactgcaacctctgccttctgggttcaaacgatcctctgcctcagccactctagtagctgggactacaggtgtgcaccaccacacccagctaatttttgtatttttagtagagatggggtttcaacatgttggccagcctggtctcaaactcccatcctgagatgatccacccacctcggcctcccaaagtgctgggattacaggcgtgagctactgcgcccggccgatacaagaattaataaaaggttttatagtgtagtatacttgaaaattaattgtgacttggtatattagatatagaatatctttattcatgacagttttactcaaaaatattttatgcttttttgttactttaatagaatttgtagaatttacctctgtaaattaacaaagtagtgttaagtttttttacagaatatgttgcatttgagaaacttaaaactcaacggtaaaaggttttctgcaattgcctagcgttgaaatgtatttgccctttgatggttattacccattagaaagacatataaacattcctatccttatataggctattatgggaaagcagacaaaaagtcagataggttgaaatgatgtttgtagagtggagggagactgtaaaagagctaactgaaggatttttcttagactttaatttgcattaataatcttagcattgttgaagccagtaagtattgtagaaatatatggcttggcagtcttctgactaaattgctcttcatgtggcaaaaagtaggtgaggactaaagtgtttatatgcctgaaaagtccacagccagcttcctaccaaagattcattcttcctgtcccaggagtccttctgaccatggggggattttctttttttctcttacaggcttgctgaaataaaaagtaaaattttagtcatctatcctataaatattttacttaattgagatatattaactactgtaaaaaagaagatatactatataacaaaaatactatcttattactacaacacaaatttactgtagttccattgtgttttaggcactggaaatataatgaaaaacaagatagtcacagtccctgccatcactggagcttactgtctagaggcagagacagagaaagacaagtaaacaaatcattacacatgtatataaaggaagcagtaacccggcagtggggaagaagcttattctaaacagagaaggcctcttttaggcaatgtcttacctatgaccagtttttcaaagagccagacaaagaatgtgccaagcagagcaacagcagtaatacattaaaaaaaaaattatcctacatagcaggttctggtctaagaatttatgtatgtataaacatttaatcctcaacctatatattatttactgttgtggtcctcactgtgcagatgagggaactgaggcagaagggggtttgcatatagcagaggcagtgagcagggtggccaggatgtgagcccaggcagttggattctggagtccaggctctttactttcagcacatattgacaccctgaggttaaaaaaaagtagctggagtaccaggtagctcagaccctggtgccttgatcatgaggtgacacttggcccctgttacaatatggttttttgggtttttggtggggggatgttgagacatggtttcactccaggctggagtgcaatggtgtgatcttggctcactgcagcctccacttcccaggctcaagcaattctcctgcctcagcctcccaagtagctgggactacaggcgtacaccaccacgttgctgctaatttctttatttcttgtagagactgggttttgccatgttgcccaggctggtcttgaactcctgagctgaagtgatctgcctgcctcagcctcccaaagtgctggcatcataggtgtgagccaccacacctggccacaatatgttttttggagggaatgcagtattatattttgagaaagactgtcacttaaaatgatacctgttaacttagttcaagccaatgaaggagcaattatatgaagcagagtggccagtaaagccagctattgaccgaacttcaacagggcaacattgtgattggtgattgccatggctgtattgattagatgtcagaagtgagtataggaaatctgtggtaaagattaagtgtcttttggagaagattagaagtctaggggaacaatacagccctgatttttgttcttgctgagacctttttccggtatctcagctcaaatttggtaactcttcctgttattaatttaattattttctctttatttcctcctgcttttccttctttcctgacctgttccccagccttgcacagaattggatgaatcataatccttggtccatgacacatgctcatcattgatttatgcgtaatacacatttattttgttcaccaattatttagttatttttcagacagcaagtgtttgaaaaaatctgtcatctaaaataccagccagatctttgaaaataacttacgtggttacccctagcccagttttctcctgtgtgaaataactgtcatccagaatccagtttacagttgtgggtggccagagcctattcagcagttcagggtgcaaggtgggaaccaaccttggataggacactattccattgcagggcacactgacacacccacccacactcactcagactggtacaatttggacacaccagttcacctaatgtgcacatctttggaatgtggtagtaaagcagagtacacacagaaaacccacacggacactgggggagagtgcaaattccacacagacagcggccctggttaggaatcagttttttcttgccgatgtcataatgaaatgacactgaatgaaatgatgttattcgaggacctgctatatagtaaaaatcttttctgttttagtcagtgctaaagatactcacctatgttttttactagtattttgataccatcttttgtttttgacatttgtttttaacttatctggaattctgttttataccaaagttacatgcacttttgtgtttttgactttattctttttcattcatcagtctgcctttctttgtaccaataccacattgtcttaattagtataacttccatgaagtcctcctagctggtagaacaagtctttttttgctcttcttcggaagcatcctggctattcttggccctttattttttcatttacatttagaatcatcttttgttaaagtttgtttggattttgattaggaagtgcattgaatctacaaggcaacttgagaattaacgatttatgtaaattttaattgtttttatccttgaatgtggtatccccatttatttaggtttgcttgaaatctcttaatagaattttatattttctgtagagagatcttgaatatcttactgtatttattcctagctagtacatattctctgatattattataaatgaatgatattgtcacttaaattaccttttctagttcactactgctgtaaagaaattcagctgacattcagataatcatcttatatccagccatcttgccagactcctcttttttcctaataatttatctatagtcttttctataaatcattatcatctataaggaatgtttccattctcctttgtaatcgttatttctctgatacctcttttttctgtctctttgttccataccaactgggacctccagagcagtgttgaacagaagtggtgaaaatggccacatttatctcactgttgactttaaaataaatgcttccagtgtttctccattaagggtgatgtaatttctgtagagcattattaaatatgtattaaaaatgtttctattttatgtaaccattctttataactaattcacatagtataagttatagttgcaaaagttagtaaataaaataccagttttgaattacctaaattacaggtaggtatatgtgatcacttgattataaaggttttttagattttatttttttagtctgatactttaattgcacgtataactgaatcctatttaagtaagctcagtacacacaaaaagacacattaagcatttcaaaaagaccttacgaactaaccatttaaaatatcttgactgagcaaggtggttcacgcctgtaatcccagcactttgggaggccgaggagggtggatcacttgaggccaggagttcgataccagcctggccagcgtagtgaaaccccatctctactaaaaatacaaaaattagctgggtgtgttggtgcgcgcctgtggttccagctacttgggaagctcagggcacaagaattgcctgaacctgggaggcagaggttgcagtgagccatggttgcaccactgctctccagcctgggtgaaagagcaagtctctgtctcagaaaaaaaaaaaaaaatctttacaatgagtattgaagacattttgtagttgtttgttaaaatttgaggtgtaatttttatatgatattaaatggtgtatttttgtttttataaaatcagtcattgaccttacagaacaacaaaaaataggttcaccataagattcctttaatgtgaagataccttaatacttgtaaatttggcaaaatgatttgatttactaaaagttgtaacacatgtatagatataccttaggtatagttctgtctacttctctccgtccttcctctctctcttctttttttcttctctttgaagtttcatcttaggctcatagtatccgtagatttgtttgtaaaagcctgtggtgattttttttaattttttttttttgagacggagtctcgctttgtcatccaggctggagtgcagtggcgcgatctcagcttactgcaacctccacctcataagttcaggcgattctcttgcctcagccttttgagtagctaggattacaagcgtgcaccactacacccagctaatttttgtatttttagtagagatgaggttttaccatgttggccaggctggtctcaaactcctgacctcaagtgatccacccgcctcagcctcccaaagtgctgggattacaggcatgaaccaccatgcctggccataaaagcctgttctgttgtttaatttgggtagtactgtattctttttattccaaaaattgtagaattttagaactgggaagatctatattctttagccccttattttacagatgaagttaatggagttactaaaagatggtagacttgtcaacgtaacagtgccccagcgagtaagctattatagtactctgcatttgaaattctgtctataccataaaattatttgggaggaaaaaaaagaggttgctttatcttgacattatctgaataaaagttgctagttttaatatattatcatacttaaactattttattctaataggcaaggtcttagacctattcctgaagcagaaattggattggcggtgattttcatgactacaaagaattactgtgatcctcagggccatcccagtacaggtaattgaagcattattttattgattcgttagcaactttattatgtaaatcgataagctaaatatacgttactcatatacttgctaggggtgaccatattcaccatgttttaaaattcatccatttatactttcatttattcattccataaatatttgtggctgccatgtagcagaaactgttatgaagtggtaaataaaataagaaagatccttgttattataaactttatgttctgaagatcaagatttagtaaccaaacacacacacatggtaagttcagatcaagccaagtataaagacaggtaaaacaaggtgatgtatgtaatagtgatggtagtaggctatttagataggtattcaaggaaagtctcaggaggtgacatttgagccatgtgtcctgaatgatgggaaaaggcagctgtgtgaggatctgggtggtggataattccaggtagaaggaacagatcactcttaggtttgtgtggagaattctaagggtcgacagtgtaagaggagatgtgaatagaatgctattgtggaaatctggatgtgaaagagcctgatgccttggaccagcatggtaatagtagagatgcagaaaaatgaacaggttcaggatatattttagaactagacctggtgggactttccggtggagcagttagaaacaactcctagtttcctagcataagtaactgggtggatggtggtgccatttactgagatgaagaatgtgcattataataatctcagtgttaatcatgaaagccaatgtattcagagacagtcactgtttcccctttattagttaaaacacatttccatagtttttaaaaaaattttttagtaagttgttgtaaaaatggtttatttcttttcttcttgcttttttaccttggagatttttacatttattctctctactaacttttatctaatttgcctagctctcagagcatccattctgtattccttatatatttatttgctccctggatttgttgtgtagttatttcatcagcagctattgaacttgggctaaaagagacaagttagagaacagcactaccagattgcacactccggggagcatcattcactgtagtccattgaatggcaactatggagtcagtccgtgtatctcctgagtgctctgcaaccttggtttaaacaagtaaggaatgtgctaagctaaattttggaaggagttagccattacggcctaatgaccaggaagctattaggtatgtagatcgttagtaaccatgcatagtaataataactgctgtctctggagtgtgcagagactagagtaagcactttaccatcatcaaactttaatctgcaaaacagtccttataagatagagggaagagcatcatctacttttcgtagatgagggaactgacggacagagaggaaattagctggaggtcacatagcaagtaattggttcaagctgagtcttaaagctgttacgacatcacattgcagtacaaatggcttatattttaatgtgtgacgttttgagaaatggtggtgtagggatgattgggagctgatgcaaaagcatagacatctgataaaatttgacaggctagtattttattatttggataagaatgtttattcagctgacatctctaccctgtcccattgagtatactacatatgtttgtgtctgtacataggtaaccttcaaatacacacagtcgtaagttcttgtgaagttttaaatataaccaaatcacttattttggtggaatcgtgatatgattaatattttcaccaaattcccagaattcatccataaagtaaaaagctaaagaccaactcttcaggctcttggcaagggaactttttaaatgtggatgccaaagagagccatattcttggagaaactactgcttccttgtctactagaaatatgctcaacttttagaactagcaggtgctgtagatattattttgttgatagatttctgttctcttacagaaaaaagatcagtatcagtaattttagactttaattacaacaaacatataaaaacggtgattaggtctaagtcagtagctccccttgtctcagcacccatttggggtcactgtcctgtgtttctctgtttagaaaatcaattctcaactagatatatgcttcagaaacaattctgaatacaaacgtacattgtccatgattcagaacattctgggatgcatcctagacatctgagttttttggttggttttgtttgatttttaagctcctgtttcctatacaaactctagaaaccactaaattagaatagtcttgagaagaaatgaactagagaggagtcttcttttatataaaaagaagaagcactcagactggaaactttggacattttttattcttccttttccattttatcaccaagacctgaaattctcactctacagcttctgctcaagaggtctgtgactgtccccttctcacagccagtaccctgtttgaaccctctacatccttctctctggagtgctggttgtattagtaattgccctagtaatggtccttactccagactcatctctacagttaatatttcactatgccactattcaattaccttctcttttctcaaaaattttaactagctcttattatccacagaataaatctccaagccctttgtctagacttctgagtcctcagtagtttagctgcagccttcctcctcccgacctcgccttttttacatagtttctctacagaatatgtgtgccatattttttatagttcccacacttcctcaccttgaacatcatgttccattcctagaatgttcagtactgctcgtcaaaatctgactcattctacaaatgattacctccttcgtaaggctcttctaaattgttttcactcccaactcctccaagtcagatgtaattattctgtttctatgctcagtagcttttttgcattccagccggagtttcttcctactttggatataaccagttgtttccacacctctttcagccactgagtagattgtaggctcttactaatttgggatcccctaacagcagcaagcacggtacttgtttgtaataggtataaatattttgcgtaattgaactaagctattggtacacaagattatgttttccagtgtggagcaacaaaatattgtcacccactgttgaaattgtgtttatagctgaaagggccttagagatcatctaatcgttctattaaaagataaggtataccaaggctgagaaaagttaaggtacataactacttcatggccaagccagttctaaaatttggttttctgactaccagactggtgcttttttctgatgtattatttcctacagaaacaaagtcatgagagtgaattaaaaagtacactgtatgtagtattacttcttgcatattttcgtaggtaggtttaggtgggttccaagtcatagtcctctgataataaaataattttatagcacaaccaactttgggggaacagagtgaatgagtctcccttttctctcctccttcctttgtttttatattcactcttttgttattcaacaaatacttattgaacatttgttatatacctgtattatggcaagcacttgaaataaagaggtgaatagatgagaccaagttcctgcccttatggtatttttaacaaggagaaaattgtaagtaatctgttaacaaacaccagttattttgggtcattagcttattattattattattatttcataaagtcttgctctgtcacccaggctggagtacagtggcatgatcataactcacgcagccttgaactcctcggcccaagcaatcctcctgcctcaccctcctgagtagctgggactataggtgtgcaccaccatgcccagctaatttttaaatttttttgttgagatgaagtctcactatgttgaccaggttggtctcttaactcctggcctcaagcagtcctcttgcctcatcctcccaaagtgctgagcagcagcgagccacctcaccgagcctacattaaattattcagtgatgatatgaacatttataatttttactctttccaaacttatgtgcagctgaaaatgaattctagagatatgtgtcttaaaggaaatgccagtgagcttctagaggtcacatagagaaagtggcggaagtcatttaaatatctgaatttagaattagtagtaaatattaagcacatcctgtgtcacaaggacctagcagaatgataatttagcttaggtgtttagtaaatatcaacttaaaatttttttcagttaatagtgtaaactttttttacatctactctataccaaatattgctctaggtactggtgatacagaaatacacaagacttagtccttattctcaaggatacaccagtctaacaagggaaagtagcaagtaaacaagtgatgataatgataacagctaatgctggcacagtgcttactatgttccaagcatttttctaggggctattttaccctccaaacaactttgtgaggcagatgttataattattctcattttatagatgaggaaagggaagcatagagaagttaaataacttgacacaggtcactcagctagtcataagtgaattttgtttattgcttttttgttgttgttttttgagatagggtcttaggctggagtgccatggcacaatcactgctcactgcagccttgacctcctgggctcaagtgatcctcccactttagcctcctgagtagcttggactgcaggtgtgtgccaccatgcctggcaagttttttttaatttttgtagagatggggtctcccagtgttgcccaggctgggctcaaactcctgggctcaagtgatcctcctgcctcagccttccaaagtgctgggataacaggcgtgaaccactgcacctggcttgaattgttattagaatgatttgcgtggtggtatggaaggagaattggagagcacttaattcagtgtgggagattcaaaaaaagtattccagaagagcagcacttgaactaagttgttcttctggtaagtaaaaagatgaggtaatcattatggttttctggagtagccagaagtttatgtctaagatggttttacatgatttgtttcaaataatgtattccttatgaaaataaaactcactaattctgatttctatagatggtagggtgtatacactttctgtgggggaataaatgtaattttttggcccactgacttaaaacataatttgaattagaatttgcttattttatttttctttcagttgataagacttcagcacaaagtatctgatgtggctttaaaatgatttggtttagataagcccgtcatagatgcccgcaggctgcttatagactgttttgtgtttgttggtaccactcattggagaaaaccatgtgcagtattccctagttaatcccctcagcatggtatagtctaacaattttaagtgaccagatgttcatcttctatctagcagttgtgattctttctttctacttgtgtgatttacaggattaaagacaacaactccaggaccaagcctttcacaaggcgtgtcagttgatgaaaaactaatgccaagcgccccagtgaacactacaacatacgtagctgacacagaatcagagcaagcagatacatggtaaagcttcttcattaccgtactattgttattattctatcaataaattaatagtatattcaggaagtaatgccctttatcaggttgtctcttgagagagaaagcatggaagaatgggataccagggaaaatgatatcttaggacaagggtcagcaggttttctgtaaaggagcggcgagtagttattttcggctttgaagactgttgatctctgtcccagctcctccactctgccactgtagcatgaaagtggccatagacgatatgtagtcattgtcaagagacaatacgtagtctcttaaagacaaggatactttccaagaaatgcttccttacacaattttggcattgtgtgaacatcgaacagtgtgttgacataaacctacatggtatagcgtactgtatagtatagatagcccaggggttccttatctctcagccacggtatcagtccatcacctgttaggaaccaggccacacagcagtaggtgatcagcgggcaagctagcaaagcttcatctttatttgcagctgctcccattgcttgcattaccgcctgagctccacctcctgtcagatcagcggtagcattagattctcataggagcacaaaccctattgtgagctgtgcatgtgagggatctaggttcttatgataatctaatgcctgatgatctgtcactgtctcccatcaccctcagatgggactgactagttgcaggaaaacgagcttaaggctctcactgattctacattatggtgagttgtataattttttcattatatattacaacgtaataataatagaaataaagtacataataaatatgcttgaattatccaaaaccattcccccctctgcccgcaaacctggaacctcaccacgaagctggtcctggttgccaaaaaggatgggaactgctggtatagactatttctcctaggctacacacttatatggcatgttactgtactgatactgtaggcaattgtaacacaatgggaagtatttgtgtatctaaacatagaaaaggtacagaaaaaatattgtataaaagataaaaaatggtatacctgtataagacacttaccgtgaatggagcttgtaggactggaagctgttctgggtaagtcaatgagtgagtggtaagtgaatgtgaaagcctaggacattactgtacatgattgttgccttattagcactacatttagactacactaaatttatatgcaaaaaaatcttcaataataaattaaccttagcttactgtaacttttgtactctgtaaactttaataatacctagcttaaaacatttaaaacattgtatagctgtgcaaaaatattttcttcatattattcgataaggttttctgttttcaaatttttaaattttgttttactttttaaacttttgttaaaaacaaagacataaacatacatgttagcctaggcctgcacagagttaggatcatcgcagtcattgccacatcctgtcccactggaaagtcttctggggcactaacacacatggagctgtcatctcctatgataataatgtcatcttctggaatccctcctgaagggactgcctgagactgttttaaagttattttttttataagaaggagtacattctaatgataaaaagtataatatagtaaatacattaaccagtaacatagtcatttattatcattatcaagtattatgtattgtaccgaattgtatgtgctgttgtgctatacttttatacaattggcagcataggtttgtttacatcaacatcaccatagacacttaataggttgcactgtgctgtcaataggtgatagcaatttttcagctcctttataatcttatgggaccagcatcatatgttgcagtccattgttgacagaaatatcattatatagtgtctgtgactgtaattgaaagtgttgtgttctaataactgtgtttataaaaataagtggcagatcagatttggcctacaggctgtagtttggcaactcctgtcttaggatagtttttttattccttgcaaatgtacatggatgactggaaagaattgttcaacttatttgtaactggtgagataagtttgaaatacatatatttgtattgcgtgatgttgcctatatttgaatgttacttgtaattttgaagatactttatatgtgtctacctagctatttaaatagttaatagttgtccataaagatagtttttctatggttctttatctgaagagggattttgttttgttttgtttttaatggaaggggttagcacttttatattatttgttattttctatttacaaccgtatgttttttattttaaatatgacataatgaagtgttcatattaagatacttaagatatcactgtattaaaccttatttattttaatttttgctacactcatattgaggccagatttaactttttcaagagaaattgttaaggttttggaagttgcttgaatgacagcctgacctcttgtttttgttttttttttttctgtaaaataagaatagcaaaggcagtgtctaatttaaccatactttgtaaaagtaaaaagtatataaaagtatactctgtgcatgtatgttgaaaatatttttctggtaatctaaagttctgttctattctcgagtctgccatctggctgaaataatgatatcagttcatttacagtgacctgaatatcttatatgtgattttattctgattttccatttttaataaaaaggtactataataatataataataaataataatgaaagtaccataatagtgattttacgtgggaataatttaaaatttttaaacaaaacagaaattgcctaggattatcacctagtttaacttataataggctatgctaagttggtattctgtgtgtgtttgtcagtcgtctatagtggagcaacaatatgtgctgtagggggtgaagaagagtaaggtatcatccttccacaggatgcttaggtaataaaggagttgctttcttgggatggtaaaatatattcagtgtatttttgtctaaaaattatcttctaaggttatattacgttagaactatttaacgatctttgtttctctattaaagttgctgtaaacttgattatttaccttgcattcttttctttttctacagggatttgagtgaaaggccaaaagaaatcaaagtctccaaaatggaacaaaaattcagaatgctttcacaagatgcacccactgtaaaggagtcctgcaaaacaagctctaataataatagtatggtatcaaatactttggctaagatgagaatcccaaactatcagctttcaccaactaaattgccaagtataaataaaagtaaagatagggcttctcagcagcagcagaccaactccatcagaaactactttcagccgtctaccaaaaaaaggtctgtttttgataacttctctcatgtctctgaaaaaaaaatgaaagttttttatactgttgtagaatggtattgtctttagtctgttctgattaagtatgcttctgctgctgcagctttttgaccgctttccctctcagaaatgtccctgatctccttcactagagccactagacagtttctccttcatctccttctatgtatgtacttacgtgttattttacttgccgcaattctcttcaataagaactaaccccctgtctcagctctaaaatcacatttctgctggttttccttgagaaccgctctcactccctctaggaccatattccatcaattattttctcaatttccatattttgaatatattgatcatcccagatttttttcttctgttttcaaaagttcaatctcacctttatttttgaaaaccttctcttgacctggtttcttcctctagctactgctgccttttttcttgtgccgtcccgttaagcttctcagaaaagatgatgttatttctcccatttctgtatgaactttggaggacttcttttcttccccgtactgctctttatactctaccttcaggttttgagactttattactgacaatcaacatatgtggccctaacttttcctttaaactttacttcttttccacaggggtttcatgctgtttccccagtaatagacctaaaaactttttctgtcctctcaccaaatgtggttttgttttttttttttagtaaaatagcttatgttgttacaatttttgactcttgtcctctggctcctgaaatcagtgttattgattgttattttcagtgtctgtcaatccctccatttccatctattgccaggttcaaactctgaccacctaaattattacaaaaacctctcgattggttggtttgtccagtaccttggcattaaattagtgttaatagaacattgggttgactgttcttgttcaacatgaatccaataaactcctggagaacagagtcccaggtctttgtgtcctctatgggcttagtacagtttgcataaagtgtttggtatttattgaatgaatgatacagtattgtataggaaacttttagtgatatattcacatagcatttgcagtatacagtcagtaccgtattgtagatttagtcactctgacttactgtcttgaatccatctctcattaacccatcagattgtattcccagggcagttttccctgcccacaaccttactacgttataaagtaagttgctgtctcttggcaacagtttctttgtatttttatatttttctaccttttcctgtaatttatcaactaatgcaacttaagcagagaagatagagatcaccgtactgctttagccacagggtccgtcagttctatcaaaacagcagaatgtatgtgagttctgcactgttttcaaaggtctatttgttgatttccagtaatattgttaataaaatcaagagtacattgtgaactaaatggagggagtgatgaatattgccaaactaaatggttacttagctgtgttcattttcttgttttgttttcttctttttttttaaatctaagggaaagggatgaagaaaatcaagaaatgtcttcatgcaaatcagcaagaatagaaacgtcttgttctcttttagaacaaacacaacctgctacaccctcattgtggaaaaataaggagcagcatctatctgagaatgagcctgtggacacaaactcagacaataacttatttacagatacagatttaaaatctattgtgaaaaattctgccagtaaatctcatgctgcagaaaagctaagatcaaataaaaaaagggaaatggatgatgtggccatagaagatgaagtattggaacagttattcaaggacacaaaaccagagttagaaattgatgtgaaagttcaaaaacaggaggaagatgtcaatgttagaaaaaggccaaggatggatatagaaacaaatgacactttcagtgatgaagcagtaccagaaagtagcaaaatatctgtaagtaacattttaaatgagaggtatagtacatagaagcttagaatgctaacaggtactttcgattttgtattgacagtatgagcatccattaatgtctttaacactcagtactatagaaatttgttggttgataaggtaaatggtaaatgttaaaagtacagtgattcttcagtagtgtaaaataaatgaccacaaattaaactttcatatgagattgttttactagatttccaaattaggctgtactattataaaagacatttggctatgatgataagtgtaggagatgcttcagtataagaaacaggcacagaaagatgaagttagtaaaacaaagtatctactcaataaatttttaggatataacatcactaggaattttcattttcatttaggttttgtaatgtccttgtctattttcatgactgttgataatttgtcttacccactttgatctatgaaaacacctgagattattttcttttttgtatacatcagtaagttgacttatctgtagatttgttagctctttagatgagagcacagacctgatgaagtaaaactttaatattctgatctccaatgtggattcattagctccactcattcatggctgtggtcatcctctccagtaacacctgcagaataaggacaggaataggcgaaaggataggattaagtgaacggaagttatagtttattagctaagcagttgagaacctagtgtgtatcaaggaccttataaatctacaactactattcaaaaaacagaacctatgtcctatttggcctgtgtattgttatcttcatataggcaagggaatccccattatttgttacttcttctgagtgatcctaaatgcccttctgtggaccagctgcattggagtcagctggtaagcttttctaaaatatagattcccaggccagagccccagagattttcattcagtatatctgattttccttcccaggataagttccctcattgggttagctaagaattcctttgatatttttaaaaattctaaaatcagtggcttccgtaaaataggatcttttttcccctataaaagtgtcctggaagtagataatcagagctgcttcccatggtattaatttactaggtgtctgtctttctgctctttgagaggatacctccagccatcaagtctactttccagggagggagaatgtgatgatgaggggacaggtaaaggcctttccagctgaattcctccctgttttctaaggagcttt

SEQ ID NO: 435 - DNA, 32744 bp, Homo sapiens
  source 1..32744: mol_type = other DNA
atcagctcagcgaagccgccgcagaggctgatggggggctggaggctgtgaggcttccagcgtcggtaccatggcgacgcgcggtggggctggggtggcaatggcggtttggtccctcttatccgcccgggccgtgaccgcgttccttctgttgttcctccctcgcttcttacaggcccagaccttctctttccctttccagcagccggagaagtgcgacaacaaccagtactttgatatctccgccctctcgtgtgttccttgtggagctaaccagaggcaagatgcccgaggtaagacggtttgcggtgggccctggcaaaagtaacactcccgccttggtcggcccctagtccccgtaaatggagtttcaccatgttgatcaggctagtctcgaacttctgacctcaggtgatccacccgcctccgcctcccaaagtgctgggattacaggcgtgagccaccgcgcctggcccgaatacatgtatattgtttagtgacgtagaaatgtaaaatttccagcagcagttaagtagtttaatagtttagttatacttgcacttaaaatggtagcagcataataccagctgtgtgccagtgtaagacctctacgtataataactaattttgtactcatactaaccctgtgaggtaggtaccaattttttttctccattttattgtagaggaagccaaggcagagagtttagtaacttgttcaaggtcatgcaactgagtaggattactacgattggaactcaagaagtgtatttctggatttgaacccaggcagtactgcctccagaatcctgctgttaatcactatactgcttctcaagatcttcagacttattaaaagtttcactatctgggaactttatttttatttatcaaggataaaattggcttttttttttttttttttttttttaggaacttcatgtgtatgtctaccaggatttcagatgatctctaataatggaggacctgctattatttgtaaaaagtgcccagaaaacatggtgcgcataatttattttaaaataacttacctgtaaaaagtagtaagttaaatatctttatttttcaaaatataatttaatgtttaatgtttccccacagactttaaaattactatgctaattttatttttactagagtaagttttgggagatcagcgaaatttcatgcaaacttggagaaaacagaaatgtatttcttttaaaatctgaaatccaaaaaccacaaagctgtaaaaatttaagtttttgtttttactcgtagaataactcggttatgaagaaaattagatgaataaggcatatatagagcagtctgggatgtgtgcaatttgggatgtgtatattcttttgactgatgcaagtggagttgtcttagacctaccatgtcaacagtttatatgattattgatgttcataatgatatctaaggtgtaattatttcatgaaataccaattgcattaatagattaaataatgtctgtttctgttttgttagtaatttcattgtatcgtaatttaaaaaaaattagtaaatagttactatatataattctcaacataaatatatttttcaatcatgttggataattaaaagtctgtgtaacagttgtgacatttacagtaatgtttcttctcattgtcatataaaaaatattaattctgggaatttaatgtgaagttatcaattgtcccaatttatagctatctgtattacttgtaagtctgattaccactttttatattaccatttattttatatctttataatagattataatagattaccatttattttatatctttgcaaatattgatcctagctgaattacccatgataaaaagctgctaataaaaagtggtctcgcagcagatttctttttcagtgacattgtttaagttattgtaatttttaaattgtcctgtataggccaggcacagtggctcatgcctgtaatcccagcagtttgggaggctgagcctggtggatcatgagctcaggagtttgagaccagcctggccaatatggtgaaaccccatctctactaaaaatacaaaaatgagctggctgtggtggcgcgtgcctgtagtcccagctgcttgggaggctgaggcaagagaatcgcttgaactcaggaggcagaggttgcagtaagccaagattgcaccattgcactccagcctgggtgacagagcgagactctgtctcaaaaaaataaataaaatataaataaataaataaataaataaataaataaataaataaattgtcctgtataaatgtattgccaaatataggagtatttcttgataaattcagtcttttcaaccaaaatttaaaataatttgtggcattatttttgttctttataaactttggttacatctgtgtttgtaattattgtgttttttgccccaggcttttcctaaaccatatgatataataagcccaattttgaatgctgtcatactttatcaaaaacctttactaggccgggcgcggtggctcacgcctgtaatcccagcactttgggaggctgaggcaggtggatcacgaggtcaagagatcaagaccatcctggcaaatgtggtgaaaccccatctctactaaaaatacaaaaattagctggacgtggtggcacgtgcctgtagtcccagctactcgggaggctgaggcaggagaattgtttgaacctgggaggcagagcttgcagtgagccgagattgtgccactgcactccagcctggcaacagagcaaagactctgtctcaaaaaaaaaaaaacctttactagtacaagccataaatggatagaagaaaatattctcataaatcaattttaacaactatgtgtataatttatatatttcataaaatttacccattttgaatcataaatgaattttttttttttttgaaagagagtattactgttgctcaggctggagtgcagtggcacgatctcagctcactgcaacctccacctttctggttcaagccattctggtgcctcagcctcccaagtaggattataggcatacaccaccacgcccagctaatttttgtatttttagtagagacgaggtttcaccacattggccaggctggcctcaagctttggcctcaagtgatccacccaccttggcctcccaaagtgctggaattacagacgtgagccactgtgcctggactaaattttttaggtatttgaatttttaaaaattagaatagagttttagaacaggtaagattaacctattaactgaccgttgattcaatctttttgtgttgtgttgtgttttatatttgtaaatggaaaaacgaaatgacaaataattatgaaagaggcatccatttgaattaaagatcctgaagaagagagaactattatccggagttaatcctttaatagttttcaggacatagtgataatatagagcttcattttggaatataagcatgaattatctctccagggaatttttatgtggctcatatatgtatgatttatttgaatattcactgtagttacatactcttatggcattttgaacttacatgattagaagaagaaagttaattaaaaaagagaaaagcattttttttcttttaatttagaaaggtgttacagaagatggctggaactgcatttcttgccctagtgacttaactgccgaaggaaaatgtcactgtcccattggccatattttaggtaagaattagattccttataaagaagtagtgataaatcttcattcttgtttttgtttttatttgaaaagggcactaatttaaatagttaagtgattacttaatatttttgcagtggctcaagcaattctcctgcctcagcttcctgagtagctgggactgcacacataacaccactgcagctggctaatttttaaattttttgtagagactgggtctcgttatgttgctcagcctggtcttgaactcctggcctcgagagatcttcctgcctcagcctcctaaagtgctgggattataggcatcagtcactgtgtccagcccttaatagtgtttataaaaattatttttgtacaaattaatgatacttaaaacatcagcaggcattgagaagaaaatacaaagttttgtctgagttttttaaaactcttaatattgtaggattagatggttatttccttaacataacatgacaaaatatgtctcaactcaaaagccaacttgatacttaatagggaaaaagcgtaagcattcctgttaatgtcaggacctggaaaaggatgcaaactatgcacttaagtaagagaaaaaaaatatttatcattggaaaagaaaaggtaggccgttgttaatcctagcactttggaaggctaaggcaggtgtattgcttgagctcaagagtttgagaccagtctgggcaacatggtgaaaccgcatctctacaaataaaaaaaaaaattatttggttacggtggcatgcacctgtagtcccagctactcgagaggcaaaggtgggaagatcgcttgagcctggaaggtcaaggctacagtgagctgagatggcgccactgcactccagcctgagcgacagggtaagaccctgtctcatgaaaaaaaaaaaaaaaaaaagtaaaatatcattgtttacagatgatttgattgtatgtttaaaacacccaacagaatgactaaaaattattataaacagtgatggaagaaaatacctcatatacagtagcaacaaaaaagaaaaaataagtaggcatatccttttttttaattttaatttttatttttgtttttttttttttgagacagagttttcactgttgttgcccaggctagagtgcaatggtgtgatcttggctcactgcaacctccctctcaggttcaagcgattctcctgcctcagcctcccgagtagttgggattataggcatgtgccaccacacctggctaattttatatttttagtggctaacagggtttctccatgttggtcaggctggtcttgaacttccgacctcaggtgatctgcctgcctcagcctcccaaagtgctgggatacaggcttgagccaccgcacctgaccttggcatgtactttagaaggaatgtacaacataattgaagaaatttgtgagtattactgagggatatgaaggcaggcttttaagtgaaaatgcattctttatttttggatgggaagattaaatattagaaagatgcaactcttctaccagtctgtatattttaaaggaccctaataaattctatcaggatattatttgtttgttttggggtaatatacaaatagagtctgaagtttaacaggaaagttatatgaaaagctaagaaaattctgggaagggaaagaaggaactaccccatcagataatatgcatgttatatagctactataatcacatatatgacaggcttatggatacacagactgattgatggaacttaaaacaggcaatcagaatagattcaattcatataggaatttggtatgtgaaaaaagtggcatttcatataagtggggataaaactgattaatgatgctgggaaaactgagaaaacacccaggttgggtttctaccttatttctgagaaaattaaactccaaatgagtcaaatactaaatatgaatatatgaaagttcttaaagaaaatgcaggaaaaatttgtatagttttggtttaacaggcctaagtatgaccaaaaatactcagtcactttggaggcctaggtgggacgattacttgagccatggagttcctgaccagcctgggcaatatagagagactctgtgtctacaaaaaaaaaagaaaaaaagaaaaaccacagaagaaaaaattggtaaatttataaaatgccataaaaattataataccaaaaaccaaactacaaactaaagaaaaatattaatgcatacaatagacagaggtcgaagttcttcaataaatgtaaagctcctacagataaataaaagtaagatgaataacccaatttttaaaatagccaagagtcataaataaagttcacatagaaaaaaatattttaacgtgagaaaaaaatgttcaactttactcagagtaagaaaatgtacgttaaagctaaaatgagattttatttttaacctaccagattttattataaaattttttcgaccgggcacagtggctcacgcttgtaatccagcactttgggaggccgaggcaggtggatcacctgagttcaggagttcaagaccagcctgacgaatgtagtcgctattaaaaactcaaaattagcctggcatggtggcacatgcctgtaatcccagtttcttggaggctgaggcaggagaattgcttgaacccaaggaggtggaggttacagtgagccaagatcacgccattgcactccagcctgggcaacaagagtgaaactccatctcaaaataaaaaagaaactttttcaactttgacaatgtatttataaggatacagggaaatagttattcgtgtattaatgggaaaaattttaagttggtgcaacctctgtggaaagcaaatttatggtgtttatcaaaattaaaaatacagattatctttgcctggaaagctctcatctagaaatttctcatttggatacacttaactgtatgcctgaagaagtgttgaatgtttttttcttgcaacattattcctaagacaaaagattataaacaaaataagattctatcaagatgagatcaatcaattaaattatgatatagtcatacaatggtatagaatgcaattgtggaaaaataaagaggcagttctacacatagtgctatggaaagaaatctaagatatattgagtaaaaaagcaagatttggaataatttattcattcatctacaaatgtttattgagtacctgctatttatcagcactattttatgtacttggtattccactatttagctttttaaagaccattatatatgcatatgtgcttgtatatgcacaggttatttctgaaaagactcataagaaactgttaacaatgctgcctcctgagtgaagaactgagtgcctgggaatagtgggaaagagacttaattttcattttaaatctttttttgcttggtgcagtgtttcacgcctgtaatcgcagcactttgggaagccgaggtgggtggatcacctgaggttagaagttcaaaaccaccctggccaacatggtgaaaccctgtctctactaaaaatagaaaaattagctgggcatggtggcaggtgcctgtagtcccagctacttgggacactgaggcaggagaatcacttgaatctgggaagtggaggttacagtgagtgagatcacgccactgtgctccagcctggatgacaagagcgaaactctctcaaaaaataaaataaaataaatccttttgtgccttttatttttatatttcatatattacccaaagattaattttttaattatctttacctttttttttttttactttttaacaatttttttttttgtggtgatgggggtcttactatatatctcaagctggtcttgaactcctgacctcaagcagtcctcctgccttgacctctcaatgtgttgggattacaggtgtgagccaccatgcctggtcttattttttcagagacgtggtcttgttatgttacccaggctggattcaaactcctgggcttaagcaatctactgcacccagcttcttagtagtttcattggcactgttgcctccattgaaaatattaacttgattctcacggtatttggggggtgtattcttagggatgggactaatgaaagttttatgagttggatggcaatatgaaatttattacacttcatgatgtactaattttggtgtgtgtgtctctgtgtgtgcacattcagaattttttttccctgttttattataaggatctacactatatagccacaggaaacataagtggtatgtttgcataaatgtttcatacacaaatattgttctagcatacttttttcagttaacggtatgctctgatgctctgttagatttacctgattctttttgtttgtttgttttttgaaacagggtctcactcttgcccaggctggagtgtagtggtgtgatctcagctcactgcaacctccacctaccaggttcaagtgattctcatgcctcagacacttgagtagctgggattacaggcacgtgccaccacacccagctaattttgtatttttttttttttagtagagacaaggttttgccatattggccaggctggtcttgaactcctggcctcatgtgatccacccaccttagcctcccaaagggctgggattacaggcataagcctcctcacctggccttacctgattctttttaatatattccatagtattttgtagcatggatataccatcattctgctattttaaatattcgtgttgtttctaacaaataatgcctcagtgaatatccttatatacatgttcaagtgtttctgtaagttaggtatctaaaaacaaaattgtggtgttataaggatgtgaatttgaaactttaatagatactactaaaagccttctaagttgcagaaacttatcagtaatctatgaaaatacttgcttccccatcctagtgtgacagaaatgtatagataagaggtaagaaaatttttgaggaaaaaaatactgacttaattgttacgatgacttggaaaatgattttctatattttactatgtgagaatagggaaggcatcacttctctttttttttggaggcatggacgggtacgaagggatcacttctctacactttattatggagatacttgttatgcctttaatgcaaataaagtgttttgagaattaatagaataatagttacaattgggttttgttaaatattttctgaatatgtagaagcttatatgtttactatgagttacatctttattttgtttctaaactgttcagtggaaagagacattaatggaacattgttgtctcaagcaacttgtgagctctgtgatggaaatgaaaactcttttatggtagtaaatgctttaggagacaggtaagcagtgtgatgggggctaacttcattaatatcatcttatattagtgtataatttgtacttttaagagtgttttcctatcatatcacttagttttcacaataacccaaggaaggatagaagtagacattaacagatacagaagctgaggcccagagcgtgagacacactagggttcaaattttggtccagtctgttagttgtctgaccttggatagctcactacttcacaatcccttgtctttagaatggtaatgttaccacccacttcataggctgtaatggctcagaaataataagtaataaagtaaatagatacagttcttagtatagtgctacatagtaaccactctgtacagggtagctatttttgtttgttgttacataatttgtatataatctgtaatataattatgtgctaagtactgtactaaagcccttatgtattataatgttacatagaaaaacataaatgtatgctaataatagcccaggtaccctgatttatagtcccattttctgttgcttcctgttccccctttgtgcatgtatttgtgaaacacacacacacacacacacacacccctgcctgcctatatacttccctctaatttaagcacattataccaatttcagcatctttaatttattagaggcctacatcatgacttccctccgggcacagttttttctttagtttccaagtttaatatggaaaatagttgagcagcttttctgagggctacttagtgttggatcatcttttctctaaggctgacctgagttatggcatccaaataccaattttttttgcccaatatttccccaagcctagtgtgttttatgtcatgccccagcccgactcctacctgctctattttgcaagtgatgaatacccatatattcactcatcactgtcctcattggaccagtaccctccctccctctgtctcattcattaatgaaaaatatgaagtatttttctaaaataaacaaagatggtaaatagaatttatttaaaagtgttggctgtaggtttgataggagctagagatacatttctcttcgggttatgctacctttttactttgtggcacataaaataaggaaagtatatttgatataactaattgtaaaaattgggtttcatttatatgagtttgttgctctcttgttagttgagtgacttaattatctttcatactcagaattattcattatgtacattccatgtagttaaaaaatactcttctattattgattagttttacttactttatactttgtaacacagaatggcctaaaactattcaaatcagtgttattttaaatttgtttaacatatttacataattgcttactgaatgaatctactctaatccattgtttagaaagacagcttttctattaggtttagtataatttattaacatttttaaaattatttttgttatattgaacaggtgcgtccgatgtgagccaacatttgttaataccagcaggtcctgtgcatgttcagaacctaacattttagtaaggctaaccaaattgataaagtatatatatttttaattcagttgcttatgccttttcataagcttctattttttccctcatttatttatgaagacagggggattatgtttcagcagcacagggaattttcctctacgtagaatttcagctgcacgttatggagaagttgtgagtatgtttcaatttttttgttctgttgttaaaaaactttctacatttcatccattagtaatttcaggctagaatgagaaacccttttgtgtaaatcattttaaaacagaaaaaaatcaatctaagaaacattagtctaataattcagcagtataatttctaagtacagtactcagtctgtaccgtagcctgtttgtttttcagtgcgctacagaatgtttacaccagaaatatctggtatatgttctgtataggatgcagtataatacatttaagggcaccagaaacgctagatttgaaccctggatttgcaagtcattagtttggtatccttggaccttgagaagatttcaaaacttcattttattgtctgtaagttggacataataaaaatacctttaccacagtgcctgtacatggtaatcattagagaaatcaggattattcttatttggccagatttttccttttttttttattttatttttgtttgagatggagtctcgctctgttgcccaggctggagtgctgtggtgcagtctcggctcactgcaacctccgcctcccaggttcaagcgattctcctgcctcagcgagtagctgggattacaggcacctgccactacgcccggctaattttttgtattttcagtagagatgggatttcactgtgttggccaggctggtcttgaactcctgaccttgtgacccacccacgttggcctcccaaagtgctgggattacatgcatgagccactgcgcccagccagttgtttcttattttgtggatgagagcattgaggcctagagttagagctttggcagcagatgctggtgataaccacttctagggtataaaatggaaagtaagtagatgaattggaactaaagaggtaacaaatccaagagaataagagttagatgactaggagttacaataggaattactgaatgaacattgaagatgcttagtatgccagagtttggggtggacagggtgtgatctagttgttaatatcattattgttaatattattattgaatataagagtgattaagaggactgtgaggatagcaatgatgagggtgggatctaggatcttgatgaatgaggcaaaaattcctctactcagtatagtcttgtgaggaagacaggcaagtaccaagtagttaccagacaacaaaataaaagctaaaatacataggtagctctgggattatcccaaaattggctcatctgtaacaagatacatgtcttctggggcattcttctccagattggagtgaatatctgtatatgattattaaatttgcaggcctttaattttccttttttcctttttcaaataatttaagttgaaataattttgctgaaagtcccaacaatgactctttgttctttctggtctgagatccccaatcatttaatggtcatgtccctttagcttcctccgatctggaactaggtcctcagtgttttcctgtctttcatgaatgcaacagttttgaatattacaggccttaccatcctacagatactttcctcacactttgtacctgcttagatgaaagccacaaaaaagatgtcatgttcttttcagtggactgcatcacatccaggggcacacagtgtctacctgtgccaccactgatgctgttaaccttgatcacctgctttaaagtcaccatgactaccataaagttaccattttccatttgtaattgattagtattttgtgaggagtatttctgagattacacttcctcactaacccttaactcactagcattagtctccattgttgaaccactactgtgatggttgccaaaggttaattttggatttccatccacatttgattacttccatatttattaattgacattctattgtaaggaagaactatctcttcttccccattcatacacttattttttaaaattaatgtccatgtggatttgtgggttcctaatttattcagttagttataatccagcatactcattatttgttttgatgctcaaattgtcctatatctggccaataaaagtcccttcaagttggcttctgcgtgattttttttttttttttgacatgtccccatcattctttgaacatttgcttactttatggtacaacaagatttctaggctaatctaggctaatcttgtaattttcctgcctcagccctggaatcagccatttcttttttctttttttttttttttttttgagacggagtttcactcttgttgcccaggctggagtgcaatggcgcaatcttagctcaccgcaacctccacctcccgggttcaagtggtttccctgcctccgcctcccaagtagctgggattacaggcatgcaccaccacacctggctaatttttgtatttttagtagagacagagtttctccatattggtcaggctggtctcgaactccccacctcaaatgatctacccgcctaagcctcccaaagtgctgggattacaggcatgagccaccacacccgactggagtcagccatttctttaatcagttttgtaggataaatatttagaaaccaagattaacacacttagtatgtcctctcaccaaacgtagctaggaaatatacacatacatacatacacacacacatctatgactatttctgtgtctgtgtatatatattaaaagggctgggcgtggtggctcacacctgtaatcacagcactttgggaggccgaggcaggtggatcacttgaggtcaggagtttgagaccagtctggccaatatggtaaaacctcatctccactaaaaatacaaaaattgtctgggtgtggtggtgccctctgtaacccagcttctcaagaggctaagacgggagaatcactcgaacctggtaggtggaggttgcagtgagccaagatcgcgccactgcactccagcctgggcaacagaacaagactctgtctcaaaaaaataaaataaaataaaatagctcatactgatccctttaattcttaagcaatacttcagggttctttctaacctttccctttgataagttttaagtatcttctccaggggtgaggaatctggggttcattatcctcaatttatttatatgctcaatgtgaccaatcttccaaccccctcactttctattccacctccacattctccctcctctgctagcaccatgcagttgacccattatagacttctttgataggtgggtagggaggaactgttccatccttaatgttctgattcagttaatgtatttcatttaaacataccagatttttttaaaattaaaaataataaaactaaattaaaaaaaaaacaaaaccacctcgacccttcccaaaactttcctggtcccacacgcagacactgcaaccgtgaccagaggatggggcactgggaacaggaacgacaccactgcccagcctggggcacctgagggacaacctggaacactccaggagcactgcaaaggtctagcagaaccaacactggcgcgggcagggaagggcagcctgatgggctcgtggggcagctcccaccaccttgaagaagggctgcctgcaaggcaacggccataggaggcgagcaaggggtacctgctgcctcagaggaccccccagtcctgccgatgccatgaggcagagggtggaggaagcgaggtcagccggattccatatccctgcatcccacatactgcccaagggcagggaggagaggcgaggggcccataggaatgagaagagcggttccatttgccatgaatgtctgtccctcatctgtcgcggctcagacctggccagggagagcatgacatcaccacagcaattgtgtgctaaacataccagttctgaacactgattctttcctaaggacagatttggaattcctgatttaaagtcatgttgcaactgcttttcagactggttccgtgtagccagtgtataaaacgtgtaagcaaaatctagttaagatggtttgactacccttgcctagtctcagtttgcaagaataagaactcagttttatccatgtacttgtaagtcagtcagattctaagggcttgtttaaagtaattaaacttagacgagattagattaattgataaaccagaatacatgtttattagtttatgttgagactgtaattgccaattagactgaaatatttgtattgactccataacatacattcttcctaattggaaaagtctactttgaacgttaaggttggaagttttcttagagaacaaaattggtacataattttgtttgtataattttataacaaggcatccaatcctactcatcctactcttggaatatacttgccaatcagaaaaaaattttcacatacatgagttagtgtctccccattccctttccctcaaatacattaatagtgaaatagcttcatggtttttggttttcccaacttttattttgaaaaatttcaaaattgcagaaaagctgaaagaattagacaatgactatgcctatgtctttcacctggtttaaagaattattaatgttttgccacatttgctttatctctctgtatatatgtaaatatatacgcaaacacaatgtttttttccccctgagccatttgaaaataagttgtagacataatgacattgcactccaaatactttagggtggatctccaaagaataaggcattttcctagaatcacacccaaggaatttaaaattaacataatagaattaactgatatccattcatacccaaattttcccagttgttcaaaaatgttctttattctcccttccttttttgggggaagggatacctaggatccaatcaaggatctcacactgcagttagtctttctagtgtcctttaatctagaacatatccctgcttcactttgcttttgtggtttttcccctctgtatttttctgattgttttctcatgattagactcagtgaaacatattttcgcaagatattatatagatgttgtatacagctcattgcatcacaacaagaggtatgtaatgtctgtcaggttgtccagttattggtgatagtaaatttgattgctaggctggacgcggtggctcactcctttaatcccagcactttgggaggctgaggcatgtagatcacctgaggtcagaagttcaagaccagcctggccaacatggtgaaaccccatctctactgaaaatacaaaaattagctgggcgtggcggcaggctcctgtaaccccagctactcaggaggctgaggcaggagaatcgcttgaacccaggagacagaggttgcagtgagccaagatcgcgccattgcactccatcctgggcaacaagcgaaattccgtctcaaaaaaaaaaaaaaatattgatttcttggtcatagttgtgtctgccacttctctccattgtaaaggtactgtgattaatacgttagtctgagactatgtaaatatccattttagcaattaatgaatcttgcctgtatcagttactaaactggtcacttctaataacaattctattattccctctagatttattagctagcaattttctgtagaagcactttactttttctctgtgcttttttttttttaaaaaaaagctttattatgaactgtagaatctttgtttactcattgtgttataatctgttaactttttttattcttcttttcgaagttcaagttgtaccaaatttgaacttcctttcagcatagctcctgtgttgttttgacgtgactttagactttagggatttctttggtttctctataccatgttccagactcaccttgtataattatatttttaatagttccataatattctggcttatgcactaaaatttgtataatggtatctccagagaatatttaggttttcagttattaactatattgctgtcaaccataaatatgttttcccatttagagggattattgctttaagataaatttcctaagtgttcctaaatttctgggttagagtatatggatattgctttataaaagtatcatgtaactttcacactatcagtggcattgtatgtggctccattttacatgcatttgtcagtactgttgtgttgcatttcattttttaccagtttgtgtgcatgtgttcctcagccttctatgcatattttttcttacaaaataatttttgcttattaaatatacacaaatagtacctcatagttttattatagatttctctgatcactgtggtgccatgttcatataatttagttatatcacttacgtgtgtgcccagacgattttctctgaatggtgcttcttagtttctcatattttagcaagatgtacagataagctttaaagtaatgttttttagccagaggtttgttatctgtagccttcaaaaccgatgtaattgccttggtctcatctggagatactgattcgtttttgtttgggatgaagccaggcattttttgtttttagaaagttctgcaggtgattgtgatgtccaccattgtttgagaaccaccactttggagatttgaaattatttccccccaattttttttattgcttgccaatttggtacagtatttataataattataaaccagtaaatattaaccactcaatactaagtcaggatctgttattttttcttttgtttgccactttattttttatgttagtgaaataggcatgtagtattttttgattacagacacattttgtctcgttatatcttttgcctaagtgtgattattttgtaatgcggtcctatttataataactgacattggttaaaatcaattcttgtattcctattagtaactgtttttctactaacattgtgaaagtaatgtgagacatttcccattcaacaatatgcatattggagtcatttgaacttaaaaataaaatgtatctttttgtttacagggcatgtctttaacttcagaatggtttgcaaagtatttgcaatcatcagcagctgcatgttgggtaagtttgaattttttaaataaatttcattttattttgaagaattataccatttatttacccagataataaaagttttatttctaagtagctatagcttcttggtcataatcttataagaagaataaactctttcttgtgggctgaaagagaatacatgaagaagatgttatttagtatacacaaattgaatgtctccaagcttttttagctgaaacggagtgttaggggaaactgactgtcacttagtaaatgtttattgatgacctactgtgtgccgggcccaattcttaaatcaggttagatatttcagaaaaagaaaaaaacagtccttcatggagttacagcctaagtaaatgtcaggttgtgctaagtgctatgaaggcaaatagttaagagtaaagtacatagatggggtggggggtgctattttatatagtgatcaggacagacatctctgagagggttatagttgagcaaagaactgaaaaaagtgagagtgagccatgtaaacatcaaggagaagagtgttctaagcagaaaccatagcaggagcaaagatctcaaagcagtttactggcttattcatgcttaagagagaaggaggaggctggagtggctggagcagagtgagcagggaaagtggagtggagatgaggtcagggatgtagggagtggctatggcaaggccctggagcttattttaagggagataggaggatttcatgcaaaggaagacatgatagaacttcagttcttgaaaggatcattgtagcatggagaatagaatttgttggggtaagggaccatttaggagagtattacagtaatctgagtgagagatagtggaccattgcacaagggtggtcctgcagaaatgagagaagcatttaccttcagctatgctttgaagatttagctgacagaatttactcatgagctggataaggggcaagagagaaaaaaagttcaaagtttttcacatgaataactgtaaaaatggaattgccttttcctaatagggaaaactgagaaagatggttgacaggcaaactcaacaaatgatctcattttgttgtttataaagcagattacttaaacaaaatggattagattttatgtgtaagatctaacatacaaattattgttctttcaaaaatagtctagtaggttttttaatgtcatgctatgagtttttccttagttcttctttcagtttcttgtctttatattttaacctaaaatttacaattaaaatgtttgtgttatttctcttcccaagtggaaagtttattttctccttaagctagagggaaggttttaacaagcaaaagaataataaaaaaaattattagtaaaataggttaaaaaaaatttttttttttttgagacggagcctcaccctgttgcacaggctggagtgcacaatctcgactcactgcaacctccgcctcctgggctcaagagatcctcctgcctcagcctcctgggtagctaggactacaggggcatgccaccacactcagctaatttttctatttttagtagagacagggtttcaccacataggacaggctgctctcaaactcctgacctcaagtgatctgcctgccttgacctcgcaaagtgctgggattacaggcgtgagccaccatgcccggcttagaataggcaaaatgaaaacaaaataaactttttctctttttatttatttcttttttgtattatactttaagttctagggtacatgtgcacaacatgcaggtttgttacataggtatacatgtgccatgttgctgtgctgcacccattaactcgtcatttacattaggtatttatcctaatgctatccctcgcccagtcccccacccaaagacaggccccagtgtgtgatgttccccgccctgtgtccaagtgttctcgttgaattcccacctatgagagagaacacagagtgtttagttttctgtccttgtgatagtttactcagaatgatggtttccagcttcatccatgtccctgcaaaggacatgaactcatccttttttatggctgcttagtattccatggtgtataatatgccacattttcttaatccagtctatcattgatggacatttgggttggttccaagtctttgctattgtgaatagtgccgcaataaacatacatgtgcatgtgtctttatagtagcatgatttataatcctttgggtatatacccagtaatgggattgctgggtcaaatggtatttctagttctagatccttgaggaattgccacactgtcttccacaatggttgaactagtttacactcccatcagtgtaaaagcattcctatttctccatgtcctctccagcatctgttgtttcctaactttttaatgatcaccattttaactggtgtgagatgctatctctttgtggttttgatttacatttctctgatgaccagtgatgacgagcattttttcatgtgtctgttggctgcataaatgtcttctgttgagaagtgtctgttcatatcctttgcccactttttgatggggttgtttttttcttgtaaatttgtttaagttctttgtagattctggatattagccctttgtcagatgggttattgcaaaaaatttctcccattgtgtaggttgtgtgttcactctgatgacagtttcttttgctgtgcagaagctctttagtttaattagatccaatttgtctattttggcttttgttgccattgcttttggtgttttagtcatgaagtccttgcccgtgcctatgtcctgaatggtattgcctaggttttcttctagggtttttatggttttaggtctagcatttaagtctttaaaccatcttgaattaatttttgtataaggtgtaaggaaggtgtccagtttcagctttctacatatggctagccagttttcccagcaccatttattaaatagggaatcctttccccatttcttgtttttgtcaggtttgtcaaggatcagatggttgtagatgtgtggtattatttctgaggcctctgttctgttccattggtctatgtatctgttttggtaccagaaccatgctgttttggttactgtagccttgtaatacagtttaaagtcaggtagcatgatgcctccagctttgttctttttgtgtaggattgtcttggcaatgcaggctcttttttggttccacaggaactttacagtagttttttccaattctgtgaagaaagtcattggtagcttgatggggatggcattgaatctataagttacctgaggcagtagggccattttcacgatattgattcttcctatccatgagcatggagtgtacttccatttgtttgtgtcctcctttatttcattgagcagtggtttgtaattctccttgaagaggtccttcacatcccttgtaagttggattcctaggtattttattctctttgtaggaattgtgaatgggagttcactcatgatttggctctctttttgtctgttattggtgtacaggaatgcttgtgatttttgcacattgattttgtatcctaagactgctgaagttgcttatcagcttaaggagatttggggctgagacaatggggttttctaaatatgcaatcatgtcttctgcaaacagggacaatttcacttcttcttttcctaattgaataccctttatttctttctcttgcctgattgccctggccagaacttccaacactatgttgaataggagtggtgagagagggcatccctgtcttgtgccagttttcaaagggaatgcttccagtttttgcccattcagtatgatattggctgtaggttcgtcataaatagctcttattattttgagatatgttccatcaatacctagtttattgagagtttttagcatgaagggctgttgaattttatcgaaggtctgttttgcatctgttgaggtaattatgtggtttttgtcattggttctgtttatgtggtggattacgtttattgatttgcatgtgttgaaccagcctagcatcccagggatgaagtcagcttgatcgtgttggataagctttttgatgtgttgctggatttggtttgccagtattttattgaggatttttgcatcgatgttcatcagggatattggtctaaaattctctttttttgttgtatctctgccaggctttggtatcaggatgatgctggcctcataaaatgagttagggaggattccctctttttctattgattgaaatagtttcagaaggaatgataccagctcctcttatacctctggtagaattcggctgtgaatccatctggtcctggactttttttggttggtaggctattgattattgcctcaatttcagatgctgttgttggtctattcagagattcaacttcttcctggtttagtcttgggagggtgtatgtgtcgaggaatttatccatttcttctcgattttctagtttatttgtatagaggtgtttatagtattctctgatagtagtttgtatttctgtgggatcggtggtgatatcgcctttatcattttttattgcgtctatttgattcttctctcttttcctctttattagtctcgctagcggtctatcaattttgttgatcctttcaaaaaaccagctcctggattccttgattttttgaagggttttttgtgtctctatctctttcagttctcctctggtcttagttatttcctgccttctgctctcttttgaatttgtttgctcttgcttctttacttcttttaactgtggtgttaacagtgtcgattttagatctttcctgctttcttatgtgggcatttagtgctgtaaatttccctctatacactgctttaaatgtgtcccagagattctggtacattgtatctttgttctcattgatttcaaagaacatctttatttctgccttcatttcattatttacccagtagtcattcaggagcaagttgttcagtttccatgtcgttgtgtggttttgagtgagtttcttaaccctgagttctaatttgattgcactgtggtctgagagacagtttgttgtcatttctgttcttttacatttgctgaggagtgctttatttccaagtatgtggtcaatttgggaataagtgcgaggtggtgctgagaagaatgtatattctgttgatttggggtggagagttctgtaggtgtctattaggtccatttggtgcagagctgagttcaagtcctggatattcttgttaaccttctgtcttgttgatctgcctaatagtgacagtggggtgttaaagtctcccattattattgtgtgggagtctaagtctctttgtaggtctctaaggacttgctttatgaatctgggtgctcctgtattgggtgcatatatatttaggatagttagctcttcttgttgaattgatccctttaccattatgtaatgcccttctttgtctcttttgatctttgttggtttaaagtctattttatcagagactaggattgcaatgcctgctttcttttgctttccatttgcttggtatatcttcctccatccctttattttgagcctatgtgtgtctttgcacgtgagatgggtctcctgaatacagcacattgatgggtctttactctttatccaatttgccagtctgtgtcttttaattggagcatttagcccatttacgtttaaggtgtaatattggtatgtgtgaatttgatcctgtcattatgatgttagctggtcattttgcccattagttgatgcagtttcttcctagcattgatgatctttacaatttggcatgtttttgcagtggctggtactggttgttccttcccatgtttagtgcttccttcaggagcttatgtaaggcaggcctggtggtgtcaaaatctctcaacctttgcttgtctgtaaaggattttatttctccttcacttatgaagcttagtttggctggatatgaaattctggcttgaaaattcttttctttaagaatgttgaatattggcccccactctcttctggctgtagagttcctgccaagaaatctgctgttagtctgatgggcttccctttgtgggtaacccaacctttctctctggctgccctgaatattttttccttcagtttaaccttggtgaatctgacaattatgtgtcttggggttcctcttctcaaggagtatctttgttttgttctctgtatttcctgaatttgaatgttggcctgccttgctaggttggggaagttctcctggataatatcctgaagagtgtcttccaacttggttccattttccccatcactttcaggtacaccaatcaaacatagatttggtcttttcacatagtcccatatttcttggaggctttgctcatttctttttagtcttttttctctaaccttgtcgtctcgctttatttcattaatttgatcttcaattactgataccctttcttccacttgaccaaatcggctactgaagcttgtgcatgcatcacatagttcttgtgccatgtcttttagctccatcaggtcatttaaggtcttctctacactgtttattctagttagccatttgtctaatcttttttcaaggtttttagcttccttccgacgggttcgaacatcctcctttagctcagagaagtttgttattaccgaccttctgaagcgtacttctgtcagtttgtcaaagtcattctccatccagctttgttctgttgctggtgaggagctgcattcctttggaagagaggaggcactctggtttttagaattttcagcttttctgctctggtttctccccatctttatggttttacctacctttggtctttgatgttggtgacctacagatggggttttgatgtggatggggttttgatgtggatgtcctttttgttgatgttgatgctattcctttctatttgttagttttccttctaacaggtccctcagctgcaggtctgttggagtttgctagaggtccactccagacgctgttttcctggatattaccagcggaggttgtagaacagcaaatattgctgcctgatccttcctctggaagcttcgtcccagaggggcgcccacctgtatgaggtgtctgtcggcccctactgggaggtgtctcccagttaggctacacagggtcagggatccacttgaggaggcagtctatccattctctgagctcaaacgctgtgctgggagaaccactgctctcttcagagctgtcagacagggatgtttaactctgcagaagtttctggtgccttttgttcagctatgccctgctgccagaggtggagtcaacagaggcagcaggccttgctgaactgcggtgggctccacccagttggagcttccccggctgctttgttttcctactcaagcctcagcaatggcagacacccctccccctgccagcctgctgcctggcaggttgatctcagctgtgctagcagtgagcaaggctctgtaggcgtgggacccaccgagccaggcgtgggatgtaatctggtgtgccgtttgctaagaccattggaaaagcgcagtgtttaggtggaggtgtcccatttttccaggtacagtctgtcacggcttcccttggctaggaaagggaaatcccccaaccccttgcgcttcctgggtgaggtgatgccccaccctgcttcagcttgccctccatgggctgcacccactgtccaaccagtcccaatgagatgaaccaggtatctcagttggaaatgcagaaatcacctgccttctgcgttgattatgctgggagctgcagaccggagctgttcctactcggccatcttggaacagacctgcacaaagtaaaatttttatatcaacttttgcatagactgttcaggttcatgttacttttctttgccattgttctgttgtaggtatatgccaatctaacatcttgtcaagctcttggaaatatgtgtgtgatgaacatgaattcttacgactttgccacatttgatgcatgtggactatttcagtttatctttgaaaatactgctggactgagcactgttcattctatttcattttggtaaggatattttgattgatgaaatgttattttgactgaattcagtgcagttattaatatattcacaaatactaataataagaaatatttattctccattattaaaacagttgtaactgtttataggagacagaatcttccttggctgttttatggagaccagttaggattagcacctcaagtgctcagttctacctctcttcctacaaatttcagttttaaaggagaaaaccaggtaaaagtgtctaatatcattagaggataactacattttgatttataattttaaaaggtaataaagttacaattcttgcctttttaggttgttggtacaaactcagttactaaactaaatataaatgtcaacaactcataagaactaaatagtatagagtttagctatcttactgaatatgtggatacttctggattgtgtggttatggcaagaagttgtacttgtagggttgggaagagcagttttcatcaccaaatgcaaaaaatctctgtcctgttttttccacaccttaaagaagtgcttccaaagattgattggggctctgtgacattgctcagcacttcacagggccaaattcctacctgtaactttttgaccttccagaatgaggagatactattctcccacactgcctcctatttaacaggttcaaaaggaggctatctgtcactagtgctgcctctcaattctagaataataattttcatgcaaaaaaccagtctaattctttcaggtctatttagtcatagaaatagattaattgaacctcaaaataaagataattgaatgtaatttttcaacaaaaaagatcagtcaacaatgaaaatttctttataggatattgtattactttcagagtatttgacctgattttgctcgttttctttaatcagaatacaaaactgaagtttgttgctgcttcctatgatataagaggaaattttctcaagtggcaaactttagaaggaggtgttttacaggtaagcatgattctagttaaagaattaataacatgcattatttttgcctgagacaaagccaagaggaaaagattattgtatgaataaagcatcagttacatactacagttgattttttttctgatgctttaaattagactttcttaagttttttgtttgtttgtttgtttgtttgttttttcttttttttttgagatggagtctcgctttcttaaccaggctggagtgcagtggcgcgatctcagctcactacaagctccgccttgcgggttcacgccattctcctgcttcagctgggagctggaactacaggcgactgccaccacgtccagctaatttttatgtacttttagtagagacgggatttcaccatgttagccaggatggtcttgatctcctgacctcgtgatccgcccttcttggcctcccaaagcgctgggattgcaggcatgagccaccatgcctggctaagttttatttctttaaagttatgactttcatttataacagatgttcccttaacttttcatatccttgatacattaaataagtattatgtagagcatatatccatgttcgggtttgagaactcttgagtataagaatagaaaacatttgtgagatttatctgttgtattattttgctgcagctttgtccagacacagagacaaggctaaatgctgcttattcatttggaacaacctaccaacaaaatgtaagtttgaacgatattagtctatattttagctttatttttcaaaatatcatgtcagcagtaattggaataatacttaaatttttgagattggaaattttttattcttggtttttttttttttttttttgagatggagttttgctcttgttgcccaggctggagtgcagtggtgcaatctcagttcaccacaacctccgcctcccaggttcaagtgattctcctgcctcagcctcccgagtagctggaattacagacatgtgccaccacgcccagctaattttttgtatttttagtaaagacagggtttctccatgttgatcaggctgatcttgaactccccacctcagatgatctgccctcctcagcctcccgaagtgctgagattacaggcatgagccaccgtgcctggccggaaatgtttttaatagtgaagaataatttcactatttaatataattttttattacctgggtacataaaagcttaatttaagtggcataaacagagcaccttgttatctatagagttttttgttttttgagacagagtctcgctctgttgcccaggctggagtgcagtggtgcaatctcagctcactgcaatctcttgcctcctgggttcaagcaattctcgtgcctcaaccacctgagtagctgggacaacaggcatgtaccaccacacccagctaattcttgtgttttgcatagagatggggttttgctgtgttgaccacgcttgtctcaaactcctgacctcaactgatccaccagccttggcctcccaaagtgctgggattacaggtgtgagccacctcgtccggcctagagtcttaaacatcatataatattacatcttcataataaattgtttatctgcttctaggcttataggtcttaaaaagtaatgcttacttctgagcattttgaaataaagtaaaaatactactttttttaaatgactaataaaaagttactcccttcttctacccgctcataacaaataaaaataattccttcatcttcttccattcttttctttctccttccttctctgactttccttactttgatacctattttgaaattacattattttactaaggaatattatgagccattcaatacttgaaaaacatgcatgtattagtccgttctcacgctgctaataaaaacacatccgagactgggtaatttacaaaggaaataggtttaattgactcacagttcactatggctgaggaggcctcaggaaacttacaatcatggtggaagggaagcaaacatgtcctttttcacgtggtgacaggaagagaagtactgagcaaaagggggagaagcccctcataaaaccatcaatctcatgagaactcactcactatcatgagaacagcatgagggtaactgcccctatgattcaattacctccctccgggtccttcccatgacacatggggattatgggaactacagttcaagatgagatttgggtggggacacagccaaaccatatcaattcattagtctgtaaaagtacatcttgataaagttccacgcacaaccatagaacaaaaccataacaaaaaataccattatggaaagtagattggaagaatctactaacagtggttacctctggatagtggggttagaaattatttttttcttttttataatttccaaattttctaccatgaacatgaatttacttcttttgtcagaaatgatttacacgttgttgttgctgttgttgttaaaataaatgttattgtgcttctaacataggccagaaagatcaacacttatgtaatgcctatctgtgtgctcagcattttatcgttattatcccatttgattcataaaataactatatgagatacatagtatctgtgcttcacagatgaggaaattatgccgtgtaattaggtaatttactcaaagacttgtgtcacataaactgtggagccaatgttctatcatcaggtttaaaaagcatttttatttctttgaacctggctaactctcaagtccttcatagactagtgggcaaaacagttatatagacaaagaattgcaaagaatgtgataagtgtcattctataggtatgtacaaggtactgattcctggggaagtatagaaaggcttcacaaagtaagtgatacttggatttgtataatgaatatgagttttccagaagaacacagtggggaaggaaatatcagacagaaatcacatttgtaatgacagagagacatacagtagtatggcatatttagaaactacaagtagattagtatgaatggaccaccatagactgatagggagtaatgagagataagcctggcttggttaatggaagccagatcatatacatcattgtacagcaggagaaaaaattgggaatttatcccgtaggacagtagttttaaaccttttcactgatgtacccttaatattgagaatgaaggtatacctccttcatctgagttgaagctcaagaagttctcaaaattctcaaagcagtactttactgttagtggttttggtccttataaaataatcatagtattcatgttttggaagacaaatgaaaatgcatataaacaaggtagtataaagacattttgcaaaactagaaaaacactctgaagataataaatatgcttgctaattttcaattgtgatcttttattttattttttactttttagtactttaagttgctgttttatgtgcttttatttttaattttacttttcagtgtgagattcctatctctaagatcttaattgactttcccactcctatattttatgatgtgtaccttgaatatactgatgaaaatcaacatcaatatattttggctgtgcctgtgttaaacctaaatcttcaacataataagatatttgtgaaccaaggtaagacatccatacataccactcttttccctgagcagaaatcaacaaataagttaacctacatgataatttaataaaccactgattataagaaaggtcatgaattctctcttatgtggttctatacagtgtgccaaaaaatgaaacaataaattgctggtggacttagaaactgttgctaattttattgccagacatattgttaagaaattatactgttgctgagggtatatcctgagaaacattagtagaaccgtaaattggggctttttcgtcaagctgtcccgaatatgcttttttggacaaattagtttcttttgttgttattcatgttataaaattctgctttttcaggtaatttgcaggggaaagccttccaaatttatgaaaagttcaatcagaagacattcaagtccaaggcacggtggctcacgcctataatcgcagcactttgggaggccaagacgagagaattgcttgagcctagaaattgaagaccaacctaggcaacataattagaactggttgctacaaaaaaaaatttagcttggtgtgatggtgcacccttgtagtcccagctactctggaggctgaggtgggaggatcacttgagcccaggaggttgagaatgcatgcagtgagccatgatcatgctattgcactatagcctggtcaacagagtgagaccctgtctaaaaaaaacaaaagaagacattcacatgagttagagaacgccattgtcaggtgtttcttatactagtagctttttgcagccatcttatctaaaacaataatttcatgttttaaatttgtgcagtaaacttttttctttttataataaaagacagcaactctggaaagtggcttctaactcggcgcattttcttagtggatgcagtaagtggacgagaaaatgacttaggaactcagccaagagtaattcgagttgctactcaaatatcactgaggtaaacaaatgtctaatgatattatttatgggaaaatatcataatggaagtgtttgccagtcattagtagatgaaaacaataaggacaactgaattggaacagttggtcgggttattttaggtgtatgtgtagattggcatagaccagtaaaagtgaatagccaagggggaaaactataacagaagagtgtgaggagttaggtcaaaatgcacattataggtcccactctagacctgctgaattagaatgggttgcgaatagctaagtaaataccagtgagctgaaattggtgtttcaggaagagcttgccagatgattgttaatgtttaggactcccctgtcctcatttctttcagtggcttttgttctaggtttacccagattaattttcaacacctccctcttcctaggataatctcattatgatcctacgttaggatagtacctcgccacttaaatttctctttcttttccagtgtgagatctctaaaatcttagtgactttcccactataatattttatgatgtgtaccttgaatacactgatgaaaatcaacaccatcatctcacagtagtttggtactttgaagtacttcaatatacttatttttcagttatttcattttgattctcataatcttataaacagtgcagaaactttgttatttatcatgctgaaatccaaatgtactgtcttttcagcatttcttcagtctgctaatatggtgttcctagtaaaaatgaaaatgcacctagtcagacttgatgtgttcttgatgaaaccatgctggcccctagtgattggcactttcctttttgaattcacaaactgtgcagtactaatgcatcgaatttggcaaaatgaacctcactttgtgccataaccatattacagctgacacttttttttttttaatttaaaaatttatttatttgtttatcttgagacggggtcttgctatgttgcccagactggtcttgaactcctgggctcaaacagtcttcccgccttggcctcccaaagtgctgggattacaggcatgagccactgcacctggcttgacacatattattttgttaagaattcatctttctcttttgaaaatcaagatcttatctgcctttctttaggcttcatgtagcactgtacttttgattattcctcaaagatagtttatagttcttcagtgatttcatttgtaaacttcacaggacttggattgagcttctaatttatctca

SEQ ID NO: 436 - DNA, 32744 bp, Homo sapiens
  source 1..32744: mol_type = other DNA
ttttggattgtgtgagtttccgggacgttcggagggtggcctctctcccaccgggttccgcataccccaggcaccggcccgcatccaagtgtcaggttggagccgggaagcggccctggtggtagcggcggcgggggcaggatgagcgcggaggcggcggaccgggaggcggccacctccagccggccctgcaccccgccgcagacctgctggtttgagtttctgctggaggagtcactgttggagaaacatctgcgcaagccctgcccgggtgagcgcggcgcctgcacctggggagcgggacccggccaccggcgctgtccgcccagcttccctccgctccccgccttctcggtcaccgaagctgcggcctgggaggcgcgcacaggagcccagctccggccgggctcctcgcttcccttaaacatgcccgggtggagggtcaaagaaaagctcgaaacaaaggctctcctacccccggaggggagggcttggtgctgtcatcctaaaccctttggtcctttttacgatttacctttttactgttggggttttagaggctgcgaggcgggtcttgtggttgcttgggtcggggaggctgaccagacgcctccttcaaccccaagctgaataaattcagggagctggggagaaaccagctgttgggtgttgatcgtgacgctagttattatcttaggttttatttaaacatttttttcttcagtgagggaattttattgactcttattccaaagttgggctgtaagttaaaagaaaatctttgaaagtaggaactgctgcacatttgcaagatggctttgtatagtgatgataatgattaatagcccagttaaatgggtgtgattgatgggggaggaggaaaactccaggcattctcaaaaaaggtattggcacaaaaaggtaagttcctcggatagcatttctctaaattcaaatctagatatggcttgttcagtctcagactggccttcactgatagagaccactgtgtaagaagttagtgtacttaggcagttttggcacctgtataatgcccttaattcattccttttgaaagataatttgttgagtgctttccgggtgccatgcactgtgcttaattgctcacatccgttacctcctttaatttaatcttcaaaatgatcctctattttgcattggaagaagcaggtacggagaggtcacttgatggaggtccccctaattaagtgtcaaaataatagttctaatatttatatctcattcttctaattggcagtggttatttgcagaaccagaaatctatgactgttatgttcttccccgtaaggtgcttttttttgctttcttccactctaatctgttacccttcctccttaccactcttccgcatctcctttaacccccaggcacacttcttacatacgtattccttagtcattttaacagcgcagctgtttggattccttttgtggcaaaaaaaaaacccaaactccccccccccccacccacccccccaaaaaaaccaaaccaatagtgaatccttttgtatctacataattaaaacttaaatttaagaatttattttcttttaaaccctagatcctgcaccagttcaacttatagttcagtttttggaacaggcttccaaaccttcagttaatgaacaaaaccaagttcaacctccgcctgataacaagagaaatcgtattttaaaactacttgctcttaaagttgctgcacatttgaagtgggacttagacatattagagaaaaggtatccaagatttcagtgaaatttcatttgaagtgctatttagatatcttggtttatttctatatatgcttttatgatatcggctcttaaaaattacgtgctgggcgccgtggctcacgcctataataatcccggcactttgggggccaaggctggcagattacttgaggtcaggagtttgagaccagcctggccatcatggtgaaacctcgtctctagccgggcatggtggcgggcgcctgtaatttcagctacttgggaggctgaggcacgagaatcgcttgaacccgggaggctgaggttgcagtgagccgagatggcgctactgcactccagcctgggcgatagagtaagactcggaaaaaaaaaaaaaataataaaataaatattatatattcttgataaaatatgcaagtataacattacttttgatgtggtaactagagaaaatccacacctaaactgttgtaaatttctcaagtgacttttacatatctgaagaaaatgaataaaaattaatgatagatgttgtgtaatatgaatgatttgctgttgaataattgagttgattttactggtcataaatcactatctcctattaaaacagctgattagagtcagtgcttatttgcttaaatataaataatttcaagccttttattagaaaatgatttattatcatccccttctcatcacaatttaaaacatcccttataggaagttgggaaaaatttaaaaaataggaaataattggggaggagaggggttttttttgacattttcatgtaattttttttctttgttctccataggcttaaagttgtgatcataccctatatactgtttttattcctggttttttcacctagctgtatcatgagcatttccccttttttattttttggagagaattccgttgtatgggtaatttattaactgttccttaattgacagtcatttagtttatttctagtttttcactgatataaatcacagggccttaaatatctttgcccataaaataagtttatctgtattttgagttgtattcttaggatagctccttaaattgctggatcgtgcagtataaacattgttaagacacatgaatattgctggattgcattccaaaagagtttatattctcaccagtagtattcaaaaaccctctttttaaccacattcttcagcattaaatattagaatttttaaagtgaattttttttttttttgagacggagtctcgctctgtcacccaggctggagtgcagtggcgcgatattcgctcactgcaagctccgcctcctgggttgacgccattctcctgcctcagcctcccgagtagctgggactgcaggcgcccgccaccataaagtgtatttttaatctgagcaggggaagctatacgttatagactgaagagacatcaacagatagcaatgggtacaaagaagtatgacatatatgaggcagctggaaaattgaacactgataggctgtttgacagtaagcaagtctaagttttttagatgtgaaattaatattgtgattatgttaagagttaattttttgaaatatattctgaaatatttatggacgaaatgatttgggaagtggggaagaatagagatgaagtaagattggccatcaggtgataattgctagatgatggtacataggggttcattatatcctgtctacttttatgttttacgttttttcataataaaaagttttaaaaatcttttcgcatttaagccgggcacggtggctcacgcctgtaatcccagcactgtgggaggctgaggcaggcagatcacaaggtcaggagatggagaccatcctggctaacatggtgaaaccccgtctctactaaaaacacaaaaaattagctgggcatggtggcgggcgcctgtaatcccagctactcaggaggctcaggcaggagaatggcatgaacccgggaggcggagcttgcagtgagccaagattgtgccactgcactccagcctgggcgacagagcgagactctgtctcaaaaaaaagaaaaaaaaactttttcacatttgatagctaaacccagagatgtggttccttaacaatgtaggtattttcagcgaggatatggaattttgtatgtattttgtgtttctttcacaattaatgtgcaaacatgtacgttttgcttcttcaagtttgtctgttccagtattgaatatgctactaaatgaactactctgcatcagtaaagttcctcctgggacaaagcatgtagacatggatctggccactttacctccgaccactgccatggctgtacttctctataatagatggtaaatgttttcataaactcagaaggcgttgggcaacctctgttttattgcactgtggctttcaaggatattcttttaatggacccattctgctgcagggatttttcaaatctggggaactgtgagtctaatggtggagaaaatttgtgactgcatagatgaaaagcaatctgataaaaatgtggatgacttatgcaggatttaccatgtgtcaattaatgcttcatataatttatacaaacctaaggagtacttgaaaaaataattgagatgacatttataatgtatgaaattttctttttcctgtcttttcttcagggcaattaggacaattgttcaaagtagttttccagtcaaacaggcaaaacccggaccccctcagttaagtgtgtaagttggtggctatgacctttacttggcacttttttcattggagttttaaaaatgtttgcaagtttttaataacctctgttatagaagaagtagagcaggaataggagggcagaaggcctgtgtgaaggtttgtttgaaggagttagaggggctggagagtcaggtaatgtgctagatacagagttctaagaagggaagtgctttgggaattgtgccatttatctgaaagcagtcaagtttttttttttgttttttttttttgagatggagactcactctgtcgcccaggctggaatgcagtggtgtgatctcggctcactgcagcctccacctcctgggttcaagtgattctcccacctcagcctcccaagtagctgggattgcaggtgtgggccaccaagcctggctaatttttgcattttttagtagagactgggtttcaccatgtaggccaggctggtgtcgaactcctgacctcaggtgatccacccgccttggtcttccaaagtgctgggattacaggtgtgagccacggcacccagcctgatatttttttcatttaattaaattgtcttgaaaaagatttgtatgtggggaaattaatatatgtcaatattagagtacaatacaaaagttgatcgtatctggaggttttctttttttaaattttttatttttaaggcttgtcaagtgaagcagcaggagtggaggatggagttttaaacctgattcttaatttccacatggcagcctagccaaatttggagctagaaagcatagtttctaacttgatacaaatgagcttttgttgtaagttttgctcttcagttgagtaaatgaggttgggtgctgtggctcacacctgtaatcctaacactttgggaggttgaggtgggaggattacttgaacccaggaggttgaggctgccactgcactccaatctgggtgacagggtgtctcaaaaacaaaaaacccaaacaaagtaaatgagaaaatactggtacgttaataagcatcataatagttgagggttttgttttttcaaacatgaaaatgaataacattaaaaacactcttaaattgaacctgactttcaagaatgatgctcttaagttttgaattttttagtcttgagagtaacttttgatacttttgttttcaattgtttctcttttagtatgaatcaaatgcaacaggaaaaagagctaacagaaaacattttgaaagtggtaagtattggcatcagttacacagtaacacttcaggaacaactttagagcagcagttcccaacctttttggcaccagggactggttttgtggaaggcaatttccaggaaactggatgtggtgtggggggcggggggcgaggatgatttcaggatgattcaagcacgttacatttattgtgtactttatttccattattattacgttgtaatatatatggaaataattatccaactcaccataatttagaatcaacgggaaccctgagcttgttttcctgcaactagatggtcccatttgggggtgatgagagacagtgacagatcatcaggcattaattctcacaaggaggacacaacatggatccctcgcgtgtgtagttcacgatagggtttgcgctcctgtgtgaatctaatgcccccattgatctgacaggaggtggagctcaggccataatgcgagcgatggggagcagctgtaaatacagatgaagcttcttttgctcacccgctgctcacttcctgctgtgcagcctggttcctggtaccagtccatggcctgggggttggggacccctgcctttataccatttatagatgtgtcttctaatcttggggacatgagagttgtgaaggtctaagtgccgtgacattaaggtttttactattaggatataggtaatattctaaatcacacatagtctttcagttttaatagtagagtactactgattgattctgtttcgtgatacattagtagatacgagaaactgattttacaggtgacgtctttatattttgtattttctaaaaactctatgacaaacatgtatagtttatattttaaaattacttttataataaattacagcagtttattttttatttttttgagacagagtcttgctctgttaccaggccggagtgcagtggcggagtcagctcactgcaacttcgcctccctgcttcaagcaattttcctgcctcagcctcctgaatagctgggattacaggcacttgccaccatgcccagctaattttttgtatttttagtagagacgggtttcaccgtgttggccaggctggtctcgaactcctgacctcaagtgatccacccaccttggccttccaaagtgctgggattacaggtgtgagccactgtacctagcctagcagttattttttaattgatctacataatggaaaattagaaacctgacagtttctataatttagaaatgatttctgtaattaacacctacaatgttccatattaccatgtgaggtgtaggggctgggtgaggagagaaaaaggtaagaaacgatctgtatctcactatagcaaatatgctgtaatattttgaatgtggaagccaaagcctacatcatttcattgttgttatctagttcctaataaaatgactggcacattgaagtatacagatatttcttgaataaatcaagtggaacagtgcaaattttttcttttttagacagggtctgactctgttgcccaggctacagtgcagtggcctgatcttggctcattgcagcctccacctcccagcctcaagcgatcctcccacctcagtgttgccagtagctgggactacagacatgtgccaccacactagactaatttttgtattttttgtagagatgggattttgccatgttgttcagtctggtctcgaacttctggactcaagcgatccacccacttcggacccccaaagtgctggtattacatatatgagtcactgtgtccagctaaatcttttttgttttttgagatggagtcttgctctgttgcccaggctggagtgcaatggtgcgatctcagctcactgcaacctctgcctcccgggttcaagcgattcttctgcctcagtctcccaggtagctgggattataggcgtgctccaccatgcctggctaatttttgtatttttagtagagatggggtttcaccatgttggtcaggctggtcttgaactcctgacctcgtgatctgcccatcttgggctcctaaagtgctgggattacaggtgtgagccaccgtgcctggccaccagctaaatctttaaagcattaacttttcttttttagacagaatattactctgtcacccaggctggagtgcagtggcatgatctcagctcactgcaacctctgtctcctaggttcaagcaattcttgtgcctcagcctccctagtagctgggattacaagtgtatgctaccatggccagctaatttttgtagttttagtagaaacaggatttctccatgctggccaggcaggtctcgaacccctggccacagatgatcctcctgcctcgcttggcctcccaaagtgttgggattacgggtgtgagccactgcccctggcctaaagtatcaacttttctacagaaaaaagataccagtctttcctgttttttgtattgtctttttctttttttttttttttttgagatggagtttcgctctgtcacccaggccggagtgcagtggcacgatcttggctcactgcgacctccacctcccaggttcaagcaattctcctgcctcagcttcctgagtagctgggattacaggcgtctgcccccatgcccggctaatttttgtatttttagtagagatgaggtttcaccctattggtcaggctggtctcgaactcctgatctcgtgatctgcccgcctcggcctcccaaagtgctgggattataggcgtgagccaccatgcctggccctcctgtttttcatattttctaacctcacaataggaacttatttcccttcatttaaggtaactttatttcaacaaatgtaattgtactcttgctgtgttaaaaatttttttaatagcttagtgtactgagttactaaatagactgtaaatatttttggttattataatcagttgctatttttgtatttttatttgtttattgatttctgtagctcaaagaacaagctgctgattctattttggtactagaagcagccctaaaattaaacaaggatctttatgtccatacgatgagaactctagatttattggccatggaaccaggcatggtaaatggagaaactgagagttctactgctggattgaaagtcaaaaccgaagaaatgcagtgccaggtattcatttgatacttaatttacgtagggcaattttttggaaaatcttaatatgagatcatcctcctatttttaattagaatttatttctgcctttgtctcttaagatgctattaaaactgcattgtatttaatttatacatttataagatttgacatttttctaaaagaaatggaagagaaattttatgtcatctgttgtctctgaaatagtttccggattgtatttaggagacagagtttaagtactgagaatacagttatatgtaattgatttacagttctttcatattatcagaaatctgatcagaccaaaagaagataaaaactaatattatgctagactttgaaaaatctagacctcaagagagagtgtctagcttttcagggatcttaagtttgccctctttctataactctgggccccttgttcctttcacagttttcagttgatgcttattgtcaggtattatttgtttttgtttttgttttttttttgagacggagtcttgctctgtcacccaggctggagtgcagtggcatgatctcagctcactgcaaactccgcctcccgggttcatgccattctcctgcctgagcctcccgagtagctgggactacaggcgcctgccaccacacccggctaattttttgtgtttttagtagagacggggtttcaccgtgttggccagcgtggtctagatctcctgacctcgtgatccgcccgcctcggtctcccaaagtgctgggattacaggcgtgagccaccgcgcccggccgttgtcagatattactttgtgtgtttatgtcttctttttccctactggattataactctttgacatctctctctctctcttttttttttaatatgttctgcgtcttactttccagagtaggaccttgagtaaaatagaaattttaaagtattcagtgattgtctagagagggctactaagattgtaccttctaaactgtattgtctttccttattcgtatgagttggcatggcttcttttatcactaattccttttctggaaaggggtaaaaatagttatgacagttttgggaaggtgcgttttcagattagctgtttccagagctgaaggtaatcatttattcaaggcctgatgagctggagtttgcagcaggagtaggagttaatgaagtattgatacttggtaaccctttttgtaaaaaaaaaaaattttaattttttttttatagagacagggtctccctatgttgcccaggctggtctcggaactcctgggctcaagggatcctcccaccttggcctcccaaagtgctgggattacaggatacttggtaacattttaaaatcactgatgaaacttgcatataggagtgttactggtatgtagtatctcataatctttcagaacccgtttaaaagttgttgatgacacttctgatttttgcaacatggtggatgatacaacctgaaaacaaaactcctgtaaaacatctgtatgtgctaggcaaactatcaaatgttcttttacttacatagctgagtgacaattcctgttttttgaagggcaaattagtggtaacactcatttcctggcatgacaatgtttttcttttttgagacggagtttcactcttgttgcccagactagagtgcaatgtcgtgatctcagctcaccacaacctccgcctcccaggttcaagcaattctcctgcctcagcctcccaagtagctgggattacaggcatgcaccacctcgcctggctaatttttgtatttttagtagagatggggtttctccatgttgatcaggctggtctcaaactcccgacttccagtgatctgcccgcctcggcctcccaaagtgctgggattaccggtgtgagccaccagatcatatctaaagtaggttctttacattactaaaatttaccttagacttaaaaagaaaaattgttatttttttcccccaataaaaccaggccttaatgcccttcagggcagcttcattatcaggcttttttgtttttacagtaaatctattgagcacctcttaacctctaaactcattgtaatggctagtcagttgctagagtaatacttgaaaatatgtttttggtattttgcagtctatctttgcctagaaaggggaattatatataactgtagtaagtatgcatatatgtgcatgggtgtgtgtgtgtgtgtgtgtgtgtgtgtgtgtgtgtattttttgctcttttagtatccctttactccagataggaggaactctctagaatgaaaatcagccaagggaggccaagatgagcggatcacctgaggtcagaagttctagaccagcctggctaacgtggcaaaatcctgtttctacgaaaaacacaaaaattaggcgttgtggcaggtgcctgtgatcccagctactcggcaggctgaggcaggagaatcgcttgaacccgaaagaggagattgcagtgagccgagatcaccccattgcattccagcctgggcgacaggagtgaaactccatctcaaaaaaaaaaaaaaaaagtcagccaaacatgtagtgtggactaaatagtgcaaagcaatgttgtagaggctaaggagaattaacctggattctttgaattggacagaaccatatttataaagcatatcagtgaagagtggtttcatgatgaataccaggcatgattatagcttaggagtttggaagaggagtaagtatctgttgccaaaggttggttttgtggtataaaaggagtaaggggtgtggaatgaagcatatttctagtatctcatgtgaatggggacttgagaagactggtgtgattaaaatagagcacagtggagaggtttggaaagagagattaggccacattctgagatccttacagatcaggccaaggagtttgaactttcttctgttttggggagtaattgaagtcttcttaagtcagtcagatcaagaagacttgatctgtcagccatgtgtagaataaatttgagtcagaatattacgagcttaggaatctgaattcaaactttggctctgctattacttggttatatgcttttcatgtcactttctgggcgtttgtattcttatccataaaatggccaagttgaactaaataatctgagtcttttttgagttttgcatttagtaattccaggtgtcaatataagctttttgaaaaacatacaaattattttcttttttgcctagtgtccacatcttacatacaaattctgtcatagaaacatacgactggaaaagttttatggttagcatacatttctcactttaaccagtatgttacggtagacgtgcaccatcttcacttttgaggggctccccagcgttttttccctctcctgtgttagaaaattcccgatcttttcagacttgtaggaggcagagcctgcttcttttttttttttgagacagagtctcgccctgtcgcccaggctggaatgcagtggtgcaatcttggctcactgcaacctctgcctcccgggttcaagcgattctcctgccccagcctcccaaatagctgggattacaggtgtgcgccactacgcctagctaatttttgtatttttagtagagatagggtttcactatgttggtcaggctggtctcgaactcttgacctcgtgatccacccgcctcggcctcccaaagtgctgggtttacaggcgtgagccactgcgcccagccaggcttcttcttatagaatcaactaaaaactcccaatactagctttctctagccttatctggcttgagggcaggcatatcacgtaagttttacagatgggtatgcttcttttagactgaatcatgagctggtcctagtaagtcatagcattgagagtgatggagaatccattgtggtggtgggtagcggcaacagcgacagtaaaatctagtttccggggacagcacttgcaggagtgtagctgctgctttcagggtctggtccgggtggctatgggtgacaggagctgtggaatctactgttgagattcttcaccagactagtgttggctctcatcctgactgcatgcctcctttgcccttttttctagtcagattctttagcctttttaataattctgtaggcgacctaaaatctactcagtaaatcaatattctgcttaagttgaccagagttggtttatgttgcttgtgactaagaacactggtggtagcacctctccttggaatatgtgtttttttatgtctttttttctgtgttttcgtgagataaagacagttttggttctgtcacctcttaagtacctgagaaattgttaagcaaattggtgttcattattatttcaggtgtgctatgatttgggcgcagcatacttccagcaaggctccacaaattcagctgtctatgaaaatgccagggaaaaattttttagaaccaaagaactaattgcagaggtaaatccagtcataataggaacttaatgttcagttctttaaaacatctatacatttttttggctttgatttttctgatgataaaaacgtgttcattattataaatgtgtgatgttcaagaaagtactaaaactggtttttaaaaatctgtagtaatataacctggaaatatagccccttttataaatctagtaaattttcttccagcttttttctctctgtttttgtacagttaagctcatattgtaaatactctgtatcttgcttaaatctttgactaggcattataaatgtatcatattatgtggaagtactctgatttacttcatttcccttatgtttgggcatttaggtttattatacagctgcaatatttgtatctgcaagcctaaatttttcttcagatttcagatatgtttaagttcctacaattattgccatgtcaatggttatgtatttttctaaggctataatttatcaaaccacattactttccaggtacatttctcacagagcacttcagttagcagtgagtgtttaacaaatttttatttttatttttttgctaacttgattggtgaaatatagtatcttttataaacttggctttcattaattcctaatatgggtaaacatttttactgtgtttatcatttgcatttttcttttttatgattcagatgactgaattgtaaacctagtatatctataactaggtttttatatggctggtgcctggaaaaattcccacttcaatctgctgtccttagtagagatattgattaaatgccctagaggtttaaatgctctgactattctagatagacccattagaaatactcattttactttgctaggaaattaatctgctttctaattttatggtatttcaggtatagtaatttaaaacaaatattttttcaaactttttttttttaatcctgtttgggtagaagcatttctattctttccaattgagtgatgattatgctctttgctcgctcctttaaatctctgctggtatgtgtcttttaaaacctttaagcttgtttttaattttaacactgtttgctctttgttaatgtcttgtcatacatacttggtatgataatgatgtccaccttttgtatgttggcctgaaaactctaagcttcagcaaactttctttgtaaagggtcagttagcaaatatcttaggctttctgggccacattcagtctctattgcatattcttaccatttttttggtcccctttgcatagtttacggcccacaaaaattgttcttagctcaagggacgaacaaaaacagaccataggctggatctggcctatgagcaatagttttttgacccctgttctaaacctttaacctttttgttttttgattcttccagttttaaatttttcttttctttttttttttttttttcctgggacggagtctcgctttgtcacccaggctggagtgcagtggcgccttctcggctcactgcaacctccacctctcctcccgggctcaagccattctcctacctcagcctcccgagtagctgggactacaggtgcccgccaccatgcctggctaatttttgtatttttagtagagacagggtttcatcatcttggccaggctagtctcgaactcccgaccttgtgatccgccagtctcggcctcccaaagtgctgggattacaggcgtgaaccgctgtgcccagcccggcttgaatttttcgttagcatttccttgtactgttaaaacatgctaagggggtgctagactattgtttatattacatgaatggataatggtgtatacctcttactttacagataggttcattatctcttcattgtaccatagatgagaagcggttagctggctattgtcaagcatgtgatgttcttgtaccttcttctgatagtacatctcaacagttgactccatatagtcaagtccatatttgtttgagatctggcaactatcaggtaaggtgtatgagggggatgcagtgaagttttggaagccagacaaaactaagttcaaatcctcgcaccatccatttaccagttacgcgttttggggcaagtcatttacactgtcatactggcctgtaacataatggtaataattatcccatttcctaagattcttatgagaatctagtgagaagttatagtgcacaaattctaaggcaaagcattatacagatgttacttcatcattgctgttatcttaaaggtatagagttggtctatcttaaataaattttgtaagaaatgcttgtaagcagaacttttaacatttaaaaattgcaggtagacagcttttagttgtgtgtgtgtgcatttgtttagcagctgggattgttggctgctaagatattaatagcttttagttttacaaaacattaagtcttgtgtcttttggatgtgtggcttgtagcccagctttagtagcccttccaaatagtaagactgaaggagaaagggagcacagtgaacacggcagttgttctggtgggtttggatggtctgttagaaacagagcccacctgctcttgagcctactcaccatcttgatttggttcatgaaaacgccttaatgagtctcttgagacttttattgtgcgcgccccaccctccccaccaacacgcacacacctctgggtgtttatcttcagttttgttatgaaaataactggaaattagaattgtgcttttaaagtctttattggaaagcctccattctagagaataaacagtgcattcattcatgtttaactcaaaataggaatcatgaaatgataaagccataacttagttttgtgtctccaattgggtattattccagctttatagttctcttacctaggggtttttttgtttttcacagaaaataggtgaagagaggaaacaagatggcacttctttcccctatctttggccctttttaaaagtattgctttgtcctaggaaagaaaattaaactttcttgaagtttaattaccgacacaggtgaatttaataaagactagagctctctcagttatagctccctagtaaaggtttatgaagggtgagatcaattatcataaaatacagattctttaacaagttggctgggcaccgtggctcacacctgtaatcccagcacttgggaggccaaggtgggaggatcgcttgagtccaggagttcaaggttgcagtgagctatgatagcactgctgcactccagcttgggtgacagagcaagaccctgcctcaaaaacaaaaaaacccaaaaaacaaaaaaacctctctggagtggtaagacctgtgccaacaagaccttaggaatatcacccagagacaagtacatgttactgtgactgtaataaagttccacaaaaatcagaaaatagtgtaatgggtagctaagacggggaaaataggaattttgttgcatctttgagattcattacttatacatgcaggactctcttagaaattgtatttcttcgaatggcattgtgtttttatgaactatgtgggttttgtttagtgctgatgaagtaggagttgagcagctgtaacaggtgtgtcttctcacacttgagaagctgctgtgttgctcctgtggagccctgccttgctcatgttttgttatggaggtgaagctagtggttgctccatatttttgaaaccacttatgtcagtacttttctggtagtggctgattagtttaattttcagatatctcctttccccctcctctcgttaacaccctttctttctttcctgctcttccattcttgagaagtagctaagaaaaagtctgtatgtaataatctgggtattttttgtagttcacagataatatattttaaatcatttaaatttattataatcacttgttagcatgttttttcagctgaattttttaattagttttttttttttttttgagacagagtctcactctgttgcccaggctggagtgcagtggcacgatcttggttcactgcaacctctgctgcccgggtccaagtgattcttctgcctcagcctcccgagtagctgggattacaggcgcctgccaacgtgcctggctaatttttgtagtttttagtagagacgggatttcactgtcttggccagactggtcttgaattcctgacctcgtgatccacctaccttggccttccaaagtgctgggattataggcatgagccaccgtgtctggccatttaattagtatttttttagtttgttttatgagcttgtgtttagagagaataataatttttttttttttttttgagatggagtattgctctgtcacccaggctggagtgcagtggcaccatctcagctcaaagcaacctccgcctcctgagttcaagcagttctccttcctcagcctctccagtagctgggattacatgcaagtgccatgatacccggctaatttttgtatttttagtagagacgggatttcaccatgttggccaggctggttttaaattccttacctcatgatccacctgccttggcctcccaaagtgctcagattacaagcgtgagccaccatgcctggcctaaaatttttttctaataacatagctggattgcctctcattgactgattcctttcttacctctcatttttggtctgtgatcttcagttttaaaaaaggggtagcagggctgtttttgcccttaatcaaattttagaattttaggaagaaaaggttttcatagtaagatatttttgtgattgtttttcaacttgtattttccattatagaaagacttgtttaaagtaaaaaaactttaccatgatttttgaaatgggtgcaactttatgtgtgtgttctaggaggtaatacagattttcattgaagacaacttaaccttgagtttacctgtccagttccgacagtcagtcctaagagaactctttaagaaagctcaacaggggtaagtaagttgaaaaattacttcttgatttttgaataaaacagcaagtgcattctggtttatcaaaaccacattttcaaatttcctatggctctgtgacattattttcatgttgttaatataagggaaattaacatagggtggaggaacactctggtgttcctccgtctagtctgttttaaaagtgcttgcagggccgggcgaggtgtctcatgcctataatcccagcactttgagaggccgaggtgggtggatcacttgaggtcaggagtttgagactagtctggccaacatggtgaaaccccgtctctaccaaaaaatagaaaaattagctgggcatggtggtgcacacctgtagtcccagccactcaggaggctgaggcacgagaatcgcttgaacccaggaggtggaggttgcagtgagccgagattgcaccactgtactccagcctgggtgacaaagcaagactccgtctcaaaagaaaaaaaaaaaaaaactgcttgggagaaaaattatacatagcaaaattccattctgttgtctaatatgtaactacattgtcccttgataaattcaaaacctattctgctttctttctccccatgatttggtatatatttattggtatgcttgaatattctaaaatcttacctcttaagaataaatggctcattcttgtgaatatagttgtataatatacacctttcttttgtagtaaaaataacattagttgatctacttttgtattctacagaaatgaagctctagatgaaatctgttttaaagtttgtgcctgtaatacagtccgtgatatactggaaggcagaacaattagtgttcaatttaaccagctatttcttagaccaaataaagagaaaatagactttcttcttgaggtatgacatgtttttctttccccttttgatttataatttgctttaagcttaccagtgacctcttaattgccaaatccagttccttttttcctgtctgccttgcgtttctgtgcctgacaattggcacttttgacagactatgcccttccgcctggtcttctgctgtagctctttttctagttcgctccatgtttcttcagcatctttattggattctccttagtccttcattgacttctctattgctcttcctttagtatttctgttcatagaacttttgtccttggctcactcatcattttttatttacttccaaagcttcactcatctgtttcatcacctgtttactaagaactcccaaatcaagcctcttgtctgtcatgtgtgctgtggaatctgtgtttctactggatcactctacttctttcttaacagtcttaatgttagagacattgagagaagtacataaagcacagataataccacttacttccaaaaatacaacgttgccagcactctagaagcctttgttgtggtctttacaacctcctctaccttcccttgaggtagctactgccctggcttttgtgatcataattttcttgctttcttttatatttgtatcacctctgtatgtatccttaaagaacattctttaatttgcctattttgaacttcatataaatggaatcatacaatgtgtattcatcatcttctttcactaaagagatttatttgtgagatttattcaagttgtatataaataacaatttttttcattgctttaaggtgttagagcctgggtgcagtggctcacacctgtaatctcagcactttgggaggccaaggcgagtggatcacaaggtcaggagttcaagaccagcctggtaaacatagtgaaactccgtctctactaaaaatacaaaaaattagccgagcgtgctggcaagtgcctgtaatcccagctacttgggaggctgaggcaggagaatcgcttgaaactaggaggcagaggtttcaatgagtggagattacgccactgcactccagcctgggcaacagtgagagactccatctcaaaaaaaaaaaagttagaatattatatggaccacgccacaatttcttcagtcttatgatgggggacatttgtgtgttttatagtttttggctgtatacacatatgatggagggacatttgtgttgtttatagtttttgccgcttggaacatacttgtacatatatctaggtgtgcatacgtaccagtttatgttacatacctagggaataatatatctgcaacattaatttttaaaaaccaagtggcttataaccaccagcatgcctgagtgttctcatcagtcaacatccttgttaacatttgatattgtcagatcgcctgtgaggtggttgtataacagtacctcattgaggttttcatttctacaactcttcatttaatttttactcatggattttgttttttgaggtaccttttccaagtgttatgcctctttttttttttgagatagagttctgcttttttttttttatttttttattttttgagatggggccccctctgttgcctggccaggctttagtgcagtggcgtgatctcggctcactgcaacctccgcctcccaggttcaagcgattctcctgcctcagcctcctgagtagctaggactacgggcgtgcgctaccacgcctggctaatttttgtatttttagtagagacagggttttgccatgttggcctggctgggctcaaactcctgacctcaggttatctgcctgccttggccttccaaagtgataggattacaggtgtgagccaccgtgcctggccagagttctgctcttgttgcccaggctggagtgcagtggtacaatttcagctcactgcaacctccacctcccagtttcaagtgattctccggcctcagcctccggagtagctgggattacaggtgcccaccaccacgccctgctaatttttgtatttttagtagcgacggggttttgccattttggccaggctggtcttgaactcctgacctcaagtgatccacccactttagcctcccaaagtcctgggattacaggcatgagccgtgcccggccatgttatgtctcatttttctattatattgtctgttctttggaaggagctttcttttttgtaggagatctatatatattctcttttttaccaattttaaatattgcagatatcttcactgagtttgacttttagtttttcttttttttttttttttgtttgagacgggtctcactctatcacccagttggagtgcagtgctgtgatctcagttcactgtaacctccacctcctgggttcaagccatcctcccacctcagcctcctgagtagctgggactacaggcatgtgccaccacgcctggctaattttttttatttttggtaaagatggggttttgtcacgttgtccaggctgggctcgaactgttgagctcaggtgatccactcaccttggcttcccaaagtgctgtgattacaggcatgagccaccacgcccagcttagttttctttatattgttccaaagctcctaaatttaatatcaaatttaccgatttttttccgttgtagtgatttctgtgtgttgtttaagaaagctttttcctattgtgtcatgaagatattcttctattattatcttctaaaagctttatagcatagccttcctttcacgtttaggtctttgatcaacctacagttgatttttgtgtgaagcaggaagtgtgccagcaccatttactgaaaggttaatttttttcccaccaatctctagggccacctctattgtatgccgggtgtttatacatgtatgggcctgtttctgagccattttataccacttttctatttgtctatccataccttattatgtccatgtcctgataccatcgagagcaagttctaccttgttttcaaggttgtattggttattcttgtccctcattctgttgcccaggctggagtgcagtggcacaatcttggctcactgcaacctccgcctcccgcgttcaagtgactcttctgtgtcagcctcctgagtagctgggactacaggcacgcgccaccatgcctggcttatttttgtatttttagtagagacagggtttcacgatattggccaggctggtctcaaactcctgacctcatgatctgcccgcctcggcctcccaaagtgctgggattacaggtgtgagctaccacgcccggcagtcctttgcatttttatgtgtcaacattagactcagattgtcaagttccacaaatctgttggatttttgtttggaattacattaaatttagaagccagtttagaaagaaattatgtctcttttctttattagaaaaaattttatgggcggcctcctaagccaaagtatgcttagggagacccctaagaatttacatgtttacattattgggtgtcctaatccatgaacgggtatgatggctcttgatttctttaggcagtctttagtgtcctttagaacttcctaatttttccatagaagtcttaaatttttaaatagttcttaaaatgtagacttgaaaatagtttatgcattgatacagaggtataatttaactttctaataattttgtatccaacaactttgcttagcttttaaaaattctattcatatttttttccatttttctatgtatgcagtcatctgtgaagaatgcattttgtttattccttttctaaccttttatttttgatttatttttactttttctttgagatggagtttctttcttgttgcccaggctgcagtgcaatggcgtgatctctgcttggcgcaacctctgcatcccaggttcaagtaattctcctgcctcagcctcctgagtagctgggactacaggcatgtgccaccacgcctggctaattttgtatatttcgtagagatggggtttctccatgttggtcaggcaggtctcgaactcctgacctcaggcgatccacccgcctcagcctcccagattactgggattacaggtgtgagccaccacacccagcctctttttacttattcttaatgtgctggctattacctccagtacagtgttcagtagaagtgggaatagagaactgcctcgtctcactcccagtctcagaaagcaagcttgcactatttcaccatttagaatgatgtttattgtaggtttttcttgttgctattccttatctgattaaggaagttcccttctctccttagttcactgaaggtcctgtttttaaaataacgaattatttttagattgtattaaatgctttttctgtgtctgttgaaatggtcacataatttctctccttacctgttcatgtgataaagtataattgattttcaagtgttaaaccaccattgcatgtctggaatagacccaactaggtcatgatcgttttttaatagaaattgctgaacttggtttgccaatatatgaagattttttttctacattcatgtatgagattgatgcacatatttttatttttttattttttgagacgaagtcttactgtgtcggccaaactggagtgcagtggcgcaatcttgactcactacaacttccctctccagcttcaagtgattctcctgcctcagcctccacagtagctgagattacaggcacccaccaccatgcccagctaatttttttgtagttttattagagacggggttttaccatgttggctgggctggtttcaaactcctgacctcaagtgatcctcccacctctgcctcccaaagtgcctggattacaggtgtgagccatgacacctggccgatgcacacatttttttctttcttgtccttcctttgattttggtgtcaaggtcatgcttgccttataaataagttgaggcatctgtcttttttattgtctggaaaagtttgtgtaaaaatgaagtcattgcttctttcagtgttgggtagaatttaccagtaaagtctgggcctgggtaatttttttgtgggaaggtttttgatcagtgatcatagaactatattctcgtttttctagagttagttttaagaagttattttctaaggatttgtccatttcatcttaagtttattagtattaaaatttattattttaatattaaagcatctacagagatgcccactagtttgagtttttctttttttaaattgaagtgcatgaaattcacataacatgatctgttaggtttgcttattagaagttacatgttccctacattgttccatgacacatgtacaaagcttctcactatgtgaataaataatctgttgtaaaaggagactcagatatttattactcaccataagatatttacatatggcagcaaagaaacaaagttattagaatgtaagtgtataatacatactccaagatgctcagatgttatttactgataggttaatttgttaatcagaaaatggtatttgaacatagcacttttaaaacactgctttttttttttttgagatggagtctctctctgtttcccaggctagagtgcagtggcctgatctccactcactctaacctctgcctcctgggttgaagtgattctcctgcctcagcctccccaagtagctgggactacaggcccgtgtcaccatgcccacgtaattttttttgtatttttagtagagacgaggtttcaccatgttggccaggctgatctggaactcttgacctcaggtgatccacctgtctcagcctcccaaagtgctgggattagaggcaggagccaccgcaccaagcctgtttttttaataacagtttcatcaagatataattcacataccatacagttcacgcatttaaagtgtataagtcagtgcgttttagtgtattcctagagttgtgcagctatcacttcacttccttttttcactccaaaaagataatctcttattcattacctgtcactcttcattttccctcaatctcgcaccacctgaggcaactactaatctaatttctctatagatttatctgttctggatattttatgtaaatggaactatgaaatagatgatcttttgtaactggcttcttagcacgttttcaatattgtagcatgtatcagtacttcactttttatggctgaataatacttaattgaatggatatatactgtattttgtgtgtttattcatcagttggtagactgcaggttacttatactttttggctactatgattaatactactatgaacattctattttgtgtgtgtgtcaacgtaaaaaatatttagcaatttcttgagattatggacttttacactagttatattttattttggcttcttataaataatatattaggaggaatcctaatctaatgaataaattcaacataatatgaaaatattatttgtagataactaatatgaccataactagtttctattctttgtttgcattgtttactttttaaaccttggttacctttttaactattcatgaatagctcatgaatatagaaccattagttctatattcatgataaatcacttactcttttcaattattttctttttggttttaaaaattttttatttttttaactcttttctgacaggagctactgatttctatggtttatcacttaatataatttggcaacatagttgataaattctgtgagaactgtatagcatggtaactaggttattctttgctacatgtatacacctgcacttattaaaatggtcacattccattccctctttgtgatggattgttattccttggtctggtctcttctgttaagttacttaactaaatctgtgattggtacattgttgaaaaaggaaaattcagttgtttttaaatccagccttttcaaattataatttacatttttataagtacccatattcaaatgaaaattactcaaattcctaggtatgttcaagatcagtaaatttagaaaaagcttcagagtctttgaaaggaaacatggctgcttttctaaagtaagtacctttcttttcttttttctttttttttttaactttgaacttagtcctgtgaacaaaatatctgtattatcttttgtttttgtcttgggtatcttttaaccaggcagtaactggtgtttgagaacccattaagttcaaatttgtatagccacgtgagacattaggattatatagttacctttttttaatattgtggcattgacatcacaattttaaataaggaccaaagggaaattttaaaatctattttaaaatatcattatacagtttatgtaatggtggctttttaaatggcttattaaaattggttgatatgattgtttttctcaaactaaattatacacttttttgttttacaatatttcttactgatctaggaatgtgtgtctggggttggaagatctgcagtatgttttcatgatttcttcacatgagcttttcattacattgttgaaagatgaagaacgaaagctacttgttgatcagatgaggaagagatcccctagagtaaatctgtgcattaaacctgtaacttcattttatgatatcccaggttagctctctagtcggccagccaaaatgttggcatgttttgcccctctattcaaattaaccttgaaatatatttgaggattctctcttgttttaattaacacttgtgttggtaattaatagaaattcacctgtcttccgtatcagatttctgtataagcagttatgctctggagctctgccaagccaatgattagtacagattcagtcctagatacataaaagattttagctggggaaggctgggcgtggtggctcacgcctgtaatcccagcactttgggaggccaagacgggcggatcacgaggtcagcagatagagaccatcctggctaacacggtgaaaccccgcctctactaaaaatacaaaaaattagccaggcatggtggtgggcgcctgtagtcccagctactctggaggctgaggtaggagaatggcgtgaacccaggaggcggagcttgcagtgagccaagattgcgccactgcactccagcctgggtgacagagcgagactccgactcaaaaaaaaaaaaaaaaaaaagattttcaccggagaaatagaccaaggtaacactgctgccagtatgttcatggaggtaaaaacagaaagcaggagaggagtggtgagaaatgctgggaccaaaaagaggacagattttcgtgcatgtcagtctatatcactgtgctagtatctgctgactgaacagcttggcagtattgctgtttttgccttgtttgatttttttttccatttttgcccttacaaatataagtagaaaatacaatgctgtttttaaataagaaacataaacttcaacatttaatatagatgagagagaattcgattggtttaacaaaagcaaacttttagcttctttgaccttcactagatttaaactggttgaatgtccagttgtaaaggaaaagggtaaggttaacacagaaatgctggaaatgcattattgaagaccgtatctgatatctgagctgtaattagggattttggtaatcatttttggttctctgggaagagcatgcccctttctctcataaaacacatgcttaatgtttattactcaaaattaacattttatatatgcttctgttaacacattatattcaaaagtagtgtataagttgtgtataagtctgtaagttaattattttcatatattccacatagttctttgcatgaaatattgatttttatcttgtttatattttcattatctttatttttaaaatgcattcatttattaaatgtagatatagtaaaattttgttaggttttctgtgtgaggataaagttaatgtgtaatttatacaatgttgaatgcatcagttctcaagatgatagcagcttttaatttatagatataatacaaaatacataattttaagtaaattgttattctcgtgtatatctttgaattaaatcattgaaatataaatctttttttagcttcagcaagtgtcaacattggtcagttagagcatcaacttatattgtcagtggatccttggaggattagacaaattttaattgaattacatggtatgacttcagagcgccagttctggacagtgtctaataaggtaaaccctatgtcaagaacagataagaaaattgcccttgttttctgaggtaatttaatagaaaagctgttccctgacctttttgataataaggacctcttacttaacagttttaagaccttcatatgaacataattgcatttttaacatccattgacagagaaaataggaaatgtcagaaacaaaaagataccattaaatgagtaacatctaaaaatgagtttttccatttgttgacaaaatatacgcattttatttcattcatttgttttttgagacagaatctcactctgtcgctcaggctggagtgcagtggtgcaatcttggttcactgcaacctctgtctcccagattcaagtgattctcctgcctcagcctccctggtagctgggattacaggtacctgtcaccatgcccggctaatttatgtatttttagtagagatggggtttcaccatgttggccaggatgatctcgaactcctgaccaccagtgatctacccgcctctgcctccccaagtgttgggattacaggtgtgagccaccacgtctggctgcattttaaatatagttgtaaatatatgtaaatggtatattatttatgcattctgtagcataatgcttcattatggaacatttttggctttaaatgttcctttaaaaactcccagctaatacatttacctgtttctgagtttatctattagaaagttttccagcatagaaagtgcaaataaaaatagcttttaaaacaccatttcagtggaatgtagcttagagatacaagggaagtaatcgacagatacaggagaaattaaagcaatatggtaatgctcgtaactaactacatacttactcctcccctgctgaagatgtagtaaaaaggcagccagaaatgtatggtttgttttttttttttgagactgagtttcactattgttgcccaggctggagtgcaatggtgcgatcttggctcactgcaacctccgcctcccgggttcaagcaattctccttcctcagcctcccgagtagctgggattacaggcatgcccccaccatgcctgatgaattttgtatttttagtagatacgggtttctccatgttgttctccatgttggtcaggctggtctcgaactcctgacctcctgacctcaggtgatctgcctgcctcagcctcccaaagtgctgggattataggcatgagccactgtgcccgacctgtatttttaaaaattgggtttaaacatactagtagagagaaaataaaaaattgctctaaaaattagttgggcttttttttagcattgatgctatttattagtgtgaatttttaagatgaaggccaggtgcagtggctcattgcctgtaatcccagcactttggggagctgagatgggtggatcacttgaggccaggagttcaagaccaacctaggcaacatagcgaaaccccgtctctactaaaaatataaaaattagctgggcatggtggcgcgcacctgtatttccagctacttgagaggccgaggcaggagaatcacttgaacctgggaggcagagattgcagtgagcagagatcacgccactgcactccagcctgggtgacggagcgagactctatctcaaaaatcaagaacaaaccaaaaatttttaagatgaacaagtatagcatgatagttatgataggggattctgggactaaccgcgtgcttaagcttgaatgccagcttcatacttaaatagccgtataatcttgaacaagttatttaacttctttgtgttgcagttttctcatttgcaaaatgacagtagtagcataatagtacttaccttgatattgttgtgaggattacctgaattaatatatataaaactcctagtctttgtgtgcctttttttcctaatagtaatcccagtccattatttattacttgttgattgtagcgaatgtgttcattttcgttagtgttatattatggctgtcattttcctttctctttaagagacgacccgtgagttatttgttttaaatgcgattgaagattgttgaaagattcttatctagatttggcttcctctatgtgtgcatatatatatgtattttttgtttcttttagtgggaagtaccttctgtctatagtggtgttatcctgggaattaaagacaatttaacaagagatttggtttatattcttatggccaaaggtttgcactgcagtactgttaaggtgagtaaaagtgtgtatcaaacacttgttaagaatatgctttatggtcaggtgccgtggctcatacctgtaataccagcactttgggagtctgaggtgggcagatcaactgaggtcaagaccagcctggccaacatggtgaaaccttctctctactaaaaatacaaaaattagccgggtgactataatctcagctactcggagtctgaggcaggagaatctcatgggaggtggaggttggagttgcatcattgcactccggcctgggtgacagagtgatagtccatctcggaaaaaaaaaaaaaaaaagaaaagaatatgctttactaattttagcaggaagtcaggaaccagaacttaccttttcctaatcttttcctaatctttaaagtcacagtcataggcctaaaaggatatttaaaaaggcattttggtttgttctttttgctttaccgttataattatactaaaatggtcttgatcaaatgaatactgctctgtgcctttttaaaagttgagagaacatgcaaagatattatttgtattctttaggattcagctagtaaagattgtgtaccaagattaaaaaacaaactttctaaaaatatacttttgtagtgtattttacatgagtttgcagtctgggatgttgagacataagtggaatgttaaatcacataagatagtgcagttgcgtgactgatcatacactgagttctttaggaaggttaaaggcagcatttggaaggcagaaatgaactaaaattgaggcttaaataagttaactacatccccacaccagcagcacctgtgacatttgggaactttttgtttgagacagggtgttgctgtgttgcccagaccggggtgcagtggcatgatcatggctcactgcagcctcgacttcctgggctcaagcaattctcctacctcagccccctaagtagctggaaccacaggcatgtgccaccatgcccagcttatttgaaagaattttttttttttttttttgcagagacagcatctccttattttgcccaggctgatcttaaactcctgggctcaaacaatccttccacatcagcctcccaaagtgctggcattacaggcatgagccactgcacgtggctggaacttgctggaaataaaaattttggggccctgtcctagacctaatggatcagaaattctgggatggggcccaacatctttttaaataagccctcaaagtaattctgttgcatgctaaagttggagaactgctgctctagaccatcattgtccagtgggaacataatgtaggccacatatgtaatctgtaatttcataaaaaagtttagttgattgaaatgatttatttaactcagtatgtctaatttcaatgtgtaatcgatataaaaagttgggatgttttgcattcttttgaaaatgtatgtgctaagtcttcaaaatccagtaagtattttatacttatagaatctcaacttggactagtcacatttcacatgctcagtagccacatcttatctagtggctgccatattagacaatgcatcatgagacaattgtaagccattgaaaagttttaataggaggaatgtagttagcagctttatctccttctacacctaacataacatttactgggcacagagacttctgaaatttcatatacatttattgtttcatttattcacaaaaagtttgtggaaggtattatctcagttttaaaggtgttaaattgtccaagggcacacagctagtaagtgtcacaagtgttacaagggatagagagaagagaacatattagagaaatatttaggaggtaaaatctggaagcaattggcaactgacttaatgtggaaggcaagatagggagaaagaattgagcatgatgctcagacttccggttcgagagtcagagaacaagtggcaataccagcaagtgaatgtgcagaaacacatttttgcagggcagattatgagtttatttttacaattttaatttgaagctacagttggaaacagcctaaagcttggagaatggtctggactggagttacagatttgggaattaccaaagatcacccagagagaatataaagagcgtgagacccta

SEQ ID NO: 437 - DNA, 15029 bp, Homo sapiens
  source 1..15029: mol_type = other DNA
gtgcggggcgggaccggcccggcctatatattgggttggcgccggcgccagctgagccgagcggtagctggtctggcggtgaggagttgctgcgcgtaggggggatgtgggaggaaagaaagcccagttgggccgatcacttaccacaggcgggagcctcagggaggaaaatcgggagggctgagaactagacgactgggggtcatgggttcccgcgttccgtccctgtcaggaaccttggcaggggaccgggaagcggctgggcatggagagccgcccctcattctaggggcttctctatcccaccctcatttggggagctatcccgtgggagagaggatgggaggccgggtcccctccatggggagaaaagttcccagccagcccagtctcccctttctttagctccttttcctgccctcccccacgccctccgcttcccatctggagttggggtcccggcgcccctccgagcggcggtagggcggcagggccgggaaggagggaaaggagactggaggccgtgacaccagtcttggttcctccgccccctgcttccccgccaccgccgctctccaaattggcgcggaaccggcttctccacagcatttcgcctccacaaccccctctccccgctggtccaggagggaggcgggacgtgggggcgctgcccaagccccactcccggtgtacgggggagagggtggaggacccagaaaaacccgtttgaggaagatgtgcctccctgcgcgttcaaggtgtcaggagtgcttggtaaatttttggacactcgcgttccagctgtacattcagttgaggaaatgcaggcttgtatccaaaatgaattaccatgagctagctaacatagcacagaagatggcagggtcacagggcccaggcccccttcggagggactgagctttcacctgcgaatcagcgtcttactggcacttggagaatgtgaatgacaatgtacttgactgcggcttttcctctccccccttcagaggttttatacacctgaaagaagagaatgtcaagacgaaggtaacattatctgtcttagagacatgtttcaaattagttgctgcctttaacttactaattacacttcctttttaaaaattcactacagtagccgtttacaagctaagcagcagccccagcccagccagacggaatccccccaagaagcccagataatccaggccaagaagaggaaaactacccaggtgatttaaggagaaagagggaggaacgaaattccatgctgggactttagtttaccaatggtcttttctattttccaggatgtcaaaaaaagaagagaggaggtcaccaagaaacatcagtatgaaattagggtaatgcagaactgggctgggtgggtttgggggaaaaatggaggatagatgaataagaatagaattatgtgtttattgctttgcgatagattcctctgacacttttacttttaatgcccctagaggtcagcaggaaggcgcctatctttgggtggtttctatgtgcccgaatcctactacagctgcagaataagtgccttcaagcagctggttcctttttgtaaatccctccctcttggaactgcctggtgcaccagggcccgcctaatctgtccaatatactgctctttgttccctcgcagactctagtagacggtcctaatagctgcttcttgggcataaataggatgtgagatcactgacagcctggcacgcagccctttggtacctcttcttcctatgtgttttacagaaagcagcactttggagatagtgattgcgtttgaaaccagcattattgggaaaagaatcgtttaagtaatcgattccatttttaaggttttgctttcaaatattcaaaagtatcagagcacactttttttaaaaagagcttatttgaaaaaaaaaaaaaaaggtccctgctactattgctagatacagagaacgattctgtgatcttgaaagtgattagtattttagactgcagatgcattttgttattactgtccttcttcgacacctggtgtcttctattaccagaattgcattttgttgtctaaaacatcctattactctttataaaaatcaatatgagctatatggcttgtttataaaatgtgaatgtcaaattagctatattgccatctatgttagctaaaattatgattctttagacatattagctttcatttatgaaagatccattacaaaaactaaggttttccttgcacaaattgatatttttctttttttttatgacagaattgttggccacctgtattatctggggggatcagtccttgcattatcattgaaacacctcacaaagaaataggaacaagtgatttctccagatttacaaattacagatttaaaaatctttttattaatccttcacctttgcctgatttaaggtaagaaaaatttcagtaattttatttcaaagatataaagttgtgctgatttaatacatggcactattttgtcttttgctttcataaagtagaaaaacgtgtaaaaattgtttactaatatttaatcatatgtcattttatctgagagtagtgctggttgcaaatgatatgggtatttaaaacactgattctataaaattattttcatttgcttgctgagtactataaagacttaacaggactgaattagttttttgttaagatagaaacatttttacatgtacagctttttcctttaaaatttttattcgtgtttcttgcagcttcaactcaaaggaagcttttccaattgatgtatcaaccctatttatttcttaccaaacttaataaggtctatacttaattcttttttctagtccatgagtgtaactaagaggtacagcttatacaaaacatgtactgtattaatttatgattggccttaataagcaatttaatggaatcagacacttaaactcaccaatccccctttccctgcattctgtcccaccttacccaccccataggtgatcctgctgtagatgatctatttagaggtgattgagacttctcttgactgtgatcacatgccttatgtgtttaacttttttgtattgctcttgagaaaacattttttttcacttttaattgcatttattttagtgctgaatttactcctgtgccataagtttttgtttcttcagtttcttctgggatatctttttcttctgggcaaccgcctcttctggtttaggaacaatttgttccttttcactaaagatcatttcgatgtggcagggagagatcacgtgtgagttaatccgaccatgagctctgtaggtccgttggcacatcgtaggtgctttgttcacttggagatgctcaatgaccagagaatctacatctaaactcttaagttcagcattactctctgcatttttaagcatgtgcagcaaaaattcagcactctttttgggccaccaaccttgtgtccagtcccactgcttggcctgggtacacctaccaactccaccattgtaatgtcagaatggcacatgctgtttctgtaaagtgacattttaaaaatacttcatggtgtttttttttttttttttttttggagacagaggtttgctgttgttgcccaggctggagtgcagtggcacgatctcggctcactgcaacctccacctcctgggtgcaagtgattctcctgcctcagcctcctgagtagctgggattacaagcatgccaccacgcccagctaattttttgtatttttagtggagacggggtttcaccatgttggccaggctggtctcgaactcctgaccttaagtgatccacccaccttggcctcccaaagtgcagggattacaggtgtgagccactgtgccggccactttgtggtttttcatatatgcatacccttgatagcctgggcagtttcacgagtgttcttacagtgaacacaaagatttgaacctcttgatttgcatgattttgtggggttttccaggtaaagtgaatagccagctattttcacagattacttcagaccacttatgggaaaagcaacgtggttatcttttaacagcaacctttgtaaagtataaataagtggaactagaaagcactcccttgaaatctgcaggtttggatgatcatagtccaggttcccactgtgttacttcaggcttctatttattcatgcaaaggaaattgtttccaaaaattaaggcagaagttttttttcttatttactttaagagcttcttccaagttctaattaaaagttgcatttcaatgtctgaaagttgaattttatctatgtgaaacagagtttgtatattacatggattgcacaatttaaattatgttttttagccgggcatggtgggtcacgcctgtaatcccagcactttgagaggctgaggcaggtcgatcacttgaggccaggagttcgagactagcccagccaacatggtgaaaccccatctctactaaaaatacaaaaactagccaggcttggtggcaggcacctgtaactcccagctacttgggaggctgaggcacaagaatcgcttgaacccaggaggtggagattacagtgagccaagattgtgccgctgcactctagcctgggccacagagcgagactctgtctcaaaaaaaaaaaaaaaaaaatatatatatatatatatggtttttttcctctctttccatagctggggatgttcaaaagaagtctggctaaacatgttaaaaaaggagagcagatatgttcatgacaaacattttgaagttctgcattctgacttggaaccacagatgaggtccatacttctagactggcttttagaggtatgttacagcaatacaaatttcctttgtctctgtatgatggaaacatatttagctgtaaatgtgctttctatgtactctcaagagtttattgttcatccccaggaagctgtcttttttgaggtacttactgtagttgattgcacccaaagtggaaagtgactctataagagtaaaaccatgacaaagctactacatataactaaacccaattcagaattcctgttacctgtggatactgctgtgtaccaaccactttctgggtgccacagatactcaaggtgaatggaatgtatagttgattaggttttgaattatgctatacaaagtgaagaactagaactaggcttcagggccctctgaagtctttttctgtattaacaaaatcatgatgatgaggaatcctgatttctatatcctaaaccataatgagactatggatatctggaagctctacgccctctattgtccagataccttctctttattatattcttctattcttttccgaaatataccattaatttaaaggaatagtgatcctgaagcccctatagatttgtgccagatttttctctcttgtttaggtccattccctttcctctggataatagctctaaaaaagtttctaaaattattattaaggaaatcattacttatgttgatgacaaactgatttttcctccaactcttggatatttgctctgtagtctgtctttaagacaagagatgaagcattctaagggaaaaagaccatagactttttggaggaggaacacatggcagaatagatctcagaagctatcagaacagtttttaagactaaaatgttatccttttgcatcaggtcatctttttccttattctgactagaaggaaagattgtattttaattgtgggcacaagaaggcattgggttttgactttttctgactgtctagtgatcatggaatcaacttaagcacaattatgttaatttttaatttgtttcctttttgttatactgatattcatccagtggttatccaattcaatttgttcctgtttttacctaaatatgattatgtatgcaacagcatacagaatatatcaaatccagcagtgttaaactctatcttagtgtattcttcagtctaggaatgcaaacttgattcaacatttgaaaatctattaatttattaccttaacagtaaataagaaaaatgctaagatctcaatagatgcaaaagacattttttgaaattcgacattcttttttttttttttgagacggagcctcgctgttgtcacccaggccagaatggaatggcacgatctcagctcactgcaacctctgcatctcgcgttcaagcgactctcttgtctcagccacccacatagctgggattacaggcgcaggccaccacacctgctatattttgtatttttaatagagatgcggtttcaccctattggccaagctggtcttgaactcctgacctcaagtgatccgcccgccttggcctcccaaagtgctgggattacagatgtgagccaccgcactcggccagcaaaagagattttcttaactcattattagaaactcatgtggccaggtgtgatggctcatacctgtaatgccagcactttgggagactgaggcaggcagatcagttgaagccaggagtttgagaccagcctggccaacatggcaaaatcccatctctactaaaaatacaaaaaattagctgggcatggtggcacacacctgtaatctcagctactcaggaggctgaggtaggagaatcgcctgaacctgggaggcagaggttgcagtgagccactgcactccagcctgggtgacaaagtgagaccctgtcaaaaaaaaaaaaaactctggtatatatctctatttcctcacctccaaaatggggataatggtacctacttacggagttactgtgagaattaaaatctttccctaaaagtgtagaaatgacagatactatttattattaataacaatagtgaaacatcagggcaattcctattaaagtcagaaacaagggataagattttgtttatcaccaatgttaaccattcagtatcctttgataatttttaacagtgcagtaaaatatgaaaaataaatgaggtaagaaaaactataaaactagtaaatgtgcatagtaatagatttgtttatcctaatagtacatcttagtttctttttttcctttcctatcttagctttgctatcagtttggcttaaacatattttaaagtctgatatgctaagagatgactttctaatttggagaaattcagaagataatatttaaatgtttggattcttctctaggtatgtgaagtatacacacttcatagggaaacattttatcttgcacaagacttttttgatagatttatgttgacacaaaaggatataaataaaaatatgcttcaactcattggaattacctcattattcattgcttccaaacttgaggtaagttcttaaaagtttatccttagatatatttatcccaaacttttttttaaatcaacatattaatcccaaagaatactatgttttatattaactccttagaaaagtgaatgtttttgtttctcagtacattttctgaacattaccacagggatgaatgataaattatcatagttccctctgtaatgtctgagccttattacaaatctctagtttagattctgggattagtatctaagtgaaatgtcccatggctcattctgccaaacgaaacatattgatgctctatttatatacataattatagcatttgtattcaacagaatgacctttgaaaactaaacagctaataaaatgaaatgaaatgcatactgtgttgggttagaataatggtttatccagccttttttttttcttttttcgagacgaagtctcactcttttgcccaggctggagtgcaatggcgcgatcttggctctctgcaacctccgcctcccaggttcaagcgattcttctgcctaagcctcccgagtagctgggattacaggtgcttgccaccacgcccagctgatttttgtatttttagtagagatggggtttcaccatgttggccaggctggtcttgaactcctgactcaggcgatccacccacctcggcctcccagcgtgctgggactacaggcatgagccaccgcacccggccagcctaatatttttgtatctgatggtgcagccctgatagaaggcacctcctttcttaagattttccttcacataagctcaatttacttttcttaatacatgatggatatcatcaatactttcatctaagacttttatagctggtatcattttgagagaagagggattgtgatcatatattaattttttaagtgttttcctttttcttttaaatgtcttttgagctttaagagccatccccaaattctgctgaatttggcacataaacttgtgttcagtctatccttacttgaaattatactgttttagacaactttctagactgaaatcctgatcttttagcctgttctcctatgtgggagacacctaatcctttgatgattctaattcttctcaggagtgctaaaacagacctgttagccaaactgcatgaagtattttttgattaactgtatttttgtactagggtaaaggaaatgtttttagtttctagaccttatttgttgggtgctttgcttttgttttttgagacagggtcttgctgtcacacaggctggatgcagtggcactattgcagctcagtacagcctcgacctccgaggctacagtgatcctcccacctcagcctctggaatagctgagactacagggatccaccaccatgcctggctattttttcttgtagggacagcgtttctctttgttgctcacgctggtcttaaactcctgggctcaggtgatcctcctacctcgacctcccaaagtgctgggcttataggtgtgagctgctgcactgcacccggcagggtgtctccttttgatctgactaaccatatcaggcaatcttaaagcaagtttggctgttctttaactgaaatgacatattctagttgtattaatgaaaattcaaagtcaattctatgaaaagaagtcttgataatcaatatagttactagatacctagatatgaaaatatcttcctttgttttgactttagaattattttactgagatttatagttagtgaagctgtccttaaatctgaagcctgtgtgtgatttgtatatagatggtcccctacttaccacggtttgacctacgatgttttgactttatgatggttgaaaacaacctgcattcattatgccccttgacgtacaacagggctatgtctgcttaggttgaaaatactgttaagttgaaagtgcactttctggccaggtgcagtggttaatcccagcactttgggaggccaaggcaggcaaatcatttgcagtcaggagtttgagaccaatctggcctacatggtgaaaccctctctctcctgaaaatgcaaaaaatagccgggcacagtggcacacacctgtaaccccagctactggggaggctgagacccaagaatcacttgagcctggaaggtggaagttgcagtgagccaagattgcaccactgcactccagcctgagactctgcctcaaaaaaaaaaaaaaaaaaaaagaaagaaaatgtactttttgtctttgcttatttctccaagaaaatgaaaatgcactttctacttaaatgatattttggtttattgggatgtaaccccattgtagactgaggaacatttgtaattaatttctatctcaattgtactcaataaaaatattacaatttaaaggaaatctatgctcctaaactccaagagtttgcttacgtcactgatggtgcttgcagtgaagaggatatcttaaggatggaactcattatattaaaggtaataataattatgttttcctagttgcaaaaaagaaaccatgttactaagtaacataagtagttataattgaatctcaaatactacaatgtaaaaagtcaaaactgaggtattaggatccagttctaagaggttaatgcatcaaaatattgacaatggttatggttggatggggaatgtacttaacctctaagctctgctgtataatgtggtgtatgtgtctacattcattaacaggcatttttaaattttgtttaataggctttaaaatgggaactttgtcctgtaacaatcatctcctggctaaatctctttctccaagttgatgctcttaaagatgctcctaaagttcttctacctcagtattctcaggaaacattcattcaaatagctcaggtactgacatttttattgattcaatggtaatgttattaattacaggttttagtgtatatatagtcttaaataggctataccacaaaatgacatattgacttcactccttaattctagaacaaaacttttgacgcataaagttctgtccccagtgtttatgttgcttaatatttctagaaaaacaaagtccttacacttttctgagtactttcattctttaggagtccaaactaaagtatctctttttgatataaaatggggaaaagcatttttttcgccagttgtgtttaagctttataatggcatagaattattctgtatgatgtctttacatttggatacacagagtgcctatcaagttaaatatcagaattaaaattactttgttaaaaaaattttttagaacataaattcaaagtaaacttttccaggctagcatatttaacaaagtaagtaagtagaggaggaggaggatctggccgggcactgtggctcaggtctctaatctcagcactttgggcggctgaggcaggcaggcagatcacttgaggtcaggagtttgggcggctgaggcagcctagccaacatgttacttgggaggctgaggcaggagaatcgctggaacctgggaggtggaggttgcagtgagccgagatcgcactactgcactccagcctgagcaacagagcaagactccatctcaaaaaattaaaaaaaaaaaaaaagaggagatcccattctttcttgcttacttctcgtaagtaatcttaaggctgctgtatctgccatataacaaaagtgaagaaaatctaccctcttattctatgtgggatgtgaaaatctaacatatggaagacatttggggataattattaagtcacctaggttaaaatttgtgggcagtggtgcttaaatctagcacattatgaatactcaaattggataaccactaagtatactgaaattggtttattttataaaactttttattaaaagcttaattttttcatccagaattcctagcatcccaaattgtcctaggcagctatacccttctgatagtgatggtaaatctttgataagccgataaacaatgtggactttctagaggtatataacagtaatatttcacttccaattcccagctcttctcccatttctcctaccttctggaccaatgaggacaaacagaattgaagtttaattccactgcacaagtatcttctcaaatctgtgaaatctaccccttttacactataccattccactgctactagttcagctcttattgcctagattatacagccttttaactaatctcactgcttaataaacatgttttcttctagtctgtctgcttcactgcattctaaggtatctttcttaaaatggaactttgatttaaaaatcttccagtagcttcaagaatcagcctataaaattctgacttcttaaagaccctttgtgatccaatctagaccatgcctctttctagccaccacccctcatctttcttgataagaaatgaaggtactccttatttatttttcaccttaggagttctgaactgtgaactgagttccaagtaatgtccctatacctagaacattctctgcctcctactcttcctggctcccttatcttttaagacccatttatggcaatttgaggccatcactatcttttccaatctggattaggtgcccttcctgctagtacatgtcacactgtattgcaacagtccttccttgtctacttccttcaggttggtggcttgttttttttttttttgagacggagtctcgctctttcgcccaggctggagtgcagtggcgcgatctctgctcactgcaagctctgcatcccgggttcacgccattctcctgcctcagcctcccgagtagctgggactacaggcgcgtgccaccaagcccagctaattttttgtattttttagtagaggcggggtttcaccgtgttagccaggatggtctcgatctcgtgaccttgtgatccacccgcctcggcctcccaaagtgctgggattacaggcgtgagccaccgcgcctggccgggtggtggcttatttatctctagatccctaaggttttagcaagagacatttagtactcatctttctcctaaattgcttgtacttttgtttttcctgttagcttttagatctgtgtattctagccattgattcattagagttccagtacagaatactgactgctgctgccttgtgccattttacctccattgaagtggttaagaaagcctcaggtaagactctctatttgttgtcttcttaccttttcacaacttctaatgggactacagtctctgaactttaacattctgctaaacatgcatttaaaactttggcaaaaaaaaaattagctgttcagtaattatctttctgttagaagtactttccaatcctgaatgtgtatcaacaaaaagaccaaatggaatttaaatacagttgaaatgaatcaacattatagttctgctttaagagttctttgggatttgaccatttcaatttcatatgtagaaggtactggttaagaagttctgaagtcctttttcccttcaacatagtcatgtaaatagtttgagagtgataatctgttttgacatgctaaacttcttggttatgatttggtttcttttaaaatatctcaaaaacagcaacaagtacatcagacatatgtaagatagtttctgatgtacaaccttcatgcttttctaacttttttctatctatctaggtttggagtgggacagtatttcagaatgtgtagattggatggtaccttttgtcaatgtagtaaaaagtactagtccagtgaagctgaagacttttaagaagattcctatggaagacagacataatatccagacacatacaaactatttggctatgctggtatgtttttttgtgagttttttggctttgctatctgaatctagtaagtcaccaaaactgatggtaggaatagagtactccttcaggcagtttcaggggaaagaaagttctaaggggcacactgatttcaaaatgtagaaaagttaataaaattactttgaaatcaaagcaagatttgtgaagtgtctcaagatcaatgccaacagtctagataaagagtttaaaaaatatataacgttacagaaactttcagaatatgacccttcacacttgcaaagacataaaaagactattaaaattaggcctaaataatctcaaataagtacccagaagtctggtttgactttgatttatgaaatcagtgcatgatttcttcccatgtataggaggaagtaaattacataaacaccttcagaaaagggggacagttgtcaccagtgtgcaatggaggcattatgacaccaccgaagagcactgaaaaaccaccaggaaaacactaaagaagataactaagcaaacaagttggaattcaccaagattgggtagaactggtatcactgaactactaaagttttacagaaagtagtgctgtgattgattgccctagccaattcacaagttacactgccattctgattttaaaacttacaattggcactaaagaatacatttaattatttcctatgttagctgttaaagaaacagcaggacttgtttacaaagatgtcttcattcccaaggttactggatagaagccaaccacagtctataccatagcaatgtttttcctttaatccagtgttactgtgtttatcttgataaactaggaattttgtcactggagttttggactggataagtgctaccttaaagggtatactaagtgatacagtactttgaatctagttgttagattctcaaaattcctacactcttgactagtgcaatttggttcttgaaaattaaatttaaacttgtttacaaaggtttagttttgtaataaggtgactaatttatctatagctgctatagcaagctattataaaacttgaatttctacaaatggtgaaatttaatgttttttaaactagtttatttgccttgccataacacattttttaactaataaggcttagatgaacatggtgttcaacctgtgctctaaacagtgggagtaccaaagaaattataaacaagataaatgctgtggctccttcctaactggggctttcttgacatgtaggttgcttggtaataacctttttgtatatcacaatttgggtgaaaaacttaagtaccctttcaaactatttatatgaggaagtcactttactactctaagatatccctaaggaatttttttttttaatttagtgtgactaaggctttatttatgtttgtgaaactgttaaggtcctttctaaattcctccattgtgagataaggacagtgtcaaagtgataaagcttaacacttgacctaaacttctattttcttaaggaagaagagtattaaatatatactgactcctagaaatctatttattaaaaaaagacatgaaaacttgctgtacataggctagctatttctaaatattttaaattagcttttctaaaaaaaaaatccagcctcataaagtagattagaaaactagattgctagtttattttgttatcagatatgtgaatctcttctccctttgaagaaactatacatttattgttacggtatgaagtcttctgtatagtttgtttttaaactaatatttgtttcagtattttgtctgaaaagaaaacaccactaattgtgtacatatgtattatataaacttaaccttttaatactgtttatttttagcccattgtttaaaaaataaaagttaaaaaaatttaactgcttaaaagta

SEQ ID NO: 438 - DNA, 3391 bp, Homo sapiens
  source 1..3391: mol_type = other DNA
cactgtgcgtcatgtaccagcgccggaagttggtctcgacacctggactagccgggttgtatttggaaacgcggagtgagtttttccgtgctgtgtaggtaagcgaattggcgggttggggtttgtggtggatatttgggccaaaactggaaagacacttggggtaaaaaggtccggtatgggggtagagttgagagtggctggggatacggtccatgctatcgctcttttccctattttcttttagtttagatgtttagccagtaggagttatttcattgttcttccctcggtgagcctgttcccctgttgagggatataattttttttggctaacttctgctagagtttgggaaaatagaacttgtgttaaacgagaacgcgagctttacagtcagatctgtatccctttgacttttagtagctgagtgatcctgcggaaattaacatgtctaagtatcggttgcgtcctctgtaaaacaagagtgatgtctcctaggattgttatgaagattataatggcctaacacgtatgaagtagttattatgtccagtttggggtaaacgctcaatacttgtgtgtatgcgtttcgtccttgagacctaacccataggatttggggaaaggaacagattaggaattggatctttgtagcttttcctgagaaaaatgggcccggatggacttgtgagaagcccttttgagatattcagtatttgagtctgtgatttcaggggctaacaatggacacccagaaggacgttcaacctccaaagcagcaaccaatgatatatatctgtggaggtaagagtagcacttacctaaagtaagaatattttatttaagtttttttgaaattgttacatttattctttgcttaaatgagttactggtcttcagagttataaagtagaacactttagcaaccataaaaaaaatcgttgaggtcagtagacctgggttcgtccttggtcttctgtttactaacagaaaaaaacaaagctcgttgagatttcattctctctcctggaaatatgcatggcctacaacctttttctttcctatttaatatatttaataaaagcagcagacccttgagattgagtatattttagtgttttggattgccttaggtaaataatacatttaagataatttgtctgtaatattttcctcttaggcattgagtaaatttttttttttaattctagagtgtcacacagaaaatgaaataaaatctagggatccaatcagatgcagagaatgtggatacagaataatgtacaagaaaaggactaaaagatgtatccttttaacgatgctttctaaatatgagttaggaggaaatgaataatgctggggttgataaagattaatttctggttaaaatgataactttctggattacagtacttaaaaaacaaacatgattagcattttcatggaccaatgcataggctctaaataatctaaataatgctagttgattttggttctcataaatttattttttagggattctgtgcagtcaagcttgaggatagggatacattctgagaattgtgtccttaagcaatttcatcattcctacagaaacctagaccgtatatcctactatacatacacatctaggctatatggtatagcttattgctgctaggctacacacctgtacagcatgctattgtactgaatagacaattgtaacacaatgtttttgtatatctgaacatagaaaaggtacagcaaaaatagagtataatcttatgcgaccactgtttatatgtgctccatctttgaccaaaacgtcattatgggtgcatgactacatttatataagtattcattcttgagcttcagtttatggacaagctaaagttcacgaggagaaatacaaatattgtgtatactacctaatggaaaaagttgggcatacaaattgttcaaatactgagagtaggcccagcatggttgctcacacctataatcccagcactttgggaggctgcaggagttcaagaccagcctgggcaacatagtgtgacccccatgtggaaaaataaaatacagagtaaattgttatgatacaactaacacacattgtaaatcgacggattatccgctttaacattactttagtgtttttttttgtttgttttttgtttttttttgagacggagtctcgctctgtcacccaggctggtgtgcagtgacgcaatctcggctcacattgcaagctctgccttccgggttcatggcattctcctgcctcagcctcctgagtagctgggactacaggcacccgccaccatgcccggctaattttttttattttttagtaaagatggggtttcaccatgttagccaggatggtctcgatctcctgacctcgtgatccgcccacctcagcctcccaaagtactgggattacaggcgtgagccactgcgcctggcctgctttagtgttttttgatacattttatggaaaaggtggtaataaaaattgaaagtgtttttagtttatttaaaaaccagttgtcatagtaaatagtgaattccattcttttttgcattttaagttaaataacaaaccagcttattgcaaagagaaagtgactttgaaaccttcagtcttaataatgtttaagtaccgtttttgtccttaactcaaattaatacagtggtcgtttttgatgctcgatgaatgctgggaattcagaggaatgtcttcacttatacttggatttgctctcttcccatttctgattgttgtatagctttcgattttgcttacagtagttcccccttatcttcgggagatacattccaaggcccccagtgaactcctgaaacctcaaacagtaccaaacctttatacactgttttttccatatatatatacctatgataaagtataatgtataaattaagcatagcaagagattaataataatgtaatagaacaatgataacatactataataaaagttatgtgaatgtggttggtctctcttgctttcaaaatatcttcttgtacagtactcacctattttagaatgtggttgactacaggtaaccaaaaccacagaaagggaaactttggatgaggggggcactactgtacttaggaatacaactatatacatatgattttatttttaagaccatattatatttgggtatctactaatattttgtataaagcaattttttgttccattacgtgactttttgttttattgtatatgtaatttaacacacaataaagggtaaagttgcttccccaaaccacacttttaatcaaaacctagaatcatctgcagtccttgttaaaaatgcaggtttctagaaccctctgaagttctgattaaataaatttattgcaaacca

SEQ ID NO: 439 - DNA, 19171 bp, Homo sapiens
  source 1..19171: mol_type = other DNA
cccttctccccggcggttagtgctgagagtgcggagtgtgtgctccgggctcggaacacacatttattattaaaaaatccaaaaaaaatctaaaaaaatcttttaaaaaaccccaaaaaaatttacaaaaaatccgcgtctcccccgccggagacttttattttttttcttcctcttttataaaataacccggtgaagcagccgagaccgacccgcccgcccgcggccccgcagcagctccaagaaggaaccaagagaccgaggccttcccgctgcccggacccgacaccgccaccctcgctccccgccggcagccggcagccagcggcagtggatcgaccccgttctgcggccgttgagtagttttcaattccggttgatttttgtccctctgcgcttgctccccgctcccctccccccggctccggcccccagccccggcactcgctctcctcctctcacggaaaggtcgcggcctgtggccctgcgggcagccgtgccgagatgaaccccagtgcccccagctaccccatggcctcgctctacgtgggggacctccaccccgacgtgaccgaggcgatgctctacgagaagttcagcccggccgggcccatcctctccatccgggtctgcagggacatgatcacccgccgctccttgggctacgcgtatgtgaacttccagcagccggcggacggtgagcgccgggctccgcggtcggccgggcgggcgggcggccatgaggctcgggcggcggcggcgggcggggtaggccggcgggcccggggaggggggcgggagggcatgtcaccccgcgacggccggcgggaaggcgccggggtccctggagccgcgtttcccgagccggcggggacccgcgctgccggcagccacacgcccggctacttcctcctttgcgaccattttctcggcctcagacgctctcaaactttagggtgatgacgcgccgggagggtgggtgagattcggttcctccgcggcgctcccgccagtggccccgggattctggggcgttgaacgctgagctccttccgtgggtaagaggtggaggcgctcccaccacccggagctcctgccggcgccccagcctggggaggaagtgcagttctgtgctcgaaaaataccacgtgttgaaccctgtaacctcgcaggcccgaggcctgcttctgctcctgctcctggcccagtcgcctgggggagccaccaggccttaggataaagttcctgtggcgatgtgtggtgtggtggtggtcctcaggcttgtgagtccacttcccagaactcatcagtgactgatggatctaggaatggaatttaccggagacatgcatttggggtttcccctagatcaagcatttctctaacattaaaagggcagagtgggaggaggggatgtggcagccgaccactttgaaggccagttttctcaggcaacttagaccatttttagtcaaattttatcttagattcacagtactggtggttttcgagtatattatgttaccttctgaaatagttcctgtcgttttgaggggcttttctttataaaatagtcaactttggctataaaatgttactttagtgtaattccaactggaccagtcttatctgtagcatgcaagaagttcaagtttctcttttatttttaaaagtggcccatgatacctgtaaatcttgggaaatgactgagtacaaaataacggagattaaattgagcttgaaatttatgggggaaatgcagctaactttgtgcttttattttgaagctaaacagttaacagaaacacaattttgtaaacagataatatctgtggtctgttgagttgctaggatttgtctttagatcaattggctttgagaagtcagcttaattccattttacggcccaattttgcctttttccccccctacaggctggccacttgaatacatgtcaaataatcgaaatatgaagaattcatttttattagaaaaggccttaagggtggaatttaagctcctattaacattcattcagtagaacttaggttactgatcagctcttcactgtgtaaagttgatactgattttggaagcagaatattgagtgacacagagccagaagttgtaaaactgcactgcaggtttcctgcccttttgctctgtaagcagtaactccaaatgtcacttcataacagttcttgtcaaccttaggcaggatgtatcaatgcatgtcagatgggggtagataactttggggcaggttatcacaacctaagagttggtggagaaaacatgggaatgaattctagagaccacaaaatgaaaacttgaaagtgttactctttctcagcttaacgtttttaaatccaaaaaacaatttttacatttcttgggattcgaagagttgaacttcaggttgccgtggttacagtgtacagtatatattatcagtctgtaccagtagaccagtaccctaactactgaaaagaatatggcagttttccatttgtctagtttctgtatgtacaatttactatccaattaattacttaagtggatttcttgttcttttttaaaaacttattgctacattgataggcagaatagcttctgaaagtgaccagttttcaatttcataggaagaggtgactcattgaaaaatagctcaagcaaagtcagctaaaaaaaaaaaaaaactagggaagctgagtaggtgtggtcaattgataatgagctaacagctgattatcactatattctagaaactggaactttcatttataaaaaaagaggtggccggaaaattcatcctgtcaataacttttaaatttacattggcatggaatttgtaggaattgtttcagggcttaaaagggaccgttttccctctcttcggggactagtctttttatttaaggatgtgttatttcatttagagcctttaatggtacaggtatacataattcaatcctttatagatcctgaaattaattgtagattttgaaattttctagcagtattcagaaataactaaatcagttgttaagaaaatcagcgatctaaagtgaaattgattgtatgtgtcaagagagcgttaatggtgatttctgaatattgcagacctggtgtttttaaaattctgtgattatgaaaccaaatatgtctaacttcacattagcttttgaaagcatgattcaaatcttggtctagcctttcattttcttaaatggaagttgtgccatgaatcactgaaaccctccctccccccaataattaagaaactttcattttttaggaaatggactagttttcatataatattgttagttattagcaatgaaatgaccaattttagcaagtagttgggaagaagttaaaatatttaaatctataaactacttccagcttgtagataaatctgttgcgtaatgtcttttatactgcttattaaacagattgtatgtgaaggaatttggattttgataactaggaaaaaaagtgctttagatttaatggcaattaaggcgagagattgcgtcaagaatttattaattattagcaatatggaattcttttatatgtgagaaatttcgggggcttctggtatttgtctttgctttatacaacttaggtcccacactagtgtgtgatacttgaaaggtctagccatcttgaagcttaaagaggaagcgttcaactgtgagaccatgtgtcctcccactccagtcaccatagtttatataatcttaagtagccagcaaaaattttgaagtaatattgactctgaaaatgtccttcctgcagcggagcgtgctttggacaccatgaattttgatgttataaagggcaagccagtacgcatcatgtggtctcagcgtgatccatcacttcgcaaaagtggagtaggcaacatattcattaaaaatctggacaaatccattgataataaagcactgtatgatacattttctgcttttggtaacatcctttcatgtaaggtaagccaaaaatgtccgatacacatgtttacattgttgagctacatttagtttagtgcttgaaataggaactgtgcagtaatggatatctttatttcacaaatatccaggttagatggctaacagattgtctctcaacactgaacaaatgttaaatcaatagcaaataaagaaaaatgggtatatgtttttccctaggtggtttgtgatgaaaatggttccaagggctatggatttgtacactttgagacgcaggaagcagctgaaagagctattgaaaaaatgaatggaatgctcctaaatgatcgcaaagtgtaagttataaatatctagctaatcatattttgaatcttatttttaataattccaaatccattcattttaagttaatatttgtcagggagaagttagatgcacataagataaaagaataaaaacattttaaagatgaataacaaaaattcatgtagttgtactggagtgaaaattaataagctaatcttgatttttacaattgaattttctacacagtaagtgtaacatacaaataacaggtttaatataattaacattcatgccaaaaggaaaacagaagataagtaaacagaaaaatgtagctttttcaaaatgagtgcattagtgaaaaatcaggaattcagacaaacctaatattcataattcttgaggtactggttaaattaacccattttataggtgaggaaactcaaagtaatttgcttttatgtactgtaaaatgagagacatacattactcacaagtccgggcgcggtggctcatgcctgtaaatcccagcactttgggaggccgaggtgggcggatcacctgaggttgggagtttgagaccagcctgaccaacatggagaaaccgtctctactaaaaatacaaaattagctgggcatggtggcgcatgcctgtaatcctagctactcgggaggctgaggcaggagaatcacttaaacccgggaggcggaggttgcagtgaaccgagatttcgccattgtactccagtctgggcgacaagattgaaactgtctttaaaaaaaataaataaatactcacaaatgcctgttaccagggctttaggaggaaaaaaaagcaagcccaacactggcaggatccagaaaagaatgatatgttgctgttttgagtaaaagtgatataactcttttggaaatttgtaactgtcctaagaagaaatacacaaagtgtctttcataaagtttcagctttactgcagtgtgcctttattcccagccactgggaagctgaggcaggatgcttgagccaaggctgtagtgtgttgtgattgtgcctgtgaacagctattacactccagccagggcagaatagcaagaccttgtctcttaaaaaagttgcagcattatttacaaagcagaaagtgatggtcacaatgaaatacgctccctttgagaacatttatgaaactaatagcatagcgaagaccaaccatattttgtggagagataaggaaattatttttattttactttttattctaaagctgggttagagataaggaaatttagatgactagggtgagattatgtaagatggtttttccttctgctttgctgtgtattataatatgctatgacacatgtgctacctttttttcttcagtgatcgttgttctttttatatttttgagacatggtcttgctctcttgcccaggctggagtgcagtggtgcaatctactcactgccacctctgcctcccgggttctagcaattgtcgtgcttcagcctcccaagtaggtgggattacaggtgtacaccaccacacccaactaatttttgtactttagtagagacagtttcaccatgttggctaggctgaactcgaattcctggcctccagtgatcatcccaccttggccttgcaaagtgctgggattacaggtgtgagccactgcctagcccagtgatccttgttctgaattactactgttatattcagaaaaaattaagttttagtgtcattttgttgaaaatgctgcagttatgtcaggctgttgtgtgttagagtacacgattgggaagtttaaatttttattctaggagatggcaaagaaagcgcaagcgccactttaaaatgacgatgaaagctttttaatttgatagaggtctttttattggcatggtacacatgcacttccactcatttgtattgatgggagtgatccctttaaccctaggttagctagagaagagaagtgtgtattaaaagaagtggttttttttttgtgattgtagttagaggcttattcatatatttcatggtgtcatatcttaaattatggccctatttctattttgtagtgtgctttttattagggattctgaatattctcattaacagtaacaaaaccaaccatcaggcttacttaatctgaactttataaaatagaatctaatgttatagtccttgtatatcttattagatttgttggacgatttaagtctcgtaaagaacgagaagctgaacttggagctagggcaaaagaattcaccaatgtttacatcaagaattttggagaagacatggatgatgagcgccttaaggatctctttggcaagtttggtaatgtgtcttaattaaatttttacacacaaagctctgaattagtgctcagtgttaattttagctattactttatactaaaaaagtcaataaaattagacttacatggtactttaaaatatttgtggttatttgaattaagctgctggccatctattacactacaaagtagtataatgcaaataaatagaattctatccaggttaaaggttaatagcattagattagcacagtaaggtatgactaagtaattagaacagattttaaaatattttactacattaagaggctggagatatatatgtgtgtgtgtgtgtgtgtgtgtgtgtgtgtgtgtgtaattagagatcccatgtcatcagaagcatatatttgacacagccagcctacagtggaatgcagtctcatagaacaataaagctggtcagtctaagtaacatcatgtttgagcagtttaaaacaatgactttcagcgatgaaaccaaaaattcagattttccagtgattcaaagtacttatttcctgcatttaaaaataacttcataaaacttgaaattgatgaagcacaaaccagccttagtttaggtaggggtataacagataaaataacttttaagtgttcatgtgcagatgatttgcttgaccccaccctttgcattttgtgttgaacttagaggtgtcttgctttttttaatatgtcaaataataaagaattaggaaatctaatacttttttttttgactcttgctctgtcacccgggctggagtgcagtcacgtgatctcggctcattgtagcctccgcctcccgggttcaagcagttctcctatctctaccttgagtagctgggattacaggtgtgcgccaccatgcccagctaatttttgtatttttattagagacggggtttcaccgtgatggccaggctggtctccaactcctgacctcaagtgatccagccacctcggcctcccaaagtgctgggattacaggtgtgagccactgtgcctggccaggaaatctaatatcttactgccatgctagcatgtcacatcaagccctccactagagcaaaaaagtaccattttgcacaaagatagatgatataaaacatagaaagtgacatcatgtttacatctcaacccccaaatttagctactgccttttatatatttcaactgtcatgcttcttaatgtcttataattagaagctgtttgtaaaagttgatgttaactacctaccgtatgagtaatgctgcataagttgaccacaaatatgtgaatatgtcatattttcttgactttggcctcaggagagaggcacattcagaagaaaatctgccttggcccatacatcttctaaatttctgtaatcaaatgtgatttttaaccttttctgccccacttgcctgagataccacccgcctcagttacctgtctctcctactttagagggagttaggggaaaacatgtcttcagaaataaatgcttcctcttccaggtagttcacctgtgtctttaaaaagaattttttttccctgtctttcaaattcctgtattacctatgtcttaccaaagagtccaactatgtattccttccactcctgttgaaagtcgggtaggccaaggcttaataaatacttgtttcttaattgatacaaagaaaatcaaattggtcttagcacaatagctcatgcctgtaaccctagcgcttggggaggtcaaagagggaagatacttgaagccacaagttttagactagcccgggcaacatagcaagaccctatctctacaaaaaataaattagccaggcatggtggtatgtgggccagtagtcccagatacttggtaagttgaggcaggaggatcacttgagcccaggagttgagttaaagtgagcttattcattgtgctgctacacttcagcctgggcaatggaatgatatactgtctctatagaaaagggaaaaaatcaaattattgggtaaaaaatgcaactcttttgtgctagagctgagaataaaactttttacagccgtttaaagtgtacctccttaaatggaaggaggaatccttcaggggagggaaggtgtttaccttcttaataataaaaggtctttcaatggaaaagtatacctacctggggcatagaaggctgggagggaggagtcaagttacggagctttgaaatttttttcatggctttgtatgttgaaatttgaaatgtataacgtgaatgttgtatggaatatctttgatttatgtaaaaaaattttttagggcctgccttaagtgtgaaagtaatgactgatgaaagtggaaaatccaaaggatttggatttgtaagctttgaaaggcatgaagatgcacagaaagtaagtggtctgtattcagcaggaagaagggggtacaaagttgagttgctcttgtgttgaagtctatgtgcatactaatagctatttgacatgttcttatattttcagttatttgcattttatgcattaggtttgagagtataaattggtaacctatattgtcccaaaaccttgagattttgggatgggtttgtctttagcttttgtgacttaacaaatttgtcttaactgttaaggaaatgaactgtaagttgaaagttttgtgattttttttttttctttttttttggggggaaggctgtggatgagatgaacggaaaggagctcaatggaaaacaaatttatgttggtcgagctcagaaaaaggtggaacggcagacggaacttaagcgcaaatttgaacagatgaaacaagataggatcaccagataccaggttcatttttaattgaacaaccaaaataagacagggatgaggaaacctattttacgttgatttcagttacttccaggtagctggagggtttgagaggggaataggagaagaaatatggggtaaaataatagacccgatgtacttaggtaccaccatggttttctttttctatagttttcttttcttctttttagggtgttaatctttatgtgaaaaatcttgatgatggtattgatgatgaacgtctccggaaagagttttctccatttggtacaatcactagtgcaaaggtaagaaaacatatggttcatttatttgaggtctagtaaaaattcatacatgtagatatatgtatataaattttgtattattatagccactagagaggtgtttgcttcgttacttctaaaacttaaattcacatttgaactggttgtcatagcctaatggttaacttaaaaatggcaagcactgaactctttgctaaggaaggctgatatcctcacatgatatgcactattccaacaactagtcattttgctaaagcaagcaatttattagggacttataattgttactatagttctgatctgtttattcatttctacaattcattctgggtagtcaagccccagttccctcccctgccccctagcagtaagaatagagatcatattttcttttatttgaaatcagagattaagaaacaaagcagtagtattctagtacaaattctgaaatcttgatttaagaagttctcttctagatgtttttgtctagcatccgtgggccaagagtccccctatatgcaaggttttgtgcatacataattttgctggggttggggaagagtgcatagaaaaaaattacaactcaactgaactggaatgacgctgtggctgatctttctagtcagcttttcctggcaagtccgaggaagcttctgtgagagtgaggaaatgttaggggaaaggtggttgaatacaagtaagatggaagtgccatggttgtcttgtgtttcagattatgctttttatgtaagagtattggagtacgatagaatttattcctgaatgtttttgtcttcagtgtgttccctggatattgtttaaattgagtgttgtgcatcagcatattttgaatgtatgaagcatgcatgtttttctgtttcttgagacaggatctcattatgttgcccaggttggagtgcaggggcatgccacaatcacagctcactgcagcctcagcctttcctgggcttaagccaagcttgtccaacccgctgcttgcaggccacatgcggcccaagaatgcttttaatgcagtgcaacacaaattcttaaacttatgaggtgttttttttttgtcttttttaaagacgagtctcactctcgcctgggctggagtgcggtggtgcaatctcagctcactgcagcctccgcctcccgggttcaagcgattctcctgcctcagcctcctgggtagctgggattacaggcatgtgccactacgcccagctaatttttggtatttttagtagagatggggtttcaccatgttggccaagctggtcttccaactcctgacctcaggtgacctcctaaagtgttgggattacaggcgtgagccaccgtgcctggctggttgtctgtctttttattgattaagggaacatttgttttatttttttgagatggagtgaagtggtgtgatctcagttcactgcaacttccaccccctgggttcaagcagttttcctgtctcagcttcccgagtagctgggattatatgcacctgccaccatgcccggctaatttttgtatttttagtaaagacggggtttcgccacgttggccaggctggtctcgaactcctgacttcaggtgatccacccgccttggcctcccaaagtgctaggattacaggcgtgagccaccgcgcccggccaaacatttgttttatattggaaatattttcttcgaattttccactttatagacctcactttgtgtgtgtgtcatcttagaaaggttttctctctatttctacattctatgttcagattcagaatctacctggcatttaagatttttcaatgtaatgtgaattaagagttctacattttttcatttgtcccagtgtgtcatgtattgagtagcccaaagtcctttttccccagtactttaaaatgttaactttagcacagtgaattcccataattgcttgggtatatttctggcctctgttttattaccgtttgttcctatgccactcgcatactgttaatgtagttttatagcatgcttatatatattgctggcctagcgagtggttctttgcaagtcttcattgctcatttaaaaggtctttgcaatcaattttagaagaaccttcctcttgagtgttctttataccgtaatatttatggatcctctgctcttgaatgtaaaaacttttattttaagatgtgggtattgtaagattcaactacttttttctcaaaggcatagtgaagcatcttgtcagcttgaattgttagaatagtcaaaatttaattgggaaatgcttccagtggtgcccaaaagtcaatttagtaggcctgggatgtatttatttagataattaaatttcaatattgaaaatccaatcaaattcagtatctaaaatctttaaaagtttctgtgcagccttcacttctgtcagttctctgacctggctagggtaatgcatatgtgtagtttgcccttaataattgggtattaaggaaaaattgtgaactcaatgggtaaatacaagatgattaagcattaacagggtttagttatttgattcagtgatttataattgtctaaattgtaacgctctttttttgctcctcattctaccattacgttaactttttttttcttttttttaataggttatgatggagggtggtcgcagcaaagggtttggttttgtatgtttctcctccccagaagaagccactaaagcagttacagaaatgaacggtagaattgtggccacaaagccattgtatgtagctttagctcagcgcaaagaagagcgccaggctcacctcactaaccagtatatgcagagaatggcaagtgtacgagctgttcccaaccctgtaatcaacccctaccagccagcacctccttcaggttacttcatggcagctatcccacaggtaggttttagaaggcaaccagaaccatgaaggttttcgtatttggtcatttctagtgttttttgtgcccctcgccccgcaaatgtgaaacattaagaaaggggaattatgattgagtaggaaaaaatgcttgagtgtgaagtcctggtaaatgttttgaaaaagtacatataatttattgcattatttgcttttttcttcaactgataaactcatgtgctttttttccctgcagactcagaaccgtgctgcatactatcctcctagccaaattgctcaactaagaccaagtcctcgctggactgctcagggtgccagacctcatcgtaagtcttttttcttttaattaaggttggggattgagttaaaaataacacattgggtaaatcagctcttctatgtcaatgttaggttaactattgcatttcacataatttgtggttatggatgttcatttttatagcatttaaaagcagtgctaagatagtaatgtctacagtggtttgatttccctttataaaagttttgggaataggtacagctcttcattttttatttatttatttatttatttattttcgagacagagtctcgctctgttgccccaggctcgagtgcagtggctcagtttcggctcactgcaacctccacctcccaggttcaagcgatttctccctgcctcagcctctggagtagctgggattacaggtgcccgccaccacgcccagctaacttacgcattattagtagagatggggtttgaccacgttggccagggttgtcttgagctcctgatctcaggtcatctgcccacctcagcctcctaaagtgttgagagtacaggcgtgagccatggcacccagccaatttcatattttgtcaggccacagttttaaaggtctcgttccatttaatcatgtatgagaatcagagtcgtggtattttatgtcttgtcctgtggaacagtatgttatattccaagagcacttagagtttatttttttagacagagtctcactctttcttctagtctggagtgcagtggcatggtcttggcttactgcagctttcacctcccgggttcaggtgatcctcctgcctcagcctcccaagtagctgggactacaggcacacgccaccacgcccagctaattttttaaattttttgtagagacgggattttgccctgttggccaggctgggagcacttagaattttatcatgattatgtttcaggtatatttataagtgtgggcggcaaaccacccaggtgccaaggcaagagaccgaggacacgagctgttccaatataataaaatataaaataagaatagttataccagatatagatcttagatatgattatatatgaatatcattaatcattagtttgtagcaattactctttattccaatatcataataatcctcactctataatcataacctaggaaaaaccaggccatacagagataggagctgaggggacatagtgagaagtgaccagaagacaagagtgcgagccttctgttatgcccagacagggccaccaaagggctccttggtctagtggtaacgccagcgtctgggaagacgcccgttgccaggcggaccgaggtctagcagtagcgtaagtgtcaaaggaaaacacccactatttagcagaccgggaaagggagtctgcttttcccctggggagtttagagaagactgctcctccacctcttgtggagggcctgacatcagtcaggcttgcctgcaattatccagaggcctaaccgtctccctatggtgctgtgcttcagtggtcacgctcctagtctgccttcatgttccatcctgtacacctggctctgccttctagatagcagtagtaaattagtgaaagtactaaaagtctctaatatgcagaaacaatggcgtaagctgtctttctctctgtctcctctccctctctgcctcggctgccaggcggggaagggccccctctccagtggacacgtaacccacgtgaccttacctatcattggagatgactcacactctttaccctgccccttgtgttttgtttccaataaataacagtgcagccagacattcagggccactactggtctccgcgtcttggtggtagtggtcccccgtgcccagctgtcttttttttttaaatctctgtgtctcgtgtctttatttctgcactctctcgtcgctgcatacagggagaagcccaccgaccctgtggggctggtcgctacatataagtactcgtccttgtatgaattaatgtttttacttattgatgctctgagtctgggaaaatggcaagtgttaagactcagctttaaaaagttttgtcactttttagtcttttatgcaaacctcagatcgaagaagacagcataaacacttttcactcagtaagttttcccagttaatgtatattcacatctttaaaatgcagcattccaaaatatgcccggtgctatccgcccagctgctcctagaccaccatttagtactatgagaccagcttcttcacaggttccacgagtcatgtcaacacagcgtgttggtgagtcttaatccttcctttaaaaattgatcaccaatttgaaagagcaagataaaaatacaaaatgttcttattttttagctaacacatcaacacagacaatgggtccacgtcctgcagctgcagccgctgcagctactcctgctgtccgcaccgttccacagtataaatatgctgcaggagttcgcaatcctcagcaacatcttaatgcacagccacaagttacaatgcaacaggtatggatttaatgatttcttaataaaaatcacatttcttgggtgaaatcaaaggtgtgaagacagctgggcacagtggctcacacctataaccccagcactttgggaggttgaggcaggcagattgcttgagaccaggagtttgggaccagcctgggcaacatacaggaccctgtctccacaaagaaaactagctgggtgtggtggcataagcctgtagtcctagctgctaggaaggctgaggcaggaggattgctcgagcccaggagtttaaggctgcagcaagctgtaatccctgctgggtgacagcaagactctgtctcaaaagaaaaaatgtgaagacagctgcatgatagattcttgagagcttagcctatctggaacattctgctaatatgatagtatgtaaaatgtcttacgcttttggaattggacaagcagcgagaaattcacatcctaaatcaccacgcctggtctgaaacaactattacaagtagctatgggccaggcgtggtggctcacacctctatgtaatcccagcacttcaggaggccaaggcaggtggatcacttgaggtcaggagtttgagaccagcctggtcaacagggtgaaaccccagctctaaaaatataaagattagccaggcttggtggcacatgcctgtaatcccagctactggggaggctgaggcaggaaagttgcttgaatccggaggcggaggttgcagcgagccaagattgtgccgttgcattccagcctgggcgacaaagtgagactccatctcaaaaagaaaaaaaatgtatctgtgatacatagtatataataactactttggcttctttctaattcgctcactcaacttctccacctcatgtttcgatggaagtctaccacttcagcagatgtccattgatgactatttgtatttgccatctttttctgtgctttaaacttaagagttctcattttctgtctagcctgctgttcatgtacaaggtcaggaacctttgactgcttccatgttggcatctgcccctcctcaagagcaaaagcaaatgttgggtgagtacttctgtcccaccttgtcagttcagaaagactagaaaatataggaatcacttaggcactaggtcaatcaattgacagctagggcagtggaattgatctgaattggcatgaatgattatgatagtacagttggtctgcctaattaaaaccactggaaagccaataagaaaatgtattgttagtaataaatagggtagtagggcattactcaccatgggccctcactacatttttgagagaaggaatttgaagcaaatgagaagaaaacttgtgactttgcctgaacaccgatttaacaacctaatggtaacattgcttaattggcaagctgataatatcaagagttaattgccttgtggcagattttattctgtcttcccatgaagacataatgaaattgtggattatgggttattatatacgtgagacagaagtatggttcttaaaccccagtttaatgtggtaattcaatgcagttaaaaacttttttttattgaagggagtttttgaatgtttctgttcctaggtgaacggctgtttcctcttattcaagccatgcaccctactcttgctggtaaaatcactggcatgttgttggagattgataattcagaacttcttcatatgctcgagtctccagagtcactccgttctaaggtgatttaaatttatttaccaagttgcctcttacacagttattacgtggctttttatggggacttaattgtacagaacacttacatcgtgttatatataagccatgtacagttgtaaagtctgcataataacctgtggcgctatttatccccattttatagataggtaaactgaaacaggctgaataatttgccaaatgctcacacagctcttaagtggcagagcctggcttcaaatcccatcagctccaacagccatactctcaactgctgctgctttctctagtggagaaagagaaatatttttcgagtgtggggaggacaaggaaagagtagtgcaggggagcgattcataattctagaatagtggtgtaatagaactcaaaattgaatggatatagttgtttagtgtaacaatttatactttcatttgagggaagaaacttatctttgttgggaattggtatgttaccattatgaaactctttatttccattcctttcctgaaccagtttatctgttttccccttttttaggttgatgaagctgtagctgtactacaagcccaccaagctaaagaggctgcccagaaagcagttaacagtgccaccggtgttccaactgtttaaagtgagcttttccctctggtttgttgttttaagcttgttttcttcatcttttataaagtttgttgagcatattttgaaatgtacatagcaaaagatcattttacagttcatttaaatgtattgctaatttttcaaggaaaagtggaactaactatagaggaattaaaggaattttacccgttaactgttggatttttaaaatcccaggactttcaggtggtgtttttttttttttttttttttgagatggagtttcgttctgtcgcccaacctggagtgcattgacgcgatctcggctcactgcaacctccacctcccaggttcaagcaattctcctgcctcggcctcccgagcagctgggattaacaggcccatgcctgccaccgtgcccagctaatttttgtatttttactagacttggggttttgccatgttggccaggctggtctggaacttctgacctcaagtgatccgcccacctcggcctcccaaagtcttgaaattacaggcgtgagccactgcgccctgccagattttgtatagtaatatatatataaaatgacctgtcacaggttggctttcatagttttacctttcctttttgggtggtgcccttgggtctctactactgtctttcatcactcccaagaaattgagtagtgcagccaggatcaggaccagggattggcaaatgttttttgtaaagggccagataggaaatattttgggctttgaggactgtgttatctctgaaatgatcttgttccagtgttaccatgtcaagacaaccatagatagtatgtatacaaatgaacaggtatggctgtgttccagtaaaactatggataaaaacaaccacattgcatttggctaagggctttaatttgctactgacaagtgatagtcctggtcttaatttgtttttttaacatttacagattgatcagggaccatgaaaagaaacttgtgcttcaccgaagaaaaatatctaaacatcgaaaaacttaaatattatggaaaaaaaacattgcaaaatataaaataaataaaaaaaggaaaggaaactttgaaccttatgtaccgagcaaatgccaggtctagcaaacataatgctagtcctagattacttattgatttaaaaacaaaaaaacacaaaaaaatagtaaaatataaaaacaaattaatgttttatagaccctgggaaaaagaattttcagcaaagtacaaaaatttaaagcattcctttctttaattttgtaattctttactgtggaatagctcagaatgtcagttctgttttaagtaacagaattgataactgagcaaggaaacgtaatttggattataaaattcttgctttaataaaaattccttaaacagt

SEQ ID NO: 440 - DNA, 32742 bp, Homo sapiens
  source 1..32742: mol_type = other DNA
ctttctccttccccttcttccgggctcccgtcccggctcatcacccggcctgtggcccactcccaccgccagctggaaccctggggactacgacgtccctcaaaccttgcttctaggagataaaaaggtaatgatcgtcatgtgcagtatgaggtcttcacgtgaaagctttatttgggtaggaaaacctagcctacgagaaacgggtccgtgcggtcacgcctgactgcctgtctccgggtcaaggctgccaggaccagctccagccctccgcccgagaaggctgtcctttcccctcggaactctggcttccctaaagcggccgcgcctccttccaggcctcacctcctgccggctccgcccggcccggcccacctcgcccccacctcggcgcccacccattgtcccctcgcgcagtcaccgagcgcagatcccgcgctctcgattggaacgcctccccatcactcagccacactcaggggctggacgcctcactcccgtttccgagccataaaaggtctaggaccgcttcccccgagccagcaggtaaagccgcggcggcgggagggaggccgggaggggccgcgcgccccggtcggcccagccggggaaggggagcggcgggcggggcggggggcagcgcaccacacacaaccctcccttgccgtgcgaccgcgccctgcccccgccccggggcccccgccccgcaagtcctgatcacaatgccggagccgccgagccacccttgtcatcctgcccggggacggccctggggcagttactaccgcgaagcacggagggtggggcgggccgggcctcggggaggggtggggggatgtgaaaggtcccggatgttgctgaacgggagccccttccagagggagtgactggggcaagcgcagacgggctgagcgaaagctaaggtgggggtagggagagaacgccttcccgccggctgagaggaagagtgggccggcagaggctgcaggggagagggagagagagggcgttggggacccaaagggaaggcgaggagtgggggatttgcgttggggaggaaaaggaaaaaagcagcctcctgccctaggtgcactcgggacaagcgtagaggagctggaagccgagcggggtgggaggagtggcggctgcgggcgaggacgcgcgcgcctccgctcgccctccagcgcgggcgggcaggacgagcgccggggagcggcggttacgcggggccccgatcgctgtgggcaccaatcaacggttgccatagcagcgtttgacgtcatcgtgcgtgtggtgcccctgctgccggggctggtgattggaggaaaccccgtgtctgcggagcggctgtagcctgtgagcagcgagatccagggacagagtctcagcctcgccgctgctgccgccgccgccgcccagagactgctgagcccgtccgtccgccgccaccacccactccggacacaggtgaggaacccggccgccgccgcgcctcgcttcctgtcccaggccagccttccgaacgcgtgggagccgtcctcgctccgtcccctcatccccactcgccccgcggtggcggcgccgggctgaggcggagtctcctcagcggacacgggcggcggctcctcttccgctgggctcgggagggcggctagcggccgcctccggctccttgcttccgcatcgacgccccggcgccgatcggtgctcgctcccccgtcctgcccccgggggtgggtagggcgcccacacgcgagatccctggggatctccctgtcgccggctcccgaaggtggacgaggcatggccggggcgccgccggccgcgatccatccccacccttgtctctgcgggcttccaccccctccctcgccgcccttctcgcttccgcccgagataatgactcggcggcggcggcggcgggcatcgcagtggcgcaggtgaggccgccccctcccctctccctcggccgccccctcctttccctccccctcgcgcagcctccgcgctgggcgctgcggcggcgggacccggccctcccccaccccgggaggcggtggcgcggcggggaggggccgggggcctcggggacccaagcgcgagggaaaggcctggccgagagcgggccggagcccaggcctggcgcggcggcgcccgccaggtagaccggggcgaggctgcgcgccggcgggaggggagtccactgcggggtgaggttttggggtggggctcgcctgggacctagagctgaatttcctgggctccgcggtgggaggaaggacttgaattttcctggtgggggtgggggatgggtctgactttttttgctccttgtgaacgggcgggggaggtgtggacgggggctgcaagtccaggtcggggtagagaacagggtggtgagcccgcagtcggctcccgtgcttgatggactagaactggagggtccctgcgctcggtttggggacgcatatcctgctttgggggcgggtgagcctgagcatagccgctggtggcccgctcggctgggtgtggctctcgtcccctcccccacctgcagctgtcggtcccttagagacgctgtacacggtcaccggcgctgatcggtggcggggaaggcgctgggtgggagagcggggtgtgtccgcggcggggctggtagtggttccgcttctgcgggctgctgtggcgtctctgccccggggtcgggcggcttcgctccccatctctcccccccccccacggcttgggcgggggcgcgggctgctcctccctctggctccggtcggggggaggaattaacactctgcagtaggttgggctccctgacacagatccgccatgacaaaggaggagagtcggggacttgagccgtggctccgacttgggcggagcctggaggggggtggttgcgatacgcggaccggagaatttgcactttaaagtccgggtctgcccgttttcgtttcacagtaaccgacgtctcaagtcaggtaagggttaaatgggtgcggtgagtcctgcccgcagtgtagaggcgaggccttggagcactcgttactgtgtgagaaaccttatccacttcctcttgtaccgaagtgattggggagagaatcctttgtactggcttaaatcattttttgttagaagcagaaataaccagagagcgtttctgagatcctaagggaaaaatcagtaatttagagacctgacgaaaataatgccgtcataaaggttaaatagtttacgtattgagccagtaccttgcatccaaagtggttaattatttgtttaaaatgtggcgacctgttctctcatttggttaaaaaaatattgtgggatttccctgggaaggtaaaagatgattaatattcgggagccagctgccaaggtggactcttctgttcaccttctaacttaaaagtgcacttcattcagggtgtgtattttcctctgaagtcatttattctgtggtgtcactgtgtggattagtatctttgtgctgttcggcaacttgcaaaagggtatctttccagaaaaatgtagctgaggtaaatcgaaaaggtccaggaaactaaaatgcgagggaaagagaattagatgggtagtcatggtaaaggacagcttgagtggtaacatccaattacattatgatggctagaagcaaaatgcagcacttctgcatttcaactggagcgatgacattggaaacacttataaattaagtacttccaatgtgatatattctagtactcacagtaagagttgaagtgtcatgacttgcggatatttttaaagcatgtggacatataacaagataaagagttgagacattagggtcagatattgatcctttgtggtggatttatactcaaaatatctgaaaacaaacagttggtcattcccccccaaattgttatgctattattggctggcagttgttgcagagatctagtaggtttggggtaggggtaacactaaagctaaaatgtaatcactcttgacaagagtattatgaaagtaaaaagacgtgagttacattaaactgatatgaattatgattctggaaatatgatagaaatccagatgttctctgtaaacaatgcttttactaaaggaagaaaagctgcttaattttggatcacttagtggtattggaaatgagttgagattttgatcaggtaagattaggggtagtttttgaggcagcttttggaagtaattttgacatgtgaaatttgggtcttctgaacaaattttaagttttgctacactgatgtgttaatggctgtaagtttacctctgatgctgagtatgctaaatttttttcccttttttgactatccttttgtgaggctgcattttaattcctcatgtgaacagtctttcacaggcagttaggtttcaggtttaaaaaactcatttaccacaggtataattttgagtctgtttattttgatgggaaaaattttaaatactccttttttcccccctgcagaacatccagtcatggataaaaatgagctggttcagaaggccaaactggccgagcaggctgagcgatatgatgacatggcagcctgcatgaagtctgtaactgagcaaggagctgaattatccaatgaggagaggaatcttctctcagttgcttataaaaatgttgtaggagcccgtaggtcatcttggagggtcgtctcaagtattgaacaaaagacggaaggtgctgagaaaaaacagcagatggctcgagaatacagagagaaaattgagacggagctaagagatatctgcaatgatgtactggtgagaatcaattcagtctggcttcattatactgtagggtccctatgagtatcagttacattactcttaactttttgtttggtttttcttttccttctaaacattgtgtgttccaaatttaaaagtcttcatggtgtcatgactaaaaagatgttaagacaattatagatacgtgtatgtaaaataattgcaacaatgattatgaaacagttcagttttgttaaaaataacagactttagtattgtattttatattaattgaaaatataaactaattgtgttactgttttacttatggttagaatatttgtagtagctctatagctggttatcttaaatgtacatctgtggataaaggaattttacatactttaggtaagagagatgtaataggatactcattgtagaaatagtactcttctcaggattagccgctataatgttaatgtaatgagtcaaccatgcagaaaactctggcgtcacaactatgaaacctcttcctgcattgaattcttgaaggtaaattttgaacactcacaaccatgatgaaaggttatgaacaactcaagcttgattttccagtttgaatcgagtattttaagtattcagtacttactgtgttgaagcactgcgcttaaaagaattaaactacattttggttaattttaatctgtcatataaagtagggctttttgatcaagaatagtttaaatttgaggataaaccagtagagaatccaaccaagctggcagtttttggaataatatttaaagtggttttactaaatggttacacttaaccagtatggaagggctctgatatacaaagaggggcagcatctcgatttttctggacagattactgaatctggaactcagtatggaaatccaggtttgttacttactatatgaaccttgtttatggaagaagtgctataatgagcaataggataatgtctgatgtggttgtgggtttggggtttttgttaaagttgtgatgatactatcatttctttacatttgtatttactaatggaatagcatcagttcctaaactgtaattttctcaaatgatacttacttgacactgtctttttaaagaatagtgattttttaaacatgcttatttgggttcacagccacaaactcaatgaggcatctgtcttggggcatttttttgttctttgcttattgaaacctttagaatgatagctactatttgtatctaagttgaaaaaaggaatatcttgcttttattggggccaagtgacaaatgtctgttttgtgattttgctaaggtaataagaatatttaaattttgttttttgtttttttttttttttgagacggagtcttgctctgttgcccaggctggagtgcagtggcgcgatctcggctcactgcaagctccgcctcccgggttcacgccattctcctgcctcagcctcccgaatagctgagactacaggcgcctgccactgcgcccggctaatttttttgtatttttagtagagacggggtttcaccatgttagccaggatggtctcgatctcctgacctcgtgatccgccctcctcagcctcccaaagtgctgggattacaggcttgagccaccgcgcccggccaaatatttaaattttgaaaatgtgattttttttttctataataaaaaatgtattgggtttttttgttttttttgttttttttttttgctcaccttactaactaatatctgtgtatgtgtaattcagttttgttcagtctggagtgtttttcccaattattacacctgatcgaaaagtttttattttggcttcaaagggtgtgttacacattaacatttcccttaagacaaaagtcaattttaggaataaaaaggaatgtaacatttaccttttactaacacgcttatttgcaataccaggtaggtatgtgcatgttttccatatacaaagtataaaagttcctgtcattgtgagtcttttccaaggaaaagacttgtagcaggtttgttttttgtgtatgtttgtttgtttgtttgttttgagactgagttttgctcttgtcacccaggctggagtgcaatggcaccatctcagctcactgcaacttccgcctcccgtgttcaagcaattcttctgccttgacctcccgagtagctgggattactgggcgtgcaccagcacgcccagctaatttttgtacttttagtaaagatggggtttcaccttgtcggccaggctggtgaccaggtcacgtctaactcttgacctcaggtgatccactcgccttggcctcccaaagtgctgggattacaggagtgagccaccacgtccagcccaacttgtagcagttttgactatgcttccctttagtttccttatgaagaaactttgtttgcatagaaccagtagatgaggataacaagataatctcttcatataaatagtttcttcttgttatgattattaaggaagttcactctggtccctacccacatcgttaccctccagaatagcactggcttcccaaaaagttttaatggtatttacactttgaaagtttggataaatgagagtttaatttctttactatacaaatggctttgaagagaattctaaacaagcttttgcttccagccttggtcttttcaggagtaagacttagtgatctttgcatactcaacgtgtaatagatgctcaaatatttgttaaacaagcagaaaggcttctttagagaaagagcatagaattaggtcagcagcactgcaaaatttccctagctttttctttttctgcttgggaaaatttgatatttaccgataataggcttctttttcctaccatctttttcaaataggtcacatcgactctggaaacatattgcataaaattccttctgccctttctgtgagatggaagaataaaatgtagcagaactgatatttctactagaaaaagttattgaatcattattaatgattagtaaaaatattttaaattatatttttaagatcttacatgataaaaaatcaattataattttttattactccagccttttctgggctttgatatatatattttttaatttgagaaaaataagcaggtgtccctttgcagaaataatagtattggcttgtggcattagtgataaccagattttttatattgagcacctattttataatagctatgaaaataaactttcttcctacaaaaagcagctaatctccaaagttctgagtttttctgaagagctctttagtaacccattctggttatatgtatttatctattgtttaaccatttaataagcaaagagcttggaccatgttgcatattacaagagtaaatagagcattatggcgggaagtggtcactggcatgctcttcacaatgtggactttgcattatgtaaaagaacttgggtttcttctcttccacgtgttaatttcaaactgcaatatgtgaactaatgcaatctgcctttcctgccagatgcttagacaaaagctctcttggtagttggggagggactcaacactagtacctctttaaacctgaaagatggcagccaaaaattgggtagtttttatcttgcacatgatgaaatgaataccaaggaaatacagtctaggaagcctctttcaaactcaaagaagtatgtcgaggtgaataatggagctcaagatactgagtcaaactagttttaccatttaatagatgcatggcctgaggaaatcactcagtccctctgagaaaactaagctcaattaaataggaataatactcatcccacagggttgtggggaatgagagtcaggtaaagcaccttgactaccttctgtgtcctgtttatcttagcttttcagttctatttaaaagtgtgagcctgcctataatagtgcaggggtctcttaacttacagtccatgaatggaatttcgaagattgaagaagcctttaaaattgtgtatttttgtggggcagaaggtccatgccaaccatcaaattttcaaaggtttcattttaaaatttaaaatccactgctgtaggcagagaatgactttatataggaggtctccgagaggaagcagtgtaaaattgtgtgtctaacatttataacagttggcaactgcagttgagtaatcttaatagtgattctgttaatttgactgagttctattttattgctgctctacgtttttatttgctcagggcaattttaagttgtggttatgggtcactgatttttatctccagcccacagaactaccattaaacagaaataagaaagcaagcggctttgggtccgttttagtctgaatatattattacgtgccttgggctttaaaaactgctatgtagagttagcagtttttaagatgaaaatcactagacagctcattggaataagggcttctccaaagaactctgtagggttatatctattgttactatttcattttattaagatatactgtatatttacatgtcttcatggttttggtatgtttcaaagtataaataatcccagttctgtggtctcaggaaggaaaaaattggacagtgtcttttttttctttttttcttttttctttttttttttgagacggagtcttgctctgtcgcctaggctggagtgcaatggaacgatctcggctcactgcaagctctgccttccgggctcacgccattctcctgcctcagcctcccgagtagctgggactacaggtgcccgccaccacacccagctaattgtattgtatttttagtagagatggggtttcaccgtgttagccaagatggtcttggtctcctgacctcgtgatccacctgcctcggcctcccaaagtgctgggattacaggcgtgagccaccgcgcccggcctggacagtgtctttggtaataaagttcagttttttttaatgtaaagtgccacacccaatgacatattttgtacaaatacaaaaagtctgaggtatatgaagtggaaatgatgaaaataaaggaaagggaatggaaaggtgtagaggcctttgctgtttgatgggaagggaaactagctctgtctttataatactgaattaaatgtcattggacttttggattaatttctcaaatttttgattccaaaataagttactcttggcatatttatattgaatgtgtgtgtgagaatttttaagtcagaatgacaggtgttctgatatcaagtaagttttaaaagttagcatatagtttattgaaattctaataagtttcttagaattttttgtagaattcctggttccctattgtgatttcattctagttcccatagcttttgctttactcttgacagttccacatagagaataaacaccgctcaaggttttaggggacttagaactgctgtcagtttcaatatactcaaagccagcattccttttccttttgaaactgcctgttctttataactacccaattttagcatgttttctagacttaatcacacgacatgttggactcaactttgacttaattttcagattacaagctgttgatgtttcccatatcattggttccctatcctttacattcacgctgaattgtatagttcccaggattatactcagaaaagtgcacattgccaaataggaaaatgatactgtatggataaacttgatgtgcttttaatggacaaaagctaaattataaacatctttttactgctgcttgtggtcattcacttggacttgttactcttatttttcctttttcagttctatgttgcatgtatttcttattctaatctttctaaaatgctgatttcattccatctatttgcttgatccttgccagaattccctgcaagaggcttttagctttagtttggtcgtctcactatccctgatacaaactgttgctaattaccatctttatggcctgagggtttctgcttcattactcgatttaggacttattttaatcttgattatctgtctttcagcatcagaagattggctctgttcttttctccttgaaaacatttgtgtatttgtaaagtacactgaaggagtatatgctttgatatttagatggcacaaatgtaaattttggtgtgggaagaacggtcgtatcagcagttctctcttttttattatgtgtatttctatgtaaccgatcattcacttgttctctagtcagtaattccatttaattatgaaaagcttgtatatgtgaaagttactgtgcaatagcagttgtcattgatttagttttgttttctggtaaggtataatgtgatagaagtagtagtgtagtgtaggatagagttttacatattggcagatttcactagtttttttttctattgccattcaggcaccaaagccatgtggatgaatatagctgacttgatatcagtaagatcattttgtgtgacacctgcccttttgtttacattggataggttattaaaaagtttcagcatgtaagctcttgtggatttcttttgacaggatttgttgtgagccttccttccccaaataaaaatgtgcttacagtggtaacaacaggtaaaagaatataaggatagtttcagccaagtattaatctataaagttaagcggaccaacataagatttgcttaatgggttggcctgtatgcatgtgttgaattttaaaatctaagaaggattattgcattaaatttgcagggactgcccaatttttgttgtattagtattttattttaatcgtttaatgagttgggaagttagagatgtttttttttttttttgtcgttttttgttttgtttttttctgagatagcagtctcaccttgtcgtccaggctggagtgcagtggcacaatctcgcctcactgcagcctccaccttccgggttcaagcgattctccctcctcagcctcccaggtagctgggactacaggcgcccaccaccatgcctggctaatttttgtatttttagtagagacggggtttcgccatgttggccgggctggtcttgaactcctgacctcaggtgatccacccaccccggcctcccaaagtgctgggattacagtcgtgagccaccatacccggcctagaaatgttttttagtggcagttaatttctaacttgcaaacaatttttgggatctagagtttttaaaaattagcgttataccaaggaacccactggtatgcggaatgtttctcatctaagtgattaattacaaacgcttttctgagacagacctatttgttgatccaagacttatgaacactcagcttataatttttttgctccttaaacgtaataaacattgtccagtttagaatgacatacttggaccacattcaaccaagagacacttgatgaaaatattatgcaaaatacctacttaaaatgtgattctgtggaattgacagttgaaggtagtattatataggcaagctgtagttcttgcctagaacaggcaagttctcaattcaacaatttgatgagtcctttagcattgtgttaggaagatgtttagaaataagacaactcaagcaatctgctttttgtaagagtaacgacttttccttcccagttgccctttgattgttgccatctaatggaggactagcatcaggctctttttctttaattggagcagagataaaactttaagcatatccctgtgtaacatttctaaaaataaaggatactaaagtgtatactaccttactttaagagaggtgataaaacttagcatgagccatgcagtctttttgaatttttgattcattgtgtgatttggggcaagttttactgcatttgtctgtgactctgtttccacatcttcaaaatgggaataatactatctacctctaggatgttttgaggaaattgttgaattaacacacccctgtggtggtgttaaatagcaaatacactgctttaccttttgtacctctgtgatatcactttattgtggtttcatttataaattttggattaaatttaagagaactttagaaagctgaaattttttatttaatatttgacaacttgctattttataagccctgggctattacaaaaataaatgtaaaagcccctgctcttcagtctggagagggaaatagacgtgcacaaataatacaagtcaaagagggaaaagtactgcaaattcattgaacatagaaaagctggtctttagccttttttaaaaaggggctgataaaatatagtcccccatgtagtttatccataatacatagcgtgccacttacaagctaaaaagccctatgaaaaatgaggcgttttaactaccaccaccaccaacaacaaaaagcatcgtgagggaaatactggtaaattgggccttggtttgtgagaaacttcagcgcaggcctagatcctgggggaggggagaagaggaacgccttcagtgagtgtcaataatttttaagtttatacttaactactcattaagttctttttgatataagttctttttgatacttgttagtgtttcactttttttttttttttttgagacggagtctcgctctgtcccccaggctggagtgcagtggcgcggagtctcgctctgtcccccaggctggagtgcagtggcgcgatctcggctcactgcaagctccgccttccaggttcacaccattctcctgtctcagcctccctagtagctgggactacaggtggccgccaccacgcccggctaattcttttgtattttttagtagagatgaggtttcaccaggttagccaggttggtctcgatctcctaacctcgtgatccgcctgcctcggcctcccaaagtgctgagattacaggcatgagccactgcacctggcctagtatttcacttttaatctttaggaacaacatttcaaaatttgttttcagatgttcctttttttatttttattttttttgagatggagtttcactcttgttgcccaggctggagtgcaatggcgtgatcttggctcaccacatcctccgtctcctgggttcaagcgattctcctgcctcggcctcctgagtagctgggattacaggcatgcaccaccacgcccagctgatttttgtattttagtagagatggggtttctccatgttggtaaggctggtcttgaactcctgacctcagatgatccacccgcctcggcctccaaagtgggattgattacaggtgtgagccaccgtgcccagcgttagatgttcttaaaacactgattccttctaggattattttgctagcattcatgattcggagggagacaattctctgaacctgatttaatttggcagtttttattctcacttcctgctagccctttcacccagttgattaaaaaaaaaaagttttagaacagaacagatggggctttctatcagcattgtttagtgtaggtatcttttgttttggggtaaatatcagggagcagctactcttttaacaggaattatattaataaagttttaggctggctttaacagttcttgaacatcaggaacatcttgctttgccagatttcttgttgattaaaagtgcagatttgccatctattaatggaaaatgcgttaagtgattaggcacaagcctgcttatagatgaccttatttatagaacatatgttcacagcttaaaatcttattctgttaggccacattgcatagaaaggtaataatttaaagtcaaaatgtctaaaagacttaataaattagttcttgacacctcctaatcattagcatttctggtggagcacttttctaattggttgaaagcaagtgaggaaattgcaaatcaaagaatggaagccactccggccacaagggggagtaagagattaaatctatgggcccctaatgtgtgacagattatgggcttcttgcatgatttctttttaaaattttaagagatctaggatttatacaaggcccagtgtctctacagaataaaaattataggaaaattatctctgcataagagaattgtacaagaccagaaatttgaactacactatgctgaagagttggaattaaatctattaatgaggatgttattaaaatgacatttgtggggtatttttgtgagtttttaaattgaataatataaactgggagttttacataatttatagatttgtagaaatatgtttaagtatacagaaatttcattgagtcattgaattttagggttaaagggacatctgatctagcctttttattttaacagatcaagacactgcagctcaggggttcagctatttacatgaggtcatacagtaagcattaatatttgtagtctcttaatgtagtatcatcttattgtagattgaaacatgacatttaatctgctatcaagatactgggtttgtagggggggatgaggagttgtcagaataacaaaataagtggctttaattttattgaaaacagtggggtttttttgttgtttgagatggagtttgactcttgttgcccaggctggagtacaatggcatgatcttggctcaccgcaacctctgcctcccgggttcaagtgattctcccgcctcagcttcctggatagctgggattacaggcatgcgccaccacgcccagctaattctgtatttttagtagagatgggatttctccatgttggtcaggctggtctcgaactcctgacctcaggtcatcctcctgcctcggcctcccaaagtgctgggattaccggcatgagtcactgcacccggccgatttttgtttcagactataattagggtgctgtacttactgagaatcacttttgagggctcttatgcctcagttacttgctacctcaaccttttaacttctggtgtgtgtatgctttgtatgaaagcaggcatgtctgtgtcctaatgtctctctcttcatttgttgttttggaagagagccatgacagtacaatctaaaacagaagaatgggttatggaggcttgatctttctcccactcacatatttggtgaggtcatgtcaaagttagcccagctgtattcgcaaatttcaattcataaatgtctcaatagaggttgattgttttgctttgatattctggggggatttgctatttgctaatgacactcgatgtctaattatctttgtgcgaattaaatttaatattaggaccagttggtgaaatactgttttaagacaagatgagaactttctctccaccccacatatttttctttacaaatgtatcattgtttttgtaccatttctgtgttaaatacaaaagtagtatcagccacataaggaaatttgaaaaaaaaaaagcatataaagggtatgaaaaagggtatctttcagaaataaagacaattaaaagggacttctttaaaatgtattaacttttcattttgaaataatttcagatttagaaagaggttggaaaaatatgaagagtttttcatatattttgccagattgtccacatgttaataactacagtataattattaaaatcaggaaaatgattaaagtaaatgataaactattatgtaacctataatcttaattaaatttagcaaattgttttactgtaatttcctgtttctgctccagaattccatccagaattacactttgcattttgcttacatgtctccttactctcctttaatgtggatcagtcttgttttagtctttgcctctaatgattttggaacttttttcaagagtactggctggttattttgtagaatgtctctcagtttcgatttgtctggtgatcctttttgtttgtttgtttgttttgagatggagtctcactctgtcccccaggctggacttcagtggcgagctatcctggctcactttgcaacctctgcctcccaggttcaagcgattcacctgcctcagcctccccagtagctggaattacaggcacccgccaccatgcctggctaatttttgtgtttttagtagaggtggggtttcaccatgttggccaggctgatctcaaactcctgacctcaagtgatttggccgccttagcctcccaaggagtgagccaccgtgcccggcctgtctggtgattcttcatgattaaatttaggttgccagtttttggtgagaactcctggaagtgatatggtgtcctcctcactgcattatattaggaggcatgtggtgttgtcctgttacttaaccaattatatttagatagtgcattatgctgttaggacttctgaaaacacaccccatggtgcaaaatacccattgaatcttttttaaggtatatgccttaagattatgattactttgtcaaaggttacaaactaaattattttgccaaagtgctttttaaataagctgcctctgtttatactgaataggttgcttcttcaaaggggaaaataggatcccagctctgtaacttgtaattttttttcgaatttattttcattagttggcttcttgtgttctagttggcaagcccaaatctcagcacatagcacggtggtttgagtgtatagtggcaggttggctattcttcaggactgaggtgaatgtacaaatacttaatgattgagttcttgttcataattttggggtttggtctaaggacccttagtttataaattctctgattactttttaagaaaaaaagtgatcttgaatttaaagaaatgtaagggatagtggtggggtgggaaattcattatgttagaggagatttcctggcattggaagggagattttgaaattaatgctgtagtgaaacacaagaagattaaggtgaggaggaggctggtcatagttttgtatttgaaatgcctgtcttgcctcttagttagtagaattagtaccataatctaggacccttgacttcttaacaagtttactctgccttgcaacctcacactctcttccagttctctctgcaggatttttcttaggttcttctttgttcattacatagaaacctggagcttatccatattaggaggtgcttagcctgcccctttgctgctgtttctgaatatatgtgtttagttcagcactcacatattttaaatgagcaatctcttaggttttcagagaagtagaacattgttgtgtctcttacagcagaatattcattattgaatgtagtgtcaacctgaatttctatcaggttttgtcttaactatttaggaatttggtaaggtaatacactcttgatgatgaagactttctgaaaaatagtttttaggatgttgagctattaaaatatcctccaagatagttttaaaatgttttatttaaatgaagctattacagttatgcgtatattattcagtcagggagtttaatatttttgagtgcttaaaatgtgtagaacgtgcctttattagagcctatgagtaggttaagagtatatatgtgtgtgaaaagttaaaggtgcaaaaccataattgtttgttttatttgagatggagtctaactcattggagtgcagtggcacaatgtcggctcactgcaacctctgcctcccgggttcattcaagcaattctcctggctcagcctcccgagtagctgggattacagtcgtgtgccaccacatccaatttttttttttttcccagtagagacggggtgtcacccaggctggtaatctttattttaaattgtacttgctcctaagaatttaggtgttaagagcatagcatgtagaaggaaaaaataaagctgctgtaacctcatcctgccttcttggaggtaatctctgttagtcctttgtgtatcctgggaatttatgtgcaaagtaaacaattctgtccttgaagaataaggatcatatacttagtttggtaaattgtacaaaactacacactttgatgtatatcttatgtttcattttgacaggtacctccttactcttttgttttttggagacagtctcgccctatcgcccaggttggagtgcagatggcacaacctctgcctcctgggttcaagtgattcttctgtctcagtctcctgagtagctgggattacaggcgcctgccaccacacccagctaatttttgtatttttagtagagacggagtttcgccatgttagccaggctggtctcgaactcctgacctcaggtgatccacccaccttggcctcctaaagtgtgggattacaggcgtgagccaccacaaccagcccgtacctcctcactcttaatgtctgtatagtattctattatttgggtatgtagcaacttacttagccagaccctccttttaaaaaaaaaaaaaaaagatagggtctccctctgtcccccatgctggagtgcagtggtgcactcactgcagccatgacatcctgtgctcaagtgatcctcccatctcagcctttggagtagctgggagtgcaagtgcacactacactaggctaatttttttttttttttttttttttttttttgagacgagtctagctttgttgcccaggctggagtgctttggcacgatctcagctcactgcaacctccgcctccagggttcaagtgagtctcctgcctcaagcctgccaagtagctgggattacaggtgtgcaccaccatgcccacctcattttttgtatttttagtagagatggggtttcaacatgatggccaagctggttttgaactcctgacctcaagtgatccacccacctcggcctcccaaagtgctgggattacaggcgttagccaccgcgcctggccacgctaggctaagtttttaaattatttttagtagagatggggtcttgctatattgcttaggctggtcactaactcctggcctccagcaatcctcccagctcagccttccaaagtgattgtgattaaaggtataagccaccacacctggccgttagtcctttattgacagaaattaggatatttcccttttttctcttcagttaaaaagctctacactacacactatctgtacagacaatgtagatgaagctgaatagctttgaataattagctttagggagaacatagcattagagctaggtatggagaggtatttagcacagattcttttcattttatttttccagctttattgaggtacgattggcaaaaaaaatatatatttaaggtgtacaacatagcagaggttactttaaatcagttgttaaaagtgatatgccgaccactgggagtcctttggggaggtgtctattacatcacaaaaagtcacaactattttcttccttttttttttttgagacggaggctcactctgttacccaggctggagtgcagtggcacaatctcggctcactgcaacatccacctcccaggttcaagtgattcttctgtctcagcctcccgagtagctgggattataggcacacaccaccatgcccagctaatttttgtatttttagtagagacaggctttcaccatcttggccaggctggtcttgagctcctgacctcatgatccacccacctcggcctcccaaagtgctggagttacaggtgtgagccactgcgccgagccaggtcacaactattttcatggcaaatactgttaatactgattcttatcactttgttgacatttagcactggtgcaaacccaagggttgctcaaacttactggttccttatcgctaatcaaggcagtgatactatactgtactagtgattattgtatttctttaccattatgcactcactgtttcttttaaaaagaaaaaagactttttttttaatgtccttgaatctgaaacattattttattaatagcccttaaatagacatctttcagtgaggcaaaatgggaagtccagtggttgtctctaagaaaaacacttgcagttatttgaattgtgagataaactagctgcttttctttttttatggaacacttttttcttcaaagaactgcaggcagataagctgtgggtattcagacctaggtattcgacaaatatcttaaatgaattgagcctctcactttaagggaaaatgatatttttgacagataaaattgaagctttggagcaaaaatgagaactttggaaaataattactaccaccatgatcttagttttctacttttttatgactgtaaaagtgtcttgagacaaacttttaagccataaatttgaagtattgttaccgtttagggttttttcctagaaaatgtacctatttatagaggtagtatatatgtaccatggttgggagaaataaggtaatattacttaaatattaggaaattatttcacataagagggagttcagagctaaggtggtttttgggtgggtgagtgggtgggttaagatcagttactgcagtacaaacagtacttgaagtctaatgtggttgacactagactttcaccttccaaaaggatggcagcacttctttgttgcttactatttgccagactctgctaaatgcttattatatgttaattcatttaatccttacaacaaccttgtgcattatgtctactactaatatttgccttttacagatgagaatctgagacccaggaagatttcagagttttgtcaaggtgacagagtttgaatttaggcagtaagcagtctgtctccatagtttgtgttcctaacaagtctgttgtttaaaaagagaaaataaatactaaaggaaatgttctttttttcttttgttcttttttcttttgttctttgatatgtcttaatcctgtgtttttgaatgaaaacttttttgcatcctacttcaccatttttcctagttatacaaattttagattaccaaagccaaaatgatgtacttaagagtacaagagcactaaagcagatttttgaatgtcagaatctccatactttattttcacataactgagcaaccagtgagtagaatgcctactctcggttgggagctgtgaatggtgccctcctgtttatatgttcatttagacctcataacagccttttgatgtggattttcatatagatgagaaaataaagattagctattgtgtaaattctcaaaattaatgggttagggtggaatttcaagtctgcctggttttagagtttatacgatttgcattacatcaagcttttcttctaacaagtgttgaatgcccgaaaggttaaagtcttgccaccagctcaggcagcagttttggtggtttaggggtaatcatactgaaagaccagtgagaaaggcatatcactagagatagattctcagttcattaacttttcattaggaatatttgactacaggcaggagtgagtgtttataaaattcatattagtgggatcaggttgagtctatgccaagaagggatcagaaacagatgacctgtcaatttatgtggttccttaattttaatagacttaattttaaagacaaaacatcattgtaaatatagactatctttggattaaggcatcttttggaaactggcttgggaggaaaaatgttatttgaaccccatctcttggaagtgttttcacaatctaagaggttaattatactacggtgcagtagagagaaaaatctcttttatctctaaaatctcaaatttcatgtaatttacctgttggttaggttaaggattagtgtcctctcttcagagcccatatcacatatttaactctggattaggagctgtttaccaaagagtattagataccggcttcttgtggcattttgctgctgagtaaatgatttcttatcccacttaatattattagggtgaatgctgtataaatgcattaactctaattcagcaaattaatcttgggtattttctaaaatgttggccatgatatctttaaaagacagtggctgtcatgaaaaaacatatttaaaagttaatgggagcagggcaagctatgatggggccactgcattccagcctgtgtgacagagcaagacctcatctctaaataaaaattaaaaaaattaatgggagggaaaaaagtaaaacttacatccacattttgaagtaaactgaggaaatactgtggatttctaaatgagattatatttcaggaagattcaacagattaacatttagccttgatttagcttgagtgtaggatgtgcttgaattttgtttgacctcaaaaccatttagatttggtttaaaaacttaaggtactgtgataattgaaaaattttacaagttgaaccttcagtcaacctagcccttgttttacagttggagttggctgggcgcggtggctcacacctgtaatcccagcactttgggaggctgaggcaggtggatcatgaggtcaggagttcaagactagcctggccaatgcagtgaaaccctgtctctactaaaaatacaaaaattagctgggtgtgatggcatgtgcctgcagtcccggctactcgggagactgaggcagaagaatcacttgaaccggggaggctgaggttgcagtgagccaagatcacaccactgaactccagcctgggcgacagagcgagacttcgttctaaatacggttgaaattgtgacacttagtgtatacttccttatattatggtgtgcccactccctcccctttttacttcagactttatttcagtcatgattgctttcattgtactattgtaggtgaacgaaatttaggaggtttatttctgtgttgagcaggatattctctgaagttattgcatattttgaaagtagctatcagccctttcctcccttccattctctacttggtgcacctccatgtttttttctgctttgttgtaactgctgcttcctttttcttttgttcttttattcatttttttctattcttcctacattgggttttatcttctggcttccaaatctggaaaacttggatttgttattcttcggtcagtttgacaaagcaacatacttaattgcctcttttatgttaccattaaattaattctgtgaactctgacttcccttagaattgaaaaagaccacgtgtacaaaaatccggttagatagtagaaataagttctagtattcaatagtacagtagggaaattatagttaacatttatttattctaccaaagtagctagaagaattgcagtgctcctaacacaaatagaagatcaatgtttgaggccaggtgcagtggctttacgcctgtattcccagcactttgggaggctgaggcaggtggatcacctgaagtcagaagttcaagaccagcctggccaacatggcgaaaccccattggtactaaagatacaaaagttagctgggtatggtggcacatgcctgtaatcccagctactcaggaggccaaggcaggagaaacgcttgaactcaggaggaggaggttgcagtgagccgacattgcgccactgcaccccagcctgggtgccagagcaagactgtctcaaaaaaaaaaaaaaaaaatcaatgtttgaggtgatggatatcccagttactctgatttgatcattatatattgtatgcatgtatcaatatcacatgcacccccaaaatatttacaactattttgtcaattaaaatttttttaaaagaaacagatgacatcttctttatgaatctcctctacaaaatacctaagttaccctctttagtttcctgttttacctttatgtgaaaagagggaattcactgagcaggttccagtactggaccactcataagttttctcatactgaacagaaatcttccctcttgctaaatttaattggtcttgtctcttggagccattcatgtcctgttctttccattatcctgacagtttctagtatactcgccataactttgattcctgattgtggaataacgtcctttctagtaggtatatcaccccattgaggctgagaatatgttcctttttttttttttctttttaagacggagtttcactcttgttgcccaggctggagtgcaatggcgcaatctcagctcactgcaacctctgcctcccgggttcaagtgattctcctgcctcagcctcctgagtacctgggattccaggcgtgtgccaccacgcctggctaattttttgtatttttggtagagacgaggttttaccgtgttggccaggctggtctcgaactcctgacctcaggtgatccacccgcctcagcctcccaaagtgctgggattataggcatgaaccaccacacctggcagaaaatgttcttttatagttagctttttttgagctacagtgttagcccctttaaatttaatctttaatccagtcttgcttggttttgggtttttaaatcttaattagcttatgtcattggacgatttattagaagtaggccatttatgcctttctcaactctttttttttgagacggagtctcactctgttgcccaggctggagtgcagtggcactatctcagctcactgcaagctccgcctcccgggttcacactgttctcctgcctcagtctcccgagtagctgggactacaggcgcccgccaccacacctggctaattttttctttttgtagtagagaccggggtttcaccttgttagccaggatggcctcgatctcctgacctcgtgatccgcccacctcagcctcccaaagtgttgggattacaggcgtgagccaccatgcccagccacctttctcaactcttatggtcagcatctcaccagaaacacttgccacttgtttggttcttttggtctatcattaggccagtaagcagcctgactgctgtttacccagccctcctgttacttgtgggttctaacaaatagctttaaagttgttttatggttaattcagtgttcagctttggggaaagaagtgcttaactgccattttaattcccagggaactgcttagttcagcatattacccaggtagaaagttactacctacaaaagatagattactacttttagtagcatttatcaacacctttcctaaaaaaatttaagtttttagtacagctttaaaattttacatcttaagtgactggttcactcttaagtaactgcatgtgtttatggccttcatctctgcatacatagagggggttaaagttaccgaaaagtgaaagacgtgattaggcagtgttactctttttgagacagcctcactgtcaccctgtcctagagtacagtggtataattcaattacagatcactgcagcctcaaactcctggactcagatgatcctcctgtctcagccttccaagtagctgggactataggggtgtgccaccacacctggttaacttttaaatttttttgtagaggcaggatctcatgttcaccggggtggtctcaaactcctggactcaagaagtgatcctcccacctcagcctcccaaagtgttgggattacaggagtgagccaccgtgccctgcaattcttgtaaagtgtattgtaatggaaggaatgatagccttgtctctacagctagattatgaattaccagaatattgtgcttccagcttctagcatggtgtctggtgttattgtgataatagaaataaaattttaagtgcttactcctaagtgcttacctgtattttttctcaataatcttagaggtctctgccttacaggtgagataactgaatcattgagattaagtagttcacacggtgtatagtgctgtaattcaaaaccagactcaccccaaagccacttatgtttataccatctcccatagttgaatgaataatacaatttgtgtaacaatgaaacttttgaaaatcctggtcatttgtttcttaaaaccattgtttttaagtggaaagactcacttgactattttaaatgcaagtgtcttccactgtttgaggcagatctccacagagcaaccataggtggtaaaaagcattgtattcaaaggacaaaacacttttgcagctaagagaactttgaatatgaaagtatgaatgtggtgtaagacagaggttgctatcctaaccaaaacgttcttctgatttccggccagtaattttattttatttttatttattttgagatggagtcttgctctgtcatccaggctgcagtgcagtggtgcaacctcggctcactgcagcctctatctctcgggctcaagcagttctcctgcctcagctgggattacaggcgcccgtcaccacgcctggctaatttttgtatttttagtagagacagggtttcaccatgttgacgaggctcacctcaagtgatcctgccaccctagcctcccagagtgctgggattactggcatgagccactgtgcccggcctcaggccagtatttttaaatatcggttaataattgcaggaaacatcatttcaggttgacttttctcacctttaacctctttatatagcacagtgcaatctggccctactgccacttcatctgggttatctgtagcttgagttgtaaaaaaaaaaaaaaaaaaaattgggggaagaagttgggttaaaactgttcacctacccagcattggaacataatgggtaaacaaaaagttggagttaccatttaaaagcatttttcaaatttatattttatatataagtaggtgctatataaactaatactttttttttgtaagaatggatttggaatttagctcagctgaaaattgacttcaccttgattctcagagtgtacttgaactttaaaggaagtggggtagtgagaatgggtggttggggtttttttgctttaatgtttacctaattctactactagaattatttttctcccccttaactggaaagaaaaaaattacacatttattgagacttcttcccatccccaacacaatgatctaatctttttgctttaaaatcagttaaagagtgtaatttttaaaatcctaatcaaatgactcagattgtaatagtagttttagacagaattttataggatgatgttttaattttatctgttgtctgggatgatctgtaatcgtgtatcttactagccgaaaatgacttcaatgagattaaaggtctgctctttaaaatctgtaagtctcctaccactgtctttaggaaaaataaaacttttgaacggtttttttatctgttgtgaggtttgcttgaattgtgttgttataaatgaagtttattttgttcctccttctctggcatggactccttaagtgtcttacattattggtttctgctttagtcatttctccagagtcccaaaaggttcatcccgtatgttctttctattttcatgtcatgaccacatgaaacttcagatggaaagcttgccagctcattagaaaatgttcctaaatgtgaacggtcatgccccacattcatgaagtcagcatgtaaatagataacattgtcagggaccaatgttcaattttattgtcctcaaataataaactgaacactaacttcaaacttaaaatattgctgcccaaagcattctgctttaaaccacaaattcatgtgccagctgcattcacaattgtattgacagtgactgggtgtttaagttttataacttaggctatagtttgttctttaagaaatgcaagttctttcagttttgtaaatgttttattctcactatgtctgtttcttttcttcttaagtctcttttggaaaagttcttgatccccaatgcttcacaagcagagagcaaagtcttctatttgaaaatgaaaggagattactaccgttacttggctgaggttgccgctggtgatgacaagaaaggtatgctgtttttaaacctgttggttgaacttgtataagataacatagtgaggaagagtctctgaagcgtacataatgtcttgttttgaattgcttagagtgccgaataaggagtagcagtgctctttgtgttctgagaatacacatctactgcctcatactgctattctaaaataaatgctttctgaaaagccaatattgtgtacagggatgttttttcaagattttaagaaaagtgaccagcctgagcaacatctctctctacaaaaaatattttgaaaattagctgggcatggtggtgcaagcctttggtcccagctaatctggaggctgaggtgggaggattgcttgggtctgggatgtcaaaactcgtcaattttttaaaaacataacaataatgagattataaagttgttttatcttgacattgatcaatggctagtgtgtaccaggagaaagctccctttaaaaaaaaaaaaggaccttgttcaattaacaaatattaagctgttacaggttagtatttcaaaggatatgtgagatattaaaggtttggtttgaggggtgaagatataatgcacactttatctcagtacgttttggtgtgtcttatccagggattgtcgatcagtcacaacaagcataccaagaagcttttgaaatcagcaaaaaggaaatgcaaccaacacatcctatcagactgggtctggcccttaacttctctgtgttctattatgagattctgaactccccagagaaagcctgctctcttgcaaagacagtatgtattttacctgttacgtagaaatttagcagtctttattatttgagcactgaaatgtaatgtactatttttaaatcgtaggcttttgatgaagccattgctgaacttgatacattaagtgaagagtcatacaaagacagcacgctaataatgcaattactgagagacaacttgacagtaagtacataacagcatcattagtgatgaatgtggttgaagaggttatgttttactctagggaatttttttttttattaaatacatcttttaaaattttttctcaacacatttcataggctctcataaatatatctcagctactattaaagtcctatgaaggaaaattacagaaactgaaatattagactgagaactaaaaaatacacacattgatgagttacctgtcttgttaaaatttgttagtatcaaaagtgtgctgagactctacatgttttagttcctttaagaatgattttcttgcccatcaagttgcctccatattggtaaagataatggtagggaattaataacttgagttacaaaatctcaggtatctacagaatccaagtggaagtctattttgcctagcttcttattttaaatgacttaatatgaaaggtcgtgattgtccttgggatactgcagatgtataaaaagaaacagtgtcactatcacaccaggaacatcaacataattccctaataatgtttgaatatctaaataatacttgaattccaattatctctctttttttaagttatttgaattgggattcaaattcagtccacaatgcagttgatttgtatgtctcgtttgtttcttaggtcttctcattcttctccttcagataaatactagatttgaaattttgaggcttaggtgaaaaaattatcaagcatttgctgtgtgtcaggtaaagaggtaggaattgcagatcataatctaggtattactgtttttttgttagacttctagggccatttctcttggggactatgtaatctcattttatacatttctcttccaactttattctagtccactgccattttctataaaccagttctatatgctagtgctgaaaatcttgaagagttttttgaatagtattgtatacttgtttattaaacctaaaattactttattagcacaatttggagctatctataaacttttctgatacttgagtcaagataacaagccacagtaaagaatgaaagaatcttatatatcaaacataagaagcactttgttaactaactttagtattaaggatttttcttttctagtttgaagtgatgacatttttaaagtgatgacctgagacctagatactgtgttttgttcacatcactttttgagaggccctgatctactgtctgcttccaactgaattttgctatcagtatagcatgaagagcgcatattgcaataagaaaaccagggttggccgggcgtggtggctcacgcctgtaatcccagcactttgggaggccgaggcgggcggatcaccaggtcaggagttcaggaacagcttggccaagatggtgaaaccccatctctactaaaaatacaaaaattagctgggcatagtggtgggcacctgtaatcccagctactcgggaggctgaggaagagaattgcttgaacccgggaggcagaggttgcagtgagctgagatcacaccgctacactccagcctgggcaaaagagcgagactctgtctcaaaaaaaaaaaaaaagaaaagaaaaaaccagggttttgattctaattctgtcactacttgtatgtcttctctgagccttattagtgtcagctgtcaccattataggttgattggaacatttatctgtcaagaaaagaaattatcccaaaacttaatatttcattctgaatttggttgaccaagactgtcaacacattactctagaaaaagaaatattttgtatcaaatttgcatgtttatacagaaaattcaagaatccttgaaagttagaacaggaaagagacattagaaacaatttcatcttgcaattacaaaaccccttgtttgacaggaggagcacacagtttccaagaggtcatttggctatctgtatgaccttggaagtagtctcctttccaggccagagatatatttgcttagtagataaatgaagctaatggatgatttggggaatataaaaataataattagtgtattttccccttcccctccgttttcatgtgtaagtcatatataaaatttaagattgtcttgaatccttttgtaattacctctgaaaatcactagagagtggttaagacttcaacatttttaacattggagcaggtggaatagagttcataaccctgccacctatgggacaactttcatttttacctgttaaaagatttggttctggtttttgtccagcatttattttgaatcatatgatagggtagtgcaaaagtaattgagggttttgccatttaaagtaatggcaagagctgcgattacttttgcaccaacctgataaataaaggtttgtttttctaagcttaaagtgttagaaaagctagatttgtagtttagctcagagttgaggctggttcttgaatttcatggagtataggattctgtttggagtgtgagtcactttaagatctaccagtggagagtagtcaaccctagctccttcagcatgggccaaattagatgcttctggtatagttgcactcaccttggacgtccatctttcatattggggctctttaggttctgacacctattgatgcttagtttttaaaaaataatttagggcctgggcacagtggctcacacctgtaatctcaccactttgggaggccgaggtgggtggatcacgagatcagatcaagaccatcttggccaacatagtgaaaccccgtctctcctaaaaatacaaaaattagatgggtgtggtggcacatgcctgtagtcccagctactcaggaggctgaggcaggagaatcgcttgaacctgggaggcggagggttcattgagccaagatcacgccactgcactccagcctggtgacagagcgagactccatctcaaaaaaaaagtattatttcttgtaatttctcttcaccttctgtggataaccaaaactttcctgtatctgaaggttatttgaaggcaactctgtggtgtacttaacctgcttatatagtggttacaaaaaaagtaaatttgtatattgagatgtttttgtatcttgaagctaagtgatgctgctatctttttaagaatgctttccaactaaaacattcaggtatcttggcacttatatgaaaacgcccccccccccccatcccactgaaacttgctgaaaaatctttccttcttttaccagttgtggacatcggatacccaaggagacgaagctgaagcaggagaaggaggggaaaattaaccggccttccaacttttgtctgcctcattctaaaattta

SEQ ID NO: 441 - DNA, 32742 bp, Homo sapiens
  source 1..32742: mol_type = other DNA
ggctggccgaagttaggcggagccccgaggcgggggaggcggggccgggccggcgcagggagagtcactcaatggacaggcgagaaagcaggaccggcgcggcggggcggggccggccgagtccctagagctgggggcggggcggacccagcggaccagcggaccacctgggtgctgtcgtagttggaggtggcctgaggagctcagttccctcagcgcccgtagcttcggcggagtctgcgcgatgggcgacccggaaaggccggaagcggccgggctggatcaggatgaggtaaatgttgctgttgcgtcttccccctcaccgcagtcacgccagcccgttagattgcaagttgcaggaccgctgtaggaaatgttattcgccgcggtcaggacaggcctgtccgcccgccctcgccgcagcctggcttcgtcgttgcgagcgccggggaggccgtccccggggagggcggaggaaggagctgactttgggtttgcgtcccgctcgctgctctgccccggggccagccaaggacgacgcttggaggcctcaggccggggtgagacttacccctgcgtttatccgcctcacgctctcccaccctccttccctgttttggagccctggccagggaaaccgaggcaaggaaagaggactgtggcggctctgctggagaggtgcataccatttgggatggtgacaaggagttggagaacgcgtgtggaaattgacacaggtggctggggtgaagatgacaggtagaaggggacacgaaatcctcatgacctcctcccagtgaaaaaatcagggtaggaggccagttttgctcaggcccggctccttaactaactgaatcttcggggtgtcactttcttcctttatacaatggaagtgatacttcagagagaattaagtaaaatgctttatgcaaagtgccacgaaaattgtaggtgcttaataagcccaagttgttcatccaagttgtttatgctgataaaagtacctaaaataaataaaccagaatttgttagactgtaggattgtatggtagtttaaactgttgctgtataattttcaaacactgtcattttgcaaatacttctaagccctttgtggacaagagaaatgctttttgtactactggaacctgttgctgtggtatctttgatttaatactgtgaagatttgggggaaacaaacgtttccaccccaagagattcatgcttggccctacatttctttagaaagttgtagattccaggtttgagattttattttatttaacttgatttttgtaagcatttagtaactaactgtaaatatccctcaagctttttcttcctgttttgaaacaaatgcgtttagtaccaacttccctactcaaaggggaaaattcagactgctgtttatgctaatggcaccagcagtgattcaggcttaacacctggatattacattttatttattactcctatctcaatgatacagacccgcaaggacagacagaattttagattcagaatgaattttagtggtccaaaagtttttaacttgagatgctgggttgcctgaagcactttgtttttctagatgccagagtgcataataggagacctgcatcagagtcacttggagtattttgtaaaaaatgtaaattgctggaccaacaccccaaacatagtgaatcaaaatctcttgagatctgcatttttaacaagtacttcaggtgatcctggtacacatattaaaacaaaaacaaaaaaccccccactgtcttaaagggtccatagatagactagaaggggctttataaatctcctgaagtgatatgtagattttgtatgtgcagatgtgaatcttctgagaaaggggtccatagttattgtcaatttctcagagttaactattgctaatctaattcatagtctattgtcaaggtaaagtttaggccagaaaacattaaatggcatgcccaggactcagtagaggagctaaatttaaaaccaagttcttgcacctgggcgggtatcccattggttccgtcagactttgtgggaatagaagtgaaaataatacttacaagtagtgtatgactatgacaacatacagctattttacagaagtagaagagacataaaggcaaagaaacggaagtggtggaattggggctggataggaggtaagagcctggtatgatgccagcctagattggggcatcgtaagtgcttgctgggaaatcttgacctaaattgttgtcctgacatgcccaggcatgtcttccaactgggtgaccagaaattgagtcagtcggaaactggaagtaccattctggaaaaaacagcagaatgtcactaaggaatgcctactgctaaactttatttcaaattctcatcactttacacctgtgcggctataataattttgttgtttctctatctcctatcttacctgccattcaatcctaattaccattgccaagttaatccttcattagaccagtgcctcagtgtcactgaccctgtgtcccccaaaaaactcccaaaagagtctcaattcctaccaaaaagcctggccaacacctcaggctggtgaagtcttgttgaagctgcttttttcatgctaactgccacatcttaattcaagtcctcatttccatctttgaaattggttccttagttgcttgcaaaatctagttttttatcaattaatcctatacgtggttttctgattagtcttcctaatgccacctctattcatgttaattcccattcagaaactctccatgactatttgtacccccaaatctgtggggtacagattttcaaactgtaccctgctatgaacgccagcacctggggttgggggcaaatggggagaattggagtatgagccttctagacctccgatgtttgaagatctttggccacaaaattgattcctaacctcttagtctgatttatcttaagagtctagatcctttgctttagccaaatcacatcattcctacttttgcttttccttgtcctgcatccatttcagcctgttttaatctcagctggcttctcttctttcatctgccctttaaatatcagcattctctaagactgtatcctcagttgtcttgctgctctatatgttctctctggataatcacatccattcccttggcaaccactaatgggatctccatcactcgtgttctgcagtgttatatttttaactgcttactggacatcttgaaactgaattcattatcttttctattcttttttttttgagacggagtctcactctgtcaccaggctggagtacatacagtggcacaatctcggctcactgcaacctctgcctcttgggttcaagtgattctcctgcctcagcctcccgagtagttgggagtacaggcgtacgccaccacgcccggctaatttttgtatttttagtagagacggggtttcaccatgttggccaggatggtctcaatctcttgaccttgtgatccgcccgcctcggcctccgaaagtgctgggattacaggcgtgaggcaccacgccgggcctgaattcattatctcttctaatgacctagttgactttgtgaggatattgtgtttgtaactttgttgttgtcgcctggcttggtgggaggagttaaattaaacttccgttaaacatctaatgtgagaagcaaaatttttgtctgatttatttatttattctccaggtactgagcaccttgtgtgtgccttttagatcttgttatcacccagttactggagctggaaacatcaagggcatctttaactgttcttgccccttgtcccaaattcaaatttttaggaagaataattcattctacttctgaatatcacttaaatcaatttttgtgtgtgtttctagttcaggcaagagatgggtagtacaataatcttttcattgttctttctgcctctaatttctcttctaatctagcaatgtttctagaaaagcgatcttaaaagatatatctgattatgttatttgccttattaaaaaccttcagtggctcccaatagcatacatcttagagttattagatgccaaagtgttttatatcaaagcagaccactttaacctccaaaattttttaaaaatcagattactactaaccaattttgctcttttattaaccctgtaaaaatatagatacccatgagctttgaaatttctatgtctagtaggctgctctctcatgcacccatatatttctttttgttttgttttgttttttgagatggagtcttgctctgtcaccaggcctgagtgcagtggcgtgatctcagctcactgcaatctctgccttctgggttcaagtgattctcctgcctcagcctcccgagtagctgggactacaggtacgcgccaccacacccagctaatttttgtatttttagtagtgacagggtttcaccatgttggccaggatggtctcgatctcttgaccttatgatccgcccgcctcggcctcccaaagtgctgggattacaggcgtgagccaccgcgccctgcccatcatatcttttttcacattttttttttcttctaaaatatgggttcttagattaggtccacagagggtactgtggagagcctagagtttcaagatgcatgaactttctgaaattgtattcaaatgtatgtttgtgcacgtttctaagcattatgaaataatacgtcatctctagcccagctcaaaggttgatgttggttaacctccttctcttcacattgcaaaatccctcataatacactcctaatccagctactcctcttaatagtctacaggttatcaggatagaacaggagaatgtgtatacaaatgtgactttcattctaacttaaaggtactagtcttcagcagatcagttatttatcatcatttaaaaacttcattcatcgtcagggcatttggtgctgaagagtgactgcttgtgatgtccttcccaacttccagtaacaaaagtatagaagttcccaactttcatactttgagtatatcccaaatttcagtaataaaaataacaaaggccaggagtttgagaccagccggggcaacatagcatgacccccatctctacaaaaaatttaaaaattatccaggtgtggtgacgtgtgcacatagtcctagctacttgggaggctgagacaggaggattgcttgagcacaggagtttgagactgcagtgatctatgatcacactactctgatctatgcactctagcctgggtgacggagcaagacccagtcttaaaaaaaaattgctcaaatatttgtggaatgagtaccaactaagtgccaggtactgtgctaagcacaagggattctacaagggtgaaaatggattttactttcaagaagcacaggaaattagagacaattaacagggaattaaattgcagtgagctatgtacttatatctggaacctaacccagacctttggggtgatgtgaagaggggaaaatgtgattgattttaatggttattgggttgtctcactgatgtattgtggtcctatgttaaattaaaattttctaaaggtacctagaaatctgagtacaggaagaagagaaattagcagcccatttacttagctaacatgcttgacacgatactaagctctgggaacatcacaacaaataaaaattggttcctcttctccagggctcaagtgctgtatctgaggaggcccatacctttaaacaagtagttaaaatcaagaccatctgtactgtgatggcagtaggtataaagcacgcaagcccccctgtatttgcatagccgtatgcttgtattttgggctttcttcttgctaagccttagcctcctctgctataacagttgctttggcgaggtgacaatgggtggacgctggagtaaggaacataacgggcctgtcacagtagagagagagacagttttggataggagtctagaagttgtatgtgttctaatcctggtttatacacgtttagcttatttgtatgtcctttgtttatactcattctcacacatgtgcgactcttctgattctcttctgatgttcccgctattttaaaaatatatgcatggcaccatttgctcttagagtgccatcgtgttttgaagcagtgtgaatacaggtatgtgtttctcactttattcacaaagctttgagacagcccacagtgagatcatatgcagtaatgttagaatgtaaatagcagtaacaaattggagtatcagaaggctaagatgaacaaaggttaagttgtaggtaatgagttttcagataagtattatattatttcagtgaagagtagaaagaaaaaacattaaagtagcttataccagtagcttattcattccagcaatcttatcagagaggctctaaagggacattttgttcacaaacttagaaatttgcccatcatgatgacatttatgggtctagctttgtacttatcctcaaactagcaataattacaataatttttgagtgcttactatataccaggctttgtttaaagcacttttaatcatcagaataaacctatgaggtaggaattattttacagctgaggagactgagggttagagaagttaagcagctttctatggtcacacacgcacttcctaacagtattagtcagctaccaggtaacagtaaggattcaacccaggcagacaggctctcaaaccaatgccgtctccctgacttccttagatgtatgtttaggtatgaataaagaagaaatgtctatataaaaggcgtgtttgtactttatttttcaaagagatcatcttcagacaccaacgaaagtgaaataaagtcaaatgaagagccactcctaagaaagagttctcgccggtttgtcatctttccaatccagtaccctgatatttggaaaatgtataaacaggcacaggcttccttctggacagcagaagaggtacgtggcattgcctccaagagcattcacatcctatagtgcagtgttccttcttgttttacaggatattgaataactttaacttatacattgaagaagatcagttgtagaagataagtgttggaattactgagactaaatatgatgttctcaatgttttagtttagattactatctataaacaagttttctgctgcaacaatggcatctaattctgccagatttttatttccaatatattagaacattttttttctttttcttttttttttttttttttgagacagagtctcactctgtcacccaggctagagtgcagtggcgcgatctcagctcactgcaaactccacctcccgggttcaagcgattctcctgcctcagcttcctgagtagttgggattacaggcgccagccaccacgcccagctaatttttgtatttttagtagagatggggtttcaccacattggccaggctggtctcaaactcctgaccttgtgatccacctgcctcagcctcccaaagtgctgggattacaggcatgagccaccacgcccagccaacattttctatttttaaacagacttttagtttgatatggccaagtaagacttgtctgactagtcttacaaggtcagcagaataagtaaaattgcagctgtagtcaaaaaatgagtgaaagctgtagcaactctgctttcaattgagagatttatctgattgtacaaaatgagccgctgcatgaagagtttgatcctctaggctgtggactcactcccgagtcagccaggtggaactcacagtgctgctcccagtttggccctgccctcagctacatcaaacgtgacagagttgccactaatagatcagctgtagaaagctttttgttaattccacctgggagatcagttgaacacagcaaactagaaaatatttgctggttggtaaggacagtggtcatgaaaatgattgccctgtagtctaactgaacaaatagttattgtcttgatctttaaatataatgggtgatacctatacagcactcttgttctgtatatgtttgtatatgtatctctatagatagatgtatctatttggatagatagatttgaatctatttttcaagacattaattctataaatgttaaacacatgctgttaagaatgcaggctatggggtcagactgcctaggtacaaatcctgtgccactacttactagctatggaactgggaaagttacataacctctctgtgtatcctcatcagtaaattaggctaattgtacttggctatttgtgttgttatgaggatttatgagatatttaaaatggtagttgacacttagtaggcactaaataaatgtaaactattattttatgcacagaagggggaaaatttaacctagaaatcagaaggcaccagtgtttgaagcttctattacactaattttacccacttacccatctttgttatattgtagtgttatattgtcaacatctttgttatattatagttgacatatagagcaaaaaaccaaaccacacaaaaacaaacacccaatattttcatacgtggtcataatgcttgacacacctgactgtccctaactgtctgtggtttttagaaaggttttttgttagatacggttcagagaacgagtggaatacgcaggtggctttttcgttcattatgttaaaaaggtacttaggattcttaggattcttgaaattcatttggaaattaacttgcatcttttagcaaaggtaatatgtgacctgtaacaaagcaacactaatttttaaaaactgaaatctacaggttggtacgtgttctgtagctaattataggacgattcaaatacatattttgaagataaatcaaacacatttttagttccacatatttttcatttacaaattatgtaagttaccatttagtcagcttaaatggttgagcttaattcttaaatatggctgatcaacagaaaccctgatcaaaagacaaaagtctggggtttgggacttttttctttaaagccactcaggcagttatgataattgtctagtttggaatcagtatttaaatgatgaaattgagaatttgctcaaataagaaaaagctaggcaggaagggaatatttccaatgtagtgtaaataaaatttagaagacctttgaaactgagtgttcaaagaaataattttaatatttaagaggaagcatcttacaatattaacatttaatatcaaatatataatatataagaggtcgagcatggtggctcacacctgtaatccaagcactttgggaggctaaagtgggcagatcacttgaggtcaggagtttgagaccaacctggacaacatggtaaaaccctgtctctagtaaaaatacaaaaattagccaggcgtggcagcaggtgcctgtaatcccagctactcaggaggttgaggcaggagaatcgcttgagcccaggtagcagaggctgcagtgagcccagatcatgccactgtattccagcctgggcaacagagtgagactgtctccgaaaaaaaacctgaggggttataatatatatgaatgaagaagatgtccttcagttaaacctgagttgagcttttaatagaacagaacttgatttttaggttgcatattttaaaagatgaagacaaatatttcctccaccctgctccgttgtatccccagtgcttagcacggtgtcaggtgtgcagtaagtgctcagcaaacacttaaagaataaattagtgggaaaaaggatttggaaaatagcatgtgattaaaagattgggacattagtcctttttggaaaggtcaaagagattgaggcttgaggctttgtgggtttttttttttttgttgttgttgttgttttgtttttgagacagagttgcactctgttgccaggctggagtgcaatggcacgatcttggctcactgcaacctcctcctcctgggttcaagcgattctcctgcctcagcctcccaagtagctgggactacaggcatgcgccaccatgcctagctaattttgtatttttagtagagacagggtttcactatgttgaccaggttggtctcaatctcttgacctcatgatccactcaccttggcctcccaaagtgctgggattacaggcgtgagctaccgtgcccagccgagggtttgttagagtaaataaaagaaaggcaaaagacaaagacaattacatatttcaactgttcatgaagttaattatgaaaaatatttaaaagattttttctgacaaaattgaagcaggatagtttctccgatcccttcgtgggtgggaactggaatgcgcatgctggagctagctggctgctttggcgctggcaggggcaaactccactcacttgaacccattgcgctcagccccttgagggagggagcatgcaggtgagcaggtgcaggagcttgggtgaattcttttgggcaccggcaggagcaaaactccatgcaggcctcatggcagcatctgtgaggagtacccacaacccttgaagccccagaaggaatgtgttatagttaactctcttttagcttttgctgtccgcagatggcttaagttttaacggctcagtgggccctctgccttttcacatggggcagttggtctccaccagtgagggcagagggtcagtgtgacagcttttagcatccacacctgtggcacccacgctcttgttcagcatccaggaaaaatcagatcacatgaacaaatcgaagggtggtgaatacagaggattttgttgccaatgaaagtggctctcagtgggaagaggagctggaaaggggatggagtggaaaaataatcttctcctggagtctgtctggccgtccccagctgactcctctccaaaggaatgctgtcaagctgtccctctgaagttaagctgcttctctccgacatccaaccgtagtctctgacatccagctgcttctcctcttctcctctcctcttctctgctggtagagcctggggtttttatgggcacagggtaggggagtggggccatgggtggttttggaaagggcaacattatagtgggaaaacaggaatacatgtcactttgggctgcagttccaggattgagggtggagtcctcgctggggaccatcttcttctgcccagaatttccctgcctcctgtccctatcaaaatgatgtctatatatgctgtgtgatggtatttggaggtggagccttgggaggtaattaggtcatgtgggtggagccctcatgaataggattagtgcccttaagagacatgagagatatgatctctctctctctgctatgtcaggatacagcaagaaggtggccatctgtaaatcagtaagagggccttcaccaataacccaaccatgctgacatcctgatcttgggctttcagcttccagaaatgttcaaaaagaaaaataaaagtatgctgtttaagcaacccagtcaatggtaatttgttatagcccccagaactgactaagggaaggtacatttaaagacaatttttggctgggtgcagtggctcaggcctgtactcccagcactttgggaggttgaggcgggcagatcacttgagctcaggagttcaaaaccagcctgggcaatatggcaaaaccctgtcactaccaaaaatacaaaaaattagccaggcatggttttgtgtgcctgtggtcccacctgtgcctctggaggctgaggtgggaggattgcttgagcctaggaggcagagactgtagtgagctgagattgtgccaccgcactccagactgggtgacggagtgaaaccccatctcaaaaattaaaaaaataaacaatttttaaattgtaggtttcaccaaattctaaagtacgtctcccttaattccaaagactaattctaatgaacattttcaaaaatatttccattcccaatggaagccatacctatgtataaactgctttaaaaaaaaaactgggttgttggccacctgtgatggctcacacctgtaatcccaacactttgagaggctgaggtaggaggattgcttgaggccaggagattgagaccagcctgggcaacatagtgagaccccatctctttaaaaaaacaaaacaaggccagctgtggtggctcgtgcctgtaatcccagcactttgggaggccgaggcaaacagatcatgaggtcaagagattgagaccatcctggccaacatggtgaaactccgtctctactaaaaaatacaaataattagctgggcatggtggcgcctgcctgtagtcccagctactcgggaggctgaggcaggaggattgcttgaacctgggaggcgaaggttgcagtgagccaagatcatgccactgcactctagcctggcgacagagcgagacttcatctcaaaacaaaacaaaactcaggttgttacctgcctggcattacttctggatgtaaaagtagactgattacctggcagtaaagtagcagctacagttggttaataggtgcctaattatctaacaccatagcacatattatataaaatgttaaagcagtgactgttgagattcattagtttatttacttcagtgccttcttgactagtttttactctcccccctccccttttagcccttctttcatttgcttcagtgccactagattatgttaatttgaatatttttaaagtacatcctggccagcttcttaattagccagaaaattcgattccatcttaattttttaaagataaattttattgtgtatgtttaaggtgtatgacatgatgttatatatatatatatataataaaatggttacccattatgtaacaaattaatatttcctttgcctcacatagtttagctgttcacccccccaccaagaatagctgtaatctactcatttaacaaaaatcctgaatataatacacttgttaacataacttttttttttatttctttgcagtgctaacatctttctttttccatagtttactggtagtgggatattcctacttaacaatagaagttagtttcccaaacactttgagaagaacttaactccaaattaaaatttttgaaaatctttttattccaggtcgacttatcaaaggatctccctcactggaacaagcttaaagcagatgagaagtacttcatctctcacatcttagccttttttgcagccagtgatggaattgtaaatgaaaatttggtaagatttttgcttgatttaacttttgttctcctttagcagttaaatgatgataatgtcagtaagattattaaattcagccaaagacaagatgtctaaaaaatgaactagatgaagcttaactctttaaatgtttttctgatgaattgcttatcctttgaccagcaaactattattaaatcaagcataaatgatatgaatcaaaactatttacagtgcattaacatgagtttgatttttactctcagatagtaagcttaatagagaacctgcaccttaacctttggagctctgtaatagaacactggattctggctccccattttaaaacttgattatggttgatcaggaggcataatttctttttaaaaagaattagaaagataggccgggtacggtggctcatacctgtaatcccagcactttgggaggctgaggtgggcggatcacgaggtcaagagattgagaccatcctggccaacatggtgaaaacccatttctactaaaaatacaaaaattagctgggcgtgttggcgcatgcctgtagccccagctatttgggaggctgaagcaggagaatttcttgaacctgggaggcagaggttgcagtgagccaagatggcgccactgtactccagcctggtgacagatcgagactccatctcaaaaaaaaaaaaaaaaaaaaaaaagaatatactatgcaaataatttaccatggagaattgatggataaacagtactgcctaggatactgcttaaaataatccataaggtctttctgacctgtttgttacatgacaggcagtttttaagcgataatgctgatgtccagattctgatttgcagtgtttaatgagagcctatagaactggatatatctattttccttatcttcttaggtggagcgctttagtcaggaggtgcaggttccagaggctcgctgtttctatggctttcaaattctcatcgagaatgttcactcagagatgtacagtttgctgatagacacttacatcagagatcccaagaaaaggtattgttgggattttatttacaaaatattgcttacggcttggttatgttcagatcagaatttattccaaaactcaatgttaaggaaagattattcaagtatggaagtttctgagcataatattttctattgcttaataatgtattgggttttaaaaaaaacttgttatagaaccagttaacctttagatattttatctttaagaactgttcagtagcatcttctgtttagaaattgaatactcaaatttagctggttttgtatgagaccagattcaaaccaataatttgagttttatttctgttctatggacatgtaaaaatgtataaaaactacagatctggtagcataccgtagagttacaattattatctctgattaagtttagtccaattaagaaaaacaagtgaggccaaggcatggtggctcatggctgtaatcccagcaccttgggaggccgaagcaggtggatcacgaggtcaggagattgagaccatcctggctaacacagtgaaaccacgtctctactaaaaatactagccgggcgtggtggcgggcacctgtcgtcctagctactcgggaggctgaggcaggagaatggcatgaacccgggaggtggagcttgcagtgagccgagatcgtgccactgcactccagcctgggcaacagagcgagactctgtctcaaaaaaaaaaaaagaaaaacaagtgaataactttgctgttcattcttttgtttttacagggaatttttatttaatgcaattgaaaccatgccctatgttaagaaaaaagcagattgggccttgcgatggatagcagatagaaaatctacttttggtatgtggctctaatttatgtatgatcagatttgcctaaggtgatatgacagtattttatgtggtgtgactatccagtacgaatcaaagttacagcatggaaaaggagtacaaatgtctcaaatgcacctttaccaaaatcattattcctaataattaattagaaagtggtgataaagctgttacctattctacttaataagttggaagttgaaaagttaagatgttagtgcataattacagttaaacaggagtcagtcacatagcaataacaagagtattatagcaattcacagtttgtatctggcttttaagtttattttaggaatttttttttttttttttttttttgagacggagtctcgctctgtcacctaggctggagtgtggtggcgtgatcctggctcactgcaactgctgccttccaagttcaagcaattctccctgcctcagcctcctgagtagctgggattacaggcacctaccaccacgctcagcttatttttgtattttttaatagagatgggggttttgccatgttggccagactagtcttgaactcttgatctcaggtgacccgcccaccttggcctcccaaagtgctgggactgcaggcatgagccactgtgcctggcctattttagaaatttaaagcaagtgaaatcttaacatttttcaggaaacaaatatctagtttctcaaaaactaaagattagtgtaatcaactaggacaaaaccaatttgtaataacaggcttatttttcataggtaagctaaatgcaaacacccttctggctgagttgagatcccatagcatttttttaaggaagtgtatcatattatgtcttatacatagtagttgctcaataaatacttactaaatttaattaaaatatttatatatttcatttggatagctctaagtacccatctcattcttatctatttttaattggtgttctttactttctggttttattctttatgtgaggaagcaagtctcaaaatttttggtctcaggcccctttgtactcttaaaaattattgagcactccaaagtgcctttatttgggtaggttatgggtattgttatttttgcattagaaattaacattgagataatttaaaaatatttattagtgcattctaagatagcaataatcaacccattatattttaatacagataacacttttatataagtttctatattttccaaaaaaaagaatagcatgcttttaaatttctgtaactcttttaaatgtctgacttaataggaaacagttggagtaccatatctgcctttgcattcgatttgttgcagtgtatatgtatatagtatatgcctcatttaaatatgtattatagttagaaaagggaggaatattttatttagcttttcagattattacggatatgtcatgtagcctctagaaaataccattgtaaagtatgagagactggtagttaaaaaaaaataatgccttaatgttattatgaaaatagttttgacctcacaggtctcctgggtctgtggatctctcagggactcttggaccacactgaagaaccagtgatatagtgcgtatatgggccagcatgtagtataccagggatgaagcagatatgtttgcctccttgccttcagttcatttcaagaatgagaaaagcagccaggcatggtggctcacgcctgtaatcccagtgctttggaagactgagacaggtgatcacttgaggccagcagttgaagaccagtctgggcaacaaagcaaggcccccatctctacaacaaatttaaaaactagccaggtgtggtggcatgcacctgtataccctgctacttgggaggctgagagaggaggaccacttaagcccaggtgtttgaggctacagtgagctatgatccactgtgctgcagcctgggtgacagagcaagacccagactctaaaaaaaaaaaaaaaatttaaataggaatgagaaaatcactggttctcaatatatgtaaaagtcatctggagaatttgtggaaaaacttttaagaatcctgccaaaactgatgtaggaggcccaggtgggactgaggaatctgcattttgtattcagctgattccctcacaaggagcttcagaaacactttgggaaatgctggctttagagaaaaaagaagggaagaggcagagtgttccatatacgctgaaaatattagtatgggtaggtagtgatgaaaaatgatgagcaggcccacggaaagcatgtatttcatgaactacccaagaaggacaacctagaaatagagaacacagagaaggctggcagtcaccatgtaactacatgaggactccagctagattctccatattgcttaatctcaagggaaactccatttcaggttctaatatagggtctcagaggaaagaacatgttctaaaattgtggaggggagttgaatgggtgtagagtggaacagggaaagaggaaagagtgaagagtgcattggtggctctcctttttgggagtggagctaaaagacagtaacatggaaatattgccttgctttgctgcacactgctactttcctttaaccagctgaggaagtgctgtttcatgaactgatttggctacctgcaccattagtagctctaagttgaaaagggcagctctttcacctggcttagggttttgcctaacatttttggtgaccttcttagtgccttttgcactaagatccagcgtagcaactattctttccttatatccagactcttataagcctttatttttagctaaagagaaactaagaatatttctttaaaaattattagcttggaagtttatgttataaggagattcaattcctatagagcaaaaattttcctaattatatatctgcatagatttttaaaaattgagacatcctgtttaatttttaaaatatctttaaataacttcaaaacaaatatacagattaaaacttaatatatgtaatgaaatttcatttcaagcctcaaaaaatattagctacacaatcttagtacattgccatcatagaggtcagctgtatcttaaaaatgtatccgactttcccctctctaaaatgaatcatgaggcctttacattcactatagtttttaggagaaatgttccggaaccctctttttatttcacatatgttctcaaaaaattgtaaaatgtaccacttataatcctttaatcttctccaaaaaagaatagccttctataactatgttatgattttcattctttagtattcacattaatgtatagcatggttacaataccaattttccactaggcacagtggcttgtgcctataatcccagctacttgtgaggctgagatgagaggatggcttgagccagaagttcaaaccagccagggcaacgtagagagaccttagctctaaagaaataaaaaaattagccaggcatggtgacgcacgcctgtagtcccagctacgtcagaggctaaggtgggagcattgtttgagcccaggagtttgagactgtttgaattattaatgcaccattgcactacagcctgggtgacaagagcaagaccccatactgtctctaacaaaaattaaaatatcaatttttcttttattcacgtttgtatttaattatagtctactttcctgacagataattatccttatgatgttaccttaatgtcaattaaaaacgtatcaataagttatcttaatagtaagataaaagatacagtaagttatatgttaaactaatgacaagcctcatcttaagaatagtgatgatgatgatgatttttgagatgggctcactctgtcgcccagctggagtgcagtggtgtgatcatagcgcactgcagccttgacctcctgggctcaagcattcctcccacatcaacctcccaggtagctgtgactacaggtgcgcaccaccacacccagctaatttttaaattttttgtagagatggggttttgctatgttgcccaggctggtctctaactcctgcattcaagtgatcctccttcctcggtctaccaaagtgctggtattacagatgtgagccactgcagcacttggcctagaatggattttaatgtcttctctcatctagtacttatataggttccattgagtcagttcaggacttgtttattaagtgacttctttgggtgtggtcctgtgacatgtactgaggtataaaccgtgatgtcacctatgaaaacggtttgtagtgcactcaagcactcagctgcctgtatctcaccgtcttatagaccaaacctttttccttagacatatataaatacttttctcaggcatatgcagtgtggtgacataagcaccttgtgaatgaccttttgggttacagctctgatcatcctgcataatgttacagatatgatgccactgtagacaatttattaataggagatggatttctacgaagtccttgcctaacaatgagtaacctttaaaattggccattttgtatttagcagaaaacagtatttttgcttatgttatggggacattttatctaatagatatatttattatcctcagttgggtttatctattttttttaaattgcagatacacgccagtggtttttgaaatgtttgcagatggtctgtaagataccataggtttctaaaaatataaacttaagcaacctctcctcctttcagaggaagacacttgtcataaagtctaccttctactctccagtacacacacacacatatgtatacatactgcacacatgtgcatgtacctgcactcatagtcatgtgtggtgcacacgtaaatcacctcttgttttgagtatggaaggtccttctttgtccaacgccaagacctacagaagtccatcgtctgacagaggatttgaaggaggcatacctttctgctccagtaggtagaggtggcgcattttctcctatggagatctttggccatggcactaacttgtgtattttgtttctttgcaaacagttgtggtatttattgttatatatgtgtatatatatatatgcaaatgtttgcagtatatttcaaaaattgaaacgattttatgtctcccaggggaaagagtggtggcctttgctgctgtagaaggagttttcttctcaggatcttttgctgctatattctggctaaagaagagaggtcttatgccaggactcactttttccaatgaactcatcagcagagatgaagtaaggaatggaatgtttttctagttatatttgtattcatatttgatgttcatctatttttcttttccatctttttttttttttttttgagacaggatctcactctgtcacccaggctggcatacagtggcacgatcatggcttgctgcagcctcgacttccctgggctcaagcattcctcccatctcagcctccattgttgctgggacagcaggcatataccactacacctggcctaattttggtatctttagtttttttagagacagggcttcaccacgttgcccaggctggtcttgaactcctggcctcaagcgatctgcctgcctcagccttccaaagtgctgggattacaggcatgaattactgtacccagcctatttatttttctttctcctgaaaaatgctgtggtgacatgagtatcctggtaattaaaataggaagtcacgtcatcttgcttttaagacactgcattttcctcctgtgtctcttaccatttctcctcggtctcctggtcattcttaatatcagtgtcctcctaggttcccgcactggccttgctccttcactatatatgccctcctggctgatcttgtttactgtaatggaatcagctaccatctaaatgctcataactccgaaaacctaccctttgtcccagatattctttcctaagtgccaaacccatgtatgctagtgcatgttagacattttctcctttaagttcccccaggtatctcaaacctgttatttcagaaatcaaactcatcatctttctccaaaaatttgttgttccttctgtttttcctatttcattgagtgtctctatccttcttttccaatcatctaatttaaatttaggaatcattttagattgcttcttctttttcagccacatccgatcagtaagtaagcctggtctccctctgcctgctataccctttctaccctttccatctttcttaccacccctttttttttttttaaacctttttggattaccttctcagaagagacatctcaaaactttcctgatcaattaggtgaaactggccactctttcctttatgtatccatttgaaacctgaacctgtccatgtcttggagtccatagcatgtattgtacttcttctttctctcttctgctagactttaagctccttagtgcagggactttgttttatttatctttctgttctcaatgttttggctattatagccattcagttaacatttattgcctacactaatccttaacttctctgaaccttggtttcttcaactataaaacttaaccgttttgttagaatgcaatgaaatagtgtatgtgaaagtatttttttaaatgccataaaatgcttcatataattactttttgctttttcatggctttaaatttttaataacttttattagaaatgtcatataggattgttatagagaattgagagaataaaaaattaatctcaacacagagagaactacatttactgttttgttgaagtatttctttatagactttttttctacatttaattctatttagatatataaacatattttaatcattcatatatttaggagttgagatgttctttttccacttggcaaaatactgcaatcatttttctgtggcattaagcaccttttgaaaatagtagttttgttaaatgtataatctaatgaatgaatcatttatttgacttttataattagaaatttagattatttccaggttttttgttttactatagtataaaatgaatacctttacatatatataagctttgtcctccctttatattattttcctaagcttgatcacaaaaagtagaattactaagttataaagcattcatacatacttacttgcagattttttttccagtaattttataacaattttcagccccatctagcaatgtatgaacattttctaccatactctcaccagaatttagattaatttgctaaatgtttggcaaatttgatagggttaattggtatctcattattggttttatttgcattgtttaattattacttagattgaacacttttttcataatgatattagtgatttgtattttttctgtagttgcctacttttatcttttgcctttattactggtgcaatattaacatttttgttatttaactctgagtgctctcactattttaaggttatttcttcagtagtctattatacttaaaggaaggggtcatgcttgcttgttcattggtttattcccaatgtacagtgactgattgggtcctttcaacaagtacacctttatagcatttgttatatttatagcacaaatataatataaaatacaaatttgcttatatttatttcacatattttcccaatttatcctttgctttttaatttttgttcttttaacatacaaaaccttaaattttatgtaatccacttccagagataaattaattacacattttttttcttggttttttaacctttaagtctgtaatgcaattggaatttgtaaagtaggatttagcataaatataataaagaataagttagaatttaattttattttaaacactcttgggaagtttttccaatttgccttgttaagtaatccatcatcctttcttcattgacttgcgctgtcttctttattatctattaaggttttattagactaaaatcggtttcatggctatttttacttccttattgacctatcagattttattctataacaaaccattttaattattatagtttcatatattttaataatttgtaggataaatatcgaaacttttcttttgaaagtgttcttacaagattctgtccgtttattctattcttttttttttttttttttttttgagacagggtctttctctgtcacccaggctgagtgcaagtggtatgatcctggctcactgtagctttgacctcctgggctcaagcagtcctcccacctcagcctccttaagtagctggaactacatgcatgtaccaccacatccagttaattaaaaaagttttgtagacgcagggtctcactgtgttgcccaggctggtctggaactcctgggttcaagtgatttcccaacttggcctcccaaagtgctgggattacaggcatgagcccccgtgcccagccttccagattaacttttgaattaaaaacaatcccatttaggtacttgacctctgtgcccgcttgggactctttgaagtgtacttttctttcttttctgctctaaagccttttaaaataaattacaaacacacacacaccaattccattgggattttgattggtattgctttctgtaataagttacctgtcagttttcatcaacactttaacatctttcagccttgatggtaatttcttctttcttccttttttttttttgaaacagtctcactgtcacccaggctggagtgcagtggcgtgatctcagctcactgcagccttgacctcccaggttcaagcaatcttcctgcttcagcctcctgagtagctgggactacaggtgtgcaccatgcctgactaatttttgtattttttgcagagatggggttttgccaggttgcccaggctggtctcgaattcctgaactcaaggaatctgcccaccttagcctcccaaagtgctgtattacagacatgagccaccatgcccagcctgggaattccatctttctatatccgacctctctcttttttcatgttgaatttttgaaattttctttttttttttttttttttttttaatatttagctctatactatctattctgtgttttggagtcctgattattgtaggttgactctccttcacctattctccaattacttaagattctattgcatttgtataaccatactcgggtatttcacaagtttattttcatttttggttgagttatctgtaagatcatatctgctttgtatggcttcaggcgatattcatcattgttcagtttccattttcttatttatttattggtattttttatttacttctatttatttatttatttatttattttttatttttttttgtagagattgggttttgccatgttgcccaggctggtcttgaactcctggactcaagcagtctgcccaccttgacctcccaaagtgctgagattacaggcatgagccaccgagccccacctcagtttccattttcattagaactgaattcatttttatcttgagcctttcttatttaattataaatgtatttttgaaatctgagtttcatctgttatttaaatactaattatttttcaatcattccttaattatttttgaaatttaaaaattaatgaattttcatttcaggctttcttgctttattttcctttccaaaatgcttttatttgcagattttgtttgttcataaattaatttttctataatgttgatgaactaagatttgctggcattgaaaatttttattataggttattgtattggcatttaatgagatttgaaagaaggaagttcctagtcctattaacccctcttccattttccagaagttctgtgttatattcctagaaccactttatacaatgcttgacccatcaccatatgcaaatagctgattaaaagttatttgacaatgacatttttcttcccttttagggacttcactgtgactttgcttgcctgatgttccaatacttagtaaataagccttcagaagaaagggtcagggagatcattgttgatgctgtcaaaattgagcaggtaaaccgggaagtttgtgtaattagcacatctctctttctctgatgtttgtaccactattatattgactcataagaaattctgtaggtcaataaaaataccagcaattttattctggtcagcctgacaataccaatacatgatatattacaattattatgtcagtttacaatttgctttagtaagtcagtctttattatatattaaggttttatgtatactaaaacctgtttcagggctatttttctgtcttattgatctctgtcaaattttatgccatgatcagctaattatagtagcttttttttttacatttttagtgactggagaacagtgatgattttttatttgttttgtatttttaataacgtagcaaggtacctagcttgaagcatacacaaatttttatagaatgaataagtaagttaatgaaaagtaacaattaagttagggtatgtacggatttcttactagaaagagctagatgcgctacttaggatgtgtttttatcattctgaaattgcttttgttttggtaacactgcgtagtttaacaggcgtagtttgtatattgaaagaggaaaaaggcataacaggtactttggtatctttaatcattttgagaactaaatccaagtggttaatatatttttatttttcctctattaacgctttaccactatatagtctttcagtatggttggagctattttatctcccaacccccaaatctgtttgtttcttttttctcattttctttgttaattgagtttttctttctttcccagctcccttccatagtcatgttcttcatgatgatcatctttgaatctttttccagatattttagaacaaagtatcttttttttctattgagaaagcatacgaatccgagtcttatatctgctacttcaagaaatccagtaatttggtagttcgtttccatttattttggctcttcgaaaacatgaaaaaatgtgaatagttaataccccaaatgtttttaaatatacggacatcatttgccacattgaaagaatttatcctaatatactttccttggacaaaatcagtcttagaaataaaacgaaagtcctctttctatttggaaaatacatatttatagttttgtttgtactttattctgtttttgttttcatcccaggagtttttaacagaagccttgccagttggcctcattggaatgaattgcattttgatgaaacagtacattgagtttgtagctgacagattacttgtggaacttggattctcaaaggtaatgtgtttaaaaatgtgttactactagttaaaatattataggaaagcaaggaccctaaagtataatttactgaaagcatttgtaacatactattctattttttaaatgtcaatgacagagacttgttttgtatgaacaaggttttgcaaaatcctttgaaatttaaaattaataactgaagtaggaggctggtaaaatattagaactaataagctcaataaattattttgcaataattgtagctgtatatttaataggattattttcaaggagttaggtttaatatgcatatatatattcaccctcatataaatcgccatgtgtctatattgtggtttgggagttaatacttttaaatagggaatagttattaggaagacattaactgtcacaatataactctttgaacagagttattcaagttatttttgtcatttatcagagataatgtacctgaatttcatcagtgcggttttcccattacttaagacatggagcctgcagccacactatctgggtttgaatcctggttccaccactttctagctgtgtgacctttggcaggttgcttaactatctcagtttcctcatctataaattagagatagtaataatatttactacaaaggattgttgatgagttgatacacttaaagcacttaaaataatattagacacataataaactcacactagatggtcactttgtacttaagtgaaacacagaaattcactatgtactataccatggtaattagaaatacagattttgatttcttgtcatgaaaatgtaagttcaaattatctttaatgagaatccttatgaaatctatgatgctgtggtaatcattacctatcttgctaatgttgtattagcagatatagcagaattatattctgataaccacccaggtacttaatgaaaaagtcaagtggggcgtaggtttttttggtaagataaactacattttaacattttagttgcaagatcctctctgtgtttactaattaatgagaaatcaagattataactatattaatataatctcttaaacttataaactatgtatattaaaagaaattgtgtttgttcataacttttaccaatatttttgttattagaaaatgaatttgcttatttaagccttacagtgaattcgctattctttaacccattaccatatcctcacatccacacgttcatgttctgctgcttattagaaaactgctgacccttgggtctaattttccttttgggaacttgctaactgtaggtatgtaaaacatgccacctcctgcaggagaaggtctaaacacaatgtaaaactttgtttttccacaggcttcaaaatatctgagtaaattctaaaaagcagaaattatagaggccttagatttttaatgcaatgaaagtagaaactgatttaaaaattgccaaaaagcttaatctacttagagattaaaaatatatccgttaggccaggtgcggtggctcacacctctaatcccagaactctgggaggctgaggtggaagaatcacttgagtctaggagtttgagaccagcctaggcaacatggcgaaatcctacaaaaaattagccaggcctggtggcatgcctgtagtcccagttacttgggaagctgagctgggaggatcacttgagcctgggaggcagaggttgcagtgagctgagattgtgccacggcactccagcctgagcaacagagtgagaccctttctctctcgctctctctctctctctctctgcatatacatgtatctcctttaaaatgagatttaaaatgaaaataaaaattaattgaaaatataaagtaaatgacaatatgattactatgtatcaaaacttgtaggagctgggccttgtggctgactcctataatcccagcacttcggaggccaaggcaggaggattgctcgaccccaggagttccacactagtttcagcaatatagcaagaccctatctctacaaataaaaataataataaggctgggcacagtggctcatgcctgtaatcccaaaattttgggaagctgaggcaggtggatcacctgaggtcaggagttcaagaccagcctggccaacatggtgaaaccctgtctctactaaaaatacaacaattagctgggcatggtggtgggtgcctgtaatcctagctactcgggaggctgaggcgagagaatcgcttgaacccaggaggcagaggttgcagtgagccgagattgtgccattgcactccagcctgggcaaaaagaccgaaactctgtgtcaaaaaaaaaacccaccaaaaacaagccacttaatttagtttgtttttttggtcttggttactttgtccatgccatgaatgacttagatctaattttttgaaaagtcttcagttctaacatctagtgagtctatggctattggttcagtgccctttcactgtatcttgctgtatattacagctccaatattccctcactttttacacacaatttctgatggagaatttcatagaatttcactcagccacacccagcatatgagtttttggaaaaaagatacataaatatttaaagctttatttaaagattaagtcacatagcatgcaattcacccatttaaaatgtacaattcaatagtttttagtgtagtcacagagttgtacaaccatcataacaacctattttagaacatttttatcaccccataaagaaactgtatccctattagcagtcagtcactcctctttcctccccttacccaccttgccttaggcaaccactaatctaatttttgtgtctgtagatttgcctattctgcgtctgtagatttgcctattctgcatattctatttcatacaaatggaatcatataatatgtggccttttgtggttctcttctttccttagtgtgttttcatggtgcattcatgttgtagcatgtatcagtgctttattcctttatatgaccaaataaataatattccactgtatggatataccaaattttatttatccattcgatggacatttaagttgtttcctcttttgatctattgtgaataatgctactatgaacgttcatttacacatttttgtgtggacatgttttcatatctcttaagtatacacctaggagtgaaattgctggatcatatggtaactccatgtttaatcattagaagaactaccagactgttttctaaagcagctgcacaattttatattcccaccctgtatgagggttctaatttctccacatccgcaccaacacttattacctgttttttaaaaaattatagccatccgagtaggtgggaagtggtatctcattgtgatcttgatttgcatgtctctaatggataaggatgctgagcatcttttcattttgtatatcttctttaaagaagtatcagtttgtctatttagacactctgcccatatttaaaattgggttacttgaatatatgtttatctgtagtgttcatattttttgctgggatactcctaaattgagaaatcctcttttgttactccttgtgaatcactgaaatatcccacagtttccatcaagctgtatctccaagtctgcttcttgaattcttttttttttgaaatggagtcttactctgttgcccaggctacagtgcaatggcatgatcttggctcactgcaacctctgcctctcaggttcaagcaattctcctgcctcagcctcttgagtagcttggattacaggcatctgctaccacgcccagctaatttttgtacttttagtagagacagggtttcaccatgtcagtcaggctggtctcaaactcctgacttcaggtgatcccacctacctcggcctcccaaagtgctgagattacaggcatgagccaccatgctcggccttgtttcttgaattctgaagcagtaaaaaagcttcttgttagcatagtccccctttttgtttggagacatctagtcactatggataacatttattctgtcttccctgatcatgttcccttaatgacaatttgttgattatctgttctcttataaactaagaaacatacttagaaccacagtggattgttgctaatttaacattttatagtatcatgtatgtctgactaatagtaatatctatgaaaaatgctcatggtgtattggatatctcaagctgtgagaacattttctattggttagtattaaatatttcaattcctgaaatagttgtgtttttttttctatttattagaataccagagatgctagtacagtttcttgaggagattagtggttgatcttgggtcatcttaaaatttgtcagccttgagtacctccagggtcttaggggaatgatatgatcttgtagctgactagataggttttgagaaacctgacctctgttttggtcatctttgctcttattgtggatgtaatttgatctcttcagaatgtctaataatatttctttcctttttaggtttttcaggcagaaaatccttttgattttatggaaaacatttctttagaaggaaaaacaaatttctttgagaaacgagtttcagagtatcagcgttttgcagttatggcagaaaccacagataacgtcttcaccttggatgcagatttttaaaaaacctcttgttttaaaactctataaacttgtcattggtaaatagtagtctattttcctctgcttaaaaaaaattttaagtatatcctttaaaggactgggggtttgctcaaaaggaaatccaaaacctattctaaacaatttgcatttatataattttcctgtttaacaacaagagtgtgacctaaatgcttttgtcttgtcactgaaataaaagatggcattatgtggttaagagcatggggcgaggggtcagacatgagtctaaggttctgcccttactccagtgtgtgacccttggcaagtcagttaatcttggtaaacctcggtgtacttatctttaaaatgggagtaatagtaggtcctaaattcatagagtggatattaggattaggatgcaaaaataaatgcttaaccaacactactactgttagcaccactactaattatcattcattgataatattaattgcaatgatgttgtaataaaatactctcatttccttaaaataattgtgattctaggtcctaggatctagaattagatctttgtatttttaatgcttaggggaagaatataagtatctccttaaaaagaacataattctcattcacgcaagaataagttctttgaattccttagtatgtagtgaagaaaatttagttgttagttgctttgggaagcctacttatggagtggaaaccaggaggttatcatggtagttgaccttataagaaaaatgattcttcttcagaaattaaaaacataactattgccagatttagctctggaatgtttagaatcaggctagaatagcattttccaaagaatattctaagagctattagctcctctagatatttttttgggggaaaaaggggattctgtggtcagatgagtttgggaaatgctgaacacttcattcttctttagcaagtacagtcagtacatcaaagactgagcagttcagtggtacataaatttatctcgccctgcatattcccaacatacttaacacagatgttttttacctgttaacatctcacccagctagtgttcctcagaacaaagattggaaaaagctggccgagaaccatttatacatagaggaagggcttatggactgagaaagggagaacatggtagggattattgaatcatttcaaatttataccagcctgaatagtgtaccagcaattgacttaggctgtgtttctttatggttttaaaactcttgagctgttataagagatagttcttttaatgtgactatgcaacatgatagccaatggtgagggaaaaggaggtttctctagaagagtctgatgaaaggccgggaaccaaggtttttgagaagtctgcccctatttatttttagtaagtatcaagaggtagcctgagcctagttagagttagacctgtctttggatgaagaagtcttaatactgaaatactgaatttttaatacattattatttggtattctgtataccccttcaagcagttgtttcccattcccaacaaactgtactttatacaattctggatgctaaaacttagagattttctctttgcataaattttggctccattctttccataacaatctaatcaaaactgggagttctcaagtgaatgcaaaaggagcaggccataactttatttgttagatacactgtcagaaacttgagatcttttggcctatgataataccattaatttttgcattgcttcagtttgccaagtgtttttaca

SEQ ID NO: 442 - DNA, 32742 bp, Homo sapiens
  source 1..32742: mol_type = other DNA
cgcgggcgtaggcggagcagcgcgcgccgcggtcagctgactgctgggctggcacgtgacttgttctgtgttcgcttgggtagaggaagccgtgaggccggagcttaggtcgggaagggatggatcgctgagccgatagcgtccgctaggctgtctgcctcggtacctgttactgctgctacttcctcgtttgacaccttcctgggtcagtgagcgatggctctccccggatggggagtcctggtcaggccgaagcatgagctccggtcgctgcctgggagggacgcgggtgggtgcgggggcagagaccgtggcgttggagctggagctggctgggtggctgtgtctggtttctcggcgccaattcaccgtcttgggcctaggttccgtctctaaggaagagaaggagggaaaaagagaaagagctctcgtgggtagttaatgacaggcagaaaggagagatacagcggtctgggatctttcttcttgggtaggaatgcacgccgcctgattgattgaggggaatgaagtgataggtccaggtgaggctatggagtggtgtgtgtgaggtcacagctagcgcaagtgccttcactgggtgtgtgttggggggggcgcgggtgtcgggggtcgggggtggtgggatgacagtttaaaggcctaggagcccctaactgcaggcaaggaaccctcacagagtacacaaggtccctctaggaatgagaaagaacaggaatccagagaactcaactattttttagtagaatgggggagggtaggcaaacaaaacagaacaaaacaaaacaaacccctagaaaagaacttggtgagagtcacataaggcatattgaatcacttgagaaacaggagtaagggggaagctagtattcttttcagaggaaaattctggtatgttagggaaaaatcacatgcttcagtgcgagcccagtacttagcgccgctctgggaatggaacgggtgggatgtgaacagtctatccttaggagttagcactaacgttggagagaaaagtctacacacaggacacgttaaaatacgatgcagtttatgtatacttaccaaaaagagaatgcgaagtgctttgaaagtgtggagcaacgacacatgtgtaaactggcactatgggaagatattctggaggaaagaaaacttgagtcttggcaagccctcaggatttgaacaggttgagagaaatggggataattttacaggcagggaaagccacaggatttgaaagcctgaagatgggggtagggaatgcttctggtggagtcagaagtagcttttacagtggattgcactgcggagaagtgggaaagaaagttgggagtcaggtaacgaggacttttgaatggtagtcgtttacttattcatgcaaataatgtgtactgaatacatgctgtatgcaggtacagtgctgatggtagggtttagaaaattgtctttatagagcttacaggcaagcagaggggatggattttaaaaatcaagcaagcgtgaaatgtgctttgaaggaataacagtggtatgaaagagtgtagtaggggcatgtgtattatggaagattttaaaaaggcattgctaagaatatgactttttaaagattaaaacaattttatttatattcttcataccctctcgctctgagagggtatgacttttgacctgagatctgaaaagagactgaaaagggaatgtgaaggtgtgagtgaaaagaacattccaggcctggcagggtggctcgtgactataatcccaacattttgggaggctgaggtgggaggattgcctgaggccaggagttcaggaccagcctgggcaacatagtgagaccaccgtctctaccaaaaataaaaaaataactagctgggagtggtggtgtgtgcttgtagtcctagctgctcgggaggctgaggcgagaggatcatttgagcccagtagttcgaggctgcagtgagctgtgatcatgccactgcactccctcctgggaaacagagctagaccctgtctctgaaaaacgaaaaaggaacatttcaggctgaagcaacagcgtatgtcaaggccctgaaatgtgaagaggaagaaagcttttcagcctttttgaaaggctagcatggctgaaacggggagggagagaggcaggtggagaaagctggggtcacgccaagcagagcttttattctaaaaacagagggaagccagtgaagattacaggcagtggattgagacaggttgtggctttttttttttttttttggtgggggggagataatgtggagggtggcaaaagtgaatgaggggagacccgctcaggggaacattgttgtaatccactgaaggatttgaagacaagataccttctctctccactgaggacttcagaatgtttaactgtattcacttttagagggttcaggacttggggaagggaaagaatgattcgattctatttgtacccttcacagggtagtcgtaactaccctcgaggcagtcctgaagtacatagcagaggctcttttgcaaaaatttgttttggcttttcaaatttatccttttgtaaggtcatctatttcagaatatcttttattgaaatatagttacagggagggatcactttcatatttattttgttctcacagttctttgaaagacagtggatgaaaatgctattcattgtatagatgggaacctggagctagagaaacacgtaaagtgatttggctgagtccggagtaactgccacagttttctgactgctgatgtattcctgctgattacctacacagtactaaccacagtcacatctagagaaaagggcgagttttttgaagtgcacagtagtctttgattcagcatttttttttggggggggggaacttctccctgaagagtcagcacttttgatgaactttttctagtagaacagcttcaaaggaattggcagtggtgggctatgtcttatctataatcttggatagagctgttcaatttacagttcatctggaggaaataatgaacaataaggtgaactgaaagtgctcaggttgtcaatcacagttctttggcaaaaagtgagtctcaaattatgctgaagactgagcctcagggttctgtctcagaagtcctggatctttttctcttttggtataccttgtagggactagataaaatctaaagaaacagtactcaggatctaactaaatgctgagagctagatagtgtaattcagcttttaaaacttggcacaaaatactcatttttatttttttggtatattagtcttaggagcctcatgtacattagttttttcaacctaaaaagaaacttcagggcttcaaaaatctgattttgtgattatttccacaactcacgagataataccattggccaactggaatgccaaagtaaacctttgccaaaggtctccatgtagtttacccgtccctaagcagcaagtcttcttttgaacttggttctgcttaggagtactacagttttgactgagtacctcctacttaaaattttgctcttgtacatatttaaatctgtctacaggttacatctttttcactctttgggtgtggaattatatatcatttataaattaattcatgttagatttccatttttcatcaatttttaaagacagacatagtataaacattagcatagtgcccttgggacgcttaggcagtgaaccaaggcagtctaaaatttcctattgacatgagtgattcttggaactagaaatttcaaactatattcttgatgctgaaacaaaattttttatccagcaggacatctacttctaagattataccatgtgcaaatgtactatgcgtttattgagttaaaaaaatgagccaggtaggcagtggaggagaggtgctttggttactatgcatttattgagttaaaaaatgagccaggtaggcagtggaggagaagtgctttggttacatcggggataaaagagtattaactgtatatctaaaatgtggggtgtgtgtgtgtgtgtctgtgtgagtatgtgtgtgtatttgaaaataaaatgctaggtaagtgatgttttatagaaagggatcgatggatcttctaagatattttaaacagactatcaatgaataggaagttgtaaattaaggcgtgttaacaggtggtttaactttaccatgaaaggttttccttttgaatcagcccatagtttagtgtttctatgtgggtgctattggcagtttggaggtctgtttcgcccctacccactaaatgctgattagcgatctccacattgggacaacccaaaatgctcccatacatttccagactcctcctggaggagagaggcaccatttggtgcaaaacatgcatgtggtgtcagtttatttgttggacaaatattaagatgttgaggttacagaggttaaaagtaatattttaataaactgcatataatggaattcaagtaatttaaaatctagtgtttgatgttttaatgtaactcctttagtgtaaaattactgaaactatatcctaatatttctttgaggcacttgtcttttgtaaaactgcatgaataactcaaatagagtccccttaatcccaataaaatgtagtcactaaatgtctttgggcaactaatttcaccagctgttccctcatttgcaagtgggggtggtgataacacatcttgtgagggaattaaatacaaaattgctttagtagatgcaagtgcttatcactgggcacaacatgtggtacatattcagtgatagttgttaccagtaaacagaatctcaagcttacttagggtcatgagttggagaaaactaatcttaaagtctttaagttggtgaatttcaggccaaaatacattgtattggagatatcagcaccttctagcagaatgtggtaccgtggtccagtcactattataaattgccagccatgaagaaaagggaagtcatgttttgggagccatgagtgtagattcagggaatcccctggcatggaaggaattatttgcccactgggtcaccgctgagttgcctgtgcagaggaggagtctctagaagctgagaaggttttggtgattacttgcagtaatgggtgtacgacagggccctcctggccatgtctgccaattcagtagctttaccagaagttactagaaattttccaacattgtattatgtattacatccccagcccccactccacaatgtcacagtgtgtttccagtttttgtgataggtatctgtgtgaaagtaaggctttgcttttacagattgctttctaggcaaatgtggaataaaaaaattgtagttgataaaatgagtctaataaagattaaattgcctttcatatttaagtatatttatggcaagaaattatggtagttttaataggattatagagcatttatgggtattgtttccattgaaaacaaaacacggaatatttaagatttatttaagaaaggcggggctgggtgtggtggctcacgcctgtaatcccagcactttgggaagcggaggcaaagggcgggcggatcacttgatgtcaggagttcaagaccagcctggccaacatggtgaaaccctgtctctactgaaaatacaaaaaatagctgggcatggtggctcgtgcctataatcccggctactcaggaggctgaggcagaagaatcgcttaaacccaggaggcagaagttacagtgagccgagatcgcgccagtgcactccagcctgggcaacagagtgagactccgtctccaaaaaaaataaaaaggcatattttctgacagttttaaaatctcatttcgtatgaatcatggacgtattccttgaaaggtaaaatcccccttctagttactgaaaatgtttaaacaagttgtattatgagcaagcccctcccacaatcccaattaagatgcttctgtttcgaaggatagaatttttacattcaaagaggaagcagttatttttactttttatatgtatggtgttagtgatttctagggtaggatgtggcaactttttaactgagtggattgtggtaaatgtttcgcacagatcaattctgttaaaagttgatgtgcacatttggaaggctatgtgatatttcactgatagctgaggtatgccttcttgtgcttcttaaaataagctgctttagtaaacttggtattttcaagtactgaaaaggaagttgttttgcatggagaccaccttctaggcttaatttattgtgaaatttaatttactgtgaaaggtgattgcatttcagagaccacggtttggttttcttgaaagcattgaaatcagttaagtgtcggagcacttagtggagtgcggtactgttttctgtggttgcccctatcttgggtcaatcccataccttccattcacagaagcagtgccagcagatgtcttgttcaggcttataaccaaccccccctcaccttttatgttgtaatagttattgttttattgtctttatatgcaaatcaattgtggtaggaaaataatccatagccttcaaactctcagaagtgggagataaagtaaataaaattaacagtcccatagctttggatctagggttttttttttttctcctttcctcccacttttttcccttccatgttgaaaaataattgttacttttttttttaagcagcacacttattgcagtcagacaaaatagaagtgcctacagaattgactagtgtttcccttgtgcctccctatgttcttcagtgtttttttctgtcttgacatctacatgaagtcttcctcccaccctccctgcacacacacagacctgcctgctcgtaagacctgccaccctctcccacccccaattgtaagctccatgaggacagggtctacattttgtttgttttgtttctcagagtctattacagttttgggaacttaagtacccaaaatattttgtgagatgaataagagctttaattgagaacagttacagtcagatgagatgtgtgacaaaacataaaatagatgtctgcctaatgctgttaatgacatgagtgtaagtagacatgtgggagaagtagtgggattatagtaacaggtttggtgcatggatggacttagttgggaaaatcattttgttaagggaggcttgggttggcttaaactggaagagagaaatttgttttgtgcgaaacgagcaaaggcagggtaggaaagggaaggaggcctgaggtcaagatggataaagagagctcaggaggaatgcgaggataaggcagaaaaactcagacagggatgctagtagtgatgacagtgaagattggcagatttgagttttgtttccaagaaagaagcaggactaggggtgtctgttttggtgagttgttcagccttctgtccatagccttcaagagtattgccatttcttgtaacattaaatatactgtataatcatagaaatgcctgtcttgttacagtggttctgaaatttgggtgaattacctgagggacttaaaataggaaaaaagaatcctgggcctcacctagtataggttcaggtagtgagtataggagcagaagaggatcctggatattgtaatccaatcctctcattttacaagtgaagacatttatgcagacaattatatgcagaactgggattagattccaagtcttcatatcctcagcgcagtgctctggcgattacattgtgcttcctgaaattgacatttgggttttctttgactatgattcccagtgaggtaaaagggccgtttaccaactttgatcacatcttcagaagtagctacaattaaccagctttgcccttctcttttgtatgaactccagggctctttgttatgatgccatttaatggtctctaaacttttcagtgttttcaaatatgaggatactgccctaataaggatgcggtgggacatttttttgtttgtgtttacatgtaataatttattatttaaaaattaggaaaaaaatatacagaaaggatgaaaacaaacattcataatcactcccaagagataattgttgacagtttttttttttataatttaatgtttatacctatgcatatccttattttctttcttaagatcggcatagctaggccaaaggatatgcacattttgtgggttttgataaatattgccaaattgtgttccagaaattgtctatcttttgttctttcttccttccttccttcttttctctctctctctcttctttttttttttcaagaccctctgtcacccaggctggagtgagaggcgtgatcttggctcactgcaacctctgcctcctgggttcaagcgattctcttgcctcagcctcccaagtagctgagattacagatgcgtgccaccgtgtcttgctaatttttgtatttagtagagaaggggtttcaccctgttgcccaggctggtcttgaattcctgacctcaggtgatccacccgcctcagcctcccaaagtgttgggattacaggcatgagccactgcacccagcccatctgttgtttctcatctgcagaattttcttgggctcccatgtgatgtgtaattattttagattattttagaaatagatgatgtagtatatctaagatatattttagatattttattaatgatgacaaattgttacagctgtattcatgctttattttatttaaaaaaaattttttttttttgagatggagtcttgctttgtcgcccaggctggagtgcagtggcacaatctcggctcaccgcaacctctgcctcccgggttcaagtgattctcccacctcagcttcctgagtagctgggactataggcatgcaccaccatgcccagctgatttttgtatttttagtagagacagggttttactatgttggccgtggctggtcttgaactcctgagctcaagtgatccacctgtcttggcctcccaaagtgctgggattaaaggtgtgaagccacttcacctagcctattaatgcttttaaataaattcatgttttacttatcaagatagcacgccatacatttgcaaattaatggcacataagtgaatgttggagacatttattcaagctgcagctgttttttttttttaaacaaaaatgaacatttttccttgttagtacaaaagcaatacatgttcattgtgttccatttttcacaaacacagtagtactccagtcttttagcctagatttggtaaatttttggcatttattgttgtcagtcctgttttctgttaaatgttaaaacatggggctgagagaggctgtgaggttgtggctgaatccctgcatagaaacaatcagaacaattagaaaaaccgaacactcgtgaataatacatacaacaaaaccagatgagacttcagtttttgtctgcgatggagtaactggtaccatatttgctttcccaccataaacaattacaaatctggacaagatatattaaaaaactgcttccagacatcggacaataggcagtacaggagctgagcgaaaggaaatgagctgtgtaattcctcctgctttttcctgtagacactctctgcaccgtgttttaggaagggaacacccgtgcagagcatcttggtcttgctgagtcgaggagactggacttggggaaggtttatctggctggaatttgcaggtgggattgacagagagagggagctaggcagagaaataaacaccagaaacttatggggggggtctctgcaggagatctaacaaagaatgaccagagagctttaaactgaagaattgccagagcttatggtgctgggaggcatttgaattctgaccagatatgggagagagaacttattgaatacctgggacattcaatagaatccccaaaaggttagaccttagtatcagagactaagttagccctagagtaaggccttagatctatcctaacaatgtttgaaaacaagccttgggtggatcaagctgatcctcccctaacttacctgcccaccacaacaaagtacaacactcttaaaaggaagacagcaaagtccagtgatacacagtgcagcatttttacaaatatgctcagtgttttaacagaaaacatgaacataatgaggaaagaaatggaagatattttaaaaatggaacttaaagcagaaaaatacataagaagtgaaatattcactggtgagaagaataacagattagatactccaaagaaaaggtcagcaaactacaagatacagcaagagactgtgttagtcttatttgttgccataaaggaatctgtgagactgggtaatttataaagaaaagaggtttttttggcttacagttctgtaggctgtgcaagcatggcatccggatctcagcttctcatgaggcttcaggaagctcttgagtcatggcagaggggaaggggagcaggagtgtcacatggtgagagaaggagcaagagtcagggggaaggtaacagtcagatctcatgataacttcttactatggggagggcattctctttttaacaatcagatttcaaggtaacgttactacagggagggcaccaagccgtttatgagggatctgccccatgacccagacacctcccaccaggccccagctccaacattggggtttattcaacatgagatctggggaggacagacatccaaactatatcactatccaaagtaaaacacagtgagaaaaacaactgagaaaaatgaatgaaagctcagtgacctgtggagcagtatcaagtggtttaacatacatgtgatcttgtttcaaaagaaggaagtgaaggcaaaaaaaattgaggaaaaataatggctgaaaacatttcaaatttgatgaaaactatgaatggatccaagaaactcaacaaactcgaagcagagtaaatacttgtgaccttgggataggcaggtttttcacatgctacagaaagcatatattgtaaaaaaaaaacaaaaaacaaaaaacaaaaaaaacccaaaaactgataaatcggacattggcagaattgcaaacttcttttcaaaagcatcattaagtcaagccacagaatgagagaaaatatgtaaatatgtatatatatttcacaaggaaattgtgtcaagatcatataaaaattttgtgcaactcaataagtgaatccagttttttaaaaactgggcaaaagacttgaatagaaaatatacaaatggcaaataacatgaagagctcctgaacttcattagtccgcatggaaatgcatcatggaaatgcaacataaccctgcaacccactggaatggctaaaaatgaaaaggccaagaacactaagtgttggtggagcatctggaggctgaatactttgctaataggagtataaaatgttatatatctgctttggaaaacagtttgtcagtctcccctctcctcccctccccttcctttttttctttttctttttcttttctttctttcctcactctgctgtccaggctggagtgcagtggcatggctcactgcaacctccaccttttgggttcaagcaattcttgtgcctcagcctcatatgtagctgggattacaggcctgcaccaccgcacctggctaatttttgtaattttagtagagacagggtttcagcatgttggctagactggtttcgaactcctggcctcaagtgatccacctgcctcagcctcccaaagtgttgggattacaggtgtgagccaccacacctggccaatttcttataaaggtaaatatacattgatcattcaacttagaaattctacttttagaattttttatccaagagaaaaatatatcttcacaaaaagctttgtagaggaatgttcatagaatctctattcttagtggtcccaaaccagtagtaacaatccaaatgttcatcaactggtgaatgtatgaacagactatagtagatgtatgtggtagaatactaagtaataaaacagattgaactactaatacatacaacacggacagatatcaaagacttgctgagcaaaagccaggtacaaaagagtatctaatgcatgcttccatttacaaggaaattctagatcaggcaaaactaatctatagtaacagaaagcagaccaacatttgcccagggctggcagtgagatagggattgactggactgagtgtgagggaaggtttggggatgatagaagtgtccttaatcttggttttgacagtgctcacacaggtgtatacatttgtcaaaaactcatcaaactcttacaatgggtgcatttaattctatataaattatattttaataaagttgattttatagaaaaaacgggaagtgagggaagctaaccaactataatccaggtgcttgatgttatctcatttaatcctcacagtaatttttattgaagaatattcagcaaatatcttctgagattctaccatgctggtctctgtgccaggtactgaggataaagtggtgagcaaaaactatcatgatttccacttaccgtcctgggcagtttatttgaaagacagatactagtaaaaagtgctcccccacccccagagaaatactacaaagaaggttctatgagagcatataatacattcatccttagcatataatatatgctgtcatatgatatataatgagacacatactacataatataccttgtataatatataagatgctttatgtgccctggtttctttgtaactactacccctctaatggggtttctctaactactaagtgagttaatacacgtgaagtgttttgacttgtgctagtagataggaagtgcccagtaagtgttggctgctatgaacatttgacagttctaattgtctaatactgcaggggtacacctatactaactcagggaacagtggagtaggactacatattggggaagagatgataagtttgactagaagtgttgggttttagctgcttttgagacattcaggtggaaaatgtcttgtagtcagatgtggatactggttgagtacaactctagatgctgcagagggccctgggctggagacatacatttcagaaagtgtccagcatctagactagaattgcctcaactgtagagatcatcatcaagaaaggtgctatacacacacattcacacacacgcagaaagagaagaaggacatagacctggatctgagccttgagaaactacgatttaatcagggtgcctttttgatcatcatctcctctgtttagcatatgattttgctacatttaggcctgacttccttcgtattcaagataaaataaagggaaataattacgagtaaaaacaagcagtggagaaggtggtgtcaggttcttggcaagttgataacaaatggccactaattttgacaatttgtttccttgcagctgagagaaaaagggaaatatgtttagcaatatggattccattttccgatgaataaagacatacatattcatctgcaaagataaattttgtttgaaactaaacttaaattgttcttaaatttcaaggataatttttttttttttttttgagatgaagtcttggtctgtcacccaggctagggtgcagtggctccatcttggctcactgcaacctttgcctccagggttcaagtgattctcttgcctcagcctcccgagtagctgggattacaggcgcatgccaccatgcctggctaatttttttgtatttttagtaaagacatggttttgtcatgttgggcaggcaggtcttgaactcttgatctcaggtgatctgcctgcctcagcctcccaaagtgctgggattacaggtgtgagccactgtgcctggcctcaaggagaaatttttttacctgacttgtgtaagtgacaagttgagagcggtcatagtttaaaaatggaaaaaacagattttgcaaaatacttatgatgttaactgtcataggaagttgttacattcctccttaggtacttaagtagcttgtctttcctgttaggctctttacttagagttagtttgctttgacgaggggtagaagaactgaggccatggctttgcctgaagtacagataggttctttatcaaaccctcttttttatatttttgactttattcacccttgacataaaagacaaaggcttacttaggaacctgcaactctaccaatttttaatttttactgtaaaataagggttttctggaagactaaaaaacacttttaaaaaacatgattttttttgcgtttatctctaaatcagacgttttgattggttccatcattgttgtatttgaatttgaattttatttattaattcaacaggcatttattaagtccctgctattgccaggaatttagtgtattctggctctcagggtttcacagagaagaagatatgattctagctcttcaggatttctcagtaaggtggagaggaaaatatgttataaaaatgagggagaatacgatgagtgcgtagtaggggcatttataaagtataagtaagcaaaggatatttctcatctgggatacgggggagagtcttgggaggtaggatggggtggggcagcagctaatacaatcatccgcaggaagggcggccgcatggaaaggggaaggtctaggtacattattttattcatactttccaacagctgggtgaaaagatgtgtcgtgttcccactttacagatgaggaaactagtaagggggtagagtcagagttttaactgttgcaggactccaaagtttgtgttccttcctccatgatctggcaggtccatcgaatctctagtatctgatctctagtctcaaagtatactttgaatctcgaattttgtgtgtgtgtcctttcgtttggaggaatcgttgttccttctagaaggtaggatagttttggatgctgggtgatgctactttagaaattgtgatgatcctggacgaagggaacaaggaaaggaagcttggatccctttatcagaattcactggaccaacagggtgccctgagcctggaaccaaacagggtgaaggtgttgaagcttacatgtggatttctcttcaaataggagagcccaggtgcaccagagcacagaacatcttttctcctagtgtgacacaatagagagaacatggtctttagagtcaaacacaactaaatttgaaccccatctgccagtcgtgcagccttgggtaaactactaacctctctgtgtattactgcctatctcatgggttgtagtgagaatggaataaaatgatgtatgagaagtgaaaagcacaacatcagacttagaaggcaccttttccttcctttcctcctcatcttccaacacctaggctctagggaggtctcagttaaaagctagaattatgagcacagtggctcacacttgtaatctcaacactttgggaggctaaggcaggaggattgcttgaggctgggagtttgagaccaacctgaacaacatatcaagactccatctctacaaaaaataaattttttaaaagctaaattagagaacttctatcatatttttagactgtagttttgatcagaatttatcatgacattatttcctttgatcctaataaaagctcagtgaagtagatagggcaggtattatttatagatgagaaatggggtcctctttcctattccttgaaatcctttggaagcctgttagaagaaaagattttctggaactctaagtagtatgatagtgacatctactgtaatagcttgtattattacaatctttgaggaagctgcagtttagataatttagcacaatcatcaggaagaatttaacagttgattttattacctgccattttggggggagaggaggtataaaaatgtatcctttgatatactaacagaaaaccacttgcataaaattattataataaaatctcaatttttccagaaaccacgatcgcttagatctggattacaaaaagaggtttaaagatgctattagattttctaataactgaaaatgttaaagttcgagacagtttgtgctaaaaaagctagattcgctaagtgcgagagtattaactggaagcaaccggcgataggtggtgatgtgatccaggtgttgtgaagaacagagacaggatgacaagaagacaggatataggtccacgagatttcagcagggatttatttttaaaagcaacttcttgagataggttctggagttagtacaggtgtagcctgaactcccacacttgcaacattatgcagttagattgttggacatattgacccccgaaatacttttttaaatttattttttaaaaataaaaataattaaaaaaaaagagagacagggtctcgctatgttgaccaggctgatcttgaactccagagctcaagtgatcctcctgcctcaggatccaaaaatacttttaaaataaatcccaaactctaaaagcattgtctgcaatgtattatacttggtcataagaagatataaacaaactagtaagcatttctactaggtgtaaaacaaaaaggttgtactttgaggattaatttggtatctagattattctctgaatatccattttaaagttcactaaaattttatttttaataaatttgccatgcaatgttatgttttaacttgtaaattaaatacattctcataaaaattttaaaaatatttagttttgaagtatttcagatatacagaaaaatgttaaatattgccaattatgtcatccatgcagatttagcaagtatgaatattttgctctatttgcctgattttttaaatgaaatcttacctacaaaactaaagctcctttctcctatgcatattttagtattttctgtaagtatatataactctgaacactatatactattatgtgtttttcagttgtggaaatagaaactcttactctgctggcaggaacttaagttggtaggggctttggagaacaatttggcaatacccaaaagagttggcagtggtctgtgtcagttgtctcatgctgcacaacaaactaccccaaacttagtggcttaaaacagtgatttcttatttctcctaattctgtgagttgctggggtagtccctctgcttgttttgcctggactcattgatgcagccgcattcagctgggagattggctgggctggagggctcaaaatggcctcagtcacatgtctggtggttcatgctggttgttggttctctacatgtggccttatcacttgcaatagacttccttatgtggtagtctgagggcagtggtccaagacgcaaggcctcttgaggtctgagccctgaactcgcatagtgtggcttccatgcgttttgttggtcaaaccaagtcacaaggccagctccaccttttgatggaaggagtggcaaagtcacactgcataggagcatggaaagacatctcgcctccatctttgaagacatatcctgtaattcagctattttacttttatctatcccagaaaaaatctttcacagatagagagatatgtacacattgttcacagcagaattgtttataatagcaaaaaagtaaaaacaatttaagtcattccaggaagaagcagataataaattttagtttattcatataatggaataccatatatcaattaaaattaatgatcactggataattctaaaaataggttgaatgaaaaaatcagattggaaaagaatatgatagtataatagccttaaagttcaatatttgaagtttcttgggtaggctaatgaagattttgcttttgcttctgttttgaaatcaaaacttatctttggatggcctcattagagcatggtgcttatgagtagcttccatccttggatggccagttaagctgtgctgttctctgaccagacgggctgtcactaaaaagcttgtgtttagcttgttggccatttgggaaagtgtagctctttcatttgagaaggtgtaggtagagctgataaaggtttaacttcatcagtaatgttagaaaagtccatatacagtacagtttcttttttaaaattttttttctagaatatagtttcttaacattcatttaataccactgtctgcatctgtaccaggtttaacctgcatttcttatctgtaaatgggaagcatgatatttacctcgtagaggtgttgggaagatgaattgagataataatgcatttaaagcagtaccttttatatggtagatcctctataaacagtagttagaaaaattaacaagtatataggatggcatctatgttaagttcactttcaatggtattgtagtgagaaggtagcattgattacctactcataggtactttaagtaggtactttaattaaattttaggactactgtaattatgaaagtccattattaactataatactttacattttaaaggaaatttacatttataaactcttttcacattaattatctgattttgttctcaggacaactttgtaagatagttatattcaatttagagacattgaatattagtttcaggagaggttaaataagcagtgttagcagaaagcttatgttggttctcatgaaggcagattaaaatggaaataatgataccataatactttgatttttatcatttgtgtttatgtgctttacctacctagattctgaatagatttgtctctgtacttttttcccccttctgtgtgtgtgggaaggggaaggaggaggaggaggaaaagagattatagaagagggttaggtgaatcttaatgggactctttggaaagggagaactgcagcctgcctctcagatccaaaaatgttatattaacgccaccctctcagctccctatattttaaaatagccaagcagattggcaagattttttttttttcagatttgtaaatgttcgatggcaactaagtctatgcatcaaagatttgaggagatttctctaggttgactatggattagaattaaccaccaaatttactagccatgtaggatttgctaagccaatgtgacaaatttatttggtgacttctgtttataaatgcattgattcaattaaattctttctccaagataaaagttatgctttttttttctttttttaaatttcctattttggttgtatgctttaaaagtttgagataggttgggtgtggtggatcacttgaggccaggagttcaagaccagcctggctaacatggcaaaaacctgtctctactaaaaatacaaaaattagctgggtgtgatggtgcatggctgtaatcccagctactcaggaggctgaggcacaaaaatcgcttgaacctgggaggcggaggttgcagtgagctgagattatgccactgtactccagcctgggcgacagagtgagacactgtctcaaaaaaaaaaaaaagtttaagataaacctataaatttgtaactctccagctttgttggttgaaggaaactattggtggctggtattttgggtaatctcacttcttggctaactcccgttaaggatgttttataatgaaaaaaagtaggtacttcacatattaggtttttatcacctcactttcctagtatcataaataaatcgttttttcaccatttgtgtagatttatttcgaggtaggtaaatttcactttgcttgagatcctatgccaacattagattagttttgaaacaggttatatgttataacttctcctatgattctgaaacactttagaaacaaatgattttaaatgtgattttttttatttgttttacatttcagaatctctcttgatttttgaggaaatacctagtaacaaacatgactgagttctggcttatatctgctcctggggagaaaacctgtcagcaaacatgggagaaattgcatgcggcaacttcaaagaacaataatcttgctgtcacttccaagttcaatattcctgacttaaaggtgaagctgcactgtgcaaaattatatatgagttcatcatccaggggagggccagttctctcttttagtggaaatgagatacccaggttccttccaaagaaaacctcctctccagccattggcatgatttaaaatgtgtcttctttgaaattttagaagtaaactaccaaattgaaataatgtctctctacttaggctttttgtgctcttctaaattgcaatgaaaaatcttatgaaaatgtttgatgtgttacattcacaaatatgattttcagaaattaaaactcttagtaatatatattcttaaatatcatagtgaagtttttgttagtaaatttatattatgctgattcttacattgtaaatgtgttaccatggcacctacttaatcacacttggcaaatctaacccagttatttaatccggttaatctatgtaagattcactcttatcaaagatcagtcatctagcagcctcaaagtaaagcaggtgtccagtaatcagttgatggaacatttgtaaagaatggaaaagatcatgatactgacattttgctggttaactgaatgagggagtcgtaggcagcattcatttaagaaatatttaaaatgactgattcttggtggggcatcatggctcacacctgtaaacctagcactttgggaggctgaggtgggcggatcacttgaggtcaggagtttgagaccagcatggccaacatggtgaaacccagtctctactaaaaatacaaaaattagccaggcatgttggtgggcacctgtaatcccagctacttgggaggctgaggcaagagaatcgcttgaatctaggaggtggaggttgcagtgagccaagatcataccactgcactccagcctgggagacagagtgagactccgtctcaaaaatataaataataaatgcaataaaatgaccgatttttaatatttttggagttacggatacctttgagacaagatgtttcctccaaaacgtactcacttatgcacagttttgcatgcaaatttaattacagaccctctagcgcacatccgtggacctcctacttaagagcctgtgttgtaaactaagacttcaaatgatccagtgtcattgaatagtacaagcacagacctgtctttgaggagtcttcaagtcttaagtggtgcttataaccatgaattaaaggattatcttgtacatataaatagctttgaaatgtctggcaaacatcttttaactgtacttacacattatgaaataaaatagggagaatttaagatttgtgagaactttaggtcaagatgaatcatcttgttttttttttttaaaaaagcatgccacctaaataacaatatattttccttttaggttggcacgttggatgtcttggttggcttgtcagatgaactggctaaactggatgcatttgtagaagggtaatgtacttatatgcatggagtagagcaaaatgggagacactattatcaggcttcatggacactgggtttattatcacatgtatactctgcttattggaatggttttagaaaacgacttttttcccttcgtatatcaattttatgaaggtacaatttacataaaatgcacctgtttgaaatatgaaaatgctgattctctttttactatctttaatgggatatagtttacatgccatgcatttcacctatttcaggtgtacaattcagtgattcttagtgtattcagacttgtgtaaccattgccacaatcagttttaaatatttcatcatcctctattcctgttcccattagcagtcacttaccgtccccaccacccacaaattgttctgccactatagatttgcttggtctggacatttcttgtaaatggaatacaatacgtggtcttttgtgactgtcttcttttgcttagcataatgttttgaagtttatcccagcagttgcatgtatcagtatttcatttctttttattactaatattccactatatatgtatacatatatatcacattaatccgttcatcagttgatgggcgtttattttgtttccactttttggcttataagaataatgctgctgtgcatatttgtgtagaagtttgtgttcttaaatgttttcatttttcttgggtatgtacctaagagtggaatttctgggtcatatggtaactctatgctttgctttttgaggaactgacaaactgtttcccagagtggctgtaccgtgtaatattcccgccggcagtgtatgaagattctcatttctctacatccttgccagcacttgttattatttttattatttgtctttttgattatagccatcccagggggtatgagataatatctttgttttttttgttttttttgagacggagtctcgctctgtcgcccaggctggagtgcagtggcatgatctcgtctcactgcaacctccacctcctgggttcaagcaattctcctccctcagcctcctgagtagctgggattacaggcacccaccaccacgcccagctaatttttttttttttttgtatttttagtagagacggggtttcaccatgttggtcaggctgatctcaaacccctgacctcgtgatccacccaccttggcctcccaaagtgctgggattacaggcgtgagccaccgcgcccggctgataatatctcatttttaaaaatttgtgtttccctgttggctgatgtgatgtgatgtgttgagtatcttttcatgtgtttttttgccatttgtttttcttccttggagaaatgtctattcagatcctttgcccatttttaattggctagcctttttattattgaattgtagaagttctttatacagaatatgcaagagataaatcccctatcagatataacttgcaaatattttctcctgttctgtgagttgtcttcattttctttttttcttcttgagacagagtctcgctctgttgcccaggctggaatgcagtggccagatgttggctcactgcagcctccgcctcctgggttcaaatgattctcctgcctcagcctcccgagtagctgagattacaggtccctgccacaatgcgcagctagtttttgtatttttaatagagatggggtttcaccatgttggacaggctggtctcgaactcctgacatgatgcgcgtgcctcagcctcccaaagtgctgggattacaggcgtgagccaccgcgcctggccatgtcttcgttttcttgattgtatctgtgaagcacaaaagttttaaattttgatgaagtccaatttatttttttcttttgttgcttgtgtttttggcatcatatctaagacaccattgtctaatccagggttgtaatgttttatgtctatgttttcttctaagagatttatagttttagctttcacagtgaggtctttgattcattttgagttaagttttatgtatgttgtgaggtaagggtccaacttgattcttttggatgtgaatatctggttgtcccagcaccatttgttgaaaagactgttttttcccctttgaattgtcctggcacccttactgaaaatcaattgaacataaatatgagggtttatttctggactctcagttctgtttcactgatctatgtttctctcctatgccagtaccacattgtcttgattattgtaactttgtagtaagttttaaaatcagaaagtgtgaattctccaactttttttttttttttttcaagattggccattctgggttctttgtctttttgtatgaattttaggatcacagtgtcaaatttctgcaaataagtcagctggaattttgatgaggatagtgttgaatctatgtatcagttggggagtagtatcatcctaatattcttgtctttatccatgaacatcggatgttactccatttatttgaagatggttatgcttttgtcttcaaaattcagttggaagagtttttctaaattgcagtttttattacttttgaaattcaggtacatgtgtatttgagctgaaaatggttataggctctttgataactgcattttgattagttggcagaatcagtctacagttccttcaactctggggatacaaagattttattttagagtttagatacacaggtgtaatttgtaaagtacagaatttggagactctcagaaatgtacatttgattgaagctttaagggaataataggcttggatagaagggaattttttcttgaaatctatccagaagattttctcatttctgctgttaaaatgcttttctgaattgatagaaccacctgaaagcgatgctgtggcaatagagactgaggtcagggttacagagagagagagagatcttttaatataacaccatgtagtgaggaagtaaacagatctaaggatgtattgatgttctttaatattggagtcaagaaggccacttagcagtttcacagtaggttagttaagagatagtaaaagctcagttgggaccagacacttggctcttagaatggaaagagaagatgaaaggaaaagcaacttttaggattataattccatatattcatatagagcaaattattattatgaattattataaatatagtgaaaataattatgatgcactcaaagcactaactgatggaaagaatagtctcttggttccttgcttatacatttttaattaagaaaaaaatgggccgggcatggtggctcacgcctgtaatcccagcactttgggaggccaaggtgggcggatcatgaggtcaggagatcgagaccatcctggctaacacgatgaaaccccgtctctactaaaaatacaaaaaattatccaggtgtggtggcgggcgcctgtagtcccagctactcgggaggctgaggcaggagaatggtgtgaactcgggaggcggagcttgcagtgagctgaggtagcgccactgcactccagcctgggtgacagagcgtgactccgtttcaaaaaaaaaagaaaagaaaaaaatgtgagggaacttttttttttagttgtcatccctggagtgagtcttccctgaggtctcatctacctcattacagttacaagttatgacaaccaaagagacactgagaaaggaggtccctgagaatataattattaacatttatttatacccttattagtcaccttgatggctttatagttctttatctttaaattgttaatgggatgtcctgaatataatttaaagtttgctcagattttaaattttatttatttttttttcagagacagggtcttggtgtcacccaggctagagtgcagtggtgcaatcatagctcattgcatcctggaactcctgggctcaagcagtccttttacctcagtttcctgagtagctaggactataggcttgcaccaccacacccagctaatttttttatttttatttttgtggacatggagtcttgctatgttgcccaggctggtctcaaactcttggcctcaagcgatcctcccacctcagcctcccaaaatgctgagatttcaggcatgagtcactgtgcctagccagctcagattttttagggaaggaatctgaaaagtattaaggacaaatgtagttagtttggtgagtagaatttaaagttacctaggcagtgtgtcagctgttcttttcttcattgttcggcaagcacatcttcttcagtcctcctgaatgataagaggaatttaaaaatcatgtcgttgttagactttggtagtattgacagatgatagcttaatgacttaaatgctccaagtgttaaaggccaaatattgtagaatatggtatatgtggtaaatcatagtttgtactttcttaaaaatgtaatcattagagcagatatttttgaggtgacattgtgtacattgacacagatcctcttgtaaataggcatacggagatcttgaagttctgggttatgcaacattacgtttataaatttgacaccaggtgattctacactctgaagtacttctatgggtaaacatgcaacattttagaatgttcgtagcaaatggttctgtttacaagatgcttgccaaattttatgagaatgatttgtcccttttgaaggaatgggtgaattttggagacataggcaagtatatgtataaacctcaagttaaacatgttgaagatttaggacttacatcattatttctgaaattgttctgatttttaggtttgagaccactcagcataggattgtcatttaaatttagctcttctgtcacctttcctggctcatattggctcttgtttaaactgttaacaagccaggcttgtggctcacacctgtaatccctcctgcttgaggggccaaggcaagaggatcgcttgagcccagatgttcaaagctgcaatgcactgtgattgcaccactgcattccaacatgggcagtagagtgagactctctcttaaaaaaaaaaaaaaaatgcgcgcgcacacacacacacacacacacacacacacacacattttttttttaaggaaaaaaaaccattacaggaatttcttaatttgtcttccagtttcccctcctagctgttgagcatgtagtcatcagaatacttgtcctgagccctgtttcgactgtgttatgtccctgtctagagtgtggcttcagaggctgtgtatctgcaatctggcatcccactttcctagcctaagctcccctacttctcggcctgctgcttccatcagtctggacttctcaccattctctggatgcctactgcttttccacctcttatcatgactcataatatgccccatggcaacgatatgctttcttcccatgtaatcatccttgtaaaaccatttctgtccttcatcgccctactcatgagcctttgggctttcttgattgggtagctgctagtgatccctttttcctttctctctctctgtctgcaacctggcaatctcagctggcactgacctcagattgctttgtatttagtaatttatatatttttggatctttccaatgagattttaagcaatgtgtgaaggtagtgattttgtcttgtatgattttgaatcccacccagggcctagaggcagacatggaataaggaagagaacgctggactccaaagtcaggacaacatgtttctagtcacagctctgccgttaactggtcttgtgactttgaataagccacttattcttttatacctcagtgtcttataaatgaaagaactgacaaggtcatatgtaggtgacttggtttaggttggtgcaaaagtaatggagtttttgccatttttttcccccctaaagtaatggccagaaccacagttacttttgcaccaacctaatagttttggcattatggcttcctctatagcatagctccttgtaaatagtagatgctcaataaacagttaatgaattaataatgtaggacttagtttttcatcatgactattgcttacgttctcttgcctgtcaggtccctttcttcctaagggaaagcacagtgtcttgcatgtcataggaacatagtgaatgctagttctcagcctcctcctttgttctcagtccttaaattgtctagtttcttggcatataaatatatggctatttacagactctttctcactagcttcccatgacttactttctagactaggagacacattgcatgtagtctccttaaaaccctacagttactctgttgatttttgcatgtaacaaagtcttggtccattttatccttaaaacattataaggtaagatccatttattgtgtattatatggataggtataatgggaacatatagtcaaattcatgtctttatgtaatatgttcattgtatagaatggaatttagatctttttcctgagaatggttgttgatattttttcttccccagagtggttaagaaagtagctcaatacatggctgatgtattggaagatagcaaagacaaagttcaagagaatctgttggctaatggaggtaagctaatgctcatgattgatcattattaactcatacaaagcaaataactaagctacagaaacaaaaagtaatgtaaaaaagtctacagaaaaggacactaaatacaatagaaagccattaaaatacaattattattactgaatttggtgatacttccaggtacatcctgttccctgaaacataatctcatagaagacagtcttacataatatgtaatatagcttataatatgatgccaagtctcctgcaagagcagtattgtaaaggtttgtcttagttctttccaggttctatttattcactcatttacaagtaagtttccaagttgtatatctcagcattgttccagttgaatacctgctgtcttatgtaggtttttgtatttaatagtatgtaactgttaaagctttagaacagaaattattaattttattgcagaatagtgccccctcagtatgattttggcatttctttacttaatacccgtaaaatagcctactgacttctctgtagctagaagccagtatttacatagagtttgctctatgtagtaatgactttagaaagatgattctgaccccattgttgtcatttgtacttgcatttcttgttttcttatgaaatgtcattttagcattttgcttcatttaaaatcagcccatctctagtgatacgtttttataacaggaaataatgagctgggcatggtggctcatgcctgtaatcccagcacattgggaggctgtggcaggaggatctcttgagtgcaggagttcaagacaagcctggacaacacagggagaccctgtctctaaaaaacccaaacaaaaataaagaaaaagaaaaaagttacctggaagtagtggcatatgcctgtagtctcagctagtcaggaggctgaggaggggggattgcttgagcccaggagttcaaggctgcagtgagctacgattgtaccactgtactctagtctgggtgacagagcaagaccctgtctcaaaaaaaaaaggaagaaggatataaccctttataaccttttcctttcattctctacaggatcacctactctaataaggttactatattttaaatccagtgttcctgaaatctcatttcttcttgcaaataatagctgctcaataaatttttaatcagttaaaaatgtagtaacttattcttgctctttgttatcaagtaattctgatctcattgtttgctgtgtctgttaatttgtgttttgagaaacaacgaaggtatgttagatattaataagttaatttgtgttgcctttactgatcttctacgtattttatgaactagggcagtcagtctagtaggtggaatggtggttgaccaagaggggcagtgcatctagatagagttgcttttggaaataccatccgtgttgttgactgactggtattatgtaaggagatattgagaagagaaagatatttttatatgaattacttccgtcagttggcgctgccataattaccatttggtttcaccgttcttgatccctttaggggtgaagtcactttgactactaaacttccaaggaataagttgttgagtatttttttagctctacatgttttattctttccatttgaaagtgaaagggtccatgttttgaaaattgttaaaatgtggactcctggaaacaatcatcacatggttttaacagacaagtttattttcagtttgtttgggtaagttatcaaagaaagaacatacttttatgaaattctacttattgaggagataatttgaagtagtttcttaatctttatgtctcctacatatgaggcatattaggaatatgtacatatttcatttttaaagtaatcaaattagaaggagcatcttaatatgtattaaagtttgagtaaggagaagagattacaaggtagaaattttgattaatccatgttacttaatatagttcacatttaatcaggattcttcagaaatgacatctttgctgatttcctcaatgccaatttcagcattaaaatatatcgctgtgtaaaaaactgaacaattctattgtttttcttcagtaattaatttattcccttatttcagtggacttggttacttatataacaaggttccagtgggacatggccaaatatccaatcaagcagtccctgaaaaatatttctgaaataattgccaaggtaagataatacttgagacaagtaggacacattgatttgtagtggctttgcttattttataatttcactatgaaatactttttaggttttgataaggcaacttaattatatttcacagaagaaatccttacaacttagacattaaaagatgttaaaaagtataacactttaatgtgtagattatctaagttgaatacttagttatgtaattaacttaaatattacatcaacagtgtttaagaaagtgtgaaaattctgtatttatacaaattttaagggtacccaagattgtgtagaataggaaattggagtctattaagatttcttagtcattcaggtaggtgatagtagtcactgaagtatgtttatgtgcatacaatacttgttcaaacattaaactctatggattctctgaccccttcggactatttagttttgatcctctgcctggaaaaattcccgtattcgtgtgccacataattttatgtagtttcagggagtacatggaccttgaagccgatgcatgaacccaccaagttaagagctccttttatattgagaaatccttgaacttgaaaggaaatcctagaacttgagaggaaaaaaaagtctttttccccccaagatctgtttgtggaataaaagtcttaacagtaactataatgagacaaatagacaaggacctgttaattgtttgccagcatttgacctggctggggcaagaagtgtagtttaaattattggacagactttccttggctcccagtaactttagttatgcggtgtgctgtatagttaaatgtaaataaatagactatcaaagattttaactaaagtcatcatgtaatttgatgactatagtttaagaaactattatttacattacttgataatataaagtggtgttcttactatgactgagcctttttttctgtatccttaaggatttgatcatctgcttcctgatgctgttgtagataggaaagcaggcttagagaggtgaagtgacttaccctcgtgctacacagctaataatgctagagctatgttaaagtcagttcttcgaatgttgtttacttcacattttctccccatgtagttagtttagtattcttctgagaaaaacagcttttgtaacatttatgaataaattcaactataattttaatttcatagaaaaatactctgtgtaatagtgatgtttgcagtagtcaaaactcttcatgtaatttagtttactttggaaaatatccttcagtcttgtgaattgaagccttgtaaatagtaatctccaaacccagtggcctagattccatttccatggtttaagaagtaatataattaaaatacatgtggactaaaacattatttttagttgaaaagatttatgtggaaattatatttaaaatgaagtcggctgttttttaaatgacctcctaaagtcgtgcttttaaaataatagaatattcttacactagaaactagtgggtttttttgtagaagttaaagtttagctactttgatagtattagtagaggcagatttaggaaaattttatctatttttcttctttttctttttcaaagggagtaactcagattgataatgacctgaaatctcgagcatctgcatacaataacctgaaaggaaatcttcagaatttggaacgaaagaatgcgtaagcagatcaagtatatttgagtactaagaactggggaagcatactagcatgcaccgaaggagatattgttgggatttagttagtttcagtttatgttgttctgtaatcaaaatggtatttcttttacttcatggagaaaagctcactaaggtaagtttatagaattcagactagtccaaacagatgtgaggctgatttattatacttgttttataaataatacttgtgaactgggtcctggcttattcctttatccatttgatatttcactgaaaaatagtctaaaattaattgttttaaatgaaatcatagtttaactgcatagtaattacctatcacttaactatagaataatccttttatgatgtaatagttattctcttatctgttttcagaatttaggtttttcacttgttaggttttttaaaataggactgaatttttttggttgatccccttgtactatgactacttcaagtgcaactttaagcatgaaagtattcaagttgtgccttcatatcctagagggaaagttggttggatactgtgagtgatacaaacagggcaagacatatttattatgggaaagtgattactggaagacaaatgaggactgatttgaaagagttaattattgggttagctaccaaaattgcctagtatcaaatgatacccaagggagggaagaacactaaaggtattgtgcttagatgacatagtttcataattatatgatggaatagactttaattgatatctaatgagtagatagttttccagtcaagatattatatatgtaggcaagagaagagctgagttataataattaaagcaaacacaaaacactagaggcaaattttggtagaagatatttcgttggttgcaagggtaggatatattcagctaaatggtgacttcttacaaagtaaaaatgttg

SEQ ID NO: 443 - DNA, 28738 bp, Homo sapiens
  source 1..28738: mol_type = other DNA
aaagacggaggagatccagttcgggctgacagtgagaggatgcagcccggtgtctgggcgggctcttaccggcgaagcggatcttcacgaggtcgagcggatgcagcgcaaggttggataagacgccgccgctcacgcccgctatcaggttctcataccggacgtggcggaataccgtgctccacgccgacgacccggacgccgactggccctggcccgtcataggctcggggcccgtcgacaccacggcgcccagggccgcggaggtgggacgcgatgcagtggccgccaccgtggcgacggtcgccccttgtgagcgcaaccccacctccgggaccaacgagaggactcttatgcccaaggcgcgtgagcgaagccggagactctagtactgagggggcaagaacggggcacagacactacgtcacgccggcggaaagcgcgatggaggggaggtcccagcctctcccgagtctccgccctgcctcgcccacaaatgctccagcccacggacgcggaagcgactgcacagctaaagaaccgccccttgctaacgtttgccggcaaaactacggagcggcgcaggatccagttgagccagcaggccgccgctccgcgagtcacgtgactggaagtagtctgggaaaagcggaagtcgcctgtgggaggaggtggcggtgggcggaactcctagcggacacctcgtggagtccggccggaagagcaaccgagatgaaggtgaagatgctgagccggaatccggacaattatgtccgcgaaaccaagttggacttacagagaggtaagataagttggtagggagaaagggacggtttccgcaagtcgttgggtctagcctcggctttcgcggagtaaagccgggggaggctggcactctggtctggttctttctcagttacctttcgctaaggcaaactttgtgcttacggagtcgctgcggaactggatggatagcaagtaaagtctgttcaagtcctttttctaagaatttcctctagtggtgagtgggaaacagttgtctatagtggagaaaaattccagctgctgctctgggattgtcttcaggttcctattactgaaaagtggacttgaatgagccaaactcgtgggttgaagggctgagagttaaacaggcttttaaaaccttcctactgctcttcttgccgctttactacttcacattagttgtggatgttggaagagacaaagatgaatttaaaagcatcagttttctcttaccatcccttaagaagtttgatgaaagaatggttaaatgaaattaatttatccttcctggtctgttcccccgttaacatgctaaccacttataaattgtactttgtgatacctaaatgacaagggaccaaccatgcgtaagcagattgttctaaataaagagaataacaggagcaaaggtcttcaggcaggaatgaacctaaggcatagaaagaagggctgtgtcattagtttgaatgaggagtaagcgagatgagatgaggcgaaaacagtatttcactattttggttgagtaggagatattatcaacatgtgtgtgagcattgctaataagtctctgctcaaaagatgtttacagtttgtcacaaggcagtaatgtttctaaaatataaattagatttgtcacttggatttggcatcgttcccagtccttgaatctctggtcccaccttccttgccactttagtcagtcactacgtttcccacaagtggtttagtattcacccttgcaaatctcagtgcgtttcagtcatcttttttaaggcctcctgtggcacacacccttacccagtttagccgctttctctggaagactttcaccgaacagtaatctgttcctgcttacctcctgcatgagccccgcccccttcagcacccgtcttctgtgattctatcacttcttcacagtgtttatcacattgtctcatgattattattttggttaatagtctttcccatcagacttagcctccaaaaaggggaagaatcatgttcgtgtatgcactgttaagacagcacctagcacatagttgctttaataaatgtcagtttctccatctataaagattcatttttgcctacatgaagagatttagaaacaaaatgatctatcttgttggggtttttaaacttctgttgaaattattaaaatgctaattttagttgtaggaacagctgctgacatcagagtagatagaaattttctagacttcaaaaataatctttgcaaaactgatggatgagactgaaaattaaatatattaaataaacgtggccaattatggacattatcattttgggtatgctttctttgtgaagtacaggcattctgcactttgcacagtaccatattaactgaaccagtcccactctttaagaggtttacagtgattgaaatcacatctgttaaccacgaaactttgcaaagtggggaattgattccagtatgcaacccgtcccgttaatacagtacagtgcgaaagtgagtactgcttgaattttttttataatagtagccattaaaaccaaacattgaattaagctgaaattagaacctttaaatctatcacagtgttgaatcaagatttttcttaaaaaaaaagatctttggctgggcgtggtggcttatgcctgtaatcccagcactttgggaggccgagacgggcggatcacgaggtcaggagattgagaccatcctggctaacacagtgaaatcccgtctctactaaaaatacaaaaaaattagcccagcgtggtgctgggtgcctgtagtcacagctactcaggaggctgaggcgggagaatggtgtgaacccaggaggcagagcttgcagtgagccgagattgcgtcactgcactccagcctgggtgacagagggagactccgtctcaaaaaaaaaaaaaaaaaaagaacatctttaattacatgctctcattaacatacacatatgttgagaagggatctgctcaaaaactctgttattaatggggcacacagaaagtttgaagactactatatagggagcctttggaagttttaagcatgggagtgacatgtaaaaagctgttttaagatgacatctgataggctgggcgcagtggctcacgcctgtaatcccagcactttgggaggccgaggcgggaagatcacgaggtcaggagatcgagactatcctggctaacatggtgaaaccccatctctactaaaaatacaaaaaaataaataaattagccgggcatggtggcgggtgcctgtagtcccagctactcgggaggctgaggcaggagaatggtgtgaacccgggaggtggagcttgcagtgagccgagattgcgccactgcactccagcctgggcaacagagcaagactccgtctcaaaaaaaaaagaaaaaaaaagacatctgataatagtgtaaattgccgccaaatcaagtagggatgatattaaagtagcccaagtataagataatgaagacccaaactgcctgggaatgcagtggctcacattcataaacccaacactttgggcggcaaaggtgggaggatctcttgagcccaggagttcgagagtagcctgggcatcataaggagacccccgtctctacaaaaaatttaaagattaatggggcatggtggtgcatgcctcaggtccaagctacttgggaggctgaggtgagaggctaaggtgggaggatcacttaagccctggaggttgaggctgcagtaggctatagtcatatcactgcattccagcttgggtgacagaatgataccgcatctcaaaacaaaaacaaaaacaaaacacaaaaaactagaaatagagagttgaaagatgagtaagtgttgcaaagagatgatgagtaggactttgagttttggtagtagggaatatggaagatggaatacataagaatgacctaggctagagctttgttgaatgttagatataacaccattaccagggagtcagaaagaaacagcaggatgaagtcatggggtaagaagatgcatttactttttactcactgagtttttttagacatacgagcttaaaattactttctaagcataattatatatatatatatatatatatatatatatatatatatatatttttttttttttttttttttttttttttttttttgagatgaagtcacactctgtcagccaggctggagtgcagtggcgcgatctcggctcactgcaacctccacctcccaggttcaagtgattcttttgcctcagcctcctgagtagctgggactgcaggcacataccacccccaccgctggctaactttttgtatttttagtagatgggatttcactgtggtagccaggatggtctcgatctcctgacctcgtgatccgtccgtcccggccccccaaagtgctgggattacaggcgtgagccaccacgcccggccctaagcgtgattattaaccaagacaatgtgtttagcagcgtatcaggacagttaaaacatagattctggagccatactgccttggtttgaatcctggctccaccgtgtcgtattcgagttacttaacctctttatgcctcagttttcccatcaataaagtgtgagatagtaatagaacttaacacataggatgctgtggagattaaacggttaaggtttttggaacagcgcctggcacttgaactcttatgtgagtcttttttaagtaagtaaacaaacatagaaagtgctcagtaaatgatagctatataatatcatcataatcacaacttcgtgtgtctatcagcacagtatttagcaccagagattaataatgttccctgccctacaggaagcttagagttctgttgagcaaacatcttgcacatattttgtcccagaaactgtgctaggcataaggaagtacaaatgaaaagtgtattggaagccctgacagtgaacacttacaacccagttgaagagggtactaggacatataaaagggaggccgggcacggtggctcatgcctgtaatcccagcactttgggaggctgaggcgtgtggatcacgaggtcacgagatcgagaccagcctgaccaatatggtgaaaccccatctctactaaaaatagaaaaattagctgggcgtggtggcatgcgcctgtaatcccagctactcgggtggctgaggcaggagaattgcttgaacctgagaagcggaggttgcagtgagccgagattgcgccactgcactccagcctggtgacggagcaagactccgtctcaaaaaaaaaaaaaaaaggaaatgctgcatgtatatatacctagggtctaattgttttgcaagatgtatgcatcccatgattttccagtaatttcagaaagatttctgaacaacaggtcttctacttttgtattcttagtgttaggcatagaacaatgtcactaactaaatgcttattgaataacagagtgattagctgaggaagactgcaggaaatattaagtgtgaattattaagaaggatcattcttatttcagttccaagaaactatgatcctgctttacatccttttgaggtcccacgagaatatataagagctttaaatgctaccaaactggaacgagtatttgcaaaaccattccttgcttcgctggatggtcaccgtgatggagtcaattgcttggcaaagcatccagagaagctggctactgtcctttctggggcgtgtgatggagaggcaagtgtcaatctagatgatattttcaactaaaagtagttatattacaaatgttttccctttagtttttagttactgtaggttttactttattggatttcaatttacttctcaagactaaatttcgttaggaatactgtttagtattttcttctttaaacctaagaaattataaatgcagtagtttaaggatcaatttgacagtaaattaaataatcatgtttataattaaagtatttaagtatgagttttttcacagatgttgtcaacacctaatttcctactatggcaagtgaaaaagttttgtaacactttagaatcaacagagtatttgtcaggttgtattttttgctcatcagtatacttatccatatgcattgcattgttttaatccaaaggattttggttttagctgcccagtagagtgattcgtagccttgtcagtgttgaatttatcctgaacattttacatttatagttcactgaaatttcctggtatgccttatcataggttagaatttggaatctaactcagcggaattgtatccgtacaatacaagcacatgaaggctttgtacgaggaatatgtactcgcttttgtgggacttcttttttcactgtaagtataataccattaagtcattaaatttgatcaacataggtaagaataatctaattgaatacattttttttcaagttcatttatttgttcctaggcccttttggagtttcacaatgcaaaatagcttattaaaccttgaaaattactagttttctttatataattcagccttccccataacttaacatgattaaactaatattcaatttaccacaaaagtggaattaatgagaggtaagtctagaaagagtttggcttactctggaggatttttgatgctaagatgagtaatttgtacttttgttagtcagataataaggaatcatcgaagttttgtgcctgtgtgtggcaagatatccggaacgtaaaatttactctctgtttttaaatatacagtttggtggcatccagtacattcacatcactgtgcaaccatcaccaccatctgtcttcagaactttttcatcatccccagctgaaactatagtcattaaacaataactcctctgtcccctcagtccccaacccctggtaactactattttactttttgcctctgtgattttgactattctgggtacctcatataaatagaagcatattttaaagaattataccattttgtgtatgtggaataaggcttttgggtctggcttattttacttaacataattgtcttcaaggtttatccatgttgtagtacatgtcagaatttcctttctttttatggctaaataacattccattgtatgtgtcacattttgtttatccgttcattcatcaatgagcatttgatttgtttccaccttttggctattgtgaatagtgttgccgtgaccattggtgtacaaataccaattcaagttcattgaaagtctttttaaacaaggggaacgacaaaatctgagctgtgctttgagttaagtaatttgacagcagttagtgatcagtttgaaggccattttaatagtttggcaggcaataataagaggctaccttattatggagactgaaaactagaaatcagtggttgatactttggaggattgacaggtttgacaactgagaggtgcctgggaagaggttggttcctgttgctgaggagtaccagcaagttttgaagggtggcaatgggaaggatatgatgtgacaaactggactgctaatgggctgttcgagtgaagatgtctgtcatacctttacagatgcaggtctggagctcaggagggaggtcagagctgaacttgacatcatcaatatagaactaatcattgaagccatagtatggcatcattgggaggaaatgaggaggaaaatatagaaatacaaagatgtcaaggaagtagccttggggaatgcccacctctgggaagtgggaaaactctaggagtagccagagctcaaagaatctgtgaatgagcatagtgtcctaggaggaaggaatagtcagttttgtgaactactacaaagaataatgaaaaatgaagactgaggaaaacattttagaaatgtagagatgtaaaaaatagaaaattaaagattgcataattctagtctttcacttctaacactattagtttggtgtatgtcttttcaagtgttttgacctacctatacaacagtttttgtatacacatgcgctaatcagtcaaatagatcttccttattctttatttactggtgactttttaaaaaacaggttgagctgagttataaaatgtaggttgcaatccaggttggctgggtgcagaagctagattgcaagagaataataaagggaaaagatgacttctgggaaacctgatagctacaatttgaaagattgtcatgtgaaaaagaaaatagactaatttgttgctccatagagaggcactggaaataggtgttagtgttaaaagattcggttttggtgtaaaaaaaaaaaacttatttgctgtcaaaaagcagaataggctaccttgcaaagcattcagttacttttcactagaggggtgcagataagctgcctgaccctgcaagcccagtgttgtgcaaggaattgattggcaagtgggaatggatggcacctaaggcttcttacacttggttattctcttggatatattgattaatagctcagccagaggacttagtgtatttttttttaatgcttaaaatgaataaaggctcatttgcagcattattcacaatacccaggatatggaatcaacctaaagtgtccagcaatggatgaatgaattttaaaaaaaaaagtacacacacacacgcacacaggaatactattcagccttcagaaagaaggaaatcctgtcacttgcagcatacatgaatgaacctggaggacatgatgctaagttaaataagacagataccacatgatctcagttgtgtggaatctaaaaaagccaaactcttagaaatggagtaaaatggtcattactaggggctttgagggagggagattggggagatgttggtcaaaagagacaaaatttcaaatagatgggatggatgttgtacaacactgtgattatagttaataacaacatgctctcttgacaattgctatgaaagtgaattaaatgttctcaccacaaaataataagtatgtgaggtaacagatatgttaattagcttggtttatccattccacagtgtctacgtgtatcaaaacacaatgttgtacatcataaatatatatcttttatttgtaaattaaataaaaaacattttaagaaatgaataaagactgaaaatgtttcatattcaccacttatttccccccactttatttttttaaagagacagagtcttgctacgttgcccaggccgatgttgaactcctgggctcaagcctgtctcagcctcccaaaaagtgttgggattacaggcatgagtcaccatgcccaccttattgtttctcggtttttcaaaaagatttttttttttttgagatgaagtctccctctgtcgcccaggttggagtgcagtggcatgatctctgctcactgcaagctctgcctcccgggttcacgccattctcttgcctcagtctccccagtagctgggactacaggtgcccaccaccactcccggctaatttttttatttatttttatttttagtagagacagggtttcaccgtgttagccatgatggtctcgatctcctgacctagtgatccacccgcctcagcctctgaaagtgctgggattacaggcgcgagccgccatgcccaaccaaaaagatatttttgagtaatgtgtgctttgtcagagataagacacatgtgaagactacttgctggtacaactttaagaatgtttttaaaaattttagtacacagtgttgcaaaacataaacttttattacctaaaacttcactaagatataccagtttgtaataccaacaattccttcttcagcataaccagcctggagatgagatgttctagccaggcacatattcttgttcggctactcatttctataaaatgagaaaacccttcccagaattggtggtccgctgaggtttgtactcagtagacggcagaacagcttggtcatttacaagcaaattcagtcttgagcttgcagacactatcagaaacttgatggagggatagcgtcttcaggaacggggtgctcagggacacagtttatcctgtattctgtaagtgctaaaatgtctctttgggtcaagccagatcagtcaagacctggtacctagattacatcttagtctcccagtagaatcaggtttctagaattgagttttagtatagtgccagtggctcagattcatagttgttaataagatgtagccctattaaatactttttgtctataacaaggatgtagttaaggattctgttcatcgacatcctcaacaaaagacatcgctgtgtaatcttagtaccaaaacctttcctgatcacttatctgttttcatctcatgggcactgtaaactgttttgcaagaagcgttttcctttttgaatttgctgtaagaaaagagctacattcatactcttcccttagataaagatatctttgttaatgattttatcaaaaagtggatatagattgcatctaatatataaatgtaagattttaagttaaaactagcagttttgtatgtatgcagttatacagtaccacatttatgattttgttttcaacctcaaactacattatatgttctgttttgtagtctgtttcacctgatagcttaaacatgtctgccaaatacccatgtctaaattaccatagtttgttgctttgccttgatttgggctaacgtgccaacagttttgctcactgttgcttttttactatttgtgcagctgtcagcacagtgaaaagacaaactatgtctttactaacattatgaaaatagttttgactgtgtggaccctgaaaagttctcagggtcctccagaggcccaaagttcacagtttgaaaaccactgacttagtagtttctgcagttcatgcagaaaaggactttatctatttcaatattataacaatgccttctctccagtattttcatgtttttcattttattttttacatttaaaattacctggaattttattttcacataaggcatcaaattggctcaatttttttgaatgactaaccagatattataataccattttttataatccattttttctccaagttgaaatgccatgtttatcacaatatgcatgacctaactttgcccctgttcttgtttttcttttgctctactcattatatttttagttttatgtactttatgtatttgtcacaaatctttactaaaacaaggtgggatataaatggatcaataagtgtaatactggaatgatatggtatgttacctgttttaaacaagatacttatttgatatgtgttggcaagttttaatttataactgttgttccttaccatcatcataataaaacaaatatttctaggttggtgatgacaaaactgtgaagcagtggaaaatggatgggccaggctatggagacgaggaagagccattacatacaatattaggaaaggtacaaaagtaaattgactaatagcttgcctattaacattcttttatttaaaattattttatagttataatttcctaagatggggaagaagatgcagataagaaacgaaagactttaggctgtaattgttgacccatttacgcaatatttaatgcagctaaagtcctttgatgctaaagaattttaacagttttttttttttttggtattcattgtagtagagtttgatttctgtttttagccagaggatacaatgaaacatttcccatgggaagaccacggagaaaaagatagaagttcagaaaatgcttcagcttgtctagttgatgtcatcatagatcttacacaaaactcagaatttcttagttgaaagactcctttaagaaatgaagaaatttaatagtattatgcatcatgtataaatcttattaatgtttctaccaaattattctgcaaatcaggtgatgggtggtttagttttagcataagaataatttagaacatttggtctatccatgttttataatgtttacatttttatattaagcaaacaattccaaaattagatttaatctttaaattaaatctaccttttaaaaatcactttgtcgtttcaatattatggttagtatataatatttaggttctgctttaggtttcaagaagactaaatgttcttaaagggataggggaatggggtatgagtatgaggtagagataatttgtagttggaaacacgttagtaatttctaaaacaaaattggtttcattcttaaaatgtcttgtctcattatggtattgtttccccctttaagtaaggacttcaaagaagtttctttgtgaacagggcttttctctaaaaagatagtatagataaatatatttaaaatattattctgcagatttgaattagtaatgaaaaaaatcctcttaacctttttgcttttaaagacagtgtatactgggattgatcatcactggaaagaagctgtttttgccacatgtggacagcaagtagacatttgggatgaacaaagaactaatcctatatgttcaatgacctggggatttgacagtataagtagtgttaaatttaacccaattgaggtaatgtttttttttaagtatgttttacttattatggcttaataatttcagttctgtttagaaaacttttgaatgtatgatagaaacttctgaattttaatggtgttttggcattttgtcagttttcccgattgtaaatgagttctgatacctttgctcaaatcccaacatgtttcccagcagtttagtcccagatactagagttaagcattgttagaggagtggtgtgtgcatttgcccattggggtaaaatccaagtaaatatagtcttgttttaactttagttttactcatgccttcaacttcatgttccatagattatgtcattgtacatttaggaaaatgttaatttttctacctgccttggaggtcagaagaaggagcattggacatcattttgtctatttgtaattggtaaggtaccaatgcttcataaaaacatttgtgattattgttgaactgcatggtaattagttatagttatatttttctttgctcagaagtctgaattgtgattcccagttcctccaggcctaagggaagagttggagattggccactacatgtcgtctgtttaggtctgaatttaggaatggaggctgtcctgaaggctaagctagcccttggactccagatctttctctgaactttttcttaatgcataacaatagatgaactgattgtccagaagactcagtagggatatgtttttcctgttgaaagaaaaggcaatcatagcatatataagccaattttagcagttattgcgaggctaccattttaggtagtatgagagaaaaatcctaatatgcaagtgttatgctcttaaagacccaacctgataaaagataggaagtaaggttgagtcaaaatagtaaggtataaaaatagtttgtatgatatactggaaaatgagatgctgcagtgcgatgtgagcttggccttgaggaattactgagaagtcagaggacactcttcctgcaactaccacatgctcacacacacactttctagagacgctacaggtctagaataggttggcaaactagtctgtgagccacatgtggcccactgcctgtttttgtaaatagagctctgctagaagacagccatgttctcttgcgtacatattgtctgtagctgctttcgtgctatgatggcagagttaagtaattgccacagagaccatatggcccacaaaacctaaaatacttactctctggccctttacagaaaaagttttctgattcctggtctggagtgtctgtctctattatatctttctcactccatcctccatcttccttccttatgtttcccttggttgtagaagagagaagtggcatggaaaggcagctacctttgcagagcaggaccaagtgtaaaagttgataacatatgtgaacattttttaaaagtgctatccaaattcaagatggtgacggtattacgtactaaaaaaaaaacacaaaaaaacctaaacagacactggttcttactatttagaggaacaaaaaaatcttttgcttctctgctttggtgaacatctgtgtcagaagagccgatcaccaattctaaaatcgtaattattagggatgacctagtgaccatgtttttcaaacttgcctgtatagcagctgtatttgttcagctgtttttttttttaattgctattaaccttatgaacttagtggtaaaagtaaatggtgtgtgtgtctcttatcctgttttaaacttaatggaaagggcatgttgctgtgaacaaatggagtgtatttgtatttgtctcctctaatcattaataattaattttctcttaaaatattgaagcctagaattctggtaaagccaaaagtttatgctgatcattgggacgttttacagtgtgaaaggtggcatttggtctaggtagattgttttgctttgttcagatcaaagtctttctttttagaaatggaacctggtcagaccctgaggcgacataatgagaagccaagaaaggttgagggacctcactagggaagtctcagaaaagcagccattaagatagcaggctttcagaaagaactgagaggaaatcatgatcataacattagctttatgatgtgttatttgaattgcgtacagacagtaggaggagttagctggccatgcaactatttagtaaatagctcttcttgctgcccacatacttgcaataggaagtaattgtaggcagaagccaatagttgtgagtgtcaggaaccatgagtgaggaggaatgatgctacagagagagggtttcagggatccactggatgatagagggcttatttttacttaatgccaaggggttatgtgagtaccatgcacatttataattgacttacaaataaaataattagaaaaatcttcaaacagttggacaaaagacaggcctaatttatagagagttaacaacacgaagaaacatttactaataaaacaataaatttatatagctaggaaatactgtcatacagatattttaaatgacacttttaaatgacactacccagtgctgcccagttgcattaaaatggacatatcccacattgtagtgtatactggtacagctctttggaaaaataattagccctaaatatcaaaagccataaaattgttcataccttttgattcagtaatgtcatttgtgaaattttatcctaaggaaataattcaaaagaagaactacgtgggggggaaatgtttattgaagtattacttataatagtaaaaaacaggaaacaagtcttaagttgaagagtaggtaagtaaaatatgttttattacaaattagaacacagtaatatctgtacattaaaatacatgcatgggggccaggtgcggtggctcatgcctgtaatcccagcactttgggaggctgaggcaggtggctcacctgaggtcaggagtttgataccagcctgggcaacatggtgaaaccctgtctcttctaaaaatacaaaatattagcccggtgtggtggcgcacccctgtaatcccagctcctccacaggctgaggcatgagaattgcttgaacctgggaggtagaggttgcagtgagccaagattgcaccactgcactccagcctgggtgacagagcaagactctgtctctaaataaataaataaataaataaaatacaagcatgaggattttacagtgaaaatacttggtttaagttgctgagattatggatgatttattgtaccctcttaaaatggactttgttttttaacataaatattaagggcaattaaatcatttgtttactgaatggatgtggtttgctgccaggtctggctttgaactggtgattgttatacttgtttttagacatttctcttgggaagttgtgcatctgacaggaatatagtactgtacgatatgaggcaagctactcctttgaaaaaggtgagtttcagttttgacttttgctttatacagttggcattatatatttctctgtaaatagagtgactaacaatatggagcaaatattttctcagaattaaaaaaatcttttatacaggtgttcttagaactctacatgatgatagtcatgttctttcagctccctattgctttttagagactcttaaatttctgctaggtattgtatcctagtcaccaaccttgtgtcttccatgatgccagtacattttaggcctctaattaatacttactgaattgaaagttcttaaaggtattgcatcctgttacttaacagtgtaataatattcaaataatattcaataaattcaagccccatgattatcgtatgacatgtacactattttattccagaaggttttagaactcattcacgtaaccagctttatttgttcagttacatgctgatcaatactagtttgacatttaggcaaccactatcctgttcaaagtaacagatttcctaacaattctaaagtagtaatttcaggacttacatatcagagctaataatacaacttaagctaactctcaagagggagacagatactgtctgtaagtaaggaaaggagtgccattgtaagtaaaagggtataaagtttatttcaggtactagaattttgagtgacagaaagggctggacatcattgagatgccacaagtctgttgtcgtagtccacatacaaaagaaatgcttttaatacttgcttttgttattcctaaatcatttttataacgtaacaactagatattaggagagtacattcattgaagtttgaagtagataaatatgataatctttccaaagtaccacttatatgatttcactcattcatgtgatttaatgggaagatcctatatgaactttggtcttagacttttaagcacgttaacctaaaatgtgtttctcctgtaaggtggtggtattaataactatctcgcagcacttcgctgagaataaaacatgatactttaagcatttagcagaatgctgacatgaggtactagtttaatgaatagtcatttctgccccctcccacctacctaacactcattctgttttttttttaatttagtttatttttcattgttattgcctcctgctttgcacattctcagtttttaatggagctccattaattttaggttgaagaaaatgtagcctggctttcaaggtgctctgaaatctggttctaatttgcaactcatttatttcttttagtcagttaggtaacattgaattggagtttgtcacatgcaggtcactttgatagatgtagggattgttagacactgctactttctgttgcttctttgctccatctactagtctatcaatgtttcttttatcctttctctcataaatgtagtagttcttagtcagggattgtagtcccctaccaggtacagttctgggaatgcaagagggacatgtagtgggaggtccctgagtggcaaaacatcctacagtggatagtcatacacaacaaaagataatcctgctcaaaatgccaacagtgttcccattgagaaacactgaattactgatccttcacaggtcagttcaaatcatacttgtctttagaaacagttctttatgttaaccctaagctcaccattaattttgcccctaatttgatacttagtcatttgttactttattgtttatattttaacttttattatgtgtcacatttttctgactaaactgtaagttgtttgagattaggagactgggagttaagcatttctatttttatatttactattctgcctgtgtatttaagaagcaattactgattgatttctcttcccattgcactgagctgagtactttacacataataggtgtttatgaaatatttgcttaaatcagtggggaaaagaaaaggaaaggaagtgggaaattcatccattcttcctttctcaggttatcttagatatgagaacaaatacaatctgttggaaccctatggaagctttcatttttacagcagcaaatgaagattataagtaagtttccctcttttaaaaacttgtgtatttctatcatgaatggcttaattgtataagtcgtactaataaaatatataccactaggtaggtatacctataaagtttgaaaactgtcatctgtttagctttaaaaagttttccaaattggagaagaacttcttagaaaagtatttatttcgtcagtatttagaatgatgtagaccagggacagtaaacaactcgtggaccaaatcctttctgttgcctgttttttataaagttttattggaatatggccacacccacttacttatttagatattggatatggctgcttttgtgctataatgcctgagttgaatagttgcagcggagaccttatggcccacttgcctgaaaatgtttaacatttggccctttacagaagaagttggctgatgtttgatgtaggtcttataaataatgactgaaccatacatgttttaatggaaatgaaaatatctgcctgcaatgtttgtattgcggtgagtatcaggtagctgatgctcatgtggtcatgttatcagctatcactgttcagtcagatggaagaaaaattatagttatcttttcagtatccatatgaggtaggtgggacatgcatgttatcccctttttaagatattaaagcggggagattagtctcccagggaggaaagagtatcttatctttttttttcccaaagcatttattatagcgctatgcctttgatagattcttaatacatgttttttttaagaaggcagaagtttgttggtggattgaactttagatctttgtattgttttatgttccactatgtagatttggaagcaaaaaagtagtagtgttagctcataaaaggatttattatatgatgttttagtggtaccaactaaaagcatcttttatgactttctgctaaaaagaggtttagtccaggagtttgaggttacagtgagttgtaattgggccactgcactccagcctggccaacagaacaagaccctggtgtcttaaaaaaataaaagaagctcagttagactctcattaactagcaataccaaaccacagtaattgaagcttttttttttaacctttattgatgttttgaaattaagtggcattgttccagttaaaggcaataaaagacaagagtaatacagcattattgtgaccaacctcattaagatttctaaagaatgttctaataagctattttagcaaggtaccgtttttcagagtgtcctcggaatttctcattccttgccttgaaaagaattgcatatgccacctgaaacaaagagcatatcccttataataagtgactgttggagtatcataattgctctttgaaaatgatcttgcttttgtatcccttttctatatttgtaagtatttttttcttttattgccctttagatattctagtcattctgaattagaaacctaagttcaagtctaggccgaccagtaattactgtataaacttgggcaagtcatttaaactaactctatatcatagtttcagcatctgtaaggtgagggttagaatagatgatccctaatgaatcctataatgtggaactttgtttatttaaaggttttccatgtacacaaattgatatgcttagaattggaattcttatcatttttcccatgtagaaataaagcatcttactaaaaagcagtttgctggaaccaagcaaacctagctgaaaaccactgttcttaggcaggaactgtaaagcagttgtcaatgtcttactactagtaatgttaaccttgatcatttggttagggtggtgtctgccaggtttctccactaaagagttacttttttttccttttgtaattattatatatctttggggagatactttgaaactatgtagatatcctcttctcagacttctactcactaatcttagcatcttcaagtatttttatattaggaacttggtcacaatattgctgtattacttttgtccattgttcatgttggttcatttgaagcactattcttttagccattagattaagaatttttgaatcttgaaactcatgaagtcattgtttttaccaattgtgcataaagtatagtttctcattttgattcaccctttgaaaggccatgttcactcttacatatcaccagtaggagtataaattagtgcaactttgttggcagtgatttggcaactcaaatcaagcctaaaaatgctcatgcctttaagcttaacaatgctacttgtaggaatctgtccagatttaattgaacctgtcccattcagttaaagattgaatgttaaaaatccaaacgttgggaatttaataagcattatatataataaaatgttggaaactattaaaatatagggaaataaattatttgaacttatatatacagccattaaaatattttcaaagattgtttaataacatgggtaatgctcattaatatgctacgtgaaatatcagaatataaagctttacataacatttcaattttattaaaagtatgtatttaaatagtatggtgaaaaaggttttttaaaaaattatgctgtactaaataactggcctctgggtagtagaattcaaggtaatttttgtactctactttttttgaaatttccacattttctacaatgagatttatagggtggaaaatgtgttggtatatatataagtggagtcttaaggaatcataaaaactgttgaaatttttccttatccctcacctgcttgtgtacagcattgagctttttgtttagatgtgcattgttttgcaaatggttcttgttttcagtggtatcttttagtactgcatatggcatctttctagaaatatgtgtcaaatatttaaaaattcttttacagcttatatacttttgatatgcgtgcactggacactcctgtaatggtccatatggatcatgtatctgcagtgcttgatgtggattactctcccactgggaaggagtttgtgtctgctagtttcgataaatctattcgaatctttcctgtagacaaaagtcgaagcaggtatgtgcctaccagtaagccatttatattcatatgtcacttaacaatggggatgcattctgagaaatgagtcattgggcgatttcatcattgtgtgaacatcatcagagtgcacttaaacaaaactagatggtataacgtgttgcacacctaggctgtgtggtcatatgatatggcctgttgcttctagactacgaatctgttcagcatgttactgtgctgaatactgtgggcaattgtaacacagtggtatttgtttatgtaaacatatataaacacaggaaaagtacagtaaaaatccagtattatcttaatggaccactgtcgtatatgcagtctctcattgaccaaaatgtcatatgactatttttgtttcatttttctttgtcctgattattatttatcttttctgagagggtacctgagtttaataaagttttttgctccaatacagtttaagaaaaattagtaataatactttacatttgttattttttacttagtcaaatccaactctgtatgccaaaccaaaaattaaaaaagaaataaaagtaagtttaaattgtcaagaccgttctccctctatttcactttagtaggtatatggcttggttgatgagaggttgagaggtgggagatttgaatactcagctgtcccatagtctcgtgtgtgtctcattttgtaagcacatagagtgtgattctaatatttaagatttttattgtgttttgtatagtttggccctttactacatattatatgttattaaatacagtatctatttatacatctattatatcttatttttgtaaagaggtagtttacagaaagtgatggcattttaaggagtttgcaaggggaattttgttctcgagttttcactttacagactgactttaaaaactaagtcctgtatagatacagccccctgtatagtgaattatggtttacaaagagctgttatacacattcccattgttccttagtaatgctttagatgtgttcctggaagcatccataaaataaatccaaataaatggaaataatttttctcaaaaaattatgataattggatgatcatggtcatagtcaatctgcttatctaactctttgctcttttacttgtgatatttaagtctttttccactgtaatttgaggaagccatatggatttctacaccatgtatcgtcattgtcagcagataattatcttcatcactgtttatctgattatgaaggtgcttcagttagaagcatactgacaggagtgttctgatgactttgatcttcatttcatcatttctgttgtagagcttctgctgtgtgttcctatgtgactattgcttcctttgttgctgccttgatattctccaaattgtcatgagtgtttttttggcattattcacttaggcccaaggcaagactaatagcttccatatttctctcacctctggaaaatgttgagaatcaagagaatatggtcctccatcatttcttggcaccacaacttccaaaggtagtaggatagtatttttccaacatggtacataagtagacaaaagaatgaaacgagaacaaagaaaaaaacaggactgtgtagttacctatgatcccaaggggccagcagctgagttcaggctgaattattccaaagctagtgtggacagctaaatgtaggtctagctagaaaactcacattattccaaaattgtataaaagggttcttatatttcatttctaagaaattgtctcctgatgtcatttggaggttttgtaatcacagtcttaatatgtgttaacgtcctgttgtgtttagatataaatggtgttccctctgacctttgcctttatctgcttgaaagctagttctaatttgtttctgtggtttgtttcctatcattataaacatcaaataactcatgcttgggtgaataatctgtatttaaaaaatattttcctttaaaagaccttaaaatggctaaagcatattatttttaaaataaattttgagtaaattttttaaaactacagttaagtcagtatttgaaagtaggcttctgttggaagttcattcagtatttactgagcaaacaagtaaattaatagtgttcacatggaaaaattagtgtgactgtgtatataaagaatttaagcctttaaaaatgtatttatctcctaatagtagaacttttggtgagcttaataaacttagcatatatgcagacataaacatatctagaagttaagaactcagcatagtttaccattggggaggattctcagttacttaagtgactaaccgttggatctgactggtctactgcatgaacagattatgtttaatggttacggaaacctgattgaatttccctacttcaaatgcattatactgctttggaaaaaagggcttcttaggtatgtggagattataagaaatgagtcttcaaaagcagagcactgagcgggagaagaaaaagcagtctatctcatctagttttcattttaataggacgttctttttaatcatcccctctcttttaaaaatgaatttctaatggtttatcaaagtgcttaaaacatacctatcagaaacagtgtaaaagaccagttttgtgagtatagtcgagagatttttttttttttttttgagacagagtctggctctgtcagccaggctagagtgcagtgatgccacacggctcactacagcccctgtcttctgggctctagtgatcctcctacctcagactcctgagcagcaccacacctagctaatttttaaaatttatctttagtagctatggggtctccctgtgttactcaggctggtctcaaactcctgggctcaagtaatcctctcaccaaagtactgggattataggcatgagccactgcaccttgcctactttagagatattttttatagatatgaatatttgatttagtcattctgtttgagttttattttactgtgcatagtttattgagcctgtttccttcctctttatatactctgcattttgaataatttaatccagatgcagaaaatttatttctccagaagtttcatcttactttttctgaccttgtattttacttgctttttaatgcctttcttaacacttactaatatagtatcacctgtgaattcttctagcatatttcacagcctttccaaataggtatgatatttgacatctccatttattaaatgattcttttttttctttttttgagatggagtcttgctctgttgcccaggctggagtgcagtagcacgatctcggctcactgcaagctccgcctcctgggttcacgccattctgcctcagcctcccaagtagctgggactacaggcgcctgccaccatgcctggctaattttttgcatttttagtagagatggggtttcacctggtctcgatctcctgacctcgtgatccacctactgcagcctcccaaagtgctgggattacaggtgtgagccaccgcacctggctctattaaattattcttacctcaacttatcagacacttctgtagtcctcccttccttttcacacatgtaaatcatcaactcactttaattaagctttttttttttttttttttttttgaggcagagtctcactctgtcacccacgctggagtacagtggcacaatcttggctcactacaatctctgcctcccaggttcaagtgattctcctgcctcagcctccctagtaactgggattacaggtgtgtgccaccacgcccaactaacttttgtaattttagtagagacaaggtttcaccatgttgggcaggctggtctaattaattaagctttttaaacaatttaaccaaaacaaaattctggcattagattcagcatatcaggaggtactctttgaagaccattgcatttctttctttttcagtaaaatgaaggggaaaaaaagtgtgttgacctgaattgatttgatatggggaagaggccttttaagatcaagtcctttctttttgttacaaagttaccttggttgaacatcatattttatttgcattttatgcttttagttattctgtgaacttttctgtacatctggttttgcttagtttgttcatatttatttctcttactagatagtaagttctctgagagcagaaatttgtttactaccccagcacttaacacggaaccttattagttgggttcaataaaaatacattgacaagaatttgagtttttattttatactcctataggactcagaaatagtatcctgatacttaataggcagtggttactcaaaatctgtaccaaaatccaaagggttttaacttaattcgttttctatagggaggtatatcatacaaagagaatgcaacatgttatctgtgtaaaatggacttctgacagcaagtatattatgtgtggatctgatgaaatgaacattcgcctgtggaaagctaatgcttctgaaaaattgggtgtggtaagagaattcattttctttcattgtcataaagctgatttctaattttattagatattacattatgaaaatttacttttaggtatttttgggtattttgattaaattgacatagctgtgataaaaaaagcaataaatggacaaggttgtattgataattatttgcttcattctgatctattattgtagacactgtacattcaaattgacatttaagaccttcagaatgcctttgttaattcagatgtttgataatattgagtcttactggttttttgtgttttccttgaggtagggacagaagatgcaggaactagaggctcagaacttagagctcgtatctcttgttagagaaatagtcatccagcaactcaaaggctgcaagtccctgggagatcttgtaatatcaaagacacaatggaacatttaataaatacagaaagcttcatactttaaaaaagattccatgaaaaaatagcaggtgttatcattggctggttacctccaggataggggattatggttgattttgttttgttcttgatgtttttctaaatgtcccatattttctataagaaacagagtgtttatattagaaataaatattaagtttaagaaggaaagggtaagtgtgaattattttctacttagtcctgataggaaaatcaaaggcaattctgttttaggtttaatgattgataagtattgcattgtgcctaggtccatcattaaatgttcctctaaatcgtatcatccttaacattcgttaaacaaagggtagttcttatggaattggatacttattttttctttgctgtttcactatgtttaactcacctctttacccacccccaaaatttgagtgagtgatttaggtgcttttctatgttattgatgcctagggaaggtccaactcagtgatccacgtggccctactccttcagcactgctgctttctactgggtggcatctatctacatggcgagtgtgttgcctaaaaggaaattcagtgcttgcagagctagtgttactaatataaccttgtaaagtgcagaattacattggcaattttggttgcatatcataaaagattaggttagggggaaaagggtgctttctagcttttttatactgaagcaaaacaacacactattcattaagataccaaaatgtgtattttcagcttacatcacgagaaaaagcagccaaggattataaccagaaattgaaggagaaatttcagcattatcctcatataaaacgtatagctcgtcatcgacatctaccaaaatctatctatagccagattcaggaacagcgcatcatgaaagaagctcgtcgacgaaagtatgttttgaggcatttgactctattacccttttctgacttctgctctcatctcaccaaaaacaaagttaactgccattcaagggagtagtttatgtgctattatttaatagtatgttagtgatgtgtttgaagacttctacagaaggccttttcttttttcttttttttttttttgagacggagtctcgctctggagtgcagtggcacaatcttggttcactgcaagctccgcctcccgggttcatgccattctcctgtctcagcctcctgagtagctaggactacaggcacgcgccaccatgcgcggctaattttttgtatttttagtagagacagggtttcaccatgttagccaagatggtctcaatctcctgacctcgtgatcgcctgcctcggcctcccaaagtgctgggattacaggtgtgagccaccatgccccgcccagaaggccatttctttttctttttcccaaaaaagggaagcagtgactatctgagaatgggagaacttccattacctgtttttgagaatatgtttaaaggacaaacgatgaaaatgagttaccaaaataagaaaacacttgctcatattaaaaaattattgtaaaaaatgttttaaaaaataatttctgatgtagctggaattaagagattttgtgtattttccaagttaaagaattaatctatagtagagctcttttcttaagtaaaaagtgttctgatatactttattataacatgacatctatcattttggatatagagcagagctactaccaccaccaccatttcccgtgaaatattcttctctttgaaatacttgaagtcatgcatgaaattctaagagctctttatttttcaattagaatatacaaatggctctttttttctgtctttgggtagatgttgcagtagaatcacttttagaaattttattaactgtggaaggtttttaaacttagtaaaggaccctattaggtaaatatgataagaagcaattaaataagtaaagttgatttcttggtactagcttccttttacctattgtcatcgtgaaaatatttttttaaataggtgtttttctagtgaaagaaaatgctttgatttttctgagaaagttttctttaagatgagttcccataacttgcttatattttgtatattttatttctagggaagtgaatcgtattaaacacagcaagcctggatctgtgccacttgtgtcagagaagaagaaacacgtagtggcagttgtaaaataattggtattcctaacaatcctgatgtataattatttgttacttttgatttgagaactctacaaataaaagtgctgggactagattaattgcaaacattttagttatatgtgtagagctttattgttactccttttagctaccctgaaaaatgatccttaaaggtggcctagttggtaagactgttttatccttaatctgcattcttctttcattgtagaatacagtatttgcaactcattttttcttgtttttattacagatatacttactttctctttgatctattattgtagacactatacattcaaattgacatttaagaccaaacatctcttatgttatctttaatattactttgaataatgattgcaatgatgtttcttcctgtgattccacataacatttagaataatgatgtcaattttttacaactgaatttatttctagtgctttacttatatttggctttttgactcttttaaaacaatcagcctgcatttatataacttttataaataataatataatttgggtcaagttaagatattaaaagttcctttcagcattgaa

SEQ ID NO: 444 - DNA, 32742 bp, Homo sapiens
  source 1..32742: mol_type = other DNA
gagcacagactcccttttctttggcaagatggcggagtacgacttgactactcgcatcgcgcactttttggatcggcatctagtctttccgcttcttgaatttctctctgtaaaggaggtgagggggtctttgggcgcaaggaaggcgtgggggcggatgaggtgctgagcaaggccgaaaggtggtgtctgtagtcctaggcctgacacgtgcgaggcggtcgcgagtttggttcctggacggacactaaggatcttctggtagtttagcgtcgtctcagttaagaagcaccgcactattcggcagtgaggaggagggaggttacggagagagaaaagaagtctctttcacttactgaggtgtcagtgcgggagggattttcgcatcatttcttctcggaagttggcgattcgctggtttcgctagagaacgttagagcttcacaggctggcttgtaaaagcaacctggagtgctgttagagcttttgatttttcttttgggaactgtgggaagcctgggcttggctgtgggtttttgcatgtcgagtcttttggagtgattctcttacacttaaaataagtatctagcgctttaatttccatgaagttgtgagttctttgcgttttcttgtcttggttaagtaggactttctagaacagcatatttcgtcagatggggacggcgctcccccgcccccccccccagaaaaaatccctccaatctttaaatgtgttttccagtggatatattgtactgacttcatgtggtttgaattggtcgttaatattcaattatctactcaagatatcatgaataaatgtgtaattctggaacttcattttaaagcatatgtcagtcctaaaagttttattggacttgaaagttttggctaaaagaaaattgacattagttataccgtgagtttattgggaaattgatgcattttaataatgcaaagtaatttgcagtgatgaaggaattcgaattttttcagaaaaataagtgagttctgtttctggaagcagactacaatataagtctacttagggaactctagatttggggagtggattttgtgtagcaaaagacaaaaagcaataaaacaaaaacgtcccaaaaaccagcgtccaggtgttgtggctcgttagacaggtataatcctcatattcatatgcaccttttctaaacatagacaactctaaagttgttgacgttaggtaacggctaagatcattttcagtaaatgtccaagaatgtcttgtcatgtaaaactttctcttgatatatttttgctttgattcttctttttacacctgtattttagaccttgagtaaaacattcgcatctgcattgttttcttttctggaaaagtgaggacaaaagatctagtaaaaatgctatattttgaaagcctttaccagctgcttgtagaagtacttctgaactagctgaactttatatatttttgtgttctttataatttcattttttttatggcacacagaaggaaaggaggaatatgtaaatgtgaattagattttcatagggctagacgaaaactatgaactgcaggcagttgagaatcagtgggaaaaactgcccaatacccacctctttggagaaaatgttggtaagatagctgtaatacaccaagaggaagacagatgctggagtatttaattagcaatttctaagtacatttgactcttggacagtacaggggttaggaacgctgagctctcgcagtcaaaaatccgttataagttttgactcccccaaaacttaatatatcctaatgctgacaggaaggcttactgagaacatggacagtcctgtgttgtatgtgttctatactgtattattacaataaagtaagctagagaaaataaaatggtcttaaattataaggaagagaaaatacatttactttttagtaagtggaagtacatcatcatgaaggtcttcattgtcttcatattgagtaggctgaggaggaggagtaaaaggaggggttggtcttgctgtttcaggggtagcagaggtggaagaagtagaggaagtggatgggaagtcaggaaaggcaggcacacttggtgtaacttttattgaaaaaaagttgtgtatacgtggacctgtgtggttcaaacccttgtcgtccaagggttaattgtatagggccatataactgagaaatccaagataaaacccagacatctcaccactaaacaacttacctatcctttagagttgaatgtttttgatataaggtaaaaataaatgtcgaagaggtaggtactggtagagtgctatcaaaattgagattttgttatcttcagtgagcaaagaggactttgaggaggtgaggctttgagtcttgaaggcaaaatggttagaatagagtcagtgatcctgctatgtgaggatacagcagccccccccccccacacccccttagcagtttcaatttctgcagttccagttactcatggtccaaaaatattaaatggaaaattccagaaattagcaattcgtaagttttaaattgttcgcccttctgggtagtaggatgaaatctgtctcgctctcttgcttaaaactgggacatgaatcatccttttgtccaatgtatccacactgtatatgctaacttaattgttctattttgttattgttcatctcttgttcccagtttataaattaaactttatcataggtatgcatgtataggaaaaaaacagtaaatataggattggggctatctgcagtttcaggcagcagccgctggggggtcttggaacatttagctcatggataaggggagactattacattgcaccaagagaaaaacagtttcatatatttgtagtacattggagaatataagcttcatgagagcagaagcttccttgtgctctcagcacataatatgagtctggcataaaggctttttatgattgtttaataaatgattgaatgaatacatacttgtttctcactcttctttattttcatgtgaagcagaaggccagatagtgaaatatttaggaccctgggctctgaattggacctttcatgactcggtcatttaatacctctgtgcagtcagagcagattcttttaccctcttaaccttttctcatgaataaaatgttaatactaccaccaatctcatcgggttagaaaaattacatgagataatgcatataaaacactacgctcttctgggacagagtgagtactccttaatgttttgtgttttgagacagggtctcgctttgtcacctaagctggagtgcagtggcacaatcttagctcattacagccctgactttctgggctcaagcaattctcccacctcagccccagaagtagctgggactacaggtgtgcgccaccatgtccggctgattttttttgtattttttgtagagatggggtttcaccatgttacccaggctggtctcaaactcctgaactcaagtgatctgccaccttggcctcgcaaagtgctgggattacagacatgagccaccacccttggctctaaatgttttttattttggaagactagcccattctgtattggtatgggatgggaggggggggcagtgagggttttgaggagtaaggtaaggactggaaatggttactaagaaactgatcaaaggaaagtacaaggattggttaagtgtggagggcccaactgagattggaaatcataccttagagctaataatggggtcattctcagggcgaggagcggtagaaggctatgggagtagtatagacatatttaggggtaggcttgtatgtaaatgccatttagagaagcacagatgtgatcgaataacattattccctaattttgaaacattttgtagtcatccttagccagaacctagagaataggtgactttttttccagagttagtgattgacactgaattgtatatagttggagaaattagtttgaaagaatcaatgatagaactgaagagaaaatctttgaaatagctaaaaatgatatccaaactaaggcagaaagtgacatcaaaaagggtattacaaaaattagaaagggcagaaagtctgagatgatgaagattttaatggtaatggtggaaggggttatcagttttaagttggaattcttggagatgaggggttatcagttttaagttggaattcttggagatgagatacatgatgaaaattgtcataatttgaggaataaaggaattttagggctcaagcttttaaagagtcatcagtatggcattatatttgtgttgaatgacagcagaggaagagacagcaaaaaaagattcttaatctgttaaaaagtaatatgttttcaagaggttgatagacgacggatcagcagactatagcctgggaatcagatagcagcctgtttttgtgtggttttggggctaagaatagtttgtaacagaggaacatttgcaaacattagcaattatagaatattaactttataccccaattaagtgaaataatttctcttgaaaaagcattctattcttattaatagacctgtattacaaaaacttttactgttattatttctgtttcaaaatttttaaaaaattgtggaaatttgattctcgtttttcatgtgagtacttatatagtattttcaattgttgcttcttgatacaaagtctgaagtatttgctttctgcttatgaggcagaattgagaggcatatgtagatttgagaacaggacagtaacacctgatggtagaggagcaaggctattgaatctattgtggagagagacgtggcaaattaaaagttactagtggagtggggagaggtagcgtgcttggaaaagaatgtttttatttaagattagtgtttctatagggcaaagtgatgagaagttaaggttttttaggtaaattttttatcagatatgacgttcattcatacaagtacacaaatataaatgtactggtcaatgatacatatttttttcaaaatgaatagcgaatacatttatgtgaccaccactcagattaataaataaaacattacagacatccttttttttttttttttttttttctttttttttgagacagagtcttgctctgtggcccaggctggagtgcagtggcgcaatctcggctcactgcaagttccacctcctgggttcacgtcattctcctgcctcagcctcccgagtagctgggactacaggcgcccaccaccacgcccggctaattttttgtatttttagtagagacagggtttcaccgtgttagccaggatggtctcgatctcctgacctcgtgatccgcctgcctcggcctcccaaagtgctgggattacaggcgtgagccactgcgcctggcgacatccttaaaccttcatcttgacccctgttagtcactactcacaccccctaaaggtaagctgtagtctgatgattcattttgcctgtttttgatttttatataggtggagttaagcatttaccaccatgtactgctttgtatgacatctttcactcagcattgtttgtgagtcatcatgtttttaggatagcagtagtagttcattgatttttcagtgccgaatgttaatctattatgagtatgctgtggtttgttttctcattttaacattgatagacttggctattacaaatagtgctcctgtgtacatttttggaagtgcactttgactatatgcacccatttgttttggatgcctcgaaacaattgctggatcaaaaagtatgtttggctttgggagataaaaatcttacaaagtagttgtattcctgccagaagagaataggttccagttagtctacatccacaccaacactggtattgtcaggattttttaggtttttattgtaatttttagtatgcatttccttatgattaatgacgttgagaaccttttcatgtgtctgttggccatttggttgtcttcttttgcgaagtgcctatcttttagccatttcaattgcaaggtctgtcttgtcttactcatttataggagttctgcatgtaatttggaaggttcgattttgctctcatggctaaataccctttgaccaccttcatctttattttttgtgggcagtgaaatattgtggcattttcttggatttttctttccttgcaaaattaagttcagtacagaaatcttttcttttgctgaagcatttctgtccgtgaatattttgtagaatctttacatattactcagtacacttcatgttgttgtgagtttgtgtatatgtatctatttgctccctgtactataggttaaattatgcttttttggatcctttgcaaagcaaaagcctgatctgacatggttgacttaaaaacttggtgcaggttgtttcagcaatgtggatggagaagcatataggagtttattactgattacctggatgtggagaagtgacagctatatgtgctttacaggaaagatggcgtgggttttatttatacacagccttgcctagaaagggtaagagatggtttgtagggacacataaaaaataaggtcatgtaaatcagaagtaggtgggaatgtctacagtaattctcttcattttaaaatttttaggtaagtaaaatacttttacgtctataggttggttgcttgccatattgcttgccattattacaagaggggaatgttaatggtttatcgtattttataaagtatttcttgaaatatatttccaggtaaattagttttagtattaatcagtttatttggggaacttaaatatattcattagaaagttatcttcttttgcagatatataatgaaaaggaattattacaaggtaaattggaccttcttagtgataccaacatggtagactttgctatggatgtatacaaaaacctttattctgatgatattcctcatggtaagttttgtcattagaactgaaacttgtcttgtgacttgaggatgtgtgtattaaagttttatgatttataagacagctttagccaaaaggcttaaatatgatttgaatgttaatgttctttgggtgagaggttatataaaggtttcatatcttccgaaatatattgttttctccctgtgaaagatgtggaactactttaaaatatggtcatcagatgccttcatttcatagtatgtatcatcaaagttgtgcttatgattcacattccttagaattatctgagaatgttgcagttcttgggttgctaactttttcagttagtgcattgtgtgccttagagttttgtgtttttttttttaattttgaggcatctagtgtagacattgttctccaaatatggtccccaggaccagcatcatcagttcacctgggagagcttgttagaaatgcaggtttttggccacacaccagacctacttaatcaaaactgttaagtggtcctcttaagtttgggaaataattctgtgtcatttcttcaatgcacattacatttttaaaggttccaagaattttggcagtagagaaatacagtatactgtgattaaattggcatttctcaaaatttgatcatagatcttctgtgtttcagaaagactgctctagaatatactttctaatatataatacagacattattacattaaacataatccacatgtttgacttgtagttccctgcaataacagtatctcttttttagtttgtcatggataaacaaaaaggaaactatttcttagtttctttctttttttttttgagatggagtctcgctgtgttgcccgggctggagtgcagtggtgcgatctcggctcactgtaagctccgcctcccgggttcacgccattctcctgcctcagcctcccgagtagctgggactacaggtgcccaccaccatgcccagctaatttttgtatttttagtagagacggggtttcaccatattggccaggctggtcttgaactcctgacctcgtgatcagcccgccttggcctcccaagttgctggggttacaggcgtgcgcccttgcccctggcctatttcttagtttcttaatgaaacattaaggtgttaccagagttggttatgtgcaagttttctccaccttttcatagtatagtaaaaggaacgatagaatttggtttgagagattatagagctggatttgtggttaaaagagattatttaatggatttaaattccattcaacctagttgataacctgtaatagtaatatgtaaatccctctgagtttttcttcaaaaactctgggataatattcacctaagaaaattaaatgagaacaaatataaaaacacttggaaagaagtttctgcaatggagaattaaatgatagataattgggtcctaccctttttttctttcacatccctctgtcaccccaaggctgtatattctctagtttccctcaagagtaggaagaggattcccttttcctttttgtgcctttgtattagtagaaaaaagaaattagggatcggggacatttctgactgagtagcccatggcatatgaatatattgggggtaaataaatatatgtatagtttaaatacactgaaaaatttccagacattctcatgatgagtagcacaatttaacattccttaacattgtagtgctcttctgcatttttaattagctttgagagagaaaagaaccacagtggttgcacaactgaaacagcttcaggcagaaacagaaccaattgtgaagatgtttgaagatccagaaactacaaggcaaatgcagtcaaccaggtaaactcgtcttaattttgaattctaaaaattctcctttctggattaatacaaatgttaattcaaactttatccagtatcccatagtaaaagttcatggtttaaatgagtgctttattcatttttaatttttgtttatccttattttgtaggggccagtataattaataaatgttaatattaacactaagtttttttcctaaaaaaaacttctttagtacttatctatactgattatactacagaaattccatctcctgtttcccccttcctggggacatttggcaatgtctggaaatactttttggttgtcataactggaggggtgctatagggacctagtgagtagaggccagttatgctgttaaacatcctacagtgcataggacaagcactgctgccgctactccccaacaaagaattatccgactgaaaatgtccattaagaaaccctgttccactgtgtggtggctcacacctgtaatctcagcacttggggaggtggaggcaagtgaatccgttgagcctaggagtttgagaccagcctgggcaacatggcgaaaccctctatcttaccaaaaaattaaaaccaataaaaagttagccaggtgtggtggtgtgcgcttgtagtctcagcttacttgctacttgggaggctgaggtcagaggatggcttgagcccgggaggcggaggttgcaatgagtcagtgtcataataccactgcattccaaagtaggtgacataatgagacaccatctcaggaaaaaataaaaaagaaaccctgtgcttgggcaatacctagaaccttagaacacatgggtatctcgttataagagaaacctgagctcactttatccctggctacattctttcatacccttccaagctccatgcccaaggagggtagttttgagctgataagattattttattcctaacttccctttacctacaaatagacgttactgtttcgtttccaaagaaaacatattgccttagtctgacgtagtacatgtcacgggtggaagtcttttgggttactagaaacatttaaaaataaaatctcttactaaaattgaatattgtcatttgagataaatcctagctaccagtaaattcacttgaggaattgctggatattttgccgtgctatacctttgatttctatgtatttaaaccaaatttttagagattggctcttaagttttcctttgtgatttgtgaaggtgttaccagatatttttagaaaagcaacaaatatacaattactgtgccatactatagcgtactatactatactataccataccatactgtgacatatactacatacaaatgcagttagctctctgttctgcatctgtggattcagccaactgcagattgaaaatattcagggaaagaaactaaaaaataacaatactacaataaaaaatacaaataaaactacagtgtaacaactaacaactatatgatatttacattgcattaagtgtaagtaatctagagatgatttaaagtggatgggaggatgtgtataatttacatgcaaatactgtgctattttacataagggactttagcacctgcagattttggtatttgagggggctcgtgagtagggggtaggcaaggtcttggaactaatgctctggggataccaagggatgactatatgcgggaaaacacacagagatatatacacacatcatgcgcatagacagagctatatattatactaaactacttttatgcttttagaagaagtaattttagatcttcaggtcacatgtaggtgattacaaagggacagcggaaataatccagatgttagactacaacagaaaatttaggatgctgtagtttagtcactcaaagactgggaagtaatgggatcagagcatgaataagatgaatgtacatgtgttcaccagttagaaaaagaggatccttgtagcttaataggtactgagtttgagataaatgaaaggatcatgtgttaaaaacttgtaatcttatacttacagactacctattttcaatgtaaaaacctttttctgacaattcaccctttttaaatttcattgaatatatagtatcgtacttacactttcccggaaataatcagccagaggacagtgattatatacgtgagtggtatgagtagtgcaatacaaagttattcagtgtgatccactgcaaatgttcagtttttgttgaagttcttctatgttggaatttcatgtacatttcataatcagtattgtaatacacctatattaatttttatggggacatatctctgctccattaaatcttcaagcaaaattgtgttcccaaagacacattatagcatatttcttctcatgagaaggataagaaaatgtttttgttttggaaaatgcagtcaggtgcagtagctcatgcctgtaatcccagcactttgggaggccaaggtgggtggatcacttgaggtcaggagtatgagaccagcccggccagcgtggtgaaacctcatctctactaaaaatacaaaaattagctgggcatggtggtgcacgcttgtaatcccagctacttgggaggctgaggcaggaggattgcatgaacccgggaggcggaggtggcagtgagccgagattacaccagtgaactccatccggagtgacagagtgagactccgtctcaaaaaacagtaacaacaaaaatgctcataaggtgggcaactatacacatatatcccctgtcccttgatgtctttctttattattagtttgtcttttactagtctgtcaacatctcaagataatgcaaagctaatttaagaaaaattaaatatggcacttggttatacctaaggattgtgtagggtatgtagcatagctgtcatgtatatcggacatgatttttaaatttttatttattatttttttttgagacagagtctcactctgtcgcccaggctggagtgcagtggtgccatctctgttcactgcaacctccacctcccaggttcaagcgattctcctgcctcagcctcccaagtagctgggattacaggcacccgccaccatgcctggctaatttttgtatttttagtagagactgggtctcaccatgtttgccaggctggtcttgaactcctgacctcaggagatccacctgcctcggcctcccaaagtgctgggattacaggtatcagtcactgcggccggccaggcatgatttattaatcttgtaaatttgtcaaatcgtccttttgaaaaatattaacagattggaggaggggacatttatatataggattagtttcttctagtttgtacatggtacatttatttcagtctctataattagactatattatctattagaaatttgaccacatagagcaaaaaccattctcagtagattaccactaagtagactactgaccttactagaaatagtcagaatcttctggttttattgtctgacaaactgttaaaggccttaccttagttgtggtgaaacacactaattttcagttagggctaaagaaatctgaaagtcaattttaaagtttgtagctctccttgtatacttcttatattcaaaacatgtaatgtcctgcttattttattctggaagtcttttaacatttaagtatttatttaaggtgactttgcgtaggtaataacttagaagttggatatgcttattttgttttctgtggcctttaaaataatgtaatttttgttttttattatttagggatggtaggatgctctttgactacctggcggacaagcatggtgtaagtgttttaaaaatattttaaagttgtcatgttttaataatgctgactaaagactggtttgtacagatgagcttatggcttggcctaagaatataatttccagattaatttattaattataaaatctggttatatttttaaaacttcagtgtttataaattgttgctgacaggaaaatatgtgcttatagctcacctttagatgacagaaattctcaaagcttgtatttattccagagttgtaatagttggcagtaattgttggcattttatattagtgccaatagcaagctaagtattatatattatagggcataggatgccttttcttatggattaacgagtaaggcaaacagaattaaatttgaattagaaatgctttgagcagtagaattaggtagtactttggctgccttgtggaacacaatagcctttgaaattatcaaggtctttataagtccccagattcacaaataaagaaacatcgtaagctttcctaaccgtcactcaatcttatttcccttgtgttaactcaaagcatgaggctttgcatataattaattatttaaggagtccccaactcccaggtcatggaccagtaccggagggccacagagcagatgatcagaaggtgagcaagcattaccatgtgagctttgcctcctgtcagatcagtggaggcattagattttcataggagcacgaaccctattgtgaactgctcatgcaagggatctaggttgcacgctccttatgcgaatccagctagtgccttgatgatctgaggtggaacagttcatcctgaaaccacctccccgaccccagcccccattagtttacttctttaaataactccagaggtcagttctataaaagtctcccaaaagctgccaccaaaaataaataccataatcagagatacatttgactcataaaatatacattagaagttggtgacttaaacattcatagttttgacctcaaagacttatgaattacaatggggttttaaaactctaaattaaagagaacttaatcttttttttttctttttagtttaggcaggaatatttagatacactctacagatatgcaaaattccagtacgaatgtgggaattactcaggagcagcagaatatctttatttttttagagtgctggtaagtataagtacatgttttttttttttttttttttgtcttttgtaggattcccttggttcttcaaaacatgtatatagatagatttgggtctgttcattaagttttcaacagtcattggcaaaagagaaaaaagtaaagaaaaccctcccactcaaaaacagaaactagaaaccttgtttcagggcctcaaaatttggagggtgatttaacttgtccttgaaatccaaaagtaggaacaattttatgatttttagcattaacagaatcgtatcatgtaatggatttattattataatattatacagcacagtgagtggcacattgtaggtgcttaattaatattgttgagtaaatccattattcctgatttaatactttatcatatatatatatactccttgaacttggctctaaacaactgtggaatcctaacggtatgtgaaatattttatgccttagtagtaacttttttccagttacctctgccttcagctattggaatataaatatcaatggtttcttcattacgtggggtatagatgagtttaaatggtactattaaccatgaagtatcctattaccgtatatttgacaggcttctagatttagtgcttttgttagagaaggagagttgtgtgaagccaaattaaaaatcaggccttggccaagtgcggtggctcacacctgtaatcacagcactttgggaggctgaggcgggctgatcacctgaggtctggagtttgaaaccagcctggtcaacatgttgaaaccctgtctctactaaaaatacaaaaattagctgggcatggtggcacgcacctgtaatcccagctacttgggaggctgaggcaggagaatcccttgaatctgggaggtggaggttgcagtgagccgagatggtgccactgcactgcagcctgggtgacagaacaagactccatcaataaataaataaatatatatcaggccttcaaattgatgtacttcgttctcactctgtcttctgtttaggaaagtgtattaagtgccttctacagttatcaaaacatccttgtattaactagcctctcatttgagaaattataatttgttaccttggactagtaagtaggtacttaaagtctaagatttcttttttttttttttttttttttttttgagacagggtcttgctctcacccaggtaagagtgcagtggtgccatcatagctcactgcagccttgaactcttgcgctcaagagattctcttgcctcctgaatagctaggactacaagtgtgcatcaccactcatggctaatttttaatttttttttttccaagatggagtcttgctatgttgcccaggctgatctcaaactcctggcctgaagtgatcctccctcctcagcctttcaatgctttgggatttacagccatgagcctctgcaccctgcctgtctaagatttctctagttaatcctagaagttggaaaaagaccttaaaacagagactttttgtcttccaaccttggaagagtttgtttctttttgcctttactttctggtgcttttttcttcacttgtagctccacatgttgcaaaataaagtctcatggctgctgtctgtggttattttctaggaaattaaaattttcattttgtggggagggagagattagtattactgattcaggtaatttctacacttaaattgcatagacaacttcactttttgaaactccaccgtcctttaaagaaaaagattttctgtttatttccaactttgcttaagaaaaacaactttttttctttcttgcttccatttgtagatgaattcttaatttacagattagctgtggttcacttgcaagtgcattgaaggtaatcagtgatgctaaacttgtagtaacttatcaaaaaattccatcagttttactttgaatattacgagggatttaggagagcaaaagttgattactttggaaatgtaaacagcttaaacccggattgtaaaatcagaagcctggtatgattacaggtacatgaaaagagttggttatttatatcatttgttaatgctgggagtgaattttgagaatgaagatttagtgtcatgttagagttccagcacagtaaatttattgttgctggtcagtgagtgaatgtgccattttgctaagacatggaaacttaaggtaactgctggaaatccagatattgaaactcttctagcatatccacccttgaaagcaggttagtatgaagagccaactgtaatgacatggagtttagccagagtagtacacatgaaccttttgaggattaaaaaacttgctacactgctacaaaaagcttttattctaacacatataacacattctagtgttaatagtattatatttatgtagtatggttttatattagtctgaaaatttctacaagtgacaggtttgtacttgtaggtttggtgaatttttatgtttatttttttaaaatatgacgatacaagttaattcccggtcttaaaaaaatttgagggttagttttaaacttttgcattgcccctaacaaatcttgtgctggaactcaaatgatattttgattaagtgattgaatactgtgatacaaacactaagttaatatgttttacatcaagaacagtcaacatagagttactggaaattctaaaaagttacattcaattcgttttaaaatttttgtcctgtctgagccacaaaacatttgtgttaggcgagagtttgttgcttcctgttggcatattggcaggctaacagtgccaagcttaaaagaatagatatctttttcttttgatttagatagccactaccacaagatctgtgtatttgtttgaagttttgttaatagcaaatctaaaaatcttgtttggatttgggatgagaaatgtcagtgttttactttttagttaattaattttattttttgcagtggcctttttttatttctaaatacttttctggtggttgattattcttttaaatctgtggttagggaaacataagctatgaaagagctattgtaactatgatctgagattagaatttgactctccaaatgacctattgtaggtcagtgttgtataaattaaagctgtgtgaccctagaatctgcccttaaaaaaaaaaagaaaagactcgtggattttagaatacattgagaattgttcaggtacactctgtttggtgtgaaacttctttgatttatactccaagaaatgtgttaattgaaataaaatgacgaagctggtttggtgggaatttttgaacacttttgctttaacagttattagcactattgattattttgttaaaattttccctcattgtggcctttgatctggctccataatataccccattcccttattcagcagctctttgaaataaaagtgattttagttcctaggactatttgttatacttttggagctgtctctttccctccctcaggatgtaaaatgtatttcctgtttgtatataccacttcatttaaaaatatttttccttgaggctcaagacagtatgagtaatgataatttttagaggcattaggatcttgattgaaattctggctctgttgtatcctgttgtgatgtcactgtaagaattgtgcatttaatattgatcttcaagcatagttttgcatattttaacatctgaaatcagaaagtgtctttactgggtttttggttttagaaacataaaataataatgtatgttaaaattgatggcatttttgactcgatgatatatttttatattcagatatcctttataagaattaaacattttatcctttgtaattagaacaattattttatggattttgataaaccagtttttaaattttcaatgaattttgaaacatttgtgtacttgtgtggctacattaagtcaagataaagaacatttctgtcacctcagaaagaccctttttgttcttttgtggccatactccacccatggtcctgggcatccattgacctgctttctgtccctgtagattagttttgcctgttctagaattttatgtatgtaagtggaatgatgtactatgtatgtttgtgtttggcttatttttaccagcaagtttttgaggttcatgttattgtgtgtatcagaagttagtttctatttattgctcagtagtatttcattctgtgaatttaccatggtctgtttaatatattcatctattgatgatgaacatttagattacttttcgtttttgcctattaaaaataaagttagtatgaatatgcatgtacaagttgtattgtggatatactttgtgataataactagaaccaggagtggttcaaaatttaatttacacatctactccctgtgttatttgcctgctcttagtgtgccaaatgttatttagtacatttgaaaggaagaatctcagtatagactgagtttgtattgtggtccccaatgtttagatcatatatctgtaaatatgtatacacatttacatatagataaatataaatttacgtatgtaaatgtatatgtaaatatatgtaaatctgtatacctatctctgcgatgattttcatcatcatttcagtaactcagatttaccaagttcttattctgtatcaggtgataattgtaatccctgtatgtcttatgtcacttaaactatacaactgaggtgggttctatccccatgttgcagtgaggaagctaaagtacaaactagctgttaagtggtagagacagaattcttgattggatttctgatcctgcacatataatttaacttgtaattatgatatctcttgatatttatactattatgtaaaagtgcttctgtaaaaaattaaatttgaaatttcatcttgaggtgtagacatgtattcttccccctctactgcccttacttgcttctattgctttagcacatctgatcggttcagagtcagtttacctacttctgctgctttgttttgagggagtccagctttgctcattgttattagcctggtcattatggatgttttgagtttgtgactcttttaccagcggatagaagaggtagggatggcccttagtcccctctttttttaggttaagactgtggtgtaaaatttataggtttcatgattagaagtgtaatttggggcaagttacactctatatgtattagttcccattttgaaatggggataaaaaaatatagggtttttgttaggattacaggagaacactaacttgtattgctcagtacataatcctttgataactattaattgttaatcagtgggcctgcttttttcctgtctccctctctccgtactgacttccatttgtgtcataatttggaaatattttttggttctgtacataatttctcattacattgtaaatgagactcacgtgtcttgattttccacatcttcatcctagtgattttagtgacaaattacatgtaaatctaacttggtttctgaagttttaggtgcctgaaatttgattagttatgtataaattatctgaagtgggttatagtaagatgatgctgctgtttcctagttataaaagttattttttattttcttatctagactgattattgaagacctgagtatttttagcaaaggttttttgaaacaaaccagtgtgatccaataaggacttagataattacagttttttgtagaaagctataggtcttttagtaggctagagggatacatgggtataaaacatacattatgttcatttttcaagagtattcacaatataattaattatgatttcttaaacaggttccagcaacagatagaaatgctttaagttcactctggggaaagctggcctctgaaatcttaatgcagaattgggatgcagccatggaagaccttacacggttaaaagagaccatagataataatgtgagttcgactttttcacagttattctctgaaatatctgtgtatccttcacactttctgatgaggaaaatcactatgcattttgggaattaaaaaaaaaaattcatattagcttttgttgaccttacaaaaatcatagtggattagtggcttgactagtttgaatctccttgaatgaaattgtcagacttcttttggctcttagagaaaaaacgtagccttcatttctgttttacagctactgtgccctttttttctatgccagtcaaaatgacactatgctgttagtgccacctattattgaaagtcctatgcagaagacagttttcatctacaattatctaattaaaccacttactatgaaatgttcagtttaattcttgcttttaaaatgttttctgaaatgattataatttataacttctgtaagagtttataaattagagcgtcttcagtagacattattgaatctgtctctaagaacagggtaataatttggaatgtcgagggatcatgtagagagaaggcatagggggtcggacattgatcataatgacctccgtgcatgccttagaaggggctcatttttaattacagttttgaagttagtgatgtttgtcctcctgcctctttcttatatattaatattttttatgtatatatttttaaatcctttagtctgtgagttctccacttcagtctcttcagcagagaacatggctcattcactggtctctgtttgttttcttcaatcaccccaaaggtcgcgataatattattgacctcttcctttatcagccacagtaagttatttcactgtgtaattttggctttgtttagataaaattacatggagttgtttaaacttaaaatatacttttttctatcatttgaatttgttgtcacctgtttttttttttcttcatgtagtagatttgcttgttactgaaaagtatgcatgtgactcttaagtaaactatttgacagagtgtaccctaagccttttaaagtgctatttaaagtgtggtccctgggccagcagcatagaaatcatatagaatctcaggactcaccctagaactaaattagaatctgcattttaataagatcccaggtaactcatgtaaacatcaaagctttagaaatgaggctctagggcatactacttgaaaggaatacgtgcatctttttatatcatctttgctctgtcaactagcttttgtttaatattttggtgatgagaaattcactgcttatgaactagaccattcttttgtaagctagaaattatttgtaaaatttactcttccagtggaactcaaatacctctgaaacttctgcccattatttcttgtttgtttggaatgacagaaaacaagactgcttcatggaaactctttagatgttttaagataattttttactcctctctgcttccttcaggctaaatatctctagttttattaagtaacacagtttttcagaccctttagtattttgattgcctttttagataatttctattcatattcttacaatctagatgttcataattgaaattttattctaggattgtcatctaaactttatagattacagtggcaatattagctcatgttacttgtatgtatgcttttactaatatagcctaagattgcagtagcaattttagcagttgcttcatggtatgagttatattgtattgactatattattgggcaaattttacaataacacttttttttttagataatgtctggctgtgttgcccagactggagtgcagcggcattatcttgcctgactgcagcctctacctcccaggctcaagccatcctcccccgtcagcctcccaagtagctgggactacaggcacatgccaccatgcctggctaatttttctattttttgtaagacagggtttcaccgtgttgtgcaggctggtctcaaactcctgagctcaagcagttctcctacctcagcctcccaaagtgctgagattacaggcatgagccactgggcccagccctacattaacagtcttagttcatacttttactatttgttcatctaaatgaagattttatagtttcattacattttatcttgtagaaatgaaaatggtttcatatgacaaatgaaataataagaattctaaatcattaggaaatactatatacttggctgatatcctccaaaatctgaaataccctgtgtggcattatcagatcagttaactgagggaggaatcatggggggttttgctttgtttttaaatgattccattaacaggattatgggtcctgatgaatgtattggtcagtatttaaaaagtgtgtgcatatgggaatatatcctaactttgtggggcaaaaaatcccttatttgaacatccagtaaagccttcctcctcaaacattaaagttagatagatatacactgaaaagccattggatatttggaaggaagagaaaaatgatattaaaattatatttgggagtatttttaccagccagtgcttcttaaacattttggtcttggaacccgtttacactgttaagaattattgaatgtaggccgggcgcagtggcttacgcctgtaatttcagcactttggaaggccgaggtgggtggatcacctgaggtcaggagttcgagaccagccatggtcaacgtggtgaaactccatctctactaaaaatacaaaaaattagccccacgtggtggtaggcacctgtaatcccagctactcagaaggctgaggaaggtgaattgcttgagtttgggaggtggaggttgcagtgagcctagatcacaccattgcactccagcctaggcaacaagagtgaagctccgtctcaaaaaaaaaaaaaaaaaaagaattattgaatgtaattttctttgcattggttttatctcttggtgtatacagtaagtcctcaatattgtctctaggttcttggaaactgcatctctaagcaaaacaatgaataatgaaacaattttctttctcaacagcttcataatgaaagaatgttacttggttttaaagtcgtagtttccaagaaggtaccgattatgttaaggacttaactgtattaaaaatcaaaacaaattaaaaattttctcattaataaatggtaaattgattcaatttaacacataatagaattttaacgaaagtaactttgaaaacaaaattagtgagaagagtgacattgctttacatttttgcagaccttcagttgctgggttaattgacaactgggttttcatgcctgctttcttgcagtctgttgtgatgtgctttaactgtaggatgaaaaacctagcttcacacatgtagttggaaaagaaaggtgtgttttattaataatatccttttccgataattgtgaatattcttttttgaagatacagtaaaattcagtaagaagtacagataaaataaaactcaacaagaaatagtttttaaaaggttgtttgtaatgtagaatctgaaaccatgtggttaaactttttgggatcctaagctgtactggtattctagactgtattgagctatcttgcacttggaatggatcttttttacccatgcatgattttatagtatcattcattggttgtttgggaaatacttactggtccagtgagttatgcaggtattccagtgtgttgacattatacaacaccagaaaaaccacattcatgaacatcactaccagacccatagaaacgggtttaagcattggaaagctttcaagctcccagtggctgatacaaattttccaaaattctagtttttcttgaaagctctaattttatcatttgtttttcttgaaggacaggctcacttcattttctagaaaatgtctggcaaattcccaagtctgaatgtctgaatagctttagtttgtctgccattctttcaagtaaaaacagtgttctgtgagaaaagcagctggttcatcttgtttctcagttgcacaagtgcttttccttaaggacagccgtgacagtgaagtgtgtatacagcagaagcactttatgaatacttaccatttagtcatacagaagactagaaagattagtacttaagggttgaagtttttaaaaattaatttgggctacgtgattcaaggacatagttgaaactttttgtgtgttttttaaaactgcaaaagtgtggtggtgaaaaatatagggactgctagtatagtttgatgccactgctttgatttactctaaagtacaagaagaatttgtttgtttatagtttagtaatttttagtaacttaactgagtgatataaccatcacaagtcagttttagaacatttttattgccccagtaagaaccatcatgcctgtggaactattttctttgaacagaaacagcctgtggaaaagaaaactactcagtagtatgatgacttttagttgtttacaaaagtactgtgtttactgttttcacttgctatagggtcagattgctgtcttattttctgtcttgttaagtcttcttgcctgattttgatttttgcttgattctgacttttttcctaatggaaatatacccagttgacttgacagatcattgtttcacccatttcctggacttcatattcttgaagtgggagagctatttactgttgagattgtgtgtgatttgcatttgtatatctataatcagtatgtgtttttcagttgtctctgtttaagatttatgaaaaaagtagttctaatttcttatagcacagtaggtagttggttgattgcatgttcaatggatattatatgtagattgtaaattgcatatttttaaaaattattttatttttattttttttgagacggagtctcactctgtcgcccaggctgaagtgcagtggcgcaatctcggctcacttcaagctctgcctcccgagttcacgccattctcctgcctcagcctcccgagtagctgggactacaggcgcccaccaccacgcctggctactttttttttttgtatttttagtagagattgggtttcaccgtgttagccaggatggtctctatctcctgacctcgtgacccgcccaccttggaatcccaaagtgctgggattactggtgtgagccaccgtgcctggccatactttttatttttaatataaaagtacgttagagatcatgtatacgtttgtccttaaaatgaaagtttagataccagtgcaggttaaagtctcttacatcacatatattaccatttctgccataatttattctgaatctaaaatggagatgatttacacatttgaaaagtgttgaacttttaaatgtaacataatatataagataaggtggcaggtgtaagatagagcagtgttcgtaggctatcggagatgaggctttgccactaaatgtagatgctgttaggaaaaagaatccatttgtaatacaatgccctattactctccacttgtagaaagaaagatgcaaagttcagttagtaaaagagtattttgttttctcaataaaaataatctgaattttctaagaaatttcaagttttactattaaccaatccactatgtgatgtccagaatttgtacagacagacctttcctgctgttattttccttatattttctaattagttcctggtaaaaaaaactctttgtcgtgcagatagtttacctgctttagctcactcaggatgacctccaaggtcctcatctggaggtctacttagtgtcctacctgtgtttttgtttttctctttttaaagcctgtccttcatgaaatgcacttccctttttgttctttcttgtccaaaacctatctgtttttaaggtccagctcagatttacttccttcgtgaagtcatttcagtgtattttgtttagcttgtatttggtgtttagttacttaaagctgttaaaataaacaaaacttataatagcttcatctccccaacttgtaagcatagttacagacagagttgtcatttttcatgttcttgtagcacatagtagatacttaagtatttttaatttggtggcatattttatgttttgattattaaattttctgtgtttaattatgaaacactgtaggaaaactcccataaagctgtacagttggggaagattgtgctagaatgaaaaaataaactaaaacattttacttacctagcttgaaatttcacttcatagcacaaatactgagtctgttatttaaaaaaaaaaaaaaaaaaaaactaagaaaatttgatttcaaaactatgagaagtatagcctgctattacacagcttagaattcaaacgagtaacataataagtaatacaagagcatgtctaataagtacatacagtggtattgtacatgctaaatactggagaagttagaagcatccagtccttgaagataaaaattgatctgtcttaaatttggttggacagagaagagagataagccagggaagtaaaacaaaagagcacattggtcattggtaggctaactgttaaaatatatacctgtggttttggtcatgtttgaagtaagtttttaattgctgatccttcaagaatgtgaattgagataacaaaataatcacctctaatctccactcctattccttcctctccttatctatatatagatgcatacacacctaaatgtttatatacaggatggatcacttttgccctgtaaggtagggagtctgccatgtttcaaagtctggctgggcatggtagctcctccctgtaatcccagctacttggaaggctgggacaggaagatcgcttgaagccaggggttttgaagcctgcctgggtaacatagtgagacctatctctaaaacatttttttagaaattagctgggcattgtgattcactcctgtggccccaactacttgggaggttggggcaggaggatggtttgagtccaggagttaaaggctgtagtgaactatgactgtaacactgcactccagcctaggggacagagtcagattccatctctaaaaagtaaaaacgcctggagccatggtgatactgtataccaaggatctgcaaactatggaccatgggctaaaatctggcccacagcctgtttttatatgtctggcagtctagaatggctttcatattttaattggctaaaaaaatgtgaaaagaataataatattttgtgatgtgaaaatgacatgaaatttcagttttagtgttcataactttttattggaaaacagccactttgtgtgtgtgtgtgtgtgcgtgtgtgtgtagtctggcagcttttgagctctaatggtagatctaagtagttgagacagagatgatatgttgcacttttgccacctcatactcttctcagtttactacaaatccaagtgatgccagttatacctggacagtgtttctcaagccccatattgtcacactgcaacattttatttatatgttattttattaccagtgcttatttaccgtgtcaaaacagagaagtgaacttcgactatgattataaagcacagtggagtggagatttttattgtaggaattacaaagcaaagtactaaactgacactgtaggtaagctaataatatacatccacattaccggactataatcacttatcacaactgtcacatgttctcaaactgacaggaaagcaactgtcagaaaaattataacctttagaaatggaatattagatcccagcagaattttttcacaaaaattaatgaaagtgaggcatcaaaatttctagcccagagcattgcctcatgcccatagccctatcacttaggctaaggcaggaggatcagttgagcctgggagactgagtagtgatcatttcactgcacttcagcctgggtgacagaatgagaccctgctctaaaatttttttttcagttaagtgtctgaggggttcttttcttttctttctttccttttctttcttttcctttcccttttcttttcattcccagttctttttctttttcttttcatcctgtcctgtcctgtcctgtcctttcctgtctgtccatgtctcgctctgtcgcccagtctggagtgcagtggtggaatcttggcttactgcagcctcggttcactcactccctgggctcagatgatccttcctcccaattcagcctcctgagtagctgggactataggctcacaccactacgcccaggcatgtgtagtacttttatcagccaagtaaggaaagtcatttaccagtggtgatccagttaaaacatgtttgattttagcagccagagaaatctgtccagtgaagtaaacttgtttaaaactattaacctttcagcgagaacagttgctctgagttgaggatattgacagcatgttgatctggggagagattgaaagtgcccccaacccgttatcaaacactgaatggctctggaagttaacttttgcagcagacttgataatgtttcttagtttgtgccatctaaaattgcaaaacaaaagtgtttatatgtagaatttatattgcagtaaagtcatttcagtgacaacatggtatgaatcataagtaataaaaagccagctgctttacacattttgtgttctgtcagaagttaaaacacaaagggagaccttcattgctaaataggattgtagcagatgcatttccaagttcaaattatagttgcagaaagttttagacctcattgcaagtatgaaggaaatttctatatttcaaaatttaactacagttgaattgaaagtgattaatctgcaatgtgatgacacgctaaaagataataccaaaataatagaattgtacatgtctttctaaatgtgctcaattaaaataatatgcttgtcagttggtgtttgatgtcagcatttactagtgcctgtgcatgtttttacattttccttttttttttttttgggagatggagtcttgctccgtcgcccaggcctggagtgcagtggcaccatctcagctcactgcaacctccacctcccgggttcaagtgattctcttgcctcagcctcctgagtagcagggattacaggtgcctgcctccacacctgggtaatttttgtatttttagtagagacagggtttcaccgtgttggccaggctgatgtcaaactcctgacctcaagtgatccacccacctcggcctcccaaagcactaggattacaggcatgagccaccatgccccgcctacattttcttttttctttctttttttgaggcagggtcttgctctgtcacccaggttggaagtgcagtggtgcagtaacggcttattgcagcctcgacctcctaagctcaggtgatcctccacctcaattttattattattattttttgtagagacaaggtttcactatgttgcccaggctagtcttgaactcctgggctcaagcagtcctctcacctcggcctcccaaagggttgggattacaggcatgagtcatggcacctggccgtttttacattttcaaggactaaatatgtaaaatctcattacagattacattatcagaaaaacatttgcaatactttttaatgatatggacctctaaatttgaaattaattaagcaaaattattcccagtgaaagaattccattggtctcattagcagacctatattttggaaatttgtttcctctctttttatagaagtatctggcataatattctgaatttgcctcttgcccacaaagccaaaaatgtttactatctggttctttacaaaaattttgctggcttctgaaatacactcacagaaacaaagagtagatttcccaaataagtaatcctccagtaaaaataattaagatgtatatggagcaatggtataaactcaggataagtaaaaataactatgagttgaacacactatacaacaaacttatagaactatttatgtataaattgattttagataaattaatgatgagtctcataaacgtgcactaaaatgacctactttgtctgagtggagtggctcatgcctgtaatcccagcactttgggaggccaaggcaggcaggtcacttgactcagcagttcgagaccagcctggccaacacggtgaaaccccatctctactaaaaatacaaaaaagttagccaggtgtggtggtgtgcacctgtagttccaactactcgggaggctgaggcaggagaatctcttgaatctgggaagcggaggtttcagtgaactgagatggtgccactgcactccagcctaggagacagagtgagacttcgtctcaaaaaaaaaaaaaaaaaaagaaataaaataaaaaaataaaatcacctactttaaaactgatagtaagagaaacaatcatgctttcctgtgtttgtacctgagctctctggcaagagaagtaattgttctaaatgagtattgcaatacaaaattttcatttctaactcaagcttaatttttcagatgatgtaatttagccagtgtgtttttggtgtcttttcctagaaattatttattcttgagtggatattctttttatacttcacctcgtttagagggcattcagggtggctaagtgggactagatattattaagtgttcaattctagggtcctctaaagagtttaaacaacattttgtgggaatctataatataataaaatacagatttactcatcattgcctgggggaacttagaagataaggtattgaagctggaccttgaaggatggctaggatttaggctttcaggggtatgtatttgggagaccaatctgtgtggagtgaacttgaagaaaagagagaggaagctgtcaatggtagtgtgatgggagatgtagctggatggataatttggggcttgaatattcacctaaaagaaatggactttattgacagataattctgagatatgtatagtgtctggccctcagaggtgctaaattagtatttattgggtaaataaatagggagctatttgaggaaattaagcaggagaaataagggtaaacacctaattacagggcattgtcccatgttgatcatcacaacagcaagatttgctaaatattagccaagaccctgttaatgtttacctgacatctattccttcctaattcctactgctaccactttaaccaatgtcttgtaatattgtaatattccttccccgttgcttccagtctttcatcccctgaattatttaatttaagtggctgattttctcattagtatgagtgctttgcacataggttttcacacatttttttctaatgggtgaatgaaagtcatcgcttagtagccttttggaacagactgacagcatgtcaatgaaccttgcaaaatcctgttactcaaaaataataataggataattagcctcttgattgagtcttccatctcaccccatattaaagaaatagtggctagcattctcctcatttggattcctgaaactggattctgtttttaaatttccttggaggagattttcttataatactcattcttaagtgtttgcagtcttaggctagtgaaatagtacaatctaatgacctgctcgagagttttctttatctcaccctgggtaagttattaaataacttttatattttttcttagatatcttaatgcaattcagacaatgtgtccacacattcttcgctatttgactacagcagtcataacaaacaaggatgttcgaaaacgtcggcaggttctaaaagatctagttaaagttattcaacaggtaaaactaaaatatatattgatttttttttttaaatacctaagctttaggtctaacctctttttctaaggtaagacttagttcttaaggtacaaacgtttttaaaaataggtggaaggaatacttgaagtttagaaaagagaagaccctcaaatgggcttttgttttccttaagtccaagatacacaagttggatgtggtaggaatgattattactgtctgctagatgaacacttaatatatacattatgtgtatgtgtttctcttattgcaaagagtgaagaaaatctggaacctggaggtgggggtcattacctgtgtaattctacatgggtgaactttatatacaataccgtttcaatagaccccaagttgggcaaaaggtttcaggcagccatgctgattgatatttagtgagcttgtcagcaaaacccgtagattagaaatataacttaaatatttatttaagagtgtattaaatacaaagaagttattgtcattcagtagggaatgaatacccttatgattggggaagtttattactgtttattgaccaagggagacttttggtagtagaggaatttgaaagctttcagaatgcttctaggatgagactttagagaacttggtttgaaagacataataagcttaaggtgtggtctggaatcaggataggaacaattgttttgggaagatgctaggtaatttggctagaaattaatggtaaagaaggagaaaacaagaagattgggatattctggggcaatctgctaaacaatgttgaatcagacttaccttgaccgttgacttatttttacaggagtcttacacatataaagacccaattacagaatttgttgaatgtttatatgttaactttgactttgatggggctcagaaaaagctgagggaatgtgaatcagtaagtgtgaatttttatttataaactaatactattcttaaatttttggatattgtaacgttaatcttgcagtgtcttccttaaagtaatgaagtaattataacggaaatatgcttattaatcttaaaaaggcctaaatggctcatgtttattaaccttaaaatggcttaaatggcttgtgtttattaatcttaaaatgggaatgtgctagagtgatgacttttttaatgttgttgccatgtgtttatcccttttgtgagggagtttgttaaaacattgggggtaatttaaatttacagacatatccataatttcatgtcttaaatctcgaatgaatatttttaatatttcatatgtacaggcaaggtcactttgaattgcaaataacaactgtgtttttaattttggttcatagatgggctt

SEQ ID NO: 445 - DNA, 32742 bp, Homo sapiens
  source 1..32742: mol_type = other DNA
ccctctcaccccgctgcctctaggttctgggaagatggcgaaggtctcagagctttacgatgtcacttgggaaggtaacttcgggtgggggcgggtgcggaaagactaaaagcgctgggaagccgttcgggagtacccgctgctttcggggagctgggttctctggtgtctttttggtaccagagccctcactgtacgggccaagctgaggtggaggctgaggctgacccttcccttggcccggacgcgtactctgcagcgtttcccacggtgtctgctcctcggttgacctgccctcctccgcgccagtccagcgtcccggggccgcttttatttatgaggcgggcgggagggacttggggctggggttgtcgcacgctaactggttgctgggcggtgcggaagaggcggaataggtggttactgaagcttctttggagccaagaaacacagggcctgtaaggccctttactaagtggtgtgtaaggattacagctctgtgcagaaaagctgtgtaaaagatgcgtgaacaaatgtgattctcatatgccactctacatttagttttcttcttaaacccgggtttccagtttcttttccttttagtctagtctctgtcccactccttctcaaaacacatttacacacacaacacaacttctttcttactccctactagtagtttcttttctgaagggaaaaataactaattaactctgggctacgtaagtgcttacgtgtgatggtcacttttccctatccttagttgatctagagtgggatatgttctttaaatctgggaacagccaaaccttggatcaattctgtgtgcttaagaaacttgagtttcattaaggcgtggaatttgtgtaattggaattcatattcccagcatttaacataatacaggagacttcagtagctaatttgcttaacgaatgccttcttgggatgttttaataatgacctgaaaacatgtggaccgaaagttgtattttctgttttatcgtgaataaatatatcagttattataaagttgtaaatccgttacaaataaagcaaaatttctttgtacttgaactgaattaaatgatttattgactttatggcctctagcacgttgtgaatctcagtatttatacctgaattgagggattccattatattaaacaacagtgttgatttcttactgcaaaatcttggctctgtcaacacacagtccccacttccaaggaagtcacaatctaatggagaaaacaaacctgtaaacacacagttttaaaaggcttgtgtcagggtatcttccgtaagctgagtcgtagataaatggatgttatttttaatgctttttaaaaaatgttttaaatattacataatttttagaaaatgctattatgaaggtatgttcattataggtttcctagatgatagtagcatatataaaatcctgagggacgagtagctgtatactaccaacagacaaggtgatttaactgagtaattggaccttaccctgtggtcattctaaagaggattgatgtaattaatttggaataataaataataactactacacaaatttgtaggaacaaagaaaacattttaaagtgctttgtaaactgttaagtactatataaaaggatgtgttactattagctagtgctaatatgattatgtccttcctctgtatgatctggcggttgcccatgtctccagctttatcttgagcccttctccctctcactttgtgagctgcctatgctggcctttgttgaataccctaaattgccatgctgcttcttaaagctggcacatgctagtccttccactgggagtgttcttccctccttgcctcactcttgcccccattaaactttatcatttatcaattccccacaaagctcacctactacaaaaaagccttacttgaccactctactacccccttccctttcctcatcccccaccaaaattgaaaaaaaaaacccaaacaataaaatgaagcaacaaaacacacctgcaatccttcgattatgtattctattctaatactattgaagcacttacccaattgtgttttgttttaaaattttgtctctcctaagatgaaagggaccaggcctgtttcttcactgtcacttccctagagcctgacacatgggggcggagctcagtaattatttgatgactaaatgaattgttaatgagattaataataaacactaacacattgtcagaaaagattataagccatttttctagcgttgaaataatttctttagtatcttagatacaggttttagtatcattcttctcttagcttgaaaatgacctttttagagaagccttctctgaccaccctttccaaaagctcctcctttctcccaatctcctgactttatcatatggtcttttagttttatttgtataatttcactatctgaagttatgtggattttcatctttttaccctattatactctaagcattatgagtatataggaactttatctttttctttctttctttatcctcagtgcccagatcaggcctggcacataggcatttaggaaatattagttgagtgatgaagaactccaatatttactccaagaagtaaatattagtggaataatgaagtatagttccagtcatacactatactgcctcaaagaaggtaggaatcattgggtatcttaagaatttacattgtaatgaagtaaatctttagaaatatctggtagtaatttacagattgaatttgggttgagagatcagtttggaagctatcctagcaattttagcatggggtgatgaaagcctgggcatggataatagcagtggaaatagagtagaagatgtaaatcttcgaaatacttcgaaatacttcaaaacaatccacaggacttagatatacaaaactcccacagtgggagtcagaaacagcactaaaaaatggaatgtcaggtagtattaacagaaggtggaattaacagaaatgtgaacattgggaagggaggccatatttttaggaaatgaagatgacttgattttcggatgctgtgattttgaggtaatgagctatcaaaggtgaaaacatgttttcttcaagatggttttatttttacaaataatttttttagataaatgtatttaaggcatttctaaaagtagtatgtggttaatagtgctacaaatgtatttattacagcagcactcaagagtgtggcagggtcagctatgtaaggtgtatagcttaaggtgtttataggtaaaatgttgcttgttttgtaagttatattttcatacacagtgtttcttgttttgtgttcagctattatattttaatatgtgactgtgtgtcagactgccgttcttagaagttatgctttaaaaaaagttctctttcctatgagtgttttttcacaataagaaacaccttttacaaattaactcatactcaattaagtatacctatacatgaatctttgagtgtatgtataaactgaaaccaaagttgcatttacaaaggattctaatgagtattgcttccattctgttcattttgtttcattctcccccactgcccccccacccccaacagatgctggaagaaatccactgaaccgattttataccctattaatggattgtaatacacagtttgaaaaatacgtcttctggagctctgtgtgcattaaaataaattaaccctttcctttttcaaatcaggttgccttttcttttagaatagctgttcccaacagcctgcagccaatctgactagatacttttatgggaccatgaataatttaaaatttattatcctgtaattatcaaccttttaaaagaatatgctggtttatgtaaatgaatctgtaagtggtatttccgaatatataaaaaaatgaagtggaaaagatacaggattggaggaagtagttttggactaaagaaatcataattaagtagcaggcatatttttccatctttcagaggccacctcactgcagtgacatctcatgcaagttgtcatggaaggaataaacagaacaatcatagcgactctcttaacctttgacctttagctcatctcacaggattgcacagtagttaataaaatgtacaagcaagcagtgagaagcttacttacatagtatgtaataaaatgaccttggctttgaggagcgagctttttgcaggaaggtgaaagggtaaaatgaaagttttaagccacctttgaggaaagagtgagggaagagcctttatttcttgtgagaggctgaaacagttaccagatttttttaaaaaataaaagtaactagaatttttgtagggcttcacattttataaaatgctttacacgaattttctagtgtttggtgtcctaaactcaagggccaagcagatgaaaatacatgtagttgggtgaaagacaatagtggtgcctgtgaagaactggtaagtgtatacccttatctaagggtaatcaaaatcaacttaaaaacaaaaatatccaaactattgtacgaaccaagcaactttatatatattttatgtaatcttaactgctcatccctgagctaaaggtaatattatctctattcattggtattggaaactaagtacagattcggtaagttatgtaaggtcatgtaaaagatggagtttagattcaaaccaagtgtatcaagtccatgttctttccagtatactatacgtcctctatgactggtgatatggtttggctctgtgtccccacccaaatctcatcttgtagcacccataattcccatgtgttgaggaggagacccactgtgagatgattgaatcatggggacaggtctttcccatgctgttctcattatagtgaatgggtctcacaagatctcatggttttagaaacaggagtttctctacacaagctctctttctttgcctgctgccatccacgtaggatatgactttttccttcttgtcttctgccatcattgtgaggcctccccagccacgtggaactgcaagtccagttaaacctctttcttttgtaaattgcccagtctcgggtacgtctttatcagcagtgggaaaacggactaatacaaccagtttcttttctttgaactgtttactcctttccagtttatcttctggggctttttgttttggtttcaaatttatttatttttaaaattgacatataaaatttaaaattctagtggtttctttttttttgcaccagaatgattttcctgtcagacagccatgattgtgttgcttttcttttgctcagcatttttaagttgttcttctgtacctttaaaaacaaactttaaagttctctagtatgaaataaaagtcttccaagaaactcactcttcttacttcttatacactcatttcctgatcctagtgtgtttatttaattcccagctaccagtagttctttctgtataggataacttactttgttatatgcctgttgaactcctttttcaacctttaagagacaggggtcttgctctgttgctcagactggagtgcagtggtgcaatcacaggtcactgcagcatcaacctccaggctcaagtgatcctctcacgtcagtctcctgagtagctgggaccacaggcgggtgccaccatgctgccttttttttttttttttgagacaaagtcttgctttgtcactcaagctggagtgcagtggcacgatctcggctcacgcaatctctgcctcctgggttcaagcgattctcctgcctcagcctcctgagtagctgggattacaggtgtgtgccaccatagttggctaatttttgtatatttagtagagacaaggtttcgccacgttggccaggctggtcttgaactcctggatcaagtgattgtcctaccttgggctcccaaagtcctggcattactgatgtaagccaccgtgcctggcccattcatcacttctaaagatagtcataataccagttgtaatgctgtttcagtcttctaaaggatctgttgcccttgttcaattaattttctactttatcaaatttgagataccacagacttctacatgattgtgagtttattttccttacctaaaaagctgattttgtcttgtcaggtttttgacatctatcggatgtgtatgtgtgtgtctgggtacatatacacttaaatgtcatgttatttttttcagaaatgagagataaaatgagaaaatggagagaagaaaactcaagaaatagtgagcaaattgtggaagttggagaagaattaattaatgaatatgcttctaagctgggagatgatagtaagttcttttattacattcaggctcagtacatgcctcattcatgggcctttttttttttttaactgttctttcattcatgatttttctacttgtcatattaattttctttgtgactttttgtcccaagaattttaatgatagtttattttgagaaggatttataattgcttggtagtagtaagctatcaaataggcattttgttttaaagctcacagggctgccaaatgtctggccaaaatgtattgtgtatggactcttttagaacagtaaaactattaaataattggagattttaaccttacattaacatattttacactgctgaaacatgtaagaatgcattcttagtttcagagataatacaataaatcagttttcagttataagtaatgttctctagaaatatcagaaactagaattcattaatttccatttgggtttgttttaatattaaattcagtttttttccccctttatgtgtatctagtttggatcatatatgaacaggtgatgattgcagcactagactatggtcgggatgacttggcattggtaggtatttaaatgaagtatatatttaatttgcttcatcaattgtataccgtagttaagacttaatgtatggcttatatggaatgctttcaatagctagttttgagtgctactctgaacagtaagtggaactaactagatattttaggacaaagtatcttatatctttttattagtcctgagaagtagctgtttagtatcccagttttactgtaaagatttagttactgaaatttatctgcttagtaagtgacttatcctattttatagagtttaaaataagaaagtttaaaacaattttgtattttgtgttattgaatgactttcacagaatgtaatgttcaatactgttacacaatattataaacatatctgacataagaaaatcccgacgtatagaacataacataaaatactaataatgtttggccaggcaaggtggctcacacctgtaatcccagcactttgggaggccgaggcaggcagaccacctgaggtcaggagttcgagaccagcctggccaacgtggtgaaaccccgtctctagtaaagatacaaaaaatcagccaggcgtggtggagcgtgcctctagtcccagctactctgggggctgaggcaggaggatcgcttgaacctggaaggcagagattgcagtgagctgagattgtgccactgcactccagcctgggcaacagagcgagactctgtctcaaaaaaaaaaaagaaaaaaatcaaacaaacctaatactgcttttaaaataacactgtaatggtagctatgtttttggactcatgctaggaacgaagctaaatgctttacatcatgattttattgagccttcataattatttcttgatttgatttgtgtttgatgttattattatatttattttataaatcagaaagcagaggcatctgttaatgttgttcctatcatcttgaattcttaagtaccgcttcatgctgcctctgtatttaaactgaaagaaaatatgcaaaaacaaaaaattgaaatacctgaaaaaaattcacatctgaattagtattgtccttttcaaggttgggttggctatacatgtaattctagtggagctgttagtgatgaaaacattccacaaaacctttgttggattaccttcagaacctatgagacatagtcttttgaatattcatagaggtgaccgttttatgtcttgagagaggtttttatttttattttttttgaaatagccaaatatcacttgataaagtaggaagtcaaattagataacactattgattaataaagcagtatacacaattaaacagtaactttataatggttaagattatttatacagttagcttgcttgactgaccaagtaatatgattttgcttgatatcaaagaaataaatgaacatatcttcacttttgattaacttgaatatttttcttagtgtggcaaatttcagccacaaactttgaagctgtatttccaattcatattaaaacttattttattaccagttaatagtttcatcagtagttaatggcattgttttggtcacacatgcattaatatgcttcagtggactatttgtatcatctttaacatttctaggacttccaaaactttgaatccttcatatgttgctgagaatgtagatactcagtaaatatttgattatttatttagtcaagttgatgagtcaattatggatacttgttcaaagaaattggtattccatccgtttaatgtctgtattttctgaccccaaatcaggatatgttgattgaaaggatgattgattggctgggtgcggtggctcatgcctgtaatcccagcagtttgggaggccaaggcaggcggatcacctgaggtcaggagttcgcgaccaggctggccaacatgttgaaaccccgtctctactaaaaatacaaaaatgagctgggtgtggtgacaggcgcctgtagtccgagctacttgggaggccgaggcaggagaatcgcttgaacccaggaggtggagtttgcagtgagccaggatcgtgccactgcattctaacctgggtaacagagcaagactccatctcaaaaaaaaataagaaaggttggctgattaatataaaatttcaacagggcaaaattaatcagtgtttatgttatttgctaggaacttgagatgactactaaaaaacttagttcttaccaggagaatgcttatgctgtaattaggaagaaaacgccaggcgctgttgtcatttaagtaggggcctgacacattatagaagtagtttttaaggaggaataatatgatattagtacttaaagagttattagtggttctcataatctgttcattttcctggttaagagcatgatcagtttctgagaactgattgttgccttcactgtaatgtcatagtgcttctttcaatccattatttgttactgattaatttcacttcatgttattagatgacactaatgaaattattcaagaagacacattgaagactatataggccatccattgtagcccatttagtataaataatgtaattactactcaacccttattttttcagttttgtcttcaagagctgagaagacagttccctggcagtcacagagtcaagcgattaacaggcatgagatttgaagccatggaaaggtaaccaaatcttatcagctggcaggcatggagcctgttaatcatggtggtgttaatttttttttttttaattcagacattctagagtgtgtggaatactgtctcaatatggctttaatttacattttttgatgactaatgaggttgaaaaccttgtcatgtttgcttagatattcaaataacttctttttgaagtatcttctttagtctttacccatttaaaaaattgcgttattttaccttttttactgctgatttgtaggaggtctttatatattctggataaaagctttgtcagatatatgtgctgtgaatatttctccctattctcttgcttgaatattttattttctaaatggtgccttgtgaagtttttagttctgatgaagttcagtttatcattttttttttaatgcttagtcattcttttgtcctgtccaataattcttttctaatgtttcaacaatattcggtagtgttttctagacaataggaacatttaaattatgattatttttagtttgtaagagtgctttcagactatttttctttttgccgtcttttaaaattttattttcagtacttctagataattgattgtgctgtacagtttaactgtgtccttatattctgcctattatgtctgttaattattaacaaaggagtatggaagtctccaactttaatagtggattcatctatttctccttgcagttctattagtttttgcctcatgtattttgatgttctgttgttagtcacataataataaggattgttgtgtttttcttgagaatgagccctttatattatgtaatgcctgtctttatccctactgatttttcttgctctgaggtctgctttgtctgaaactaatagagctcctgagctttcttttgattagtgttacagcatatctttctccatccctttgtttttattctgttgtatctttgtatttagagggttttgtgtagacagcatttagttgggtcatgtttttaaatccactttgatagtctctgtcttttcattggtatacttagaccatttacatttaaagtgatgattaataaagttgtttcattatctgccatattcataactattttctattgattgctcttgttattttttcttttgtcatttgttttctgccttctctgatttaattgagcatttatagaatttcgtattttctctctctcagtgtatcagttatacttctttttaaattttttaaatagctgtctgagagtttgcaatatatatttagaactatccaagtcaactttcaagtaacactatactgattcacagttagggcaaataccttacaacagagtatttttaattcttctctttcgtcatttgtaacactgctttcattcattttacttattcataaatcataatcaccaaatatattgttgctgttactactttgagcaaactgttatctgatcgattaagaataagtaaaattttattttacctttatttattcattttctaatgctctttctttctttatatattagaaccttccaaaggttctaaccaatattattttccttttctctgaagagcagcttttaacatttcttgaaaggcaggtctgctgacagcaaattgctttaatttttgtttgtctggagtatatttctctgtcacatttaatgggcagtttctcaggatacagaattctaagttggttttctctcagaacactttaaatatttccctctactcttttcttgtttgcatggtttctgaagagaagtctgatataattcttatccttgtacctgtataagtaatgtgtttttttcttctggcatcttttaagattttctctttgtttttgattttctgtaatttgaattttatatgcgttggtgtagattttttgctatttattctgcttgatgttcttagagcttactggatctgtagttttgtgtctatcataagtttaggaaaattttcaacgattaaacattttctatatttctttcttttttcccttctagtattccattacatatatatgacatcttttgtaatcgtacacacttcttggatattgtgttctattatttttctctttttatttcaattttgaaagtttgtattgataattcttcaacctcctgactcttttgagttatgcccaatctactgataagcccaagcccatcaaaggcattcatcatttcttttgcattgtttttgatttccagtattttcttttgattcttttttagagtttccatctctgtttacattacccatctgtttttgcatcctgtttactttttccattagagttgtgaaaatacatgtcattgtttaaattcctagtctgtttatgccagtacttctaccatatctacatctggtcctgatgcttgttctgtcttcaacttgtgtggctagtttttacttttgtactttggacaaattgaatcagtatttttttaagggaaattttctataagtactatatacatgatttgctttacttaacaaaataagaatgtagtaaacgtttactgttatatgaagatggaagacttcggtaacgattataaatgcatttaaagcaattataaatgcatttaaattaaaatattaaagccagtttaatttttttctgtatttactatttatcactatatttttaaggtaataattgtagatgtttctttttctttttaaatagatatgatgatgctatacagctatatgataggattttacaagaagatccaactaacactgtaagttggcagattgtcttgaaaaaaatctaaagtttaatttaaaagataaaattaatcgaggaaataatagatacataaggaactaggtcttatatttttaatttttaattaaaaaatatttttatttttaattttaaatagttcatgatgggccacagtttattttaaatagatttaagactctccaataaaatttgacttctcaccctcaccaacagggtgaaaccccatctctactaaaaagcaaaaattagctgggtgtggtggcatgtgcctgtaatcccacctactcaggaggctgaggcaggagaatcccttgaacctgggtggcagaggttgcagtgagctgagattacgccactacactccagcctgggcgacagagcaagacttcgtgtcaaaaaaaaaaaaaaagaaaaaaaaaaaaacaacttctagaagataccgtattagagaaggggctagttgagatttggaaagagtagactatgtgtttgcataaaatattttgaagtttatgaaatactgaattgtttaatttgtgcagttactttttagttgtcttaatgaaaaaaaagccatttcaataattagtatatggaattaatgaaggcattttattttgtttttgcttttttctgccttatacatgaataagaagaaacatacccctttaatttagtgtaattttgaacaagtatattagtttattggatagaatatttgttctgaagatacctatatagtagtatttgtttgaaaaataccctggtgaattctgtttttgatgttgagaacattatagtttattgccataatagattccctcagacttaaccttttaactaaaaagttacagagagactttagataatacatcagtcattttaatgttttatgtcattatttccacgcacacatatgcctgctaaaagaaaataagtatttttaaaaattttaaacaaaaaccaggttgagtttttttcttttatagaaggagaaattgttgtattaacacaataaagatacatgaagtttctctcttatttggcaagtatttctttaaaaatatacattaaaaaatcttatataatgtctgactgtagattttaagatgtaaaatgcttaataatttaacaacagtaacttgatgtctgtagtttctagagcacatttatctcaggcactgatcataaatcccttatctctgcttatttcctttgatattctgtaatgatacttatgtattatagtagttggtatgtttcttaaatgatagttgcttacttttagtcttttcccaccccagggagattttctgtggaaattccctagggtttttgtttttctttttgagtgggtgtgtgggggtttgtgtagggatgtgcgtgtgtgtgcgtgtgtgtgtgtgtgtgtgtgtgtgtgtgtgtgtgtgtgtgtctatgtattagtccattttcatgctgtctatgtattagtccattttcatgctactgataaagacatacctgagactgggcaatttataaaagaaaaaggtttattggacttacagtttctcatggctggggaggcctcacaatcataacaaaaggcaaggaggaacaagttaaatctactgtagatgacagcaggcaaagagagcttgtgcagggaaactcccatttttaaaaccatcagctctcactatcagagactctttcactatcacaagaacagtgcaggagatacccgcccccataattcagtcacctcccactgggttcctcccatgacatatgtgaattgtggaagttacaattcaagatgagatttgggtgaggacacagtcaaaccatatcattctgcccctggcccctcccaaatctcatgtcctcacatttcaaaaccaatcatgccttcccaacagtctccgaaagtcttaactcatttcaacattaattcagaagtccacagtccagcatctcatctgagataaggcaagtcccttccacctatgatcctgtaaaatcaaaggcaagttagttacttcctagatacagtgggggtacaggcattggataaatacagccattccaaatgggggaaattggcccaaacaaagaggctacaggccccatgcaagtctgaaatccagcggggcagtggaatcttaaagctgcagaatgatctcctttgactccatgtctcacatccaggtaatgctgatgcaggaggtggattcctatggtcttgggcagctccgccccatggctttgcagggtacatcctctggatgctttcacaggctggtgttgagtgtctttagattttccaggtgcatggtgcaagctgtcagtggttctaccattctggggtctggaggacggtggcccttttctcacagctccattaggcagtgccctagtagggactcttgtgtgggggctctggccccacatttcacttccatactaccctagcagaggttctccatggtagccccgcccgtgcaacaaacttctgcctggacatgtagccatttccatataccctctgaaatctagacaggggttcctaaacctcaattcttgacttctttgcactcacaggctcaacaccacgtggaagctgccaagacctgaggcttgtaccctctgaagccactgcttgagctctgtgttggtccctttcggccacagggggagtggctgggatgcaaggcaccaagtccctaggttgcacactgcacgggaccttgggcctggctcatgaaactaccttttcctcctaggactccaggcctgtgatgggaggggctgccatgaagacctctgacatgccctggagacattttcccttttgtctgtggaattaacattcagctccttgttacttatgcaaatttctgcagctggcttgaatttcttctcagaaaatggggtttacttttctattgcattgtcaggctgcaaattttctgaacttgccctgtttcccttgtaaaactgaatgcctttaacagcacccaagccacctcttgaatgctttgctgcttagaaatttcttctaccagataccctaaatcatctctctcaagttcagagttccacacatctctagggcaggggcaaaatgccaccagtctctttgctaaaacataacgagtcacttttgctccagtttccaacaagttcctcatctccatctgagaccacctcggcctgaatttcattgtccgtatcattagcattttgggcaaaaccattcaacaagtctgtagggagttacaaactttcccacattttcccatcttcttctgacccctccaaactgtttcagtctctgccagtacccagttccaaagttgcttccacattttcaggtatcttcagcaacaccccactctactggtatcaatttactgtgttagtcggttttcatgctactgataaagacatacccgagaagactgggcaatttacaaaagaataaggtgtattggacttacagttccacatggctggggaggcctcacagtcatggtagaaggcaaggaggagcaagtcacatcttacatggatgacagcatgcaaagagagcttgtgcagggaaactcccattttaaaactatcagatcttgtgagactcattcactatcatgagaacagtgcaggaaagacacgccccataattcagtcacctctcactgggttcttcccatgatgcaagggaattgtgggatttccaattcaagatgagatttgggtggggacacagccaagccatgtgagagagagagagagagagtgtgtgtgtgtgtgtgtgtgtgtgtgtgtgtgattgttttgttctagatagctgagaactttcattattttgtgaagattctcagaatatagaaagttcaaggaaaaattttgacagttgcaaacctatctgtaataaaaaataaaaataagaaatagcttctataagctaatgtagatactgagaataaaacgttaaaattggaaagtttttgaatgatttcctaatctaacaattctaatagcttactgtcttagttcaacaatttcttagaaaaagcacccatttttttctgaagattttctcctgtacttatttcttattcttaatttataagacttcactgtggtttcaaagatactcatttttctcttagccatagattgaaaaaactgaaatcagatttctgaaaacaacttctgaattttatatttctcatcccaggttaaaaatcgatggaatttaagtcaattttggaattaggagtacaatattttgattctgtctcagtttacattgggaatttttaataagttatttcacttcttcagactataagataatatgtgattaattattgctctgtctttgtagtatctttcatattttatggctttttgtgacttttaaaactggctaaaagagaaatccaaatggttcccctcatagaatatgtgtgaagtggtacagattgaacatccttaacctgaaaatttgtaatccaaagtgcctcaaaattcaacactttttgaagaatgaaataatgtcacaggtggaaaatttcaccccgatcacatgtgatgagtcacagtcaaaacacaatgaaaactttgttttctgcacaaaattacttaaaatactgtataaaattgttaccttcaggatatgtgtataaggtgtataggaaatgtaaaccaattttgtgtttagagttggatccttattgctgtgatatctcaggtatacagaaatattccaaaatttgaaaatatctgagatgtgaagcacttctagtttcaagcattttgtataagggatactccctgtagtaactaaatcccttagcggttaggtaaacattcgagagcaaagcgacttaattcagctttgctaaatgtattattcttgtatcaaacatgatctaatcttttttcagtcccttctttccttctgtaaacatgtattgaatacctctcatgaaccatcaaagagttgctcttagtaagagtagagatactgtttctgttcctatatccttaggaagcactgtgctagacattgaaggagaaaacatagccataaaagacctagaactaataaagtctataagtagacttcactaatatgcaacagctaaagttactccacagaagacatcgccgtttctttttccaaagcaacttagtatctcaaaggcgggaaagtctagttttattctcatttactgttgctccctgcattgttgaaaagtgatcacgtgaccttttatttgtcttatgcctctgtgtttctggatatccagtatagaaatgaagttgttcattgaagctttaagcagctgtacttcctattcacatgcattcattattctttcagagaacatttgttatgcttgcagtgtgcatggtagtgagaacaaacacaaggatgaattagccttttctgtgcttctagtgaggtagcatgatgtgatgaacatgctgtagactttgaaactgatttattaaattctctttctttgatgacttgctgcatgggttttgagtctggaaggccttaaaggatgagtgtgacttaaatgatacaaagacattgtatcccaagtgaatgcatgaataagcctttattaaagtacaagcattattaaagtacaaggcctgcttaggaaagaaggaataaggtaattagaatggaagtttcaaaattttttatttgaaagaatggtggaatggcataccttcttcccatcttttttaaagttctgaaatactctattgagaaagtcatacacatgttaaaaattgtggacaatataaaatgatatggtaaaaaaaaaataagtctgttcctctatccctgagctcaggtcctccttctcttagggaagcactttttttttattttgagatggagtcttgctctgtcgccaggctgtggctcactgcaacctccgcctcccgggttcaagtgattctcctgcctcagcctcccgggtagctgggactacaggcacgtgccaccatgcccagctaatttttgtatttttagtagagatggggtttcaccatgttggccaggatggtcttgatctcttgaccttgtgatctgcctgcctcagcctctcaaagtgctgggattataggcatgagccaatgcgcccggccaggcaagcactgttaatgatttttctgtgtgatctttcagagatatttttcatgcacaaataggcctgcgcgtgtgtgtgtgtgtttgtgtgcatgtgtgtgtgttttgtgtgcgtgtgtgtgtattcctctgacagggagaatggttagaaatgcaaatgtggtatactctatgtaacaatatagtttaaagatcatgccatgtcatcacatcctttacattatcctgttgagtaggattgcattgcgtggatatatagtcccttgtcttgatgaaaaagtttctttaagtccccttggtgaacttggtgaacctttaggatgattctgatatttcctctcagaaacagtttttcagtggatgtcattggtgggatgaatctttagaggtgaaatgtctgggtcaggaggtccatggattttaaattttgattgatgttacaaatttccttctgaaaaggctttttattcatctgtacccactttctgtggcatatgagagtgccactttccccatatcctgccacgtggtatattatcagcttttttcttttaatagttgccagtctaattagttaaaaatgttattttgttataatttgcattatgagtactgctgaacatcttttaatattgttttttttttttgagaaggagtctcgctctgtctcccaggctggagtgcagtggtgcaatctcggctcattgcaagctctgtgccgggattacaggagtgagaacatcttttaatattcttaaacagctatgggattacaggagtgagaacatcttttaatattcttaaacagccatttgtatttttctttctgagctgtctccttttacgcttttttcaaatttcatttctcatctgataaagagagggcaaggttctggtgctctgcctagttaactttctcctcctcctcttatttacttctgaggaagacagtattttatacctctgagttgattccttatacagagtagctagaagtacaaaaagaaggtctacatttgtgaacagcttggtaatttttaatttttattcttagagaatggagtatgaagtcaaattttgattaggtaaatatcatcagttagttttagagataatgtgtcatcgaaataggatatattttgaaggagatgagaaaagtaatttggaggctgttcttaggctagagattatgggaatctaaaactaagacaggtggaattggaggggactgggctactgtcagcctttattttttatgttactcaagtaccagttttggcactttttttttcggcttgcgttttgaaaatgattgacttttcatactttgaatcttccttaaggggaaaaaattatatccattgagtgggagagtgcccagcatttggtaggcttccagcgaatacttgttgaaggaatgcctttcagaaagcagagtaattattgtcttttagttgatttcatacttcagaagatcagattttgtcctgaattgtgaactctgcctattgtgatatatcaaatatttgaagttttatttatgaattagatgtaatttcctctgtgccaagggtaaagatggtttttttcggtgaggggagggtgggggtcgatttttattcaggcttctcacagtggttagagccactctatcttcagaacagtcacaacacaggaaatgcaccactgagactgcctagaaaagtctgaccagctaaatcttattgcttaaaatacacatattcacaaaaactggtaaatggtaacatgcctcacacaggaatgtgtttggatttgcaaatatcctgactggctgtagcaccaaaccctccactaacccctcattcacctggaacaccagtgtcactcacatttccctggccccctaactattccttcaattccttataaaatctctctctgagaagggtagcctcctgtagcaggggccagactgtgacgtgggaattaagcccagctctgcaggttgcattttcatctttttcatcttctcacgccttgagggtaagatgctgcagtgaatcccacagttaacactcagccagttcccccactgtaactggggaaagaaacttgagagggtcagaatacatccatttgattagtagttaactgaaaaagggttccttttggtaaaactttttcacctttgagtcatttcaatgagttatttgagattctttaaaaaaggtaaaggaaaggcatcggaggggctttgacacactctggccaactctggccatacgccagcctgcttgtgcccattggactcagtggagggaggcaggcaggccctgagctacctccagtgccagcaaagcctcctcctggcaattctgggtggggatgatgtctgggccacagctagtccaagtctgtcattgaagatccattcaagctcctgtttgaaattccaccttcttctgtcccaagtggttgtggatacccccaggggttggtacggaggaccaggtgcagccacagggggcagataggctcagaacatgtttccatttacaggaaacagaacacaggcctctgtgtgactgtggagcaatgtgcagattgcagtgatgagtagagtaaaacctccactttgagctcagcatctctggtgaacacagggaactgcaggcaacaatgctgctgaatacacccgagtgcacagtcagacgtgttccgtaaacggtaaatgtgtaagaccaattatcttgagagggtatcttgctccagaagatgcttttaaaatgccgcattttccaggcttctaggtataaaccttgggggcagggaacctggattctcctttccttttgctggtcaactgtccagttccttctgggtccctgagtctggagtgaggcaggggggaggttatagattgtattttgccggtaggccttaatcctttaatccttttctaggtagtatctcttccccaggtagcctatttaaaataaaaaaatgtatgtctttcagaaaaaattgctagctagccctattctgagtaatattatagaaggcatgtagccagttggatgaagatttattcatggtctttaaaagtttgaaacagattatataggtttccgtttattgtttggcactagtgtatatatatctttagttgggaaaatcttacaggagcatgactcttccaattctagtcttcattcagggtctagctgtcctgtagccaccttccctttgattgttttagtaaacatcacaataacctttatgctcactccaaagtttaaacaatactgtactttttagttgttctttctcaattttatttatatttaacacatgtcacttaaaagaatgtgaattctctgaagccagggattgaaccttatgtattcgatgctctttgaagaaaatagaataggatctatgttgttggccagttgatttacttttgaataatggagtaaattgtttgtggttcgtggtattcttttagtagcgtgtttttcactatcatacatgggttcttcagaactattgttgcatttcttaatgcctccagattgtttattcagaacatcgattaaggctgcagacaaattatatgaattgatattggctaaaaatcttctaaactttgtgaggtcaaaaaatgtaattattagcatttattaagggatgatataatttgtttattgagctgtgattttgttaatttttaaaaaacatttaagtgaagcatgttcagttaaaagaacaacttatatggtcatccagatttctactttacaactgagaaaaagctgcagctttctacagaacagagtataaatatgaggaaaatggtgaaagggagtgatagaattgaagaaaatgatgatgatgtgataatgaagaaaggaaatgtttatcagatatttactatggaccatcactgagctaaacactttacatatattatcccattaattgtcatcataatcctttcagatattgtctttattctataggcatacaaggtcatagagaagttaagtgacttgcccaagatcttacagttagtaagaaattctggataggtactttgatttcagaaattaaggctctttatcatgaggaaagaagcaatggtagtaaatgggattgagagtaggtagttaatacacgtgacaaccagctgttacccctacagaaattttattatttaaatttagtcagttaacgagactgtacttgctgctgttgaagagtatgtgaagactaataacttgtttttatttttaaaaatctaagtataatttttattttatagaatattatgctaaggaagctatgatagaattttttttttttttttttttttttttttgagacaggatctcgctctgttgcccaggctggattgcagtgaggcaattatagctcactgtaacctctgactcctgggctcaagcgatctcccacctcagcttcctgattagctagtactacaggcgtgtaccaccacacccaagtaatcttttaaaatttttcgtagagataacattttgctgtgttgtccaggttgttctgaaactcctgggttcagatgatcctcccgctttggccttccaaagtgttgggattacaggcatgaaccactgcacctggccaaaattggtcttttttacaagccttttttgtgtgccctaaatgagacccagaagccacaagaagccttgttgaacctcattctggttgcttgataatcattcaaaacctagggttttgtgtggcttttgggagataagctgctggactctttattcacagttagacattatatgaataaggagttggacagctgagtattaagtgtccagagagcaagagactatggcaaaaaagagacatgaacagattcaggagtcccaggatttgcaatgtaagtctgggctttgttttttgtctatgtaaaatgaagagatgtaattatcactgcctgctcctcagttctttccaattgtaaaatttgtgatgtattcatttattctgcagatagctaccgatctgcagtagatacttccttcagtgtccagtactgtttggtatgaatgcgtggaaactaagatgtgcgtttctatttttatcttagttttttgaaccagtgtttttgttattataattggttattttatgtatgataccttgtatattgtttaaaattttagatatgctttgaattatgtggcaaaactttaagactttaagtggctttttttttttgagaccgagtctcgctctgtcgcccaggctggagtgcagtggcgcagtctcagctcactgcaacctccacctcccgggttcagttgattctcctgcctcagcctcccaagtagttgggattacaggtgcacaccaccacgctcagctaatttttttgtttgatttgtggcatttgtatgcaatattttcttttttaaaaatgtctatttatttttatttttgtagagacagggtctcactatgttgcccaggctggtctctcactcctgggctcaagtgatcttcccacctcagcctcccaaagtgctgagattacaggcatgcaccactgctcccaggtgaatccaactgttttcaacaagttttcactgcttacagtatctcatctctgctgttgcaaatcctgtaaggattgggacaagatataaatatcaaataaagcaagtctgtgccagtcctttaaagattgcttagttagaattttgtggcaaggtttaacacgtaaacattaagtctagaaccaaatgttaaagaaaggaagataacatttatttaatattattatatgctgtgttagttgctttatattgatgcttgaagatagatggtattactgaggtttgtagaggttaaaactagtaagtgataagagttgggattcagtttcttgtcttttggatttcaaaacagacattatgctctgtatattgtctatggaagaagtaatgtcatgaaaaatgaaagattaaattatgtttcagattttggtgaaatcagatattaaatggccgaaagtttcctgattatatgttaatttatccctcatctatttggaggactagggacaatgctcccattttaagtctaaaattcttaatggctttagggtttgagttactttcagagctttacttttacttttcttctgagttcttgagacttttaaaactttgcatttattgtggcacatttttgttttacttagtaaacttattttaaaaatatttgcttgtgcctactatgtgacaggcattgtgctaaaggcctttgccatgacctgattaattaaggatatagattctttttttattttttattttttttactctcaggatatgcttaaggatatatattattaaaacatcattttttaattacccaaaatattataaacattgctctgacccttatttattagtctcttgatttctctaaactttcactttcatttcttcagagccaaatcactctcttaccaccccgtaatgagtagctcttgatactgtaaagagaccacatccattttacttctgtctgcatcttgtggaatattatatcaacaataagaaattttattcataattaataagtttagcttggcctcagttatagtatggtttattgtttatccttctgtatttgaagcaaacataaatagagaggacgtaaatttaataatttatacagtatgctccagtccctgactgtttacttcagccagtactgctttctcctaggcctttgctcatgtgttcttcccactatgcagtttccataaataacttcctgttttgttttttaatgtctacttactctttgtttcagtacacgtatcatatgtgggaccgtctttgctttctgtctttccagttcgtccactctgacacagcatgtgtcagaatctcttccttattttcataacaccctagatatccctgtcattgctcttactgcattaacttttttatttgatacgtttttgtcatgagaatgagcttctgcaaggaattatcatttcttttttatctttatattttcattgtgtagcacaatattggcaaacagtagaagtctggtacatatttgatgaatgcacaataaatggcattgatttttatgtttatcattttaaaaactttagaatacagcttctaattgttttgcttatcatacaatatttatttcaggactgtattattcttgtgaaagactcataggtagattttctcttaaaattgtgaaaaagttgtcagaagacatatttatataatgatattcaaaggccatgccatggtgagattttttttcccctaatctccactgttcctccccctcttaggatacagatcttatgaatgagacagagtaaagggctttaagttggataaagattaagattccctgctggttaataattatcagaatctggatgattatttatttggatgaaacgatgcatacattgtgtgcatcaaaagtaaagcatatgtgattgttagaggaatgtttgaattccccagtgggatgtcatggggtatgtttataaactcccactaagcagtagttctacaatggaatttctctggcattgagataataatttgcacagtcaaattaccttctttacaaaaccccaaggaatcataagggcctaatcctttattaatgtcaacccacaggctgcaagaaagcgtaagattgccattcgaaaagcccaggggaaaaatgtggaggccattcgggagctgaatgagtatctggaacagtgagtattttacaagaggattgtgttttgttattctgataaatcttttttaattaaaatggaatttgcatttgattttcctgtttgttttcatgctgttcatttacagaatatctacacacttacttttttttcttttcctctcaccagatttgttggagaccaagaagcctggcatgaacttgcagaactttacatcaatgaacatgagtaagttattaaacacacaacattttgttgagtgcagttttcatcactgtaagttcagaaagcactgtggtttccaaaggattggtgagagggtgtgaatcatgtcatttgaaatgagaaacagaacaaatcaacaattaaatgaaaaagaacaaatcagtaattcactggtcataataagtgaatagctttaactaggtcatttgtgttttgccaaattgtttatgtttaggaaataagtttttctttcaaatatagatggcattctttggaaataaaaaggcctgcatttgctaagctaagtttatttttggtaaatcaaaattgtgaatttttagagttcagattgttcttatatacaaagagtattatactccctgctgtttaaaaattctgtcaattgtatgcatgtattagccttagtactaagagaatcaactcttccaaagtagaagcattctgttgcctgggtaaaaaactgagaataatcaagaatgttgaatgctctaggatcttgcttattggatgtttaatgtttttgttagcttttttattgctgtagtgacaggaggaaatcccagtgtgagaggattagtccagagtcttagtgcaagttttctaatattacagcattaatgctaacctccatctagaggcgtgttttttattttttttcttagttcttctaaatctgaagtatatgacattgtttcttttccttctttttgacagaatagaatcagattctcatgcgcattttcttgtgcatgaatatttaaccttgttctcatactacaaacaactgatgagaaacagaatgaagacatttgtctattgtctgtggtctatatatataatgtgatctagaggattgaggtagtctatttgcataagtctaaggaaagtgggagctaaaataaaagtaatagctgtaatttaatgaatgtatactatattctaggaactgtttttcaagttctctgctatactctgaaacagatattctggttttgattaggaaattatttcctgaatcacattcagtatagatgatatgcttgtatgtacacatatgtaaacatactcatgatttcttacacatgtgaaacagtatataatacttatatttaaatacatgaaattgaatttttagagtatagtaaaaataattagcattaattttattttgtttctaaaacaggtgacagtcatttaacattttttgtactttctaaagattttctgactaaaagcattttaaaacatttcaaatcaacaaggaaattttttttttcaagttaaaggaatacctaatgcagaaaatttgagaaacacagtaaagcataaagaccaagacaaaaattacatgtaattccagcatcctaagttaactatagtttgtttggtttttgtccttccttatcttttaaaataaaagcccaaaataaaattatcttccgtagtttatactttcccttagttatattttgttcaaaaatttcttgtcactgtaacaatctacagtgtgttttgaatggctttatattatttcatcttactaatttaccctagtatttttaacgagtttcctagggagatataaaggttgttttatatttttatatataatgctgtagtgatcatttttattttgtttccttgggttaaattctttgaagtaaaattgcttgattaaataagatgtacattttctgtggttttgataaatagttcctgattgttccctagaatggtaacatcaatttacttgcacaccagcatttactagagtccctctttaacaacactggatactatgattcttttttaatctttacaagtttgataggtgaaattggttctacctttttagttcatttttacgagctctttttataaaggagagcaaccatttgtcaaaagtatatccttgttatatgctttttaaatactgacttcttaaaattatagaaactttacatttttagaaaatcagattcatcaatttttaacattatcatgtctgctgtcctttaatagcttaaaaatatatcaccttttccccctacttcatttgcaattttatttttttgcatgtatttctaatatttatttcatcatcaaatttaggttataccttatttttaacctaccattaaatttacttatttttttcaccatgtggtaccaccttcagttttgctttgtttggaatctaaagagtttattgaaacagaggtgaatgtacacttaagagaaatgaactgagaaatctcaaaaaatgaagatttacaaagatgtaggagcacctaaaaatatttttttagagaaaatgataattatggtcagcctacccttttatctagtatcacaaaactctttttggtcttaaagctagttagttacaaaatgaccattttttttttctaattgaacacttagaaggaatatttatgtttaggtgactggaaatgcatatctacaggtttttttgaaactgtgaaaattacaatcagttcacttgattcatttgacatgtttgagcaagtcattataggaggcaggaattttttgatggaatgttaaattatcgtaggatatcagttttagcaccagtcttggggacacagtggcaaaaacgtagcagtttcgaaaatgtcagatatatttaacattcgatattcctttctgcatatgaacagttgtaagcttttttaagtataataggtcgcaggcagctttggtagcctatatctagaactattttttttctttaagagacagagtctacaacatttcccaggctagacttgagctcctgggctaaagtactcttcccacctcagccttttgtgtagctggcactacaggtgtgtcactgtgcccagctctggaatttttaaactccaaataaatatctatagtataattttcatatagccctatttaatgtttctatagagagaaaaagggatatagaattgtgccatgtaacctttttatatttttaagttacttttataagtttgtttctgatttatagtttgtttttagttattccagggatatatgttacatccattgaccatattgagacacttgttctaaagttttaaaactacagttaatttttttgtgtcagcactaccaatatgtattataggttaagtatccataacctgaaaatctgaaatccacaatactccaaaatctgaaactttgagtgccaacatgatgctcaaaggaaatgctcattggagcattttggatttgggatttttgcgttagggatgttcaaccagtaagaatgcagatattttaaaatctgaaaacttctgaaatctgaaacatttctggtcccaagcattttggttaagggatacccaacctttgtaagcaaaaatacattcacattatgaaagacaaatttttttacttcatttgttattgaaactagatactatacagcaaggaacagttagtattatacattaattatgattgtgattatagttccttttcataagtccagccttttaaaattccatatcaacggaattaccacaattctttaaggaaaaattgtgatgttggtaaagtaacacacagtaccaaatactgtaacctttagttatatatacttttgtaaggaagagaagaaaactttatttagttctagtactgactctaatattgtaataacaattgttattctgttttaagtagattcaaattatttttacttctctattcttagtcttgttgagtcactgtgtgtaatgaattaacttctctatgcacctagaatagtactggctatgtattatccctgacaagactgaggaaatagtcactttctgcgtggcctaacaatggcctagaaaagctggactagaccatctgttgagctccttctagctctaattttatttaattctatattttatccacaaaattagtttgatactgtactttataaaattgggggaaggagtccttttctcatatgtgatgctaattgatttttgagaaaatatcttggtattcattttaccctaagagctgctactacctgcccattttatcttgctttatgcaccagtgtcacagttgtgctcaacccatttaaatgtctaagaacttttattcttagtctcaatatgaatttttggcatcatactattaataattaaaggaacacatttagaagagaactgtcttttgataaagtgtttaaggtagagacaaattttcccttttcttttcgagtgataaatatatattaggtaggtagtcataacacatttgttttagacatttattcaatcatttgttcagtcttattaaatacctatcatgtgtcaagaaccaatgctaggttttgaatttaaaaatggaaagggctaaatagctgcatgatcttggatgagagtacacacacacacacacacacacatacatatatatatgtggtccttcataaatctaaaatgctgtaattattaggtaatctgcagggtgtattttttttcctcagtccctttgggtgtgactgctgtacacattttcatgttaccattgacatcttcagtttttcaatgtgatgtgtaatgcatataagcagcatatgtagtggttgaagagtacaggctgtctggagtggcacagcctgggattcagtttacatctctgtgcctcagtattctcagctctagcatgttgataataatttccttcttcctagggttttggtaggattaaatgagttaatacatgtaacacatttagaacaatgcatgacacgtaataagcatttagtaaaagctattattagtatacatgtgtgaaacaggaaaataatttttaaaagtatatcaggcagtagtgtaaaggtagatccctttgtatactggtaaatgccaaaaataactttaggtagcctctttttgttgggtagtgtcatcacttcctcactgggaagaaatcttgtaacacctgtgttcattagaatttcctgtagatagtgaggatagtcacatggcattaaacgtttaaaatatatttagtgaattacagtcacatgctttaaaatgtttttccagagctctttctggcagttctctttccttaggttttcagcaagatttttgtttattctaccacaagattaaataatagtacagtatatatcaaaaccaacttgatctgtttttcatgggcttagaaatttataacttcattataatttggtatttgacagtgaacttaagtaatgagagaaatctttgtaatagaatatgttggtaaatatatgcctgtgaagaatttttagtgagtagagaatatttaataaaatgtttattttctccttacacattagctgtttgaatatttttttaaatgatcagtcaacttccagaagttgttttatatacagcttgatccaaggtcttgaagcccttcttattagtagtgatgggatgtagtaggagtgacccagtttttgaaatgtagtatctattgattgtttgcaggctgctttaagatttaagcctgtgtttattaatttcatgataaaatttaatgtcattgatatttatgaatttcagatgacaaatactttattaataaagctatgtaaattatattgggaataaattgtttaacatgactaaagttgtttttaaattatttcaaggtttaactaagataaaaatttgtgactttaaaaattaatttctcctcttgatgtgtttttagctatgcaaaagcagccttttgtttagaggaactaatgatgactaatccacacaaccacttatactgtcagcagtatgctgaagtaagtgttttcagaacaatggcatataattttattttggttactattcggtgttattatggaactaagaatatttccttgatgttaagcaagtatataaatatttaaaacatctgatgagcattgaattgtgggaataaaagtttaaaatttttaacattgcagtggtaatactgacttaagacatacttaaaacagtgaaattccttgtatttttatatttgtatactattttctttcctaattataagttatatcacatttgtcaccacttaatggcttgtgagacatttatagtgattatgattgttaaatccatattctgggaaatttgtattaaagccaattgggacataagtatttatttaatttgcatattattaagaatagcagtacaactgaa

SEQ ID NO: 446 - DNA, 32742 bp, Homo sapiens
  source 1..32742: mol_type = other DNA
agtgttttctgggatgggaaccacgccgcttcccagtctctgtgcgaggcgtgaagcgcggacctttcaacaagggctttattaattctcacgctgcggccctggaaagcgatggaggtggcggctaattgctccctacgggtgaagagacctctgttggatccccgcttcgagggttacaagctctctcttgagccgctgccttgttaccagctggagcttgacgcaggtgggaagcggcggcgcccttcgtactccgttcctttcccctttcggctgcctccggcctgacccttcccgcaatttctttctttctgactggcaagcgaagccaccgtggcggcttgcgtggactcacggaggccgctgcttctggggaatgatgcccatcccagaacccggtgggagccgccttcgcgcgctcttcggtaacgggaccctgggccccctccgtcagcagcccagcctctgaggtctgaggtctgagggctggcgtgcgggtagtgcctggggctctggctgctgtgtgtccacagcctggcttctgtttcgggggacgctgagaacattccttcctcctggagcatcgcttgtgaacgtgtgcgttgagaaaccacacctccttggaggacccccagttcctgtttcctctgaccgagagccgtttcttagaagagaaactacattccagtcatagcatttttaattactcagttcctggcacattaagaactctggtagagaacatctctagaagatagtgaggaaaagtggatttactcccacactgctactccttgctttatctgtagctggtagaatatccttactcttgtttttacaacttaacggcattttcgttatgatagagcccagagatctgcattttaaaattcacacccctgctgattctgatgcatgttttcagagatcacactttgagaaatagtgatctacagttaattataataacagacattaaagtataaaataagtttatgctaattgatttattaaattcagaaatatttaccgagtacctgttttgtgttacgtcctgataatatcaaaatgaacaagacaccttccgtaacaaaagaggactattagctagttaggaagaaaattgtaaacagataattgtaaaacaatatgggaaggcagtgatagggatatgtacaaaatacaatggtagtacttgaatatctttcctaaactagtctggggatctgggaaggcgtcttggaggagttaatatctaagttgagctttgaagggtaggttaagagttgactaggatgagagaggataagcttgatttttctttttatttttttccttttcctctttgccaccgtgtttcttccagtcaccccatgtcagtagatggtatcaccatgtttagttagtgcattagaaagtgaagccaaaattcagtgtctcaaaacaagaagcagttattattgctcacaagtctacgggtcagctgagtggttcttctagtcctagttgggctcattgatgcatccttgttcagtaatggatctgctgggaagctctgctcatttggctggacttcctcatatgtttggagggtgggggtagggtctcagactataagcttgtttaagattctttcacatggtctcctcttgacttttctccgtgtggtctcttatcctttagccgactagactagcccaggttggtaccaagagacacttgtgccagagtcatttggggtttatttcttttagccactgtctgcttggtagcaagtccggtcagctccacattttgatatctctaggcctccaccctaatccaaatcagagttatctcttacctgaactctagtagcctcctgactagccttcctgccttcacttttgggcttcgtcattgcattctccataagacgtacttatcggccttttaaattctatcttgatttgttgtctgtttcctccactagactatgagttccttgaaaacagtgatgtttttcttttgttcactaccctatatctagtgcttggcacataggatgtattcaataaaatgagtatatgaagaagagaagaaattgttgaggtcattccattcatgggaaagcatgaggaaagggaaataattagtaggttgtatgctggacatccttgcactcttatattgctggagcaaaacgtctgggaaagtgagaggaaataaatcagtgagggccttgtttgccttttggatttcttggatttccggtcattcagtgtttccctgacatttttgtattgagccattacaatataaaataaaactcagctgctgtagttctgccaacttttctgtttactaggtggagatgtttcttaaaaactatcatttactcatctatcttttcataaacaaaaggatattttaacaccaaaaaagcaggaagcaaaatctcacaataaacaatccattgaatactttaactttagaaaaaattcacaaagttgtccttgttccgtactcatttcatcagcgttaatcttagattctgtgtttgggatgtacagctgcaggatatcaggtgccatttgaagatttttttttttttttttttttttgagtctgagtcttgctctattgcggaggctggactgtagtagtgtgatctcgtctcattgcaacctctgccttccgggttcaggcgattctcctgcctcagcctcccgagtagttgggattacaggcgcccgccaccatgcccagctaatttttgtttgtttctttttgtttttgttttgttttttgagacggagtctctgtcgttgaggctggagtgcagtggcgcgatctcagctcactgcaacttccgcctcccgggttcaagcagttctctgccccagcctctggagtagctgggattacaagtgcccgccaccaagcccagctaatttttgtattagagacggagttttactatcttggccaagctggtcttgaactcctgacctcgcgatccacctgcctcggcctcccaaagtgctgggattaacaggcctgagccactgctccgaccgatttttttttttctttgaagttccggggtacatgtgcaggatgtgcaggtttggtacataggtaaacgtgtgccatggtggtttgctgcacccgtcaacccatcacctaggtattaagcccagcatgcattagcaatttttcctaatgctctccctccccctaccccattctctgacagaccacagtgtgtgttgttcccctccctgtgtccatgtgatctcattattcagctcccacttacaagtgagaacatgtggtgttttgtgttctgttccttcgttggtttgttgaggacagtggcttccagctccttccatgtccctttgaaggatatgattgtgttcctttttatggctgcatagtattccatggcgtatgtgtaccacattttaagtacaagggacgtgaacagatacgggagttgaaaagcttacctcagactctgtggaggttgagtttggaagatgagatgactgcacacagcagataggaggcttttgcaatagttcacatgatgagtttttcattaggaattacttgaggatgatgaaaaagattattttgtttaaaaactatcatttctagagatagtgaagcataattgaggcgcttctggtaatttgatttcttttattctaactgaaggagttcactttagttccacaaacctttgatgggcaccttggctacctgaaacactgcatttaagatgtaaagatgatgtggtctctggtgtcaagaacttgatgcaatgaggcttattctcttgtcttaaataatgttattaagttgtaccaaaatttcctttgctacataagcagtaaatgtcactttgtctttttctattccaaagaacgaaacaaaaaacttatttttaatcaaattgtaattgtcttttgatccggcaatttccttcctaggcatttataaatatccttttcctagaatcttcatttagtacaagtctttttatatgtttttatatgtttcccagctatatttcacctagctaattcatacttcattctttcatgttggcttacatgttacttcctcagggattcctttcttgactagtcagaatctacactatagaatctgtattatgcgttgccatagtaaccagtacttcatagactttatcatacttcgtagcatccagtatgttttctttgctaagattattgattttgtattgaagggtcccatgtccatcgttttcaatgctttatctccagggttggagcatgcctggtaagtaggacataaatttgtctcacaaattaaacagctttatgaagacataattgacaataaactacaaatttaaaatgtacaacttaagaagttgtgatatatgtatacacccgtgaaatcatcaccacaatcaagatactaaacttagctatcattcccaaagtttccttgtacccttctgtaaccatctctctgctccttctgcattctaggttgacagttttttctttcaatgctttaaagttatagcctcagtcttgcttatattgtttctgatgagaaatctcacattatcctatctttgttgctctatacataacatgccttttttcttctgttttaagatttttctcttttacattggttttgagcagtttgataatattgtggccagctgtggttttctttatgattcttatgtttggggtttgttgggctataaactgcggacatatagtttttatcaagatcaatggcaatattttggctattatttcttccaactttttcccctccttttctcctttgaagactccagttacacatttttagatcacagaagttggtctcagctcatgaatgcccgtttcattttttcttcatacttttttctgttttattgccaatagtttccattttcatgcctttagttccgtttactttttttttttgtaatattagtctcttgttaatcccatctggtgtatttttcatcttggacattgtaatattcacatctagaagtttgatttaaatcttttgcatctttcttgcttctacttacttatgttgaacatacatggagtacatgtagcaataattgtttttacatcttgttctgtgaattgtagcttccatgtcagttttatattggcttctattgattggtaattctcttcattatggattttgttttctttcctctttgcatatgtggtaatctttgattggatgccagacattgtgaattttaccttgttaggtgcaggttatttttgtatttttataatgttcttgagttttttttccgggatatagttgagttacttggaaacagattaattccattggttcttgcttttatgatttgttagtccgatcaggagcagtgctcagtctagggttatttcccactaccgaggcaagactttcctgtgtacactacccagtatcccacaaattaagggttttctccattctgcttattgggagcagttatggttcctagccttatgtgagtgcccaggatttctcttcaaccctttcagatggttctttctgtagcctggggtaatctcctcaaacacatgccattagtactcttgagtacttgaggcagactctcagatctctgggcttctctctgcatctctcttttctctgctactctgtctaatgacagagtagtagcctagtttcttcaactcaaggaggttgaagtcaactctgcatacaagtactctggcctttttctttcttcagagaagggggaagaaaagctggtgaagatttacactacagttaaagggagggaaaagccatgtaaccgttgtatttatgtagagttgactatacctcactttcccttctttgtgctgtggtctggaaactcctcaaggcagtaaactagattggtggtggggctaatctcataagtgtcctttgttgttttatgtctgatgtcttgaaaactgttgtttcatttaactttctctggtttgtttcatcttattggatgtttctggtggaaagataaatctggttcctattcttccatgttggctgcaaacaaaagttattcaatgtatatttttaagtgaaaaaatattttctgtagaataatagagctagaaacaattgaaaagggctaatgagtatagtgagaaaatggatgtataaacagctttttaaagaagtttgagaagaacaaggtaggggagagctctgctttagcggccaggcagagaaaaggaagccttttttatttgtttattttgcgagtggggaagtttcagcatatgtaagtggaggagaaacaccagtggacaggagataacttctggcaggagaaaattgaatcataaacacctgtgtgggaattagccttgaatgggagaaaaggaacagggaaatcaatgcttaatcttatgtgccatgcattgatagtaaatacattgcatatttcgactgaagcttgtcaatgttttggtacaattagtattactaacctttattatagatgaggaaatgggcaataagatgagctaacttaaccaagttattcatcagtggcaaagctgaccctaaagctcatgcttttcctaatgatctttgtggtcactctggcctttttctttcttcagagcagagggaagaaaagctggtgaagatttacactacagttagagtaaagggagggaaaagccacgtaaccattgtatttatgtagagttgactataaaactcatctctacccttatggaggaaaagatggggaaaatacccacatgaatgtgttgaggtcagagaagtattgcataaaataattttatgggagcagtgctcttaactctggtcctcccgtgttctttaagtctcgctttagaatttgtggacttgtacttttacttttttacaccttcatagataaatagcaagctcagtaactaggtgaaaagaaggcttattgggttgattctagaagctaagtggtccatgaagtgacctttgtaagttaacgttcttggcctctctcttccccctctttaaagattattatactttgcttatgtaaatattagactgcatcatatttaattggtgtcaaagagttaaatattggcaatatcatgtggttcaagtaatagtgtattttgagaagccaagaaacagtaatgaatatcatcgttagcactattagtgcaggagacaggtctgttttattcactgtttgtgcccaatgccaaccacaatgtctggtacatatagtagatattcaataaataatttatgaatgaaaaactatagccctttgaggtcccatgaggcttttgtggttttcatgtgtgaaaaactaggttttgaggttcggtaagtatttgggcaaatgttaagggagactcttcttttgaggccctaagttctttttagaagactaatccttatcagatttttcagcaaagctcttttattttcaatgcaaggtatcattaaataataaaatatttactacactggcttctctgtaaaaagttcttcttcttcaacccttacaaagatctatgcagagattgaagcctcgctgccccctacttctttttttgggagaactctgcaaaagagctctgccagtagctaagaactgtcacattctggacactgcttttctactttcagttgctctgcctcccacttttataatcaagataattgacatggtcatcatcatgtgataacttttcctttctcatttgaggccagagaggtgtcctttttctatgcgttaatagagattttacaaaatagcatgtaatatggcctagactcacatctgtgtcttaataacttatataaattattttgttggaatgaaacaatcatgaagtgttgtaataagactgatgtctaagaagcctccagtttgttcaggattgcccagaggtctttgcacagatatgaagaaaatgtatttgttatatcgttgtctaatattactgcttcaggcccttatgttaccatgcagttttcctgcagtatcgagtttcatccacacagtggtgctagaaaaccaagaatacatatttctaactgttgcttataaaataagtggtgttatatgtttcctcaacctctatcaaatctatcataattggatttttacctgtgagatgtttccattatctctcaaccagatgattgcaatagctttctaatggatcttcctggatttaccctgctttattccaatttgttttccatattgtagttataagtactcttttataaactcaaatctgaactttactctcctgcttaaaaactgttaatgaattcttttaaattgaatttgtcaacaaaaataaatacagtccattcataatccagttcttgctgagttttcatttattgcaacctttcctgtacaagtccccttgttgctctgcatttcggccagtgtggccttctttgaacagtgtggccttctttgtgttctttgaacacaagtttttcttcctactttttacagattttccttctgtctggaaaagtagaggagtgggtatgcatgtatataggtgtattttttattttaaaaatatgttaaattgataaactgggattttatgttatattttgatgcatgcatacggtgtgtaatgatcaaatcagtatttagggtgttcatcaacttcagtatttaccatttctttgtgttgggaacatttgaaatcttctagctattttggtactcgctgttttgaaatacacaatatattgttgttaactgtagtcacccaactgtgctatcaaacatgagaacttaatccttttaattgtatgtttgtacccattaagcaacctcccttcatcccccacccccatctttcccagcctctgataactatctttctactctctccctccatgaaatccacttttttagctgcgtgtatgatgtctttctgtacctggtttattttatttatttatttttgagatgaagtctcactctgtcccaggctggagtgcagtggagcgatctcggctcactgcaacctctgcctcctgggttcaagcgattctcgtgcctcagcctccccagtagttggaattacaggcacgcactgtcacacccagctaatttgttttttgaatttttagtagagacggggtttcatcatgttggccaggatggtctcaatctcctgacctcgtgatccgcccgccttggcctcccaaagtgctgggattacaggcctgagcctcggcgcccggccttgtgcctggtttatttcacttaatgacctccagttccatctatgttgctgcaaatgatagaatttcgttcttttttatggctgaatagtatttcagtgtgtgtatatactacattttctttatctgttcatcctttggccacttaggtttcccccatgtcttggcttttgtaaatagtgctgaaataatcatggaagtgacggtattccttttgatatactgactttcttttgttttgataaatattcatttgtgggagtgcctattgtggtatagtagttatagttttagttttttgagaaacctctttactattttccataatggctatactaatttacattcccactgacagattatatgttcccttttctccacatccttgccagcatttgttattttttttttttgtatttttttgaaaatagccattctaactacaggaagatgatatctcattgtgatttcaatttgcatttcctcaataattagtgatgttgagcattttttcatgtaactgttggctatttatttatatattcttttgagaaatgtctattaagatctttgccctctttataatgggacttttttttttttgcttcaacagcaaaaaaaattttcattccttacgattgaatagtttgcaaatattttctcccattctataggttgtctcttcactaggttgtttgtttcttttgctctgcagaaggtatttttgttgttgttgttgtttagttaaatataatcccatttgtctttttgtttttcttgcctatgcttttgaggtcttaaccataaaatctttgcatagacctatatcctgaagcatttcttctctgtttcctttttggtatttttatagtttttgagttgatttttgcatatgatgagagataggagtctaattttatttttctgctatggatatccaattttcacaccatttattgaggaaggtatccttttcccagtgtatgttctttgcacctttgtcaaaaatcagttggctacatgtacatggatttatttctgatccatgagcatgagatgtctatttgtgtcctcttcaatttctttcattaatgttttgtagttttcttgtagaagtctttcaccttcttgttaaaatactttttcttaagttaattctttcttatcttttatgtcgtggctcaaaccttggaaagcttttgttaatctccccaaatagaactcttacattatgtgttctcatggtacccagtgattattctttatcacaatttaattatataaaatttatttcataaaaattatttaagatttatatgattatttgactaatgcccatttcctcactgtatcataagtgctaattggcaagattccattcttggctcatcactgtgtcatcgatgcctattgaaattttatttatttatttttaaatttatattagtttctgtataaatgaatataagtcagacaggactcaaagcaggtattggaagtgggaacaggtgagcatttgggggaggaagaaaacagttgccatcagaatacagtaaagtgagttttatattagggtaggatattggcccagcataatccatttatatgtttcctgctggggcagaaattaattccagatcatgagcagttctgagccatgaaagtttccatcttcatgaaagggcaggaggagtgggaggaagagatcacatttgctagatttaaacctagggaagcagctaatgcttaagtgaagaaatctctgttctgtaagtaggagatcttgtttctagtccagctgtgatactgttttgctctgtacccttggaaaagatgtagtataacattggagaagtcattatttgtgtatacatttatttatataactgtataatgagattttaaaagttaatttcttaatgtgtattaaaatgaatgagataatagtatattaaaacatttttaaagtatataaacacttcataaattgggcttaacattttcctggaaatggtagattcttcaattttagaatttctgttatttttattcataattattagaggtgcctaaaagagggtcatgacataaaaagccctatctcctgtggccgctgtattctaagtcttgtaaggacgtgggaccatatcagttttacttactgtttatcctctgtacacagtacccagaaattatctttgaaagaatgatatactgaattgtcctgaaggcctttgtgattggcattctgtgatttttttttttgccttgtaggcattctacagatagaaactatctgaggcaaaactcttgatgtttatgtttgcttttcttgtatttcagctgtggcagaggtaaaacttcgagatgatcaatatacactggaacacatgcatgcttttggaatgtataattacctgcactgtgattcatggtatcaagacagtgtctactatattgatacccttggaagaattatgaatttaacagtaatgctggtaagagaaacatgtatgtaataattaatatatgtatgtaatatcaagcaaatttgataattaagtttcccttttgaatctaatatccagagaagtgaggtgcacatacctgtagtatatggaatcctatctacgtaatactccatttcttatttcaattttaatttttctctttgatcctgttatttacacttactcacctccactctcaccattgggcagcaactctcatggattttatatattattaatactgatgtaactgttcatgtctgcttttcctatgtgaggtgttgtccccaactataatgatgaatttgcttttgttttagtttttactttatgtatttttaactatgttaattggtacaaacatttaggattgttttatttatactgaattgattcttttagcattttaaaatgtctctttatctctaggttctgtgaatattttttgtcttgaaatcttctttggtattaatacagttatttctggatttttgtaaattagtatttttcttcttatatgctttttctatttatcagtgttcttgtttttaaagtatgtgtcataaagagcatatagttggctcttgttttttccatatgacagtctttctcttaattggagggcttacatttatacttaatttaatctagttcccaatattcttgggctaatattaccatcttgctcttctcattatgccctgtttgttctttgttccttggtgtctttgttcctacttttttgcaggaggaattaatcacagtttttctttttaaaaaaaatgtccttagaactcgatttaatttcctcttttggctttttatttaaacctgtttgtattattattttttaaatggttgatacagaggttatagtgttttccttgacttaccacagtctgcctctaattaatattattttactttaaaaacaatgtgaaaactttacaacaatataattcctttcacttaccctctcattgtttgagctaattttatcatatgtttttcaccttcatatgctggaaactccacaatacattgttaatatatttgcttcaaacagccaataatctgttaatagcttcctaagtactctattccttctagccctcctgcgcattgcatctacagagtagtctgtctgatttgcgtgtttaatattatcacttgctaaaattcttttaatatttccttcatggcaaaatccatgtttttaatatgtaatttaaaaataggcaatgtgttcatgtaatttaaaaaccaaaaaagttataaaaggtatttagtgaagcctccttgatcccatcttttatctatcctatctccagtatccattatttcccctgcaatgtctttattggttttgtgtgtctttccagatgtggtaggttatttgttgttgttttttgcaagtataaacacaaaatgatgttgcgggaagtcagggaccccaaatggagggaccagctgaagccatggcagaagaacgtagattgtgaagatttcatggacatatattagctccccaaattaatacttttgtaatttcttatgcctgtctttactgcaatctcttaaacataaattgtaaagatttcatggacacttatcacttccccaatcagtacccttgtgatttcctatgcttgtcttttctttaatctcttaatcctgtcagctgaggaggatgtctatcgcctcaggaccctgtaataattgcattaactgcacaaattgtacagcatgtgtgtttgagcaatatgaaatgtgggcaccttgaaaaaagaacaggataacagcaattgttcagggagtaagagagataaccttaaactctgaccgcaggtgagctgggcggaacagagccatatttctcttctttcaaaagcaaatgggagaaatatcgctgaattctttttctcagcatggaacatccctgagaaagagaatgtgcacctgggggtgggtctctgaactggcccccctgggcatggtcgtctcttatggtcgagactgcagaggtgaaatagattccagtctcccatagtgctcccaggcttattaggaagaggaaattcctgcctaataaattttggtcagaccggttgatctcaaaaccctgtctcctgataagatgttatcaatgacaatggtgcctgaaacttcattagcaattttaatttcgccccagtcctgtggttttgtgatctcgccctgcctctacttgccttgtgatattctattaccttgtaaactacttgatgtctgtgacccacacctattcgcacactccctccccttttgaaaatccctaataaaaacttgctggtttttgcggctagtggggcatcatggaacctactgacatgtgatgtctcccccggatgcccggctttaaaatttctctcttttgtactctgtcccttaatttctcaagctggccgatgcttagggaaaatagaaaagaacctaggtgaatattggggcaggctccctgatgaaatgatatatattcttaaaataaacttttcatctttgcatatacgtttatatgccgagttttctccaaccttgtcttacagcactttgtatactacattctagccatactaaactcttgcagttcctgagacatgtgctgtatcctatttcttctggtccttttctcattgattaactacctggagcatacttttaattcagtgtcagtctgctttgcaatctttacttaagtcctaggtaaccattttgtcatctagcaagcttgccttgacatcttacctctgttcccctaggaatattcacaccattggctctcaaatctacatgtgctgtgaatttcttctattctagaggttgatacgcttttctgcacaaggccagctaatttaggctttgtgggccagatagtctcttgttgctcgcttttgctgttgtagtgtgaaatcagccatagacagtttataagcaagtgagtgtggccgtgttccaattaacctttatttacaaaaacataaaatgggccgagcgcggtggctcacgcctgtaatcccagcactttgggaggcagaggcgggcggatcatgaggttaggagatcgagaccatcctggctgacacgatgaaaccctgtctctactaaaaatacaaaaaattagccaggcgtggtggcaggtccctgtagtcccagctactcaggaggctgaggcaggagaatggcgtgaacctgggaggcagagcttgcagtgagcagagcttgcagtgagccaagatcgcaccactgcactccagcctgggccacagagcaagagtccgtctcaaaaaaaaaaaaaaaaacataaaatgggcaggaattggcctgtggactatagtttgccacccactggacgaggccatgggttctagcacccagcagaaggcttgatcagtatatttgttgaatggataatagctgtgtaaagttcattattactgttgggagttggctttggaatagggtcttcctcctgttatttctaatccaagtgtaggtatgagttctgtattggcaatgcagtgtttatctcaaaatgttcagaaaggagttagacatttcctggtaataaatattttccttcaggtgactcctaaaacagatagtgtaaaattctgattgtttcttgttggatcagaggaatgcaatctggcctcttactcttagatattagttgctttttcttgctagccccatgttctactaaggattactatctaggcccaatgtgtataagccaactaaagtgataggacatgcatttttatgagtggctatgctctgatctctctgatcaaataaattttaatgatcaaatagattttgatgtagagttctgtgtgtatgtgcatgaaagtttttccttaatcctttttgtgttaacaaatagggcatttgttgatagcatttgctgtaccataaagtttgccaataacatttattctaccaattttctgactcgaagtcagatgacattatggtagatctgaaagtgttaatttttgtagtaccatccatattcataatctattttacttttccatagatatcttgtggcacatgtaatgtagctctaatacgtgttgttagggaggtagggtagttggtcaaaaggaaactagacatttaagacagacttaccaaatgagttcattttaacgtgtttattgaaaacctgctctgtgtaggacactaatgtataggttggtgcaaaaataaaaactgttttaccattatttttaacatgttcaagtacttatacttctacatataagttcaggtaacttatatgttatactttttaggtgctaatatgagtgtacaggtaactattacatggtaatatgtagctgacaaaaagggtacagcagtctccatatatccttggcttcagtttcatagaaaataagaataatgataaggttttttagacgttaaagcaaggtgtgtgaaaatgctttgaaaagtggaaggcattatgcaaatataaagagatattactggcatatgccttggggtatcactttatgggagacaaacactggctagttttttttgcacatattccttctttgagagcagtagaactgtatgataagaataaatcataatgtcaggtaacttttattgcatagagattattacatatcaggaacaattctaaacactttacacgtactaactgtttaatccacagaacaatggatcctgtggatcctttctcataggataatatcctgatattatcctgatataccagatactattattatccacatcttacagttgaggaaactgaggcataggatgtttgtaagagtctggatttaaactcatttattccagaatgccacagtgctctaccagttctccttatttcttgttaatagagacggatattatgtgttaatagagacagagtttcaccatgttgcccaggctggttttgaacccctaggctccagagatccgcctgcctcagtctcccaaagtgctggaggattacaggcatgagcaactgctcctggtctctattatcattttcagtgccagttctctaatcacctgttcagttttttgtgcagtaatgggtttattcaaagtgtgtttctagggtaattttgtaatatgtatttttattagaggaaaccatcagtttcctcttaggtttccaaatatgctgctataaagttgcatgcgttatgctcttaagattattgttgtcttttctctttcctttctatatttttcctctttttacctaatcaagctttaggaaaggtattagtttatttttaaagaaccatgttttaggttcttaaagcttgttttctgcttaattttctttggttctcagaccatattgtaccttggaataattgtggagtaattgatcaaaacaaaaactaatttcaaggtaccatttcccaaaattctgattcattattgtcagggttggtcatggactgggaacctgcattttatcaagcacctcaggtggttttgcttgtggtccagggatgaccaggtattaagaaattttgtacctgggatacagaagaatactacacttattttttattatttttctcatcagcaacaaatgaaatcaacctactctgagtttctgtcaggtgcaggcaggtagagaatgttgaccactaactagactattggcttatagcagaaaacagctcttccaatatccattttattgtttaataattttttttgttttcttttgttttcatcaaaggcacacgtgcacaaatcctagacaggctccttttctgtgactgatgtacaaatgaccacctttgttaaacctgaactgttgtagtaaaagtgaatgctatgggacccaacacttgaaagccataggttgctaggtcttcagactgtctggagccaacaggtggcagcaggtctacatactggtttataaagacagaatactctccttacaaaaaagtttaacttgtaggtttacagtccttaattttagggaaatgtccctcggaaagaagtgtgctaaggaagtagaaaatgccttgggaaagcaaaaatgtgtttaaactttggttttttaatacatccttattttatatattatggcttattttaaagtaatgtgttccgtttcttaatatttaggaaattatttctgtaataatttgttttgtatttacctgaaaagctaatttgtttctgttactaaaagagtgtcatcttatagtgcctctttaatttgtacttaaaggtctaaggggcagttactggatttcatttgtaagaatatatgtgtgaggttgcatcttggagtgacatgttacaactatttgttagaggagctcagttttatgtcagtatgttcatctctaggcctgaatgtcagcttgttttcacagttgagttaattattaggggaccacttacttacctgtgtagagacgaaggcaaagtgtcccctttattcttagaaggtttgctgaaaatctgttgacaaacggcagattaacatgagaaaaaggcatataaatatattttaacatgtgtacatggcagaatccaggaaaatgactacccagtaacccagtggggtacagatgcttatatacccttattcatacccttcttatgcttgatcagtaggggacatgggggacatgcgggatagcaaatgatctttagggggaaatgaatgaatgggcctgatgctcagacaatgattagttaatacttttctttggaaattgaatgggatggagagcagacaatggtttgtgactaagttcatctgggctgtaggtggggtgtttaattttcagcctcttcctctgtgatagaagttttaatcttctctggttaatgaaatttcagggaaagcaattgtgtttctctttggcaggtccagtttataggtagatgaaggaacttcagagaatagcttcatcctgtgcttgggagaaacaggaagggaggggaggccagaaagaccttgaggctgcttcatgttgaagtggcattatttcggagtaacattttttgagctgcaatgcctgatgaaagaaaaaaataaagagtggggtaaatacgtagaactgtgcgtttaatacaaaaaaaagggaaaaggaaaaaggaactttttatgttctttcttccaaataaagttaatggttattaatgatgaaaatactttgtccagaaaaagatcactgccttttaaaacggcaaagttttaaatatcattgtctcataatactagtaaatagtatctaataatactagtaaatggtatccccacttgcttatttttttaaacttgagtagccctttctataaatctatatttattagaaaactacttcgttagttcaaagattctctacttatagctgcaactaagagggtcccaaaatgtgtttaaagatgttttttataaatatatatagtttatgtattacttgtttactgtttatttacagtgtcatttatatataatatatgggcattataatttttatattacatctatattgacccaggcatctgcattaaaaatactgtgtagaggcctgaagaaaaactgaatatagtagttacattcaaggttgatttggggggttggggatgggtatactagaaattgtattgagatctgaagtattaatttatttagaaaatcttcagaagtggtttcttctcaagcaaatgtggagtaggggaaagaaaaccaacttttggagtagggttttatcaggatttgagtcttggccctgtcattttctagcagtggagctccaggcaaattatttaatctttttgaacctctcttctaagtgtagttaataattttaacttcatagagtttggtgataaatacatgacatggcaaaaagtcaaagcacttatttaataaaattcttatacattatactgattcagtaagtattccgttcatcaatgaaattttaatccttctgcagtcagctgtgtaatgttgccttagaatgattttcagtgttagcccttgaacgtagttacattaactctttttgtgaggaaaaagaaaatgattatgtgagagctggacattatagatgtcagttagcatataaagtgttgttatgagggcatgtagtgaaattgtcaatagaggttattcagatataagtaaatgctatattttgggatttagagaaaaagatattttattgcttatagtccatttaaaattaaactgtactttgaaaattagatctaaacaatcagaaacatttagtttgctttcactttaactgtcattaatgcaagtaagagagccactatgtgtttccttttgtgttttaatttaattttgttttcacatttagatactcaagtatcttaatcattctattggatattgtacccatttatctgattgataattagacttctagcaacctccgtcatgtataaccaggtattttaaagaaaatggcttaaaatgctcataattgtgtataaaatgaagaatagtaatttaacaagtttatctctacgttcttcccagtaatggtttattagattaaatgcagtgtggggccatgtagtagacacaactagaaacctttactttgaaataactgttttgaggaaagcctcccattgtatcttactaatacctttaaaattacgtatatcacacacaagttgctcagtcttaaaatagtaatgtatttgaagcaaaaggggaaaattttctcatactcctgatctccccgaccactacacttcagtcttattttcctaatagtaaacattcttaacaggtcagcatgtgtctatctatactttgtgctgtcgtatcatgatatttgttttggcatatatggattcatattgtatgtattctgcatctttttttaaaaaatcagtattttatgtcagtattattaatccgccttagtatatttaacaattatttggtattctatagggtggatgctccatagttaaccatttgcctgccaatgctctccagacaaagataccaggcacgcatctgtggttgaatgagttggatttgttacttttgcagtaagggagaacacataccatgggaaccacagagtgttcagtaaaaggaacaggatgctgttagaaggtttggcttctgttgggtgattttggaggaagggttaaagaaagtgaggctttattctagattgaatactgtcaggaaattggttgtttatgtaatgggtatcttaataagtcttacctagaaggagggaagactagactgaggctcacactataattagtaaggagctgcagctgcttatattggcctggtcatatttgtagccttgacagtgttgatgttttatctgtgttcagatattactgtgaagtgctgcttttttgtcctgctccatcacggtcatgcagaggccttatctgatgtgtatgttttgtgaaactattcctgttcaacagaacacctgttagtgccaggctagctagtaacaaaacaaaggcctggctgatactgctaggccttctccgtaatgtcagggtctgctttcatctttacctactttattgataaacaactaggttgtttttcctagtttttattggcacagtttttccttttcgttattaaaataaacatacttgttacgtggatcttcgtgtacatatgcaggtattcttattgaataaattcctgtaagtggaatcatgtcaaacagtatataaaacataaaacttaataaaaccatagcagcacctcatagctttaaattatctccaaaaagcctatagttatttttattcccaccaacatggcactttagccaagaattgtcattactagtgtaagattgttttctctggccaatgagataatcatattctattaatccattattttataccagtgatttggggcttttttttttttttttttttttgacagtgtctcgctctgttgcccgggctggagtgcagtggtgcgatttcagctcactgcaaactctgcctccgtgttcaagcaattctcctgcctcagcctcctgagtagctgggattacaggtgcctgccaccacacctgtctaatttttgtatttttagtagagatagggtttcaccatgttggccaggctggtcttgaactcctgcctcaggtgattcgcctgccttggccccacaaagtgctgagattataggcatgagccaccgcgcccagccgactttttttaaactatagttgtcccgttcaaatattttccccatttaacattttttaattttttatttttaatttttttatttccctaggttattggggaacaacagatggtgtttggttacaggagtaagttctttaacggtgatttgtgagattttggtaaagccatcacccgagcagtatacactataccctatttgtagtcctatttgtagttgaattttatccctcaccgcttcccactctttcccccgagtcctcaaagtccattgtgtcattcttatgcttttgcatcctcatagcttagctcccacttacaagtgagaacatacaatgtttggtttccattcctgagttacttcacttagaataatagtctccaatctcatccaggtcactgtgaatgcctttaattcattcctttttatggctgagcagtatcccatcatatatatatatacaccacagtttctttatccactcattgattgatgggcatttgggttggttccactttttgcagttgtgaattgtgctgctataaacgtgtgtggaagtatcttttttgtataatgacttcttttcctctgggtagatacccagtagtgggattgctggatcaaatggaggttctacttttagttctttaaggaatcttcatactgttttccgtagtggttgtactagtttacattcctgctagcagcacagaagtgttccctgttcacagcatccacgccaacatctactattttttgatgtttagattatggccattctggcaggactaagttgggggtatcgcattgtagttttgatttgcatttccctgatcattagtgatgttgagtttttcatatgctttttggccatttgtacatcttcttttaagaattgtctattcatggccaggtgtggtggcttatgcctgtaatcccagcactttgggaggctgaggcaggcggatcacaaggtcaggagattgagaccgtcctggccaacatggtgaaaccccatctctactaaaacacaaaaaattagccgggcgtggtggcgtgcgcctgtagtcccagctactcgggaggctgaggcaggggaatcacttgaacctgggagacggaggtttcagtgagccgagatcgcaccactgcactccagcctggcagcagaacaagactccttctcaaaaaaaaaaaaaaaaaaaaaaaagaattgtctattcacgtccttagcccactttttgatgggattgttttttttccttgctgttgtagattctggatattagtcctttgtcagatgtatagattgtgaagattttctcccactctataggttgtctctttattctgctgactgttccttttgctgtgcaaaaactctttagtttaattaagtcccagctgtttatctttgtttttaatctcatttgtttttgggttcttggtcatgaaatcctggccttagccaatgtctagaagggtttttccaatgttatcttctagaatttttagtttcaggtcttagatttaagtccttaatccatcttgagttgaattttgtataaggtgagaaatgaagatcctgtttcattctcctacatgtggctggccaattatcccagcaccatttgttgaaaagggtatcctttccccactttatgtttttgtttgctttgtcgaagattagttggctgtaagtatttgggtttgtttatggattctctttttttttccattggtctgtgtgcctatttttataccagtaaccatgctgttttggtgactatggtcttatagtatagtttgaaatcaggaaatgtgatgcctccatatttgttcttttaacttagtcttgctttggttatgcgggctgttttttggttacatgtgaatttttttttctaattctgtgaagaatggtggtggtattttgatgggtattgcattgaatttgtagattgtttttggcagtatggtcattttcacaatattgattctacccatccatgagtgtgggatgtgtttacatttgtgtaatctgtgatttctgtcagcaatgttgtgtagttttccttgtataggtctttcacctccttggtttaggtatattcctaagtggttttttttgtttgtttgttttgttttttttttggcagctattgtaaaaggggttgagttcttgatctggttctcagtttggtggctgttggtatgtagaagagctactgatttatgtatattaagtttgtatctggaaacttctgctgaattcttttatcagttctaggagctttctggaggagtctttagggttttctaggtaaatagttatatcatcagtaaacagcaacggtttgactttctctttactgatttggatgccctttatttctttctctttgattgctctggccgggacttccagtactatttgaagaggagtagtaagagtgggcatgcttgtcttgttccagttttcagagggaatgctttcaactttgccccattcagtattatgttggctgtgggtttgtcatagatagcttttattacattgaggtatgtccgttgtatgccaattttgctgagagttttaatcatagagggatgctggattttgttgaatgctttatctgcatctattgagatgatcatgtgatttttgtttttaattctgtttatgtggtgtatcacatttattgacttgtgtatattaaaccatccctgcatctgtggtatgaaacccacttgatcatggtggattatctttttgatatgttgttggattcagttagctagtattttgttaaggattatagcatctaggttcatcaaggatatctctctgtagttttcttttttggttatgtcctttcctggttgtggtaatagggtgatactggcttcatagaatgatttagggaggcttccctctttctctgtcttgtggaatagtgtcaataggattggtaccaattcttctttgaacatctggtagaattctgctgtgaatctgtctggtcccggactttttttttttttttttgagatggactcttgctctgtcacccaggctggagtgcagtggcacgatctcggctcactgcaagctctgcctcctgggttcatgccattctcctgcctcagtctcccgagtagctaggactacatttgcctgccaccatgcctggctaatttttttatatttttagtagagactgggtttcattgtgttagccaggatggtctcgatctcctgacctcgtgattcacccaccttggcatcccaaagtgctgggattacaggcgtgagccaccgcacccagtctggtcctggactttttttttattggtaatttttaaattgtaatgtctcccattttgtttcttactgagcttatttggattttctctcttcatttcttgattaatcttgctaatggtctatgcattttatttgtcttttcaaggaaccaactttttgtttcctttatcttttgtatttttttgtttgtttcaatttcatttagttctgttctgatcttggttattttctttcttctgctggttttgggtttggtttgttcttgtttttctagttccttgaggtgtgaccttagattgtctgtttgtgctctttcagactttccgatgtaggtgtttagggctatgaactttccacttagtactgcctttgctgtgtcccagaggttttgataggttgtgtcactattgtctgcagttcgaagaattttttaatttccatcttgatttcattttttgacccaatgatcattcaggagcagttaattaatttccatgtatttacgtggttttgaatagaatgtatattctgtggttgttggattaaatgttctgtatatatctgttaagtccatttgttccagggtatagtttaaatccattgtttctttgtagaccttctgtcttgatgacctgtgtagggctgttagtggagcattgaagtcccccactattattgtgttgctgtctatctcatttcatagatctattagtaattgttttataaattttggagctccagtgttaggtgcatatatgtttaggattgtggtattttcctattggacaaggccttttatcattgtataatgtccctctttgccttttttaactgctgttgctttaaagtttgttttatctgatataagaatagctacttctgctcgtttttggtgccatttgcatgaaatgtctctttctacccttttaccttaagtttatgtgaatcgtgagtctcttgaaggcagcaaatgggttgatgaattcttatccattctgcaattctgtatcttttaagtggagcatttagaccatttacattcaatgttagtattgagatgtaaggtaccattctagtcatcatgctctttgttgcccgtatatatgtttttttaattgtatttttgtttcataggtcctgtgtgatttatgctttaaacaggttctgttttgatgtgtttctagaatttgtttcaagatgtagagctccttttagcagttctgtagtggtggctgtcacacacgtccgtgtaaagagaccaccaaacaggctttgtgtgagccacaaggctgtttatttcacctgggtgcaggcggactgagtccaaaaaaggagtcagcaaagggtggtgggattatcattagttcttacaggtttgggataggcatacaaagtacattcttaagggcatagagaatattacaaagtaccttcttaagggcggggatgggaagaatattacaaagtgccatcttaagggcaggggagaatatatcctatcagttagggtagggcaggaacaaatcacattggtggaatgtcatcagttaaggctattttcacttcttttgtggatcttcagttgtttcaggccatctggatgtatacatgcaggtcacaggggatatgatggcttaacttgggctcagagccctgacattcctgtcttcttatattaataagaaaaacaaaacaaaatagtggtgaagcgttggggtggtgaaaatttttggggggtggtatggagagataatgggcgatgtttctcagggctgcttcgagagggattaggggcagcatgggaacatagagtgggagagattaaactgaggaaagattttgttggggtaaggggtgatattgtggggttgttagaaggagcatttgtcgtatagaatgattggtgatggcctgaatgtggttttgtaggaattgagaaactaaatgaaagacacaagctctgaataaaagaaagaggaaaacacgtattaaaggactaagaattgggaggacccaggacatccaattagagtgtccagtggggtccgggggtggggggggttcaacataattatttgcttggttggcgagtttttggactctatccttgagttttttttttatgttgtcatataccacgcaagattgatttaggtaaaaacaacactcttcttttaaaaatatacagattcccactttttttttagcagtgagtaaatagaggccttggcgattttggaggaaagagaaatgcaaagtgaacaattgtttcttaaagaaggattagaaacggctaggagagagtgagtgagattgatagtgtggcagagatagctggggagaggtagagggtggcataagaacaggaacaagaataagagtgagtataaaagtaaagaataggacttcatcagggtgaaagtattggagtgtaacctgtcagcaaagagcatctatccactccaagagggagtcaagagtggtggattggggctagtaccagaggatatccactacgatagtttggaagaaaagtgtaaactggcaatgtaaacaagggcagggcatttatgagtagttgagagtggtgagtaggagtaagactagacaggaaatagtagggatgacaagttttcggggtgcagtccaagtagtgagagtgactgcataaagccctgttgcaaaaagcagggtaaggacaaatagacctaatagaatgaagggatgtattgggcttataagggttattactgttcttcagaaatgcgagtgagtttaagggaagtaggggggagtacttgcgacttccaggaggaagaggagaaatcaggctggctggctgacgggcacagctttactctggatctatgaacctaatgcgggggtcctgcagacgaacagccgttggggtactatagatgactaagtggggtccagtccaccaaggttgtagaatttgaggggtcagattcttaataagattagcagcctggtgaatttcctgtctgtcctgctggaggacaggaagatagttgcttagagggctagtgcttgggatgaggttggggccgagcaagaaactgcatccatataaaagttcaaatggattgtaccctgtagtatctcgaggacaggctctaattttgagaagggcaagaggtaaaagtactgtccagtcctttttaacttggaggctgagcttggtgaggtgtgtctttaaaagaccattagtccgttctacttttcctgaagattgaggacagtaaggggtatgaagtttccactgaataccaagagactgagaaactgcttgggtggtttgaataataaaggctagtatagaggtgggaaggccaaactgaggaattatgtcttacagaagggaagaaatgaccacagtggccttctcagaccctgtgggaaaggcttctacccatccagtgaaagtgtctacccagaccaagaggtattttagtttcctgactcggggcatgtgggtaaagtcaatttgccagtccggggcagagacaaattcccaagcttgatgtgtagggaagggagggggcctgaacaatccctgaggagtactagaatagcagatggaacactgagaagggatttccttgaggatagatttccacgatggaaaggaaatgagagattctaagagatgggctagtggcttgtaacctacatggaagaggttatgaaatgacgacagaatagaatgggcctgtgaggctggaaggagatattttccttggtccaagaaccatttgtcttgtgtgggaagggattgataggtggaagtttcagtgggggagttggtgggagtgaccaacgaggaggagaaaaactggccctgagggacagaagttggaagctggctgcttctttagctacattatcagcataagcgttaccctgagcgatgggatctgatgccttttgatggcccttgcagtgaatgactccagcttcctttggaagtaaagcggccttgagaagagtttttattaaagaggaattaatgatggaggacccttacgtagagaggaaccctctttcagcccatataacagcatggtggtgcaggatatggaaggcatatttcgagtctttaaatattgacgcgtagtgcctttgcaagagtgagggcccgagttaaggcaatgagttcagcttgctgagaggtagtggagggtggcagagcagtagcctcaaggatagacgtggaagatactatagcatagcctgcttttgctggtaagtggtgattaggcctagtggaactgccatcaataaaccaagtgtgatcagagtgagggacaggaaagaaggaaatatggggaaatagagtgaatgccaggtggatcagagagatacagtcatggaggtcaggtgtggtatcaggaataatgtgggggctagcctaaaacagtaaggtcaagttgtttggacagaaaggctacacagcacggtcccggctcttgtgtaagagttccagtcacacacccctgcacttcagctgtgtgtaatgaaaaaggttgggatgagttagggagagctagtgtgggagcagcttttagggctgttttttaaggattggaaaggggagtggggaaaggatttaggatttatggggtcagctaggtttatctagaacagaataatgggttgtggaggggaggtattgaggataggagagtatatggttttggcaccatggggtggttgataaggcgcagatcctgaactaacctgtaagacttgtccagtttttggacaggtgaaatgggggaatcgtaaggagagtttatagactttaaaaggccatgctgtagcaggcgagtgataacaggctttaatcattttaaagtgtgctgtaggatgggatattggcattgagcgaggtaagggtgattaggttttaatgggatggtaagggttgcgtgatcggttgccaaggagggagtagaggtgtcctatacttgtggattaaggtggggagatacaaggggaggatgtgaaggaggcttttaactggggaaaaaggtggcaatgaggggtggctgtagcctaggaatagtcagggaagcagataatttagttaaaatgtctcaacctaataagggagcggggcaggtgaggataactaacaaggagtgcataaaataatgttgtccaaattggcatgagagttggggagttttaagaggtttagaagcctggccgtcaatactcacaacagttatggaggcaagggaaacaggaccttgaaaagaaggtaatgtggagtgggtggcctccatattgatgaagaaggggacagacttaccctccagtgtaagagttacccaaagtgtctgtgatggtcctgtaggcttccaaggcgatcgggcagtgttagtcttcagccactaagctgagaagatctgggaaggagtcagtcagagagccttgggccagagttccaggggctctgggagtggctgctgggcgagtaggacagtccgatttccagtggggtcccacacagatgggagacagcttaggaggaatcccaggctgcgggctttccttggcccagtggctagatttccagcacttgaagcaagatccttggggaggcggtcctggaggaacacctggcccctgcagtttaggctttttgaagttttggtgtgctggaaatgtggctggggtttctctcacagtggaggcgagtaattgcaactcttctttattattgtacatcttgaaagcgaggtcatttaagtcctgttgtggggttgagggccagaatctaatttttggaactttttaatgtagggagtgggttgggtaataaaatgcatattgagaataagacagccttctggcccctctgggtctagggcggtaaagcgtctgagggttgttgccaaacgggccatggactgggctgggtttcatatttgatgaaaaagagcctaaatgctaactgatttgggagatgtcttataaagaaagaggagcattaaccttggctatgccttcatctccagccacctctaagaggaaatcgttgggcaggtgggggagggctagtcacagaacgaaactaagccagacctggtgtaaggaggggaggtaataggagggttatagggtgggggagtggaggctgaagaagagttgggacctggcttggcctggcgaggcacagcctggggaggaggggagaggtcagatgggtctgtagaaaaggaggattcccaggactcagagcttggggtggagactgaaggaacagacagcagagaaagaagaaagatttgggatgagtctcattgggagcagagattaggaagggaccgatgtgtaaaagaatgcctggacatcaggcaccacagaccatttgcccattttatgagaagaattatctagatcttgtatgatggaggaatcaaaagtgctgttttctggctatttagaatcattgtttagtttgtattggggccaggcgatgttgcagaagaaaataagatgcttaggtttcaggtcaggtgtgagttgaagagattttaagtttttaagaacacaggctaagggagaaaaaggaggaatggagggtggaaggttgcccatagtgaaggaggcaagcccagagaaaagagagggtagagacagggagaagggaggtagtgagcagccctgggctgcaatgtgggcaagcagccaaagcaggcatccccgcacttgacttgccaccaaaggaatgttggtgaatgaccaaggcaggcatccccgcagtgatcagacaccaatggagtgtgggtgaataatcaggcaggtgtccctgcagtgattaaacaccaagggaagactgtcttcccgagtccatgactggtgctggagttttgggtccatggataaaatgtgtctcttttgtctctattagagaggacaaagagctggaattggaaggacagggagattgaagggtagtaagagagggagattgaagggtagcaagagaggctggagaagagagtagaaaggccgcttaccccatttgaaattggtgagatgttccttgggctggttggtctgaggacccgaggtcgtaggtggatctcctcacggagtgagggagaggacagaggactggtctcccaaaggagtcctcctgtcccgggtcttcggcaccaaatgtctggcgcatctgtgtaaagagaccaccaaacaggctttgtgtgaacaacaaggctgtttatttcacctgggtgcaggcgagctgagtccgaaaaaggagtcagcaaggggtggtg

SEQ ID NO: 447 - DNA, 32742 bp, Homo sapiens
  source 1..32742: mol_type = other DNA
ctctttcttcctgtctgcttggaaagatggcgtcccgcaaggaaggtaccggctctactgccacctcttccagctccaccgccggcgcagcagggaaaggcaaaggcaaaggcggctcgggagattcagccgtgaagcaagtgcagatagatggccttgtgagtgctgttctttttcctctggcccacgtggggagcgcagttcccagccccgtcccaccagacgtactttctagcattctcccccttgggcttggtgtggctgggccaaagtttttccctagtacgtttctctttcatcttcactttttgttcaggagcttcgacagccttctcttgtcttctaacgggacagttggggcttcaggaaggggactgagaataggggtgtgagtgacaggttcctggggtcttgttttgagatgaccggtggggggatttgaagaaagactcctggagaccagcagctaacgaaggtgtcgagaaggatttagggacctagtagggctctgggaaggagagagtaaggaaactccactgattccctgctgggatctgacatctataacgttccaagtggagatgtactttgtagccactcttttgagcctgtacttcggcgctttatctgaaaccgtataatttagaatactcttttgtagtgttcattctgaaaaacataaaagaatatcaaagagaagggccttaaatgtatttagtagttaaggttcatgaactaggacatccaaggaaattcttgataaggaaatggacttagctgggaagaggaaaatctagaatgagaaattttatttctgttgtttcgaagcaaaatgcatttatatgacgttctagttttaaaagtatccttcctgccctctttttaaaaagcatcctctcttcctttgatttttttaaaggttatttcctattaatgcagatcttagatatttgtaataagaaagtacttttaaattcatgtgaaaattgtaattgcaagcaggtatttttaagtggaaactgttgataatttaaacgcagcatataattgaatctgttgaactgacttagttaaactggatacaagagtgtagcctggtggttaagagctcattcagtcttctaggctcttccacttaaccagctctgtgactttaaggcaagttagcctttccaggctttgctttcctcatctgtcaagtgggaatgagaagtatctgtatcatagagttgtttggattaaatgaaaaagtttatgtggtgacctgtagtacagtgtaatcacttaatgttaattatgattattattatgagtttaatgtctgtggttagcagagtttgaaagatgcaggcaagagattaactttggaatgttttgttctaaatgtcacttgtgtaatactttgaaaatgcaggccgggcgtggtggctcacggctgtaatcccagcactttgggaggccgaggcgggcggatcaggaggtcaggagttcgagaccagcctgaccaacatggtgaaaccccgtctctactaaaaacacaaaattagccgggcatgttggcacgcgcctgtaatctcagctactcaggaggctgaggcgggagaatcgcttgaacctgggaggcggaggttgcagtgagccgagattgtgccactgcactccagcctgggcaatagagcgagcctccgtccaaaaaaaaaaaagaaaatggagtactatctggcctgtgtactggcactgtggctttccctggctcatgggaggcagatgtgtgttcaggaataaatgacgtatctttagagattgcaaatctctaaagttagtgggtggacttagattacacttgttaaaataagtaccacttatgcacttgggaaatgtttatttcttagaaacatatttcttattaaatttgctatgtcacaacagcactctttgaatcacttagtttccagagttgaaaaaggcaacaggtcggtggcataaatctatttggagatcatttatttagcaaatattttaggacattctgttaagtgccaaatactatctaacacagggcagtggtaaaagcacttcagtaacaatgtcctggcagctttaagagggattgttgaattaaacagagacctgcaggtggagatggactggatcacttcaggtttcacaagggtgcttagtcaagagactggttctcaattttttggactcagaaattattattttttatcagctctctcagaattgattaatgctaaggaaccaattagtccttctcacaggagattggtttatatacatgtaaatgttgatttactcatttactgtggaagacataccttttcagtggtgaaaacgctcatatctaccaccaaaaagacccttttgattaccaaagcaccttggaaatcgaataaaaaaaatcagaagcttaccagtgactccaaaatcaatcataataagagcaggtaaaggattattttacttgagagttatttatatccagattcttgacgaacttagtgaattatctcttattcacggtggtgggtacctctgtgcttttgttctccatcggttgggtagatattaacaaaataagttcctaacaactttccccctttttggacatctgcctttctgtcatttatatggttttaggcagctagattatattgcagttgcaaggttcttttatcttggttgctcattttttaatggtgaatgttttccagttaccataaatcatgtagggaacatttaaatggtatgttctttatgcgttttacattgttaatacagggaatactggttactctaaattttattaatggattattgcagatggagtaaccaagaatcatccatcttgaatactatctccacatggatgataggtatacccacgtttgcccagatacaatttaaaaaaaactccttccttaaactcttctcttctctctctcttttttcttttcttttctctctctctttccttccttccttccttccttccttccttccttccctccctccctccctccctccctccctccctccctccctccctctttctttctttctttctcttctttctttctttctttctttctttctttctttctttctttctttctttctttctttctttctttcttcatttctgtcttgatgaacagtgttactcttaggaaagcaatattacatactagccaagagaatcttgacgacagacttggattcagatccttattccagcagtaagcatgaccttggggaagttattaaattttctaggcctcaggtgtatcctttgtaaaatggggatgatgataaagtagtaactcataagggttgtgagaatgaaattccgaggtatttaaagtgtttagtatagtacctgtgtcatcgtaaacactcagattactgtgtctttaccactctcatccttattaatgtttctcaaatcatttcgaatgctaactttgctaatgtagattggaattgtagaaagagcacttcagtgctcctggtaatcaggagacatgcattccagtctgcatccaccagtaactaacaacacttctatgattgttttactccaaaggtacattttctcatccacaaaatgattgccactatccctatcaattttcatggtttatggtttctttcttttgctttcatacctgaatcctgagggttcttattggtgtgtgaccccagtcaatcactatccttccttttaggccacttactcctttccttttatgtttcttctccatctgtgcatattggagtgcctcatggtttaggttttggcttttcttttagtctctgcttgacataggtagtgtaacgaagttgataaaagtacatgctctggagccagactgcttggatttgaatcccagctctgaaatttgctgcatgacattgggcaagtctttgtgcctcattttcctcatctgaattgttttgagactttaaatggattgaatatatgtcaataactagaacaatgtctgggacagaataagtcaccatttaagctttgctgctgctttatttgcagtaattatagtagtattctttaaggtattcttatctgtgctcacggctttaaatatttatattctaataagtcctagatttatatttctgccagtaatggctcttgaatgcctcttttgaatacccattgcctgtttgacgtcactatttggatatctcataggcatctcatatttaacatgtacaaaatagaattatagacttgttcttctccttactttccatcacagcaccctatatttctagaattttccacagcctgtaactatcttgtttgttttcttctttgttttcctcatcagaatgtatgctactgagggcagggactatgctttttcacctgttttatctccagtgctgaacctgttaattcacaaagtaggataaatgaatgagtatgtattccattttattatttatactaatttatgttctaatatcttatgcaggttattttaatattgttttcccctgccttcttcagtctaccattcatacttttattttattttattttattttattttattttttttttgagacggagtctcgctctgtcgcccaggctggagtgcagtggcgcaatctcggctcactgcaagctccgcctcccgggttcacgccattctcctgcctcagcctcccaagtagctgggactacaggcgcctgccactacgcccggctaattttttgtatttttagtagagacggggtttcaccgttttagccgggatggtctcgatctcctgacctcgtgatccgcccgcctcggcctcccaaagtgctgggattacaggcgtgagccaccgtgcccggcctcatacttttattaaaacgtttatttaacgtgaacattcagattttaacttctttccttagatgttttcagtgactttccattgaattgaaggaccaaaatgttgtccttgtttcttgcatttatgttcaggtttatttcctttctttccaagctttgtaggaactgtacattccagcccctcagactacttagttttttctttaataagtcatgctaaaggccaggtgtggtggctcacgcctgtaatcccagcactttgggaggccaaggcaggcagatcacacgaggtcaggagatcaagaccgtcctggctaacatggtgaaaccctgtctctactaaaaatacaaaaaattagtcgggcgtggtggcgggtgcctgtagtcccagctactcaggaggctgaggcaggggaatggcatgaaccggggaggcggagcttgcagtgagccgagattgcaccactgcactccagattgggcgacagagcgagactccgtctcagaaaaaaaaaaaaaaaaaaaaaagtcatgctaaagacagacctagagtcacatccttattcaaagcagtaagcatgaccttgcttttgttcatgaagttctttctctttgaaattgttctctttcatcatcacatattgaataaaaaatgtgacttaatcgacttactctgtttttttaaaaattctccatatagtttaacttgaatctgtatactccagatgtattctgttcttcattcatttaacaaatatttattgattgccgaccacatgccaggtctagccctgctacatgctggggtatattgcagtaacctatataagatattatataggtgagcaaggtagaacccagtcccgactctcatgaccattctcagtcatatatagatgtagatgaacccagagattaatctcatcctatgtttagcctgatgttttaacacatttgttccttcctggcacattgatagtggccaagaccaatttttcttgtatttttgaacccttcctttcctacctttagacctgtttcatcacttcctctgtatctgtaatgtagcagtccctccacagggcttgttttccaaagaaaagtaagccctccacagggcttgttttccaaagaaaagtatcatttggaggagcaaagttataagcctacctaagcatgtcgtaaagctgttcaaaaataactcagagctagtcttgtggatggaaatgtagtgcctgagtcacattctgcttaaagttgtaacaaatacagatgagttaaaagaaaaaaaacaaaaataaagaaagaatgggtcttcattctgtcaggtggtctcattgttcctagacaagatcaagctaattcttcccgttaaacttttcatgttgaacccactttgttccctagaacatttgaattttacctttcttatgttcattagaccttgctattcaaagtatgatccatgtccagtaagatgagcaatgttggctacacttgagtttgttagaaatgcagacatacgtatcacagaatctcaggcccctctcctgacctacacaatcaggtgatttatagcattttactgtttgagaagaagcttgctctcttcctttctctgagctttttaatgacagcttgtatcattcaccttggtatgtgatccatactgttagtgatttactgttaatatattttccccttctcattgagatgataacccttttgaaggctgaagtataaaacatttgtctcctccataattcagtgcttgaaacccattgctattgaaatttcttaccttttaaattttgttttcccctttaagttatcttattagataccttattcccctggttttgtaagtaaggtagagtatgttattaataaatagaaaagtatgagttacatatacagtcagctctctatatctttggattctgaatccagcaatctcacatccatggattcaaccaaccatggatcgaaaatactaggaaaaaaacaactaaaaatacaaataaaaaccaatacagtataataattatttacatagcatttacattgtattaaatgttatatgcaatctagggatgatatataggaagatgtgcctaggttatatgcaataactaatgctacaccattttatataaaggacttgagcatctgcgaattttggtatccagtttggtccttgtttctgtctgaaactctttttacttgttgcttatttcttcacactagaatatcagcttcctgaaagtggcacccatgtcaggtttgttcactacagtatttctaagggtctagaacagtacctcgtgtatagaaggcactcagatgttgtgaatgaatgaatatactcctgttgtgtggaaattttcttgaaaatcaatcatgaagaaactgggttagtaaatgcttgagtgttggtgagaaaagagcacacagttgaggataagctagttagctttctgggcttgttcatatttctccatctttttatttgttgatttcttatctgtttgaaaaatcactaatattaattggacacctattataagaccctgtacagggatgtttggttaaattttgtgttgtttggttaaattttttgttaaattttagatgttgtgatcctcacaacagctttggggataaatgttatcactaccttacctacctgatggttattcaaatctaatggaaaaattttggtggaagtactttgttttttattttgttttgttttgtttttgtttttttttttgtttttgagacagagttttgctcttgttgcccaggctggagtgcaatggcatgatcttggcccactgcaacctctgcctcccaggttcaagtggatcttggctcactgcaacctccgcctcccaggttcaagcgattctcgtgtctcagcctcccaagtagctgggattacaggcatgcgccaccacgcctggctaattttttgtatttatagtagagacggggtttcaccatgttggtcaggatggtctcgaactcctggtctcaggtgacccacccaccttggcctcccaaaatgttgggattacaggtgtgagccaccgcagcaggctggtgggaatgctttgtgagttgaatcaaatacttcgaatttgtaatgccaggctatcacatgtgtcactgtagattttttgtgatactcttatgaatttaaagagactggacaacagcttgtttaaattccattgaaatggaagctcttctctgagatcctggtctgaagtataatacagtttggccttttaatgttttaacaacaaaaaaaattatatgacccttggcctcttcttccagttttctgacttgagtggtgcatacgtaagttgtttgacatgtgagataattttttcagtcagataatttgaaatcctttcaagcaccaaaacttgcacattttagctattttaattatatgtgtttctgaagtgtaatacataattttctgctgctttagtcagagaacatggaacacaatctaaccatgttttgatggcatagtattatcattaagaacatgttattgggccgtgctcccgcctgtaatcccagcactttggcaggctgaggtgggcggatcacctgaggtcaggagttcgagaccaacctggccaacatggcgaaaccccatctctactaaaaatacaaaagaaattagccgggcatgatggcggatgcctgtaatcccagttactcaggaggctgaggcaggagaactgcttgaacctgggaggcagaggttgcagtgagccgagatcacaccactgcactccaacctggacgacaggcagagactctgtctcaaaaaaaacaaaaaaacaaaaaaacatgttattgaaccagacaggacagtagatctgtcaagaaatcccttcgggtagtctgttatttctataataaatgtcccctgttgttgaactttaggtgccttgagtggtttatgtttctagttggtgccttttttggttgttaaatttatctgtttcttatccccttgcttttcaggtttttttttgctgtgagtgaaaaaccagttatgcaggattatctctaacctgagtatttgtgagtgaggattaaattcgttatgcagtctgacattttgattgcttagttatattttttgcttaggcaagtaagatgttattgcttacaaatagtaactttttataatagaaaaatcatttagcgtacattattatatcttggtagctccaggaactgggcggactagtattatctggattatacatgtgattctcccactccaagaagctgggtggcttttcaaagacataaagtgaatatatcctggagcttgaattcagatcacatctagccatccttgactcattttcttttacattttatagcagcttcatatacttgaagaccccagtagttattctgtgttatgtgacaggtactgttttaagtattgtgtatttattatggcattgaagcaatacaacaactctttgatataggaaccatcattatccctattttatcaatggggagacgtgggtacaaatagtttatgtgatttgattaatgtacagatggaggaaatagaagttaaggtgtgtacagaatagttaatctagtgcttcttgtttgagcattgggaaatatgtttttcagaactcaggtgtcttacagacttctaactttaaaatgtatgagaaaacatacattagaatctttacgtttgataatcagtcatattgtagaagatttgtagctataagaagtcaatttagtaaatattctgaagtttggaaaaatgcaaccttaaactgctgagttcacatattaagatactggggatcaatagtaaagaaaatcagcatattaaggagcattgggaagagtactggtacgtgtccctaagtaagttagtttacctgcattgggtggtaattctaagtccatctgacttttccttttttttttttcctttgagacagagtcttgctctgtcgaccgggctggggtgcagtggcccgatcttggctcactgtgatctccacctcctaggttcaagcgattctcgtgcccctcagcctcccgagtagctgtgtgccaccatgccctgctaatttttgtatttttagtagagacggggtgttgccatgttggccagactggtcttgaactcccggcctcaagcaatccacccgccccagcctcccaaagtgctgagattatagggatgagacaccacactgggccagacttttccgtttttatgttcctcccaagatttggataaacctgcaaacatcctgggccattggtcctttctgttaaggtcagacaccttattgaaattcattgccatttgctttttgacagtgcttactgtgttcgtgacatatatgctagtgatgacaatctatcatttgtttcttgtagctgtcttcttgggtattatttaaggcagcatatgcagtacttctcatggaggagatgacttaataaatcagttatgatctctaggccttagtttgatatgaagatagtgaatggccttcctactgtaataaagagaacctgaatgggtaatttcttacattgttgatatgatttttagtagtagatattgattttaatagttggtaatagttactgttggattccaaactggatggtttcccaagtaaatggaatatgatcaaaatattttaactttagttgttacagcaaatctggcctggatttatatggttaatgcctcacatatctatttaacattaaaaggtgtgggtgtacaataagcattttttatcttttgccttcttgtcaccttttgcttcaactggtttctgtatatgataaatttggatcttttgttcaatatcttggacttcattggtttggctgagcaactccaggtattttaagtcttggcagcaatgctctggacttgcagctcagtcctagcccataccttggagaaaaaagcctctacaaagcatgaagtttgaaaagaatctttgcaagttcttatttttgtgtttagattttcttttacttcatcaagtctaccataggtcgtttcttagataaaagctcctaattttagcacttacagaaaacttagttgcatttgctttcttttcaaaattagtttataatgtttttcgtaaaatatttaatttacggtacttggatgttattttatttggcaaggttttagataatatcttaaagagaatatggcttcgttttttgtaaactactactggtaggtagatcattctttaaaatggctatatgcagtaaagattaggtttaatagcaaagtgtagtgtaatttacttagctgtttgatgacaaactgtacttgtttcatcaaaactgaaagggctgaagtggatgcttaaatatgctggagtaatatgccatattcttgttaatgttggtaccatgctcaagcatataagagaaaaattggattcaggaaaaacagtgataactcagtattaacttagtcaaaatatatatatttttaatcctttgagtctttgaccctttaaacatcagctgcattttggcataaaattttaagattttctttgcctccaaaatagtacctaaagtggtacttaagtgccacagatgtttattgtatcttgaggcttactgtttgttttttttttttttaatactttctatgtttccacctctccctgtcgccatctgattttatttcctgtccattagtgataaccactgtctacccaagtcatgaaggcttctggtatcgtctttgactatttcttgaggtttttcctaagatcacttacttagttctttgaatttataactacattgtctgtactgttcagttcttgcactctttctcaactatcaccaaagcctgtataactggtcttacagactttattttgtacttggacagtgctgctgactaagttatcttctcaatggacagctgtagtcctaaaactcaaccctttggaaaatcactattacacacaaaataaaatcaaactttatttcccaacttatttatatatgtgtgtgtgtgtgtgtgtgtgtgtgtgtgtgtgtgtgtttatatatatatatatatatatatatatatgtatgtatttttgagacagggtatcgctctgtcgcccaggctggagtgcagtggtgcgatctcggctcgctgcagcctccacctctggggctcaagtgatcctcccaccttagcctccctagtagctgggaccataatgggtgcatgttaccacacctagctaatttttgtttttgttttgtatttttagtagagatggggtttcgccatgttgaccaggctagtcttgaactcctggcctcaagtgatccgcctgcctcagcctcccaaagtactgggattataggcatgagccactgtgcctggcctattattttttgagacaggatcttgctctgttgcccaggctggagtgtagtggtgcagtcatggctcaccacagcttcccactcctgggcttgagtgatcctcctcctcagccttctagtagctgggactataggtgtgtgcaaccttgcctggctaatttttttatttttcttttgtagagatggggcctctatattgaccaggctggttttgaactcctggccttaaggtgatccccctgccttggcctcccaaagcgctagtattacaggtgtgagccaccaccacctggccttgcctgccagcttttgttttcatcctccaaacgagggcttgtagatggtgttttcaagtgtggtttactggtagcctttaaaacaaaataaaaagtatttccttttggagagaagaaaactcccattttacattttacacagaaatgcatcagctttggtttcattctaaaggacctcttgactagaaagatgatgaataaccaccttgtggacttactgtggtgcgctttttatacaggaaaatgggaacccttttaatttattaaacctgtttaaacacagccattacactggataatacatgcatatggcacacaaatcaaagacaaagtgaaagtatatagtgaagagaaactctcactgtcatccctgtcttccaagcaccctcttcccagaggcaatcatagttgctttatacatgtttccttctgcacttaccttagcaaggaggcagaaacaaattataatgagagtgcccccaaatcacctaaagtcctgccttctatttaagcagtggccagtgctcctgaatctaataaacttgaatgtaataaacttagaatgtgttagaaggtagatcttaacaattctgaaaagttttttgttttatgagaaaggaaatgaattttgttccagctaagctttttaatcactcatattattttagaaaaattaccaaccaggtacatgtgggaaaatttgcaggttggttatatatattgaattggtaaagcagaaacttataaattaaacatcttatcagttaattcttaattatgattatatatttgtacatttgattgcatcattatacttacatgtgactaatttttataagattagtaccattcttttgaatttcttgaggctaaatcctctatcttctctttttcccaacaattattagttgatttaactttaaaaatgtggaccatcagtgagcattagatccaagagaatagcaatgaaatatgccctttcaaactgaaatattatagaggttgatattgattaagtgtattggagcattgtaactaatcccatgtgtgtcaggagcagaaaatcttttttttttttttcctattgaagttacttaaatttctttcacatcaaacttaacagcagtgatttaaatcccgtttattatttgactcagccagttatgaaatggaaccctatcccacttgagccataaaatgtgttaaatttaagactaatgcagctttctgctttttgaatttacattttggcaataactaccatctttgttcagtgttagaaaaaattatctaggcttaaccaaataagaaaactgccaagttcacagaccagtcagtgaaagaagccagaattaaatgaaagtctacagaattaaatgaaagtctagatactgactttgcagaatatgctaaagggagatcttacagcattacagtttctttgagaataaaaatcttctacagtaatagctgttctttgacggtgattgatgtgagaaattcaggctgtgggccttacctcccagaagctacaaaactgtaataaagccgagtaggaattgtgcatcctgcctgacctcttcttcaactaggcagtgactggtatagtttgagctttgtcttttttatttcagacttttaagaaacttgtggactgtactttgtctttaatgatgttttaagggaaaattacacataaacacacatatgtatacagaatattttgagtaaatttaattgaactctttttaatgcagattcaaaacatcgtgttgtaaaactttgtggtattggttgttatgagagatagtatgtccagctgattgatgcgtcttaaagaaaatggaagtttggcatcagttgggttaataagttataattcacctcttattaggctgaaaaaaaaatctctgaggaatgaactgaaaacattctggggagacaagtgtctgtgccataagggtaactaggcatattttagtcactaaatattccttggatggacagatggatagatgaatgaatgagaataggtgaaatatgacaattctaaaaaaaagatagaaaaaattaaaaaagaaatcagacttgatgattctaaaacataaaaaggaaaaaagagaagaggtgaaatgtttgttgtgatagttgttataatagtagctaacatttactgaggacttactagtaattgtgtgctaggtagtttgagtgggattattttttaatctttgcaacagtgcttgagattggtactgtctttataggaggaaggtatgggtagggtagataaggtaacctgcctaaggccgcagggctggcactcaaactttgttttggattctggttcccagcccctcaaccactctgctgtaggatttttctgtttgtgtagactacagggttggggagttagtcacattggtgtgtacattcataagaattcatgtttaagcttttactaaaatttttttcttttactcaaacattacatttttgcaaagaaataaagatttctagaataactgtgtactagacaacaagtagaagacagcagtgagaggtttgaatgttggggtttcatctgggcttactcactgaataaataaatcactgtcttacagaagttgtgattcaaagtgggccctgctgctgaaaaaagtttgtttttaccattcttaaaaatacgatgttcagaatagaattagagctaagggagtcgtgatctgacctcagtggaggagtatgcctgtcatctcctgtagaagcagcaaggagtggcagagaaaactattcatttcttgctcttctcaactactgccacagtcttatgccactgggcttacagttacataagtgcttggtagctacacagtttggagctcatgtctattgtggtcacgtattttgagagacttcgtgacataaattaagaagtgtttgcttctgtagtctaaatgctcagttttgggagttgggaaataactgtttacgtgcttaatgttactgattctgtaaaccagtgctattcaaagtatgaggtatggtttgggaacactggtctgcacagtataaacacagggttaagatagagtgtttagaaacttttattatagtagtttgacactgctgtgatatccaagtgatatccctgggctttgtgtgtgtgtgtgttttattttcatctttctagtgagtaatttttattgtattttactaaagtgttggtctgtgatagattgggggaaaatgggttctttaccactgataacctgagaagcattgctgtaaactattttcatgtctattttggctaatggcatcttcctgtaaccagagttgccgagaccagctcagtcggggagaccctaacccagcggcgctagaggaattaaagacacacacagagaaacatggagtgtggagtgggaaatcaggggtctcacagccttcagagctgagagtctccaacagagatttacccacatatttattgattgatttatttatttttctgagacggagtctcgctctgttgcccaggctggagtgcagtggcaccatctcggctcactgcaagctccgcctcccaggttcacaccattctcctgcctcagcctcccgagtagctgggactgcaggcgcccatcaccacgcccggctaattttttgtatgtttagtagagatggggtttcaccgttttagccaggatggtctcgatctcctgacctcgtgatctgcccgccgcggcctccaaaagtgctgggattacaggcgtgagccatggcgcccggccgccacatatttattgacagcaagccagtgataagcattgtttctgtaggttatagattaactgaaagtattccttacgggaaataaagggatgggcctaaataaagggatgggtctggctagttatctgcagcagaagctagttaagacttgagcatgtccttaagaagcaggaacatgtccttaaggcacggatcgctcatgctgttgtttgtggtttgagaacacctttaagcggttttctgccctgggtggtccaggtgttccttgctcttattccagtaaactgactgccttccagtgtgggtgtcaaggccatcaggagcatgtcacagtgctgcagaggttttgtttattgccagttttggggccactttatggccggattttggggcctgttcccaacaagagtaataatttaataatttaattgaactgtatttaaaatagtattgtgatcactaaataccattacattagatttacttaacttttaagttagttttagtggtaaaacattttaataattcagtgttttttaatactgtgaaatgtttaaaaagatgaacaggttgtaacctcggcattccgtagctcagctttataaagcaggcttaaaaatgataggtggtatggttctaacagtttaaaattacttccgtccctaattattttagcagggcttttcagcagatccttattgtgtctgttacaaagatgatgggaaacctgcttttcctggtgaaggtttattgtagtaagtttgaacaaattgttcaattgttgaagcataagttaggcttctcttaaacggcctttctgcttgttgaaaaccaggccagacgttagttacctctttatgttgatggtgtgtgtatatgtgcatattttctggcaatttgtatatatgtgtgcagtgatattcacagagttgaagaggagtcaggttaacaagagatgagaatttaaaatcagcagatgctttggcttgtagtgtgtgggcttctttttctcatcctttcaagtcttaactgcttcattcagcccatattttacaaatgtaaaggaacctgctaaaatcaagatatattatgtgtccatcattgtcaactcagtagtactgtcagaaaaaatgaaacgttagtttgttctattttgtgaaactccacatagcaaatcagttactgctgtattttaaaaatctttttccttagttttttttgatgctttttgaattaaaaacaaacacatgctccattctagtataactaaaatgcagatgtataaaggaagaagtatgtccgtccataccattctttttttttttttttttttgagatggagcctcgctgtgtcgcccaggctggagtgcaatagtgcgatctcggctcattgcaacctccgcttcctgggttcaagcgattctcctgcctcagcctccagagtagctgggactactgttgcacaccaccaggcctggctacttttttgtatgttagtagagatggggttttaccatgttgcccaggctggtctcgaactcctgagctcaggcaatccgcccagttgggcctcccaaagtgctaggattacaggtatgagccacccgcacctggcctcattgttcttcattcaaacacgtaactgcatgtaggtaataagtttttattactattaattttttttaaaatttttttattttttattttttttgagacagagtctcactctgttgcccaggctggagtgcagtggtgggatctcagctcactgcatcctccgcctcccaggttcaagtgattctcctgcattcagcctcccgagtagctggggttacaggtgccagccaccatatctggccaatattttgtgtttttagtagagatgggtttcaccatgttggccagagtggtctcgaactcctgacctcaggtaatcggtctgcctcagcctcccagagtgctgggattacaggcacaagccactgcgcccagccctattaatttttaaaactttatttttgggttatgggcttttttgggaatttgaagaatgacaaagtcttttttttttcttccccagggaaatgccttcaagtacgtagatagaaaatattgctgatgattttaagaggttcgtagatcttttcaaatgcctacctgtccttcaggtttgaatgtttgtttttagggcttgcacactttgagaagtatgctttttgatatagaatattgggtagtgtgaatttttaaaaaaatcatgtctttttgggcagggagatggtaaatattttaacattttccaatttctttgaatttgttttacgtaaacaggcttttctaggaacaaattatctgttgtctaaataatctcattaaattccaaaatactgtaaacagcaaaattctaagcagtatactttgtcttcaacaataatacaatttaatttatttttggtgacctaggtttattaaaaacatgagtcaatagatatttattttatattatacataataggtagggttatagttgtggttcttagctctttgggtattatagcatctcaggggacctttgaactctgaaattgagagtaaaattgggagtcagcgcatgtatgaattgtttcttcatcagacttttaaagtgtgtacagttttgttcagttaaggtatttatacaaaataaattccaccttttttttttgtgagacggagtcttgctctgtcgcccaggctggagtgcaaaggcgcgatctcggctccctgcaaactctgcctccccggttgaaacggttcccctgcctcagcctcccaagtagctggaactataggcgcgtgccaccacgcccagctaatttttttgtatttttagtagaggtggggtttcaccgtgttagtcaggatggtctcaatctcctgaccccgtgatccgctggcctcagcctcctgaagtgctgggattacaggtgtgagccaccgcgcctggcaattccactcattttaaatgcacagttggatgaactttagtaactataaacaattgtttaactgctaccacaatcaagatgtattaatagaatagtttccccacttggagagtttcctggtatccttctgcagtcagtatttgccttctcaccttggccctaggcaaccacttatctatcagcttcctgttactattgttttgccttttctagaatttcatataaatgaaatcatatgtgtcatacataacattttgtttaacttctttcactttgcatgtttttgagatttctccttgttttgtctattggtattttacctttttattgttgagtataattccatagaatagatatacaggttgaacatccctaattgcaaaatccagaatttgaaaagttccaaaatgtgaagctttttcagcgctgatatgatgccacattggaaaattccacacctgacttcatgtgatggattgttgtcaaaacacagttgcacaccacacagtttattcggggtctccaagggaaaaaagaccctcccagcctcctttagctgtgttacgttttttttttttttctgcatgcccaaatcgcctcctgcaagcatacctgcagagcgtaataaagtgggggcttgatacatcaacagcagattccccacgatgatccacatggggccaagacgacctatttgcattactcattatgtggtggtggtggtggtgttttggcttattctctgctctgtggcgtaaagatagggttgaaaatgcaactattccaaactctaaaacacttgtcgtcccaagcattttggataagggatactcaacctgtgctgcagtttattcatctgcatttggtggtttgggttgattccggtttttagctgttatgaataatgctaccatgaacatttgtagacatgtctttgtgtggatgtttttatttctcttgggtagattcctgggactaggtatagtcatttggtgcgtttatgtttagcttataagatactgtagttactgttttctgctttcgcactagcaattttcatagagttgaagctttttagaaaggtctcagtttctactttcgtggctcagccaagttcaaaactccatatcctgacccaagaacagagattggattattacttagctcctaggttttgcagattatgtctatgtctgatgtattttggggcatggctgcattaacttgcaggtcctgaaagtccaatgtgtttcttgaatagttttctttttacctctgaactttattggagttgcaacctatattggaggaattctggtgttagcttcatagacatgcctactaggtaaagattgaccctgaccctggcattaggaatacgcatattgctaattaaaagctatggtaacttttcctgaaaggattttactagtatattgtgttttataattcattaacaaaaaataaatgaaattggtagttttgaattacttaatgttattttaagatataactgttcctgcttggcatggtggctcacgcctgtaatcctagcacttttggaggccccgggtgggtagatcacttgaggccaggagtgtgagaccagcctggccaacatggtgaaaccctgtctccactagaaatacagaacaaacttagccgggtgtggtggcgtgcacctgtaattccagctactagggaggctgaggcaggagaatcacttgaacctgggaggcagaggttgcagtgagttgggatcatgccactgcactccagcctgtgtgacagagcgagatcctgtctcaaaaacaaacaactttctgccagtaggtggggttattatttatctaccagttcttttagtaaaaacgtgaacgtgtatcactcccaccctagtgcttatccatctagaggcctttttcttcccctaaaatacaacttgtgtgatttatgaaatgtaaatattagcatttttattaaaagattaaaaatccatagtcgtcaagtattctcttctcccaagttttcatagggctgatggcttgttcttcagttctctggtcaggtatcctctcagaagcccttcctggatccccctaaggtaaggctgcttccctgcccctccttgttacatttccccttttcttagcaatttccgcaatctgtaatcacattaattttcctaattgtcattctagaatagtggctcctaaagtgtgaggatcttggacacccttttagagagtctccaaggtcaaaacttattttcataataatacataatttgccatttttactctcattctttcacgactgtttaatggaggtttccagatgctacatgattagtgtgatatcataaaggattgactgcaagaacagatacgattatccatctgttttctattaaaccagatattaaaaagatttacaaaaatgtaaaactatgtttctcctctcctggattaaattttttttgaaaatgtagattttttacaaaaatgtgaaacattgtcattctaatattctgataaaattaccttgttttataaaatatttttcattaaaacatagtttatattagcatgtaatgcatttatttttaatttttttcaaagcttgcaatagaggttatttttaagagaaataaatatttcagacatttcttggtttgaatttctgatatgcagatatcaatgtataagatttttgggggtccatgaaaattttagggatttttaaaattttttaagagtttgttttttttttaaattttaaagggccttgaaatacatgaaatatctttagtctttgttcttggtttctgtcacactgttccccaaacctttaggatttcctgagtgataggactgtcttttattcataatgctttttctttgatcacacctgagttaatgctaatgaggtgatttaggtcaggcccctcaggatggagcaggtcacccaaaagagcaagtgattagaaggttggaaccttcagccccactgacctctgggaaagagggtaggtgggctggagatgaagctccgttaagctctgtaaaaactcttgtgcaagatttgatgagcttttgggtttccaaacacttggaggagctgggaggatgcaggcccagagaagctctgccccctaacctccaatactttctcctgtgcatctcttcatctggcttttcatttgtgtcctttgtcatgtcctttataataaagtgataaatgtaagtaaagtgtttctctggattctgtgagtcattctagcaaattactgaatctgaggagggttttgtgggaactcctgatttataactggttggtcagaagtactggaggcctggatttgggattggcatctgaagtgagggcagtcttgtaggactgtgtccttaactttgggaatctgacactaactccaggaagatagtgtcaaaaattgaattaaattgtaagatacccagctggtgttgggcgaattgaagaattacgtggtatagaaagaacccacacatctggtgtcagcagtgttgtgtgagaataaagagaaacagtgtgtttgagacttgctgttctaaaaatatgagccccatgaaagtaagacctatgtgtttgatttagtttcatattcccagggcctggcagaggtgactgatctgaaaagtcactcagtaaatatctaagtgaatgaatgaatgaatgaatgaatgagggaatgaaagaagtcaaaataacagaagcctagtgattctatgcagaaagatttcaaatctttctgtagttactggtctatgcagacattatgtttgataggaaattattctagttcatcagaaagctttaatatttattttggtcaaatttgaactgttccctgtcatggaactgagtctttgatatgattttgatagggaggtcttagagattctgttaaatctttccctttaggaaggatgagagattttacctgccatccttaactcttctaaattttagatttattgacttataatgttatttatttggctattttagattggtatttatattttaccctataatacagagaatacttgtcatagaagttaaatccgttcttgcttttagatttttgggcaaagataggttttaattttttttttttaaagccagacactttaaaaagtagcattgtgttcattagagatggcgtatagtctgctttgctttttcaaatagtttgcactgaataatgaacaatagtagaaaactgttccctgcagggtaatttcagcagacaggacatctgtttactatcttgcaggttgggattccttgaagatctgcccaacttgagactgtgtaaacttcagaaatctgggaaacagtttgagagacaactgacctaatcagagaacaatacttactgtttagggcacatagagtagtttaagcatttacacccagaacatgacaaagtttcagaaggtgtagaagaatttgctaagttgggtttctactggcaagtttgcttctgtcccttgaggcataattcatggaagaatcctcatttacccactaatttatagggtaaacaaatctagtcagcatcggttcttaacagtcttagataacggggtcagatgctaaggtgtaagtcttactgtgctgcagaaaacatgaatgtttcaagatgggttgctggtattaccttccctcttgtttatatgctgtagagattgttccaactagggcttgaattcctcttattagggtgatatttatgcttttataaacaacatgttcacttttgggtctgtatttctcagtgccttcacttttcagcaacccacgaagtcttaaaacagaggaaaggaaattggggtttgaccagcagtgtattgtagtcacctgaggagttacaacaaaacaaaaacaaaggaaagctaggccatacaacttcattagaaattagaactaaataggatgttagagtaagttggagaactaaaaacagacaccacctaccaaacccagtataggaacccagccggtatcagttagctgaatttcaggagtgtgctcacgcattagtatactttaaagctccccagatggctctaatgtgtatccagaatgaggacccctcttcatttatctaaaaaaagctctttaggtgattttgctcagctgggaatgagtaaatagggctcctgagtgtatatgtatcacaaatgtggggtcatttgtgatacatataagcaaaatataacaggagagtgtttttgttttgaagaatggttaagctttccatgtgtctttttcagccttgctgttatcaacatatttggtgcactcagtttggtatcactcatttattgtgaagtaattagaagtgctttggactcagaagtcagatctcacttccctggctaaattccctgtcagcttatctttgtttccttatgtaaaatgggaaaataatataactgacttcacagggtggttgtaaggattaaatgagtccttgcacgtaagacggtggagtgcttgacatatcataagtgataagtgtttgccattcattccttcagcaaaatatattttgagtatcttttatgtgccagtatctgtgttaggtgttgaagatgtggtgagtaaatcatcctttcatttttatgggaacattcacgaggggaaacaatgagcacaacatggattctgtctctattaaaagatacttcgaatctatgaaactttgaaatatatatacatggcaaattcttggttatctatgtagaatagcagaagtatgtatgtcatttagttatatttaatcaggaatttcctttccttttaacatttaaatcagtgtctgcaacctttctggcaccagggactggtttcgtgaaagacagtttttccacgtggggggttgcggggatgtgagaggatggtttctggatgacactgttccacttcagattgtcaggcattagattcttcaaaggagcatgcaacctagctcccttgtatgtgcagttcacagtaaaggtttgtgctcctatgagaatcagtgccactggtcacctgacaggagacagagcttaggcagtttacctcctgctgtgcagccaggttgctatcaggccacagagcagttcccgagcagtacctgtccgtggccttggggttgggaacccctgctccaaatgaatcctactgtaaggcatttccatgacattacttcttgaactaaagaactgaggttttagtgtgtatgtaggaaataggacgatcataaaatgtcacaatgaagaatgagctagcttagttttgataatagtgattttttcctgagtactttatcagattatattaaaatgacaagatcataaatattaaagttggaaattattttagtgattgagtctttcctgaatgctttcttttttggacagccttcagtactagagagaatttatccttagagttgaaatcttctttccagaaactgtcacctgtggttcttaggttttgccttcaaagtaagactaatcctctaagcagccaaagaactcttcagtatttggaaagtgctttttttgagtgtcccttgcctagagagagatttgcattaattttactggttctcatcacaggattttaagctttctctcttgtaattacccttttctgtggattcttactcatactgattgttttttgtgcttttctcatttcttagtttggtactgttactggtaaattttctcttgggtcattgtaaagaactgaggataacagttcagtgatgtcgaaagagcgagataattatttcttttacttggagcgctgtattctattgatactacataaaattgcattggctgtttggcaagcatgtcaagcctggtgtgctgtttggttacattatccttactgatccctttagaattcacttttgttagagttaagacagttttcaatatagtttgaactgtaataacttgttttaaaatatattaatttttttattgctattttcttcataactggaaatgaggttattttcatctggcttctttatgaaactgtgctggtcctagtcaccagtattcccttttgcatatgtaggaatcagctgtttaggaatcacttctagaatttgtctgaagaactatgttaagctcatatatcttctaatatctcttgtttactttgatttcagtagtggtttagcaatctcattagtaggggtaagtataaaggaatctaggtaacctaggtgaattggtagttgtgtttgtaataactctttatcagtttagtttatcccgtcttgatcacctgtatttgttctattttttaagtgtagaaataatttttcttggcagagaggtatgttgaataagcattaaatagttattgacaaatatcaacaatattggtcatttattgagcacttactatgtggcagactctgtgcagagaactctatactgtgtcatttttagtagtgtcagtaatgctatgaaatagtgctattttgcaaattagaatctaaggcttgagaagattaaatagctttctcaaggtcacagctagtaaatgctggagctggaactcatacccatacttgtatgactcatcaagtccatttttgtgcctttcaagaagtggagaggtctttcatacaggaatgtgtaggttgtgcactttcatttcgtagtattgaaggtctgccaatcttattagttggtgttactccattttgagctcttttccctgctgactgcttgctctcctttggagttctgtatcttactggtgtagtctttttgggtctattcataacacagtttttactgcatatctgttgtctattactacctggttattttaactatcaatttagttactaatatgaaaatcatctcccaggtttaaaaactaggtttaaaaacctacttttaaacctaaaactaggtttaaactaggtttaaatcttggctctactacttcctagatgtgtgacctttagccatttacttaatttctctctgcctcagttttcttatctataaaatgagtattaacagtacctttctcctaaggtggttgtgagaattacatgatagggtaatacatgtgaaataattagattattgcctgtcatacaatgtttagtaaatgtaatgtgctgttattaactggtcattagtttctttttttctttcataattggtttattggtcgtgttgatgatcagtacacagacatttcaatttgtacacaattcttaacatatatactgaaaatctaaaaagccatgtgttgtaatttttaaaaagttatttcagtgactttccagcttaaaattgggaagcaaattttccataagaggctatcaagtaccagtatcttcacatgttagtaagctgttacatagatctcaccaattcacagtataataccatatagactacatactcaaattttcaatcttccacagcacattaacaaagttcattagaaaagcaggactaccacgaccaaagatgttacagtgcacagaattatgacagggagagccatgatcaaagagtgtttttctttaggaaacaattctactaaaaaataatgtgggaatgaaagtaatttaaaatgttcaagacattaaatgcaggactgcaactccatattgccatttagtatgctttgtattacaggatataaaaactaaccccccaactatggaatgttaagctgacactcaggacagtcaaaccctcccataattcagtatctcacacaaacctgtgtttacaaaatagttggtaacagtattcctctgggttgtacaagatgggaaatagggaccactgataagatacagtgtgttatgatatcagtcaaacttggcttctttatctctggcgtcatcagaggctggactcttctcagttttagtttcttcgttttgtgcaggtaaatttctttagtttcctggttagccactttggcctgttttccctttgctccctttttccctttgtttgcacttttttgtctgaagatttatcctttcctgctgcctttttttagcttcgtttccactttggcgggagcaggtttagctgacaaccgcattgattctctcttaggctgtttcttcaccatccgtgtggctgagctgacctgtgggctcaggctgcacacagaagtagctgctcaccctgtgtgtgcctggcccacccattacttcgtttctaacaataatatatttgttttaaatgaaacactaataacgtacaaataaattgtcattttcttgttagaattatttttcctctgagaactttacattacaattttgaatgtgttgccttttgggtcttcaggccatgggctcatattaaatattaatgctattattattaatatgtgccaggcactataaaacactttacatatattaacgccatgttgtaggaattattaatgattatgattattgcagactttaatttcttgtccacctgtgcacggtgttacctcttatctttatgggaatattaaaggagagagtagtagaagacctggttattccattagaggttgcttagtgaatccttctggttgaggaaaactagatcatgctggagactataccaaccagattgttgttggatatgtgtgggtacgtgttcccgttgttgcatcctctgactatggagatgatctgttgagaaaggcaaaatgagaatttatcagaaggctctgctttcaggtgtcccgataattgagacctttatctctgtgtcttattgatagttttgtcatttatgtgtctattaacaggatcactttctcaataatagcctcaggttgagggggtattctttgatttggctgaaggaactcctggatgccagaccatggggaagctttgatttaagagcataactgctgtagatggacgtttttgacatgtaatcaaactcctggagtttcagatctgcgtttagattatgtgagctttattatttatgtaagggtaaaggaaaggatttgtaagacatttatttattcctcttatttaatttgtggttttgcaaacctagtacagtttcttttgttttttcttagaaataaaggaaataataaactaggatggttgttaagctcccttctgtgtgtgtatgttttaggtggtattaaagataatcaaacattatcaagaagaaggacaaggaactgaagttgttcaaggagtgcttttgggtctggttgtagaagatcggcttgaaattaccaactgctttcctttccctcagcacacagaggatgatgctgactttgatgaaggtaagggtgttcatcacaagtgtgtctttgcagtgcatacaaatggatattgacacaggtctcaccataacttttgataatgtgtgaattgggaatctgtcaggctagcctacttcacttgatgtctgatactttgggaaaattatataaattctgggaaatgagggtttatactatagacatcattagtttggcctttacttatttggaatttgtgattctgatttgtcatagattggataggaactgtgctgatgttgactttgtcaacatgaaatcagcttgctaaataaagttttgagggacaaagatcatccttatgtgtctgttatccattcccttctatcctcttttgaataagtcagtgtttagaaagagatggagttcaattttctgcttcagaaagaagatactcctcaagcatttcagaaattttatttttgtactataggtgtagttcctttgttagcaaaggctgagagtagttaaaagctcacatcaaaggctaaaatcagcatctagaagattttttaaaaatcaagttgaaaataacttctcacttgtttgaaatccctggtttcattttctgtgtaactttttattgtaaaaagcacataaaaattttaagtatacattacagtagtgttaagtgtatgcatattgtgcagtaggtttctagaactatttcatcttgcaaagctcaaactctgtatccatcgaacaatccctttttccacctctttcatccccgcaaccaccattctactttgtgtttccaagagtctgactacagatacctcatgttagtggaatcatgtggcatttattattttgtgagtgacttatgttatttagcataatgtcctaaaagttcatccatgttgtagcaatgacaggattttcttcttttttcttaaggctgaataataattcatcatctgtatataccacattttccttatccagccatctggcgatggaagtttaggttgctcccacctgttggctattgtgaataatgctgcagtgaacatgggtgtgcaaatatctcttcaaaatcctgtttccattttcttttggatatgtacccagaagtggtattacatggtaattctatttttaattttttgaggaacttctgtatgttttttttaatagcagctgcaccattttacatttccaaccttgcacaagggttccaatttcttaatatgcttgtcaacacttgttattttctgtgtgtttgataatggccattttaacagatgtgaggtgatcatctcattgtggttttgaattgcacttctgatgattactgatgttgagcatcttttcatatgcttgttggtgatttgtatatctttgaaaaaatgtctattcaagtcctttgcttattttaaaattggaggctttttttttcctgttgagttgaaggagttatggatattaacctcttatcagatatggggtttgcaatatgtattttctcccattttgtaagttgcctttttactaggttgattgtttcctttgctgggcaggagtttttacatttgatatactcccatttgtctgttcttgcttttgttgcctgtgcttttggtattgtattgaagatatcagtgccaaatccaatgtcatgaagcttttttcctctgttttttggtaggaagtttcaggtcttatgtttaggtctttaatccattttgaattaatctttgtgctgtatacaaggtaagggtccagcttcgttctttggcatgtggatatccagttttcctagcaccatctgttgaagagactgtcctttcccattgagggtcccatcttggcaccctcgttaaagatcacttgacaccatatatgccagggtttatttctgggctctttgttttattccactggtctgtatgtctgtcttaatgtcagaagtacactttttggattactccagctttgtaataggttttgaagtcagaaattttgttcatctcatttgagattgttttgcctattcagggtcctttgagattccatatgaattttagaatagatttttctatttctacaaaaaatgtcattgtgattttgataggtattgcattgaatctgtctttgagtagtattgacaacataataagatgaagtctaacctctgaacatggcttttctttccatttatatacatcatcttttagcagcgttttgtagtttcagtttacgagtgttttgcctctttggttaagtgtattcctaagtattttattctttgtgatgctattgtaaattggatttttcttaatttcctttttgtcatttttgatatgacttttaactgatcacattaactttgatagaatgttacttgcttcatttgacttacacaccttcatagtaccttgagcatataataaacacaaagtatatgcttgctaaagtgaaataccttgcagtttgtctgcaaagcaggttttcattaaagtaattcctctagaaactaaccagggctacttttgttctaggcacctgaacactagcatacttggatttttttaaacccttatgcagtgtgcatcttttttttttaacctggctatgctctccctatttcatttgaattacctcccacagaattaaggttgagatttctctgtagttctttctggcagtattagaatacctctgtttctctatacatgcacatatgtgggggtacttaattatatttaaataatcactagtttaggtctggaaaagaagagattgttaatgcagtttctttggtttacaagtgaggagcttgagaggtttaagttttttgtttggttactgggttggtggcacagttggaagtagaatctattccagaacagttaacactgtcacacagttttctcaggtaattaattttttaaatcatattcttggtttaga

SEQ ID NO: 448 - DNA, 28932 bp, Homo sapiens
  source 1..28932: mol_type = other DNA
aggcgcacaggtaccattttgaccgtaaacatcctgccgatttgaaccgaggatttgggcggcaggaagagccgcggcgtaacggcagccatcttgtttgtttgagtgaatcggaaaggaggcgccggctgtggcggcggcgggagctgctcggaagctacacctcgcaagggctcccccctttccccaccccctcccccgacccttttcccctccccgggccacccagcccgcccaactcccagcggagagcaaggtaagagactcggccgaccccttcttttcctccagctccctccccccaccctttccccgccgctctgccgtcggggagccggactcctgggggcgggagggcgagggagaaggcagccctcgccgcgcccacgcgtgctgccaccctcccggcgcccaagcggcggcgccacccgcccagcccccttcgccccgggcccgccctcggcccggacccatgcagcttgggcccgcatcatcgcttgttcggtaacaaatgattctgatccattctgagatctacaaaggctgttaccctgcaggtccatctcacgtcccccaggaggccggggaaaccctgggctgcggagggaggggaggaggtttgaacgagcccgctctggggaccgggccgcctactccgcgggtaaaaatggctgtctgggaggaggcggtggcgggcccggcgcccgcggtgccagccccgggagcagcaaccttccgccgaactcgggtgcggggctcaagaaagtgcggagctggtggggctgggcggggtggggcggggggtcggcgggtgcccctcggccagtgactgctgctgccctcccgttttaaaaagataatttttacgttgggaatgctgaatatttcacagacgcgtggaaaaagagacggagggaagttgcttctttttccaaggatatttgcataattggttttcccctgaacttttctgatcattctttaaagtgattaaggatatcgggtgttgtagagacgctctgggggaggtgtgtgtttctgataaatgcttgatgcccttttcgtcgctgaaaaaggctttttgcgaatgatccgctttgatagtgtggggtgacactgtcgggttgtgctgccagacttagcggccttcttcaaatttgtaagagggaaaccctgggggatttacttggtcactctgatttgttagtgtcttcagcgtgaaaaaaaaaacagcgtttgtgcgaagagtttctgggaaaggcttgtgtttatcggcttctttttgcaagggaaagttaatctttgttgtcattatactggttagaagagtaattggttttcaggcaaaaatttctattttcttaaattgggtgtaaatgccagcgggcagtgcgagtctatagaattttggagacaggcaggagaaggtttctcaaatcgtgaagtcattaaatacctttgttaatgtcggaggcaactaattatttttggaaaggcattgatgaggacatacgccatatctgatcttcaaataagttaacagtttgtatagttgaggtgacagcagtgcataactaatagacatagtgcttttttttatacacaagtcagaattacaaaagaatttctggtgaattattttgtgaaacatacaaattctaagaaacgcttttacagtttggtacagaatggaaattttctaattcttgagaaataaggttgtgtttttagtttaaatgtcaaaccagagttgttaggcatgattatactggctggttaatgttttgctgcaagattgtcttcagagttacttttcgcatcagcagtggcactatgttaggtgtgcccttgtatttaattttcataatcttttttgatgaatattatcccagtttatagttgagaagtaacttattcaccgttacaaaacaactgagcaaagagggagcttaatttgaacctacgactgtctgattgtaaaactcttggtcaaaggatgttagaaccaaaacagaggagatttctagtgtgcagggttagaaatatcttcagagatccttccccctactcccctgaagaggtagctccgttctgatctgagttaggtattgacgttttcaaaggttaggtaaaccaccagatttcaacctttcaggttttcatagtagggaaactgaactgcataaaggttaggcagcttaactgctagttaatgacaatagcaggattatgtctttacttctgagatagtagtttttactttgaataggtggtgtacatttatgtcccgagttaaaatatgtgtgtgtgtgtgtgtgtgtgtgtgtatgtatatatatatatcaaacagtacaaaaaggtaggcctcacttgccctgcatacctactttccagaggtaaccagtatcaccagtttcatgtgtacgccacaggtattttaagcttattcaagaactcgtaaatatatagagaaagagcattcttttttaaaactccaacttttttgcacttaacctggagattttccatgttagtacaaatgttgtattcttgtttaaagttgtactgtacaattgtcccttgatattaaaggggaattggttccagaaccaaaaccacgaatgctcaagtcgcttatatgaaatagtgtagtatttgcatataacctactaacatcccatatacttcaaatcatctccatttatgatattacaatgtaaatgctatgttaatagttaatatagttgttatagttttttattagtagtattttttattattgtgtttttttgtccccccctccaacaatttttgatcctgggttggtttagtccatggatgcaagaagccatggataaggaggaccgactatattccgttgtttgggtttattaatttttcatatcacttattgatggccaagtaggttatttcgaatgttctgttctgctctggcaaggcagcatagtgttgtagttagaagtgtggattctgaagttcaagttccacttccattaaatactagtgacatttacttatcttcatctgttttctccatctctaaaatgggccagtaatttacttctgtaggacagtcatgaagaggttggatacataaaacacgtagtgcttagtaagttttcttaggattttttcgtgtttggttttttggttttgtctttagtaatatgcatctccaagtatatcttttgtattgattactgaaagtgcaagttctggctagaaagtgtaagtgaaatttttataaaatgttgtcatattgtccttcagagaggacagtaccaatttacacaaccgcagtcctgccatgctttctaatgagtgaaatattggtaatgactgatactatcctagaagcatgagcctcagtttgattctttgaaacagtcttaaattgccattttttgtattcttgaatatgttctaaaatagcaatctttctgctgtttcacatcagactttaattttttagggtcaattgaaaaaaactgcttgccgctttagaaaaaaatgattctcaaatcatgaaatgctaagttgtgctctggtatcaaatgcagattttctgcacagggttttcataaaggatttagcagaatatagaatcttcaaaatctaaacagattaatcgacttttttaaagattggatgaagtttggtattatcaaggaaaaaaaaataggcttaaaaggcaattataattacactttctccttattcagatatacaccaggagtcgatccaccactgctcctttggcttcctttagttattagagtgatttcctcttgctaattgtttcccacattaattttagcatcactctgccttccttagccccatcctatgccaaacaggcttctgtttaggaatctctgcctctgcatagctgggatattttaggcacggtgctctgaccagcagctgaagtgctggccaggagctactgacacctgttgaaaaatgccagtagttttaatttttaaaacgtctaaaattttttacatatgccaattatgagatcacttggtggatcttacttacttattcattaagcacatatttagtaattgtcatgccacagatagtattctagaagcttaatattaaggagttttttgtttaggatacagttgcttgcttccatagtggaacttggggcttgtcctgtacaacagcgattatatttctcagaacatgctgctatgttggatttctgtaaagttctctagattttatttataacatagtaggagcagcttaagttttgtgataacattttaaggcttgaagtaggcactgatttgaaacataggaggctctcttccggtatgggaagcatgttttaatctataaaataacaaatggcaaataaagcacctttgaggtgttatttaatgctcgtaccttaagaatattttgtctgagttcttagtatagaatatagtatttcttcattctttaatttcttttttttaaaaaataaacacggggtcttgctatattgaccagggtggtctggaactcctgccctcaagcattcctcttaccttggcctcccaaagggctgggatggcaggcgtgagccaccaccgctagccaatttcttccttccttaactccaaatttgggaggaagagtttacaacattagacagttgacaaagcctggttttttttcttttgaggaaaagtttttttagtatgaattaataatcctttgggaacattagattcagagaatgagaatttcaagactctttactcttaagtgatggaaatggagataaagcaaacctgactgcagtagtcttgcaccacagccccccaccctccaaaatatttttgacatgtaagaaatctgttgcttgtgatacgcgtaactaaaatatattttctctacatcatgggaaagaattggcacatttttaattgaaagtacagtaagcaaaattctttaagatttacagactgtgaaaaaatgaaaaataattactctgtatcttttagagaaaagctaattcaagagattttagtcccacctgcagtgtaagagatccagcttctctgtgtctttcagcatttgatgttgccactattttttaatttagctcttatattaagtgtgtggtgataatgtttttggccttaatttgtatttctcaaatgcctaggataattgaacatctcatgttcttatttgtcatcagtaaacctcttctgtgaaatttctcttctttggctcacttttttttttctttttatacagagtcttgctgtgtcacccaggctagaatgcagtgtcgcgatctcagctcgctgcaacctccacagcctgggttcaagcaatcctcctgcctcagccacctgagtagctgggattacgggcacatgccaccacacgtagcagtttctgtgttttttagtagagacagggttttgccaaattgtcctgactggtcttgaactcctggcctcaagtgatctgcctgtcttggcctgccaaagtgctgggtttacaggcatgagccagcctgcctggcctcttttgcttactttctaattggagtttttttttcttcttacccctgaagttttaagaattctttacatattctatatctgagttctagtcagatgtgtggtttacaaatattttttccccagtctatagcttgtctttgcatttctttcgtagagcaaaagtttaatttgataaaggcgagtttattgagcaagaacttttccttcatgggttgtgtttttgatgtgtcaaaatttttaccaagctttaggtactgaaggttcccctctgccattttttaaaagttttgtctattttgaatttttatataatgtgtgagatttaggtggagggttttttccttgccttttttgttttgtggggggtgtgtgcgtgcgtgcgtgcatgttttctggtcttcagatcgtatttaatcactccagcaccatttgttgaaaaatgtatcatttctccattagatagcttttgcatctttgtaaaaaaaaaaaaaaattagttgaacttagttgtgcgggctatttctgggttctcagttctgttacattgactgtgtttcctctgctaataccaatcttgagtattatagctatatagtaagtcttgaaatcaaatagactaatttttctcactatttttcaaaatagttttagcttttttagtttatttgcttttctatataaatttgataatcttgcctataaatataaaaaaactcattttgataattgtattaaagattctttaaaaactaaacatatacttaacaatacttgtcagcagtcacattcgggacagttgtcctagagaaatgaaaacttaatgttcaccaaaagtctgtacatgaatatttatagcaggtttatttgtaatagccaaaaactggaagcaactaaatgtccttctataggtgaatgtccaagcatatggtggtatatgaatctcacggaatgctgtccaacagtaaaagggaatatactattgataaacgtaacaacttggatcacagaagcattgtgctagatccaaaaagccatttcaagaagtcacataccatatgattcatttatataattttctcaaaacaacaaaattaagtccagtgtggtgactcaatgcctgtagttccaactacttgagaggctgagggaggaggattgcttgagcctaggagttcaaggctgcagtgagctgtgatcacatcactgcacttcagcctgggagacagaatgagaccccatctcttaaaagaaaaaaagtgacaaaattagaaatgtagaacaggtggtgtttgtcaagacttagaaatggcagagagagagggatgaatgtgatgagttttgtagtgatggaatagctgtgtatctttttgcagtggtgattatacacatctgcatatgtgacaaaatggtataaaagtctgtagacacattgaatcaatgtcagtgccctggttttgatactatattgtagttatttaagatgtcaccattgggagaaactaggtttaaaaaagtacatgggacctgctatctatgactccctgtgactctatttcaaattaaaattttatgtattgtacatgcacttgattttatttctgtaaagcaaggcatatatcattttctagtcgtggacattttagaaaaaaatcagaacaatagatttgttttaaatctggaaattcattctctgaagtagatttcttttaaatccgtgaaagaggggaattaaatgatataaaggaaatatcctgcagttaatgtactcttctgaactggggttttcaagcggcctttcttaatacattagagtgctgaaggaaagtagaatgtcagtaacatatttgtgattccaagactttcagtcataagataaatctgctgtaccattgtccctgatttaatatttaaattataagtagataaatgctttgtaagttcttaagttaagaaaactatatatataattctttaccttttttgaacttcgatttttctaaactacccacctgtaaaatggggccagcccatctgcttagctttgcttggtggaatatgaaatgcttagtacagtacttttcgtgtagtagcaattttacagataatttatcccagaatcgcgatttttaatggcattctaaaaatggaaatttccacagatttttatctgtgcctgagtatctttcttcatagattttcttttcttgccatgaaaaatatattctctagctcttggccagtaaacagactatttctactgtcaatcaagatagaaatgaaacaaggcatgaaagcaatttgactcttgtcccttttactttcagctcttagtattttggggtctatttttttttcctctctcaaaattaaaacaatagatttgttttaaatctgttgtttttaaaatacatattaaacatttactcaagcattttatagttttcatattaaagagagaagaaaaattttaaatttcttatgtcttgataagtatttaaattgtcagatgatgtttacattaacttttttttcccctcttaggttttcttctgttttcatagccagccagaacaatgttctacgcacattttgttctcagtaaaagagggcctctggccaaaatttggctagcggcccattgggataagaagctaaccaaagcccatgtgttcgagtgtaatttagagagcagcgtggagagtatcatctcaccaaaggtatgtttgatgttgacatttttattcactttgttgattgtttattgatatgtgaaatagaacttctaaaacagtttttttaggtaggggcattggagtgcaaggaaaatccttagaaatgtttctttattatgtgaagtccttatcacctctagatagacttgatatgattacagattagattttaaaaaaaatctctaagtgcatatattttgatttgcctatttttaatggcaaataagcatcagtcagggcaatgcccaaatattgtttactgatctgttcctcagaggagcttttatttgagaccctgtctcaaaaaaaaaaaaaaccgacgtggaagtgctgtaaatgcgtattacttagtataataagccaatctaaaaaggctacatattatatgattgcagctataggacactctggaaaagccaaaactatacaaatgagacagtaaaaagatggtaggttggggagagaatggagggttgagtaggcagagcacagactattctttttagagcagtaaaactgttttgcatgatagtataatagttaaatgccatttacatttgtacaaactaataaaatgtataacaccacgtgtgaaccctgatgtaaactacggacttttggtaatgatgtgttaatataagtttatcgattttaataaatgaaacaccgatgggaggtgtcaattgtggggaagattatctgtgtgtgaggaagggggtgtttataagaaatctgtgccttttcgtaagttttgctctatttcctggatgcagccttctaacaatcattgtgttagtttttatgtatatacacaaagaaaacttgtgtacatgtacacaggaaagcctagaaggcataccaaaagattattacagatttctgtagatggtaggattacaggttgttttattttctttttaaagactagccatttagtaaacatttcttgttaaatgtttgttcacgcccttaagtgtttcttaagatttatttttaggattataattgataggccaagtgatggacatgtttttgagatttgtgatatgcactaacagtttgttctggtgagatcataccagtttgcactgctggtcaaattgtatgagaacattggtattttcaattttttttataggtatgcttactgggataagttaatggaaaacgtagaaatcgtactcctttctggaaagtatatgtgtggctaatctttaacatccgtaagcaaatattgagtggcttaaaaggataacagatttttttcatgatatgtaccgagtactttgtgccactttagggacactacaaacgagtatgagacaatctgataattgaacatatacacgaacagccacaaaggaaagcagacagttcaggaataatgtaaaagattgtaatgtgtttatgagagaaagtgatttctcttcaaattttttaaaccatttctaactgagcttttatctatttggtaacaggatgtaaagatatttccacagagtgaacgggcctgaaatttctaatgtttgctttggtgtgcagttcttgttgtgaaaatgtcagtttagttgtttagcataagtgtcacacgtggctcatttgcaactgcaagcttgcatactttttctcttctctcttccactcccccactggaagaaccactggccctatttgcagagctttcccagaatatgtagcctggaatctttattatatttatgtttacactttaacacacactagctcaaaaacatatgccatacctcattttacctactcctaggctaaactctgaaccagactaatccagaaagaaagcttttgcccaaacaccactttttgaaagttgctagttctagataagataatagcagaggttttttttccctcctttgttcttaggtgaaggttcaatcaatattaattttaaattttataacaccacataaaaatagattctgtttttccattaggagcaacattttactttgaatttttttaaaattagggattcattgtctgataaattctgaatttgatcacaaatttggtataattttggatgtctaaaaatgtatggccatatacatcatcatttatgctgtaagtcacataaaatgctcataaatacagaacctgagagtcataagtagggtcctagagtgctgtagaaaatacacataaaatttaaaatacaacattttcttttacaaataacaatatactaatcataatttaaacattaagcaaatgtttaaaagctttttttgttaccttagaacttgttgtgctttatggcgtggtttgggaaagtatctggggatgtttgagttcatattgccttgttctttcagtaaattttccttatggctagaggaattttgaatacttgtgtttagatggagtcttatctcattgttttatcaactactgcttttccacatactgtatcccatgttaatgttgatcaagatctgcctcgaaaaaaggttgggagtatattttctggtgaaaaaaagctatggatactattgttctttatcaattagtatgctttccaaacttttttttttaaatcggtatgctttccaattaatggaaacttagttaaaaagtagcttaaacaataagggaaataacaggcttaattaactaaaattttggaaacagggagatctgagattggtccagcagcttgattatgtcatccaagaactctccatccttagtgtgttagcttcctgtcctcatactttagcattgtggtttacagggtgactgcatgaagcaccaagcaagccctacctattcacaaagcaggaaagagggaaggaagagaggcgttgttcttttgggggggaaatctttctcagaaactctctggcatacttcacctattactcaattggctgaactgtgtttcatgcccactgaagaacaggtattagcagagaggaatgagacatctgtcaatgtgggggacatttgcttctcaaacaaaatcagaattgacttagcaagaaacaatggccctggattggcaaccaaaagtgttacgtgctccttaatgtgctaatgacacaattcatggaatggtttagtgcttgcttcctagcttccttcatgtttgtgttaattcgtgaatttccagtcactctgtcttttcaggatattcgatattcagggaatttataggtaaggacagagaaatgtatgtgattataaggcaactttaaaggaaaaagataaaaagaagactatgaatggcacgaaatgcaggttttggaatatgattaatgttttattcataggtgaaaatggcattacggacatcaggacatctcttactgggagtagttcgaatctatcacaggaaagccaaataccttcttgcagactgtaatgaagcattcattaagataaagatggcttttcggccaggtattgttaaacttgtttggtttttgttgttgttgtttactttggagtttctcatgttttttgtgttactgtagctaaacacattttctaaatctacatgctttgttttaattgaaatacgaggaacccttcaaagatagagcaaggcttggggaggcagtgcttcaagggaggaaacctacttgcgtctgttctccctgtgaagtaatggagctcacccccatttgttcttcctttggagctgcctttttaatacttttttcagcagcttacatagacttgagtcatcaagaggttaaaatgttggaaactaattgttatgtgatgattttttaaaatatagctcagaaaagacaattttaggattttaaactttttttcctaagtaaatattcttcgtagttttttgttattttgttttaggtaatgattggttataaaactggagtctgccaaccacaccaccatctaagaagataattaatatttaaattcacatatctttctataatttttaaaagcattgatgaaatttttattctaattaaaataatgtgtattttattaagaaatgccttaaacagtttctactgaggatacattctagtacttcagtttatgtcagtatgtgaacagtaaaatgtctgagatctaagattttatttaaaagtaaaatatttagaaaaagactacaatacttaaattaacatgtgaccaataagcacattttatctaaataacatgcttttttttgtctttcaaagtaaggcatatttattatagacaacttgaaaaatataggaaaaagataaagaaaattaaaattgtgtaattctttctccaaaataaccagctccttttaacatttaaggtactcttctgcagttattctttttccccctcataaatatcatgtttaattaggaaactattactagttatttgttgatatgtccgtttaaacatttatgagcttaatgcataattagtgctttgactttttcctaaagcaaggaatacaatttatgagcatggaaaaagagaagtacttgtgcttcaaggtattttgcatatgttatcaacctttctatgagaatataaacttaggaagttatacctacttatctccctctgatccctagataatttatgggtagctagatatttaagcttagcatttcttttctaggtgtggttgacctgcctgaggaaaatcgggaagcagcttataatgccattactttacctgaagaatttcatgactttgatcagccactgcctgacttagagtatgtgtcttcttttaaaaaaaattgttgacttggtctgcaataagcagtagtattagcttccaaatgtatagttttccttggaatgttttacattaacagctaaaatgcatatatatatttatataggatagtatataaatatggaacataaaacctagaaagttgttcttctgtaagaaaatcatgtggatgtcagctttaacacagctaagatgtgagagttttgacaagcttaggccaaagcttacgtaaactgaaacagatacgcttgttatataatgatagcagggaatgtaaactgttgcttcatgatatttttcagagttatatattaaagtcagctactggattggccaggctatactcagagccataattctgttctggtttgtttttatttttgttttaaatgaacatacgagataactttttatgaagagcaacaaagggtcattgtcatgacacacatttgagaggagagagttacacagagatggctgttatagcagagtactgtagttatgtttcccttttctcaagcccttacgatccagctatcatgccatgatgttggaacgtgactgtagctttccaagtgacttattagcataactgacaaccaagaaactctacaccattacagatttctctgctttttgaaatgatctgtggcttctaattagagtaagttatgacctattttgttactgcatgtgtgttgattagttctaggctctatctagctattttacttttttctctctttttgacattttatttgaaaattttttattatggaaatttttaaacatagctaataactagagaaattaggattatgaaccttatatgtcagttattcagctttttaagttacaagtatattgccagtcttattacatctgtttccccagcttacctcacaacccccaccagattattttaaatcaagtaacaataatcttatttcatctgtaatagttcgatatttgtctcttagaggtaaagaatttttaaagcctccatgacccatcacacctttaaaaaaattatcagttattccttaatatagacataccttggagatactgtgggtttggttccaccacagtaaagcaagttacacaaatttttgggtttcacagtgcctataaaagttatgttcacactgtactgtagtctattaagtgtgcagtaatagcattatgtttaaaaaagcagtgagcttatcttaaaaatactgcaaaaaaatgctagtgatcatctgagccttcagcaagttgcagtttttttgctggtggaggatttgcctccatgttgatggctgctgactgatacaggtggtggttgctgaagtttgaggtaactgcggcaatttcttaaaataagacaacagtgaagtttgctgcatcaattgactctttcatgggagatttctttgtagcgtacaatgctacccgatagcgttttacccgcagtagaacttctttcaaaattagagctaatcgtctgaaaccctaccactgctttatcaaccaagtttatggaatattctaaaccctttgtagttgtttcagcaatattcacagtatcttcactaggagtagattccatctcaagaaaccactttctttgctcatccataagaagtaactcctcatttgttaaagttttattccaagattgcatcaatttagttacaccttcaggctccacttctaattctagttctcttgctttttccaccatatctgcagttactgcctccactgaagtcttgaacccctcaaagtcatgcatcagggttaatgttaatttcttccaaactttctgtctataccactgaaactttctccatatgaacaataaggtagttttgttttcttattcatgttcactagagtagcatttttcatttccttcaagaacttttcctttgcattcaaaacttggctgtttggtgcaagaggcctagcttttagcctaaatcagcttaggcatgccttcttcaccaagcttattcatttctagcttttgatttaaagtgagatacatgtgactcttcattttacttgaacaaatagtagccattgtagggttattaattggccttatttcaatgtagttgtgtctcaaggaacagggaggcccaagaagagggagaaacattgcgggggtgggggagggcaggagcagtcagaacacacagaacatttcttgattaagtttgcccatattatttgggcatcctttgtggcactccaaaataattaaaatactagcatcaaagatcactgggccaggtatagtggttcacacctatgatcccagtgctttgggaggcttaggtgggagaatcacttgaggccaggggtttgagactagcctgggcaatatagtaagatcccgcccccccatgtctactaaaaaataaggaaaaaaattttaaagatcactaatcaagatcaccataacaaatataataatgaaaaatttttaaatagcatgagaattaccaaaatgtgacacagaggcatgaagtaagcttgtgctgttggaaaatggcaccaacagacttgcttaaggcactgttaccacaaacctttggtttgttaaaaactcagcatctgcgaaactcagtaaaacaaagtgcagtaaaacaaggtatgcctatatgatagccagtcagcattcaaatgtccccagttgacatgtcggcttttttttttttttttttctcccagttcgagttgaggctaaacaaagtctacaaactgcatctggttgatatagcttatgggtctcctgagaatctattacagctttgccgcctcctattttttttttccttgccatctattttttgtacagacttggtcagttgttttgaggtattaatgttctggatatggctgatagtgtttagattggtgtttagcattacatactttttattttttatttagtatttttaaactatatgagagattattctttattagagaaagaaactgagtctcagggaagtcagggaactttagagtttacaccgcctgtaagttgcagggtcctaatgaaaacccatgcctatctagcccatgatttctaattttttcctctgtacttgatttagtgacttctgcatattacattgtatttgctgattattgatgcttttcaaatttaaatacaagttaatttccaaatcacttacattcttggattgtactggaatgtgtgaaagtattaaatattaaggcttctaaaacttggtgggttatacatatatatttttttaatttttcttatagagagaattgggatttgtttttcttatacatagacttgaaactaaaatgtatttgaccttcttttaaagtgacatcgatgtggcccagcagttcagcttgaatcagagtagagtggaagagataaccatgagagaagaagttgggaacatcagtattttacaagaaaatgattttggtaaaagagaaacaaattattagccattaattataatgttatattgtgttgctaatagcaatttcaaaagaaaaccagactatagacagaaagacttaaaatttcatgtaatgcattttcatcaagaaaagaatttggctttctaccagtagattaagcattattttcatacttggagctaattgtttacctacttctctccctatatgcaatcatagaacctatatattgatttctgcgaggagtcccaacattgaagtggtgatcacgtttaaaccaaccattttggaacagttagtttccctgttatacttgctattcaaaaacaggtattcaaaactagttagcaaggcatattgttttttaagaggcggggtctctgctgtgttatccatgctggagtgccgtggctcttcacaggctggattatagcacactacagcctcgaactcttggattcaagtgatcctcccacttcagcctcaagtagctgggactacaggcacatgccactgtgcccagaaccagattcttttcttgatgaaacacattataacgggaaagtttcagctgtgactgttaatgtaacttaacatacatacatatttagagtttatcaaacatattttaggatcatttaaatctagatctaagtttgaatttgctagtcatgccccagtgttgtaactgtgtgtaattgagtcattttaaaaaattcagatgctaaagaattaaagtttaaactagatattttaacatttgaagtaagacttcagtaagcaaatgtgacataattagaataaatcattagcagttttcttttatcacagtgctatttctaatctttctaaactaatgacaaattaaaatttgtttaggtgattttggaatggatgatcgtgagataatgagagaaggcagtgcttttgaggatgacgacatgttagtaagcactactacttctaacctcctattagagtctgaacagagcaccagcaatctgaatgagaaaattaaccatttagaatatgaagatcaatataaggatgataattttggagaaggaaatgatggtggaatattaggtatgtgggaatgatggttattccagcataaacagaatttctttattaagttgtaaagttttggaaacagttgctaattctgagtcttgaacagcttttagatatatatgagtgaattgtgatcagttggttcaataggacatttcggtaaaactagcctcttaaaatgttgtaacaaaacctaaatatgcttatctcagaatgctaaattttattagtacttaaaactgttctgtttgtgtttgatagctgtgttaagtaaaatattttttaaaatagataaataaactagaaaatacaaatgaagaatgagaatttttttttatataccaagtgttttatacttttataaactacctggaggagaaacagataaaagttgagtatacgtttaaattttatcccttttaacataattttgtttttccattgattggctgttgtggtttggcatttctttttcaaattataactaacttacattccctatttcagatgacaaacttattagtaataatgatggcggtatctttgatgatccccctgccctctctgaggcaggggtgatgttgccagagcagcctgcacatgacgatatggatgaggatgataatgtatcaagtaagcatttcatgttcagtgattctggggatgattgtatggcatccagaaagatacttaccatagaagatgacaaactaaaagttgtagtttttagtgaattataaatatctttaagtacagtgcttatgattactggttctgattctatgtttaatcttgcacccctccccatttttttggccaattgggttcaagtctggcggggctttcccattaactagaaaaatattttttcttagtaataacaggatttctttccatttcatgaagagatttttctcctccccatttgtgggatatatgttatataccaaagctttttgtgactttttttttttttttttttttttacagtgggtgggcctgatagtcctgattcagtggatcccgttgaaccaatgccaaccatgactgatcaaacaacacttgttccaaatgaggaagaagcatttgcattggagcctattgatataactggtaagcatatgaacctttagatttatacagcatacaacataaggtcctatttctggtttttgcctgtctactgatctgctactgttgtattagataactaggcttcttgcttttttctgtttttttggcctgtctactgatctgctactgttgctttagttaactagcttcttgcttttatgtcacagtcatctgtcatagagtctttcttctatccaattataattttgagtattttgtagaatgtctgtgcaagttgctgtgaaatacaaaagtatagaacaagctttctgataatgcatatcttagtctcctggggttcccagaaagttagcagcttacttgtgtaacaactggaaaacattggaaagcttttttcaataaagtacaattctaaatgctgtgcagttggtctacgagctggaaaaaactaaaagtattctttttaaaaaaaaaacaaaactagaggctggtgtggtggctcacacttgtaatccagtactttgggaggcccaagcaggaaaaccacttgaggccaggagtttgagaccagcttgggcagtaaatatagtaagacctgtctcttcaagaagaaatttttttaaaaattttatgcactcttagaatttgcctttttccacacattctgaaaaaagaaatttttttaaatttaaaaactggaaatgtcaaaatttctagaataatctttttcttgtagtttttttaagtaacattgcaagacacattatttaatttgaggaaggctgcttctgaatgacagacaatttgagataatggggatataaaacctaacaatttctagatggtttatgaggacagtaggatagaatacttgaaattgattacagtgtaatttagacatagtttttacctttaagtagagcaagattacccttttgggtttcccattgatgagggaaatgggcaattaagtaaaatatatactgtattagatggtgagattagagagagactctcactgtgtaacatctttttgtattttttttttaagtgttgaaccaaaaacctttggggtatgtctgacagggtgaaatcttgaggattttatttaaccccatgcgcttttctgcattttaaaaaagtgaggcaatacaacctacttgtaagttgtaaggattagaaatgactcttaaaatgtctaggatggagttaacaggtctatctgactgggcttgggcttgtttcattctatcaagcagcttccacaactgccatatgtgaattacaacttttctaataaaaataacagtatttacaatcattaaagaaaactcaatctgtgagtttgagtgatgggccctgtttcaaatgagaaaatgagcccaactctgaagagtgtgatatgttcattgtttacagtataaaactacataggcaaaaatgtgttggcccttgcgtcattttgcttattttgtgctaaaagtctatacatactcattcagcaaatttttgttgaatgcccgttgtgttccagcctctcttctgaatggtggttggaaaacatgagttaaaacgttctatcctcatgaagtttaacttctctgctagagtctgtgtgtagaaaagcaggggaatatagtcagtccagatcttgtagctgtgtgttccatgctggcctctcaggaaaatgatcttattttttattatcattccagttaaagaaacaaaagccaagaggaagaggaagctaattgttgacagtgtcaaagagttggatagcaagacaattagagcccaacttagtgattattcagatattgttactactttggatctggcaccgcccaccaagaaattgatgatgtggaaagagacaggaggagtagaaaaactgttttctttacctgctcagcctttgtggaataacagactactgaaggtaatatagtttgcagaatttttacttcatatacattttgagcatctaaaaaaaaaagattctaaaacctttgaatcatttttgatcaagtattttgcaactgtatggcacattttcttttttctcccttaaatcacagtgtactgggcataacttcatctgaaatatatggataagtgagacctgcatttctaaaagatgtaaaatgaattttccttacattaaaaagccactgacgtgtttaataatacttctctctgtaataaattattagttatatcgtcttagtgtgttttacatctgaattcttgaaatgttttctgaatgaaacatgagtggttctcctttttccacagtaaagaattctggcttcaggaggttttttgttgttttgtttttttgtttgtttgtttgtttttccatttataggctcttttctgctcacattccacagtattccaaaataagactcacaggtgtctggtgaatgaagcagtgctgttaggctactattctgtctgaagttgagatatgcacagaacctattgattttaccgtgtatttagaatatagtaatatattctaaatctaaagtatcccagagcaacaacattgtgctctttattgtaagccctatcatataattatttttaagaaggtccttaaactatttattctttgactcagtaatttcattattagaaatttttcctaaggaagtaattcaaagtgtggaaaagctatctctgtgaaaatgttgattacattgttctttacagtttaaaaagagagaagcctgaaattttaaaagtagaggaatggttcaaaatgaaatattatgtagccattaaaagtagtttaaatgagaccagaagcagtcgctcatgcctgtaatcccagcactttgggaggctgaggcgagtggatcacttgaggtcaggagtttgagaccagcttggctaacatggtaaaatcccgtctgtactaataatataaaaattagccgtgtgtggtggtacacacctgtaatcccagctactcaggaggctgaggcacaagaatcacttgaaccgggggcgcggaggttgcaatgagctgagattgtgccactgcactccagcctgggcgacagagtgagactccatctcaaaaaaaaaatagtttaaatgatagctaataaggttaccatatgtaagggaagaaaacacaatttaaagctattttgtatgagaccagttaggatgagttttaattgatgaatatgaaaataaactgcaggcagataaatagaaaagcccttaaggttgtgagataatggatacagtttttttagtttatctaaaatgtctgcagttataatttgaaaactcatttaaaatcattttcagatggaatgaaatgtgaatatgataaaagccatgctaaattatacacttatatttattagaacatacctttggaagatagaaatcagtggtgactttttaattagatttattttataattgaaatttttcttttttttttttttaatagctctttacacgctgtcttacaccgcttgtaccagaagaccttagaaaaaggaggaaaggaggagaggcagataatttggatgaattcctcaaagaatttgaaaatccagaggttcctagagaggaccagcaacagcagcatcagcagcgtgatgttatcggtttgttctgttggaatagttccttgatgaagttcacatgagtatttggcttaaaatttacctttatactgtcagagtgaaagaaatgaggaatcaaagatatactcaaatgtttgggcagggaaatgcattggatctgattgccttatttaagtatgaagcctcctgtctttccagagttttaaggttcagaactggcagggtagatagtctgctaaagaattgtcctacattgtactgagggtaggacttgtccttttaagatcccctttcccctttacgtatattgctaaaaattgagtaaatctttatggagctaaaattttatctggccttcttcattaaagaaagcattatgtatgtcttagtgtactagtttaaaaaataaatggttctataatactgttcaaaactgtatgacctatgttttctcttcatatgaccaattgcagatgagcccattattgaagagccaagccgcctccaggagtcagtgatggaggccagcagaacaaacatagatgagtcagctatgcctccaccaccacctcagggagttaagcgaaaagctggacaaattgacccagagcctgtgatgcctgtaagtaagcaaatctatccattaagtcatttgaaggtattcatacagtcagtagcaagtggtatttagggaggccttttaaagtatcttggttttgacagaaaatggtaaggaatgagtccagaggaagaagagcaacaggatatagacagtccactcggagtgagagaatatgttctgggagtcggtgcagtctttcctgactctttttgaatagtattgctttagagtgctccagagtgagcatccttgactctgaagttggttctgatttattatttggcaaacattcctgcacaccttcagtactaggcagttttaggtcatcttattaagtaatcagaataaacttcaaatacctgagaaaatgtaaagcagtatctgtctgcttcattcaaactttgactaccattgagttcagctaggataggaaagctaagcaagtatgaaggaggaaatagtagggtttggtttagggctttccaatcttaagtccatagaataaatgaatttgtgcaaagggaggcttttagataaccttaggcttcttgttcagcctccatcaagaatactctgccaattttaagaactagttttctgtgccctctggtggtaagagttgtcaataagagcatttttctgtatgagctcaggaataggaacacagtaatgagtaggtgactttcataaccaccctccttctggtaattctttagtttcttttaaagactttggttttaatgttcttaactctttctgtaaagcctgagagaagatataggaagtggacccagaaaagcaatgtcctcactcctattatttgctgccgtgagacattcaagactctcagagagaaagcttatgatttataagttacaatataataaccttacagaagctttagtagttaaaaagcatttgactcctaaaaagtaagtatgaaaatgaaacatggtttaggataagcagtcagtttcttttgtaagctacttcaatgtagttttataaaaaatcaaaaaagatatatactgtaataaatttttccttgtggggaagtatagagatataatctcagtatttctttttgactagaaaacttcagccactgtgtattttcatatttaaaataagctactttaaaagcatatatcttaaattgtcttatttgtattgctttaagcctcagcaggtagagcagatggaaataccacctgtagagcttcccccagaagaacctccaaatatctgtcagctaataccagagttagaacttctgccagaaaaagagaaggagaaagagaaggaaaaagaagatgatgaagaggaagaggtaaactaattaataattttcattccagatttagcaaaaacctccaaccagctttatttttcatattggggctaacttaattgatgctgagcatcagagttatttaaaaatgttagaatataagcaaaattttaccatattcttcgtggtattgatcatcattaggaacatcaaattttatgcttcgctgtaactcattggctctcttgtggggttttgaaggacatggaattgtccttacactgatttcttgcttggcttctaaattgcgtgtagctgcttttactatcttgtggtcagtggacgattcttactgctgttattgtctgcttctgatataaccttttctgtatctgtggtggcctggaaatcagataaccatatgttttccacttgtctgggttttgtttttgtttttcttttacttggaccagggtaaagcataactttgctaaaacacttagactgagtgaaggcttaaatgactttttctttttacaaagtaagaggtgttttaggaatcaatttctttttcctggggcatgtttacactgttgaaggtcttttttcttctttttcttcctaatttctggatcattgaggttgttgtttaagacttagaatttattcttctgtttgatactctatcggatatgttacttaaacctttaaatttaaaataaggtgtcctttaggtagcattgaagctgtttaaatttcttcaagaccaaaaaaggttatggattggataaattttcagtagcatctgttcttaattctaataatagtgcttatctttaatatgaatatcttattttaaagccaaaattagtttcagagccacttctacctatgtgtgaggatgtgccattatctcagacttagttgtgaatgagtattaaaatagttgtggtttctgttatggctggtatatagtttcaccatagcctgggaacatcacaactgctgccttgcacccaccttggactttaaaaagtcatttaggcagcatgtggctgagaactaggttgctcaagtgaaatatataataaggagtatagcccattcattttaaaacaccatataaatcaacttaggtagtctgcaggctctttggtactgctccacaatgagattaagagtctgccagaacattagtcatctagaaaatcatgttgcaatatttatgtatgtatatttagttgaaataaacagtatatttagtggtacagttgatttatatcctgaagttctttaagaggggccagtaaccaaaacctccatgatcagcagcagtccacagaccacatagtgtgtgtagatagcatccttatagcgcaatatagaagcatactttcagccaaatgtttgcttgcacatagaggactttgccttgtaatttaagaaaaacagactcttcagtttgtactctaaatgctaagtgattgctcagcagcattaagtacagttttctattagttcaaaatacacaatctcaaggtaatttaggagcttttaggagatgtagaaatacttcatttttcattggacttgttttgtcagctttttgggggtcatttttattcaggatgaagatgcatcagggggcgatcaagatcaggaagaaagaagatggaacaaaaggactcagcagatgcttcatggtcttcaggtattgccgctgttgtctcagaggaaaatgcttcatcaaaggcttttgccattgttccctgaaaaaaaaaaagttagatgctggaaacagaaagcatacctttgtcaaactttttccaaaactacatttttatttatttatttattttttctggagggagagttttcttttcttttttttttttattatagtttaagttttaattaaatacataaactgttaggccaagagtaagccggaaaagcatggaggagaatgcttgtggttttcctgaaaagcagaaccatggtgacataccacacaactcctttgtatgcctgcaccttcttgttttttgttgagtaaatttaatgtgctgaatcattaaatttattgggtcattgtgtagcatcagacgttacttttccttgtgctttaatgtcctagacatagacaggatatcttgaatgtctgcaaaatgccaagcaagttgctcaaggtttcttaaaataggacagttgacatgtgtttattaattttttactttaaaaactataagtgctagattttactactatattacattagctgtctaaagaaattggttattttaataatacatgtcagaacaattttgctggtttcttggactttcttatttggattttagatgtaccataacatactttggccttttaccctcttgattaacatgagaatcacatactatttaaaaaagtgcaatctttgtcctaagcagaatatatagtttgttttttccagtaaccaaaattagcatctgtgttagtctgttttgtgttgctctaaaggaatacctgagtctgggtaatttataaagaagtttatttggctcacagttctgcagactatacaagaagcaaagcaccagcatctgcttctggtgaggcctcagaaagcttatagtcatggtggaaggcaaagggggagcaggtgtgtcacatggcaagagagggcatgagagagatggctaggcgcttttaaacaagcagctcttgtgttaactaacgagcaagaattcactgattgccacagggagtgattgataagggatccaccaccacccccatccccaccccatgacacaaacacctcactaggctccatctctaacactgggaaattacgtttcagcatgagatttggaggggacaaatattcaaactgtatcagcatcctcactgaattactactttattatacagattaagttacccttttttggttttatttcagcgtgctcttgctaaaactggagctgaatctatcagtttgcttgagttatgtcgaaatacgaacagaaaacaagctgccgcaaagttctacagcttcttggttcttaaaaagcagcaagctattgagctgacacaggaagaaccgtacagtgacatcatcgcaacacctggaccaaggttccatattatataaggagctagaagcattatagctagtgtttgattcactagtgcttacaaattgcccccatgtgtaggggacacagaaccctttgagaaaacttagatttttgtctgtacaaagtctttgcctttttccttcttcatttttttccagtacattaaatttgtcaatttcatctttgagggaaactgattagatgggttgtgtttgtgttctgatggagaaaacagcaccccaaggactcagaagatgattttaacagttcagaacagatgtgtgcaatattggtgcatgtaataatgttgagtggcagtcaaaagtcatgatttttatcttagttcttcattactgcattgaaaaggaaaacctgtctgagaaaatgcctgacagtttaatttaaaactatggtgtaagtctttgacaagaaaaaaaaacaaacaaacacttctttccatcagtaacactggcaatcttcctgttaaccactctccttagggatggtatctgaaacaacaatggtcaccctcttgagattcgttttaagtgtaattccataatgagcagaggtgtacgcgaaattgtgttatgactgatagccttcagctacaaaaagataggactgacctggtttaaagtgttctattttgtaaatcattccatttgagtctttctgatgaacttggctatactgaaatctgttattttagtgaggctccaaaatgagcaaagctaggcctgattagagtagagtgactattaaaaaacataactttctaggagctataaatcaaagttttaaaaagatgtttggatatatttgagtattccgatcatgaaaacagaaattgccctgcctactacaaggacagactgatgggaaattatgcacctggtcaacttagcttttaagcagacgatgctgtaaaaactaacggcttctctgatatttattgtaagttttagtactgatctccttttccagtgctgcacactcctggtttggaactttaatagcgttgcaacgaaatcctatatccagtttcctgtaatttaattgaagaaaaatacatccaaataaagactttattattaacagaccagatagcatcagaaatcatgtgactgttatgattatcagaatgtcttaactttttagggcaaagttaacactgaaagttctagcttaagtgttgaaacttttgtgggaaaaaaaaatcacttttgaaactcagacttcagtgtatacccaataatttaaaattatgtgaaatgttttaaatttgtgaactcgtaattactgttttaatgattcagtttcttcagagtggtaattgtataaaattgctattgcagctttacattcaatatgatgtgcctgtaaaccaaggagttttccccgtttgtaaaaagacattgtagataattgaatgtttgattttagaaaggtcattagtttcttgttacacattttgttagtctggtttttgttgcttatcgggtttaatattgttcttgaaaatagttgatgctatgttatgtataacttttctaataaaagttgtgttataagctgt

SEQ ID NO: 449 - DNA, 32742 bp, Homo sapiens
  source 1..32742: mol_type = other DNA
gcccgcggagctgagcggcggcggcggcggcggcaggagcccgggaggcggaggcgggaggcggcggcggcgcgcggagacgcagcagcggcagcggcagcatgtcggccggcggagcgtcagtcccgccgcccccgaaccccgccgtgtccttcccgccgccccggggtcaccctgcccgccggccccgacatcctgcggacctactcgggcgccttcgtctgcctggagattgtaagtggggccgccggagcgagggtcgcgcggggagcgaggacaggcggcggcatccttgtcccccgggctgtcttcctctgcgtccgcccccggcctccttcccttcgacgtggctttgtcctgcgctccctcccggggtcctctcggtgccccgcgccgccgcccgggccctccctcctagcacctgttacgcgggcacctgctcccccgcgggcgacggaaattgcctggggagggcgagtaggcggcccggcagggccgaacattggggacgtggaggaaagaaaggtgttggggctcagaggcgcctttagaaacccagggcatggccaggggccgcgcttggccggagcgagctcctggctctcggcctcgcctgttgctaacctgccattttgttgggtggtgcaaaggtgtagccgatgactgggtgacctggtggctgccacgctgtggaaagtgggggcgggaggcaacaggaagaggaagagggctgaggacttgaacatgctttttccccactcacccttgccatcattagtggcctttggattggaaagaggagctgggcaggaggcagggcaaggagaaaggtgagttatgtgccatgccctgggcagtttctaatccagtgggtgtgacaatggtgggggaaagatggaaacgtggctctcgagttcttctctgcctgcctttgcaccttctcacttcctggcctccttacgcaactccaaacctttttagcacactttgttgggcccaagtaaaggtggggttacctgcctgtcgtgcagcctttttaggtagcacttgaactttttaaatggaattttatggagttggaaactttcgaagctccttgtggacaagtagataatgtgcaaatataaattgggcaacctgaggttgcatcatgcctgagaatggcaaataaaaagtgaaatgttagcgagttagtgcctttccggcaggctggtattgtttgctcggtttaggattttcatctctcccctcaccctggcctttgagcttgcataacctttatttgggtcgctttggtttcacttttgtgcttgtggagctggatcaccttgtgagcactgttctattatgctcaggtagccacaccaccctaagttaagtttagcccggatttgaatctgaaagaggagacgtgagtgagttgcaggctatgacatcagtaatgggatcctgactgcgaggctggtttgagtttgagcctggttcagaagcatctgagtgcttgggatgaggtgcaggcatccatgtgggaagagcggagagacgatggcattgggctggctgccttgctgtgggagggagacacgtttagaactggaagatctgcaaagaacgatttcttaggttctcggctactttattccatgttctgcaagctccagttttttgcctacctctttgagaagtttttgccatatccgcattccacctgtactagaatttacagacagttcattgaaatactttctaaacttcagtacttttgtcttttcttaagcaataatatacatgaaatttcaaatttgatattctggttatatttttctaatgtttattcaaatatatgtatgtatgtatgtaaagatacatgtatgtgtatatgtaaatatatatacatgtgtatatgcaaagaaggcttatccatatgccctctaatcaaataccatctcaagaacctgtagtcatgtcagacttttaggaaacaaggcctaattctgggggaaaagaatagaaagtgacttagtcaatttccccctccccctccccattatatcttttttaaatctagcccagaggttagttctcaattcttgctgtacttaataacttgaacagctttttaaaataactgttaccagcccagactaattaaatcagaatctctgggggagtgccagagttcactagttattttttaaagcttccctggtgattctaatattcagagcctagagaagacagctctgctttcagagatgtgaattctctctatccgctaaaactgccaccactccccaacctaggagggattccagactcacagaagtgtccaatctaatcctcttatctcatttcctctggcttcttacatcctgaaacatgtctcacactcttggctacgtagaacagcatcacttccaaaagcttattagtttgcttctctctttttatggccaactcaataagtttacattttaggccccctttatctcctttacttgaatatcaatctcccccaccccattgaaaaatgaccaaaatgttccaatgaaactggtgacgttagagaaacaaaacaagagaccacactagagtcaaactatagctcctcggctctcatcctttaggactgtttagagatattggtttacatgctttaagagagcagagatcaaagctggcttgttacccctccatttagaatactcatcttgagtggatgtacagatagaagctaagtgaacacttttgaagcaacttagctcctagatgtctcaatttccatctaattttctgattcttttaaaattggccatctcccatggctcctcctcagaaattcctcaacctgtaaagtaaatgtgagaatttcccaggcactgtcctaaatgctaagtgatctccattctggggacccattattttaacctctgccggtgtttctggatatcctcaaactccattttaattttgaccttctgttcaaattcgtttgtctttaagagttcttcatttctgtcccattgccttctgaaacttaacatgtgaaaattgtacctgacaaaggaggactgggctatcaacagttgactacgctattgacaccatgctcttggagtttggttctcacactaaccatttaacttggctcaaagtattcattcccaattccccttaacgtattctattcacagcctgtcagatataagccatttgttgggagatattacaaaatatataaatagtgccagcctacgagcaccaggaaaagcattatagcactggcttcttaagtggagaatattacaatctcacgtgcatagtgatttttttttttttttttttgagatagggagataaggtgtgttccactcctggatacctaattgtcagctctttggttttgggcttagcaatacttaccaatgtatgcttgccacagagtttaatactaagttaatattgcaaagctaagccttttagcttagaatggaagccatcaccttcaaaattcgcactttcaaaatctcacagttttttgagtgaatattttataaaaatcactcatcgggtatttactgaatacctactatgtgcaaggcactcctctgggaacaaagatgtttaaacccttcctcaccagaaagacctataacctagttgagagtatagtcacaaaagtaactaccattcagggaagaaagaattaagtatgggaagtgaactgcagctaaaacattttccaggtgggtctatctactttaaaaaataacatgggatcatctgcactattgggctgaacaagatatttaggatccctgctctcaatgagcttatcttgtaaaatgcacaagaaaaattgaatttttaatagtattaatcacgaaaaagaatacagataatcattgaattcattgtgttttattttgcagttttagtgtttaagaaactacttatattccccaagttattcattcacatttatctttgtgggagatactctaggattcttattcacatgcttctaactgcagtgttttggatgccatagtaattttcatttactcagcttataattaagaacatactatgcatcaagccttcttttatgccctgaaaatagagtaactaacatggctcctgcccttaaaagaaattactgtttggtggaatataaagtcaagaaagaattaccatgctgtgtatgaagtgctaatataggtttataaaaagtattgtggaacagcaggatagagtacatctgacttctggagaggtcagaacaggcagctttaatgaggtggggacatttgaggttagccttcaataatgagccatggttcattagaaaatgggaaagagaattccaggtagaaacaaggacacgtacaaacacagagacaagaaggacaatggcaagaacgttctgtcagttgtgagattttggtgggccgtggcagaaaaaggaaaaacagcaggtaggactcaggttctggtttgctgagaaatgctaggccaaggcattggatttattgtctgatggaaagctgtgaaggacagagagaaacttgatccagcttgtgtcttagaaacctttgagtgatgaagtttggttgtaaaacaaagggactgaaggcaggaagagcagttagggggcttattgcaatagtttagataagggatgaaaagaacctgaaatagaaccaatgaaagaaggatggagaaggagagagagaggtttgaggtttgggaagtcaattaagtatgtaaagtttgacttgccccaaagtgatacctagactaaacttaaatataagatgtaactcagaggaattatgccagaaaaacaaatgttaatgaaaggatgattgtgagggagggactttaggggaggcaggttcagtcatgcagataaatctatgaaagggacttcaggttattttcaactgagagctttgactttggactagtaacatgtatatgttctgatgtatagagtttattgcctggaaaatgttgactgtgaagggacattgcttatttgcagtgtgcaagagggagctgtccatggacatagttgtcccctaaatgggttttaaaactgtaggtattttttttcctttgcctctggattaaaaatcttcatccacattaaaagaatctttaggccgggtgcagtggctcatgcctgtaatcctagcactttgggaggctgaagcaggtggatcacctgaggtcaggagttcaagaccagcctgaccaacatggtgaaacccccatctctactaaaaatacaaaattagccaggtgtggtggcacatgactgtaatcccagctacttgggaggccgtggcaggagaattgcttgaacctgggaggcagagttgcagtgagccaagatcgcaccatcaccctccagcctgggaaataagagcgaaactacatccccaaaataataaatgaataaataaataacctttaaagtttcataagggaaaataaaccaatgcccctgccagagattattatcaacaatcatttgctccgactggcagtcctttaaaaaaaaatacgaagaactgaaatatggaaaactttaaaccaagtagctgaaaagattcaccttgagctccaaaggaaaaagtcatagagaagagatttgttttgtagagcctgatagaaatgttgtacgtggtggtaggagctgtggacatggtgtatttgcagtgatatggctgaatagaaatgaccctgtaatgacaaaggacaggaaccaggttggcatacccagtatcatgcacatgcagtacttaacaaatgctacttgtttgttctatagtacaaactgagcagtatgtgaaaatagtctggagacattggctggagtggagaagggcagcttgggagtagatgccctcttaaatcttgcccaacatgtaaactgccataattcttctccaggtttctgcactttaacttgaatttcctaagtgttctattttatataagagtaccatatccttttatagacaacatatataacaatctcaacttctgtataatagctatgagaaggaggaaggtaaaaagaaaggaaagaggcagtgatttatacgggtctggccaatatcagggcattggcacgcaggaacagctttaaactaaaagtgataactagttacctgcaaacatgaaaagggaattttcaaaatcgagaggaattattataaagaagaataaaaagaaccagaacatatttctcctctgtaatatgagctttccattttagggtcggtgtcagctatttaagcagctgaattggaggtttaggtcacatggggaggaagaaagtataactctctatagcactctcagacatatttttaaagccttcaaatgtaaagctaaaaagtagaacttcttttgcaatgagtattaacgtattttggtcataagcctcttatgtgtatgtcatttctcattacatcccagaatttgttctgttttcctaactaactaaataaataaacaccttgctgccttgcatctctaatgcaggtctatgccagggccagtccagaagcagtttggacagaagtcagcatggttagaggacagatggggactgatgaggggagcaggaggcactggaagaaggcacaagatttaccctggtcaaaagttccagtggcagttacaatagaaataggtcatgtgggcaaatttggggccgaaaaaagatttaaaattgggtgtcatgaattcaactggcaagaggtacaaagtttcccataactttccatctcagcctcctgagatctggtactaggtggtgggtgtcaccaataataacttgagaattgagaagtacatattctcgcttcactcgttttcatgcctatttttggacatccaccatgaaccagggagtgagctgggctccagaccggagtgtgttcctagcatcccaagctgcactcctagagcattctcttttggaaccattcattacacatgccggttggtttccattcatttcaaggaggatggattgaggaccttctgtagaaagcaccaccctgggtaatgagcatacggagatgttgaaggcaatgtcaccgactctgacgtcacagtctagtgggtgaaatgggcatgtagatccatgattttgatccagttgtaattgctgtggagaatacacgcgtcagtaaccgtggaagcaccgagggatggcacctggccagggaagtctttctggaaaacatggtaactggagtttagttatgcagcagaatttttactggcagcatgctaggcagaaacatggtcaagtgtgatcatttctctatgctcaggggatgaggggtagaggctggaatgcaaagagagggtggtaggaaaagaagcattacagggaagatgatgagcttggggaggggggcagcagtatgccttgtagtggtaccagtgatctacagtcgcattgtgaatgaatccatacttgtgtgggctgctttgtaaatacatctaccagttatattgtatgtgttggctaagtatgtttctagtttaaggaaatctttcaaaatgcgaattgtatgtaaaatatagctaattgtagataatctttttttttctagctgataaatttctgaatatactgaacacttctataaccatgatgtttcctgtgcagcaccccataagtaaacatccattaaaatagaaggggttacaagtagataaagtgttctgaacttctgggtgggggggccacatacccctttgtgattctgatgaaaggtgtggactgtgtcctcagaaaaatgcatatgtacttgtccacccaattttatatgattttaggaaatcatatggaatatgggtagaaaccctgctttagaatgaacactaaaccatgagaggggcagaatagcagaatgttaaaatcataagttctggaagccaattgccaagttcaaatttcaggtctaacacttattaactatataactaggaacaagttatgaatggatttgtacctcaattaacttacctataaagtaggaataataatgttgtctctcaaggtctgtgaggattaaattggcacaaataaaacccttataacggtgcttataacataagagctcagtaaatgttaagtactatttctgctatcaccattagcttcaacttcttactctaactctacaagccagactggaagacaaatatttttttgcttttcctctatgtttgctgggtgttcattctcactgcagtagaataatgaattatccaatatatagataatagaattagaaggagggagcttaatacggaaagttctaaatagtgttttcccttatgggtagtttagccagcctttatcctttcaaattcacttaccttttcctgttctcattccaaacattaattgaaaataggtcacagtagaaattagccggtttactttgtgggtatactaagatggaggtgtcaaattggtttgaaaaaatttttagctgtcagagggtatgtttaaaagcaggtaattaggaaataagtgacatttgaaaagaaaaagggcatttgcaaaaggaaccctttgggaacataagaccgtccaaacaggagatgagttaagaatctgtaattcatgcacccagaattgcaagagttgctacttgctcaagagcatgttttcccgtgggactatgtatttttcccattccacagtttctagtgaaaacatgtcttcacatcaaaccctgaggattcagtttagtgtgatttgtggataaatacttccgtggttttcttatggtagggtttcagccaagtcatacctttctggtctgcagagaccaagcaaacataacaaacatgtgttaaaccagaaagaagatcagttgttttaggaatgtgtagcaatttaataactgcaactcagaatatatttgagtacttctggtatgtacccagtacacctaaagttgggttaagaagataaaaggtgactgagtcaccgggagatgctgatacctactcctaggaggtttttacctttgtattgcctggaagcaaaggtagtctttttgttagagcttgaggtttgacgtcataagcactgacttagtttcttaaagaaatttcaaattgaggtgcctttggctattttatacataattattggattttttagaacactagaaagcagtggaaggcagtggcagggaaggggtcagaatatggattcagatccaagacgatgagaataacgtgggcgaaacatataatagttccgaatacctttcttcacagtgtgtactctgcagttgctactgtatttatcatctgttctctgtcagatttaaccatttttgtgttctgctttttacttctaaaaatatggccacctccagagtcgtctctactgaacaggaatgctgataattacaccgttttgcaaacactctaagctcactaatgcccggaattagaggaagtgaatatactgagcattggtcatctcaattttttaagttcagttttttaacttaaaaaaactggagccaagtttaagttggagccaagttgggaagctcaagaagaaaagtagcttttgtcaaaaggaaatcacaaagtagggaataataactgtgtcaaggccagagtgatccatacaccagtatgacagtctcaaaatgaggatggtggccctccaaagtgggctcaattatgttctctggcccatcctctctcttccaaagcgagcctggatttcacagaatctcagctctagggatgtatcatatgtatttacttgagtgagagagagggggcattcctacactccttccctctcccctttccatgcagcacataccccacaagtgaggaggtgaatctgactcctgttcatgcagcatttagtttcccttccaagcctttgaggtgtttgaagggctgtaattttgagtacgataagaacggttagtctatactattttacagtatagcctctgctgtcaaagccttggtctgtcttgaaagcttactctgaagcctgcctcccctgcctacctttccagattcttcccattatatttcttctctcctctcccctcccagcctctcagaacacactgtgttgagctctttttatagcacccaccgcaatctgctcctgaatcagtttaatagtgtctatttcttccttatttcaagctcctggagatggaaccttgccttttttgttttttcttgagtgttcttctatagtacctagcagtaggttcggggctggcctgtttgaggtccagtctgggtttagtaaatgctgtgttgaattccaaaggatcatatagcctcctctttagaggtgtgaatgtatcatcatccctaactcattatgtttatctatttggctctgcctgtccctaacaaacagtggccaattgctttttattatcctttatatttgcacataggttctcaggaaataactcagaagagatacttaatgtatatttcttaaactgtatttaaagttatgtaggttattctttgtgggagagtaagaaaagactaccagaaagaagaaagtggaaaaaaaggaaagattgatccactgaagacatacttatatcgccttcagatatttatttaatagtatgtaaaggtaaataatattaggaacaagttttttcttttataggcactgataaggtggtggttaaatgtttaagatgcactgatattcattagatttatttcataacactttctggatcaattgttaattttttatttgactttaggagttgaggtatacaccacaactatacatttttttagactggtgatttgattatcattgatcaagtgatcatttatgctttcaaaaatgtttcttcaaagtagtaacaaattatatgattgggccttttcttgaagcttgaattaaaacttgtgtttttaactttcagtgacttgtggagtaatttggatatctagatactgaaatgcaatgtacagatgagtattgatttttaatatttggagctccaactgttctcacatgagcactagcttgtttactaagcaaataatttaagagcgtgctctatcactctccctgggtgtgtgtgtgtgtgtgtgtgtgtgtgtgtgtgtgagagagagagacagagagagagagagagagattgattctcacttgcttgaggtgtcttcagggcaggtatgtagcctaaggttttgtgctgccaaatctagcatagtacctgactgatggttaggaaaggattactgtgtagattaataaatggcttgggatgcagagacatataaagcagtatgctgccaagaaggcctggtagtgcagatggagagccaaagggatttaattacagtgtatctcactgatgtaacaaagcccagtagggaggttgcccagaggagggaggcataactgagcaggggtggatctcaggaaaaatgttgtaaatgatgtgctcaagattagatgtgagtgggagaatctcaagtacacatagggagggaatgacattcacggcatgcaagtaacaggccactctgatgtgaaagatctttgtcttggaactgtggattttttttctccccctaatacaaaatgtgaggggcatagtggcaagagacaaggatgaaaaagacatgtcagatcacaaatggcttggaatgccaggcatggtagtatggaggagaccaatggtgatagatgcataaaactcatcttcacaccatttctcctgcggtgttctctcaagcctagaggcccattccagaaatctgggtattttccttatctgtcctttttctgttgtgtcccacatctgatcagttaccaactattatcatgtctacttctaaatttcactctaatccattcctttctctctgtcctcagtgttctgattcttacactctgttggtctaacagtctcctgtgttacccaatgtttgtgaaatctctgtgttgatagagctgagaaacacagagatgtgctgcctcaccatccaccctttcctccccagtccattctcacattctagccagagagaaatttctaaaggcaaatcttgaccatgctagtttctgctcaagatgatcttggctttgtcatcgcccttaggtgaagttcagttccttggcccgagcttcagcacctcctcgctcagtctccagtacagttctctccgttccccaccagcacatgcccctcctgtcttgctgagctttgttcttcacctatgcggggctactctcagctcctgccatggaacccccctttcctccctctgctttaccccatagccctgtgctttggattgttgcttctaggaagtattttcaaatctggatttatagcccttgctgtgtggacctgcagtgcccagtatttgcccaattgtgacatttatgaagcagctttttaatcgcttgcttacttgtctctttcctctaatagactgtgagttctgtggtgacagaaaccaagtgtaacctgtttaccatttgattcccagcacctggcatagtgcctgaaatgtagtaggtatttattgatacttagatccatagatatgtgaagtacttattcctatgtcgaacacataatactcaataaatgatggtagtttttattgtttaccgccatatacaacagctgcaactattattctatccattttttttactaactctctaagaagcaatgagatcaaaagctggtttatagtgatgtgaagagcaacttcaaggagaggaattggagaccaagcaaagatgaatttgttaaaatggttgactgaaaaaataccttcattgaaaaggtggtagtcagagaatcagtaaagtcaaaggaaggtatttgtcaatgatgaaggaatactggacatgtacatgggttgaagaagcgagtccaacctgaagatacaggtgtggagttggatcagttctccaagcaggaggattgatcttgcacctgaggaaagaaggcatcttacataataaggggaaaatcgaagggatggggttgctggaatatgtgcaggggtctgggaggaaaatgaaggcaatgctgagggtaatacaagcatgtttaattctgttgtgtgaaaggtatcttttaagcaaaccaattaccctctttttctctttcagctgttcgggggtcttgtctggattttggttgcctcctccaatgttcctctacctctactacaaggatgggtcatgtttgtgtccgtgacagcgtttttcttttcgctcctctttctgggcatgttcctctctggcatggtggctcaaattgatgctaactggaacttcctggtaaggactttttattttaagtctattgcaggaagatgggagaaacctgtatcctattctgttctgaaatgccagagtcccagttctgttgcccctaatgggagagaagcggtccaaccacagagactgctgtggtgctgcggtggtgtgtggctgccttgatggacaacagggccccagtttgcgaaatctctgtgttgatagagctgagaaataattgttactcctacaacttagataactcttactcaaaaactgtttcatttcatacggcaaatgaattgcattacaattatcaaacaattgaacaaatgcctttgggaactaaacattgtcgcatcttgaaattttccattaatttctgccccagatatttaaatatgtatttttttttcagaaaacaaatacttagaaaagggcatgtttcatattgataataaacgtctgtcccaaattaaaaagaattggtgagtttttaaaaatgaatttgtggccgggcgtggtagctcatgcctgtaatcccagcactttgggaggccgaggcagatgaatcatgaggtcaggagttcaagaccagcctggccaacatggtgacaccccgtctctactaaaaatacaaaaattaccccgggcatgatggggtgtgcctgtagtcccagctggttgggaggcagaggcagaagaattacttgaacccgggaggcagtgagcctagattgtgccactgtactccagcctgggtgacagagcaagactccatctcaaaaaaaaaaaaaaaaagaatttgtgaccaagtgcagtggctcatgcctatagtcccaggactttgggaagctgaggcaggaggatcacttgagaccaggagctcaaggccagcctgggaaacatggtgtaaccctgtctctacaaaaactacaaaaaatatctggacatggtgttgcactcctgtagtcccagctactcaggaagttgaggcaggaggatcacttgagcccaggaagtcgaggctgcagtgagccatgatcacaccagtgcactccagccaaggagacagagcaagaccttgtctctcaaaaaaaaaaaaaaaaaaatttgcaatcaacacaatttttaaaattatgacaccattaaattagatcaactttttgtttagtatatagagcttgtctttcatgcttgcagccatttattctctaagactgttttagaatgactcagaggatcacagtgcttcagggaagttcaggaagaacccccattaggttatgatcatactttggtgtttagaagcttacatcagaccttcagtcaggctttatatatattcctttcaagtataacagcatgttattccacagctttagtgcagatgttaaatatctgttcttgttttatttatagggcataagaggaactgtaatcctaaatgttattagtggtgaagtgtagggaatgtggctggcctttaagccagccctggggcaaatggcatagcttagtataaagctaagaaggaagtggagtaccgtggttacagtcctgcatgggctttgagcatagatctggtttgcttagtagctgtgtagcctcgggcacaattattaacctctctcgattttagtttcttcctctgtaaaatgagaataatatatttggtattgagtacagtcattcatgtccttattaatttatttgttttcccaagtttgcatttcccacccatttgtagcattatatctgatgttcagaaaattaaatgttaagcgtttctgttgttttaattgtgctactctatgaaagtgacagctgaaattggaaatctttgtttcataggtcagctgcaaaggttacctgtggtcttttagctggagtagtcttttagctcagtagctgttactgaggcaaaagatggtaatagcaatgcacagcgttgattgtatggtaggcatgctttctaagagccaaatcttgtcttcaaggaatttatgaaatgttttccctatttcgaaagggcttctctttttttcttcttttgtgtgtgggtcttttttttattattattattcagtcattttttattgcatggcttgcttttgataggtttggtaacatattttgtacactctcccaggaaaactttttagccatgtatataatggaattgtcacaagttggtaacaatttttaattgttgcattctggaactgtcagacattaatggctcaaaaatagttgttttctcctgtgataatagtttaccactttagaccatacttgaaggaagcaagaatgcattttgataaagaacttattttctagatgtatttgttgtaggatattgagtttactatttcttctgggttttattgactaagaaaattacattcatgatagatagcttcagcagtttttcctgagctttctagcttttatataaatagtgaaataaaaatatactatctaataacagatataaagtactaaatacttgcctcattctattctgggaaaataaggagattttggttttgaaacagcttttctgtattttttttctggagaggaaaaaataccatttttgtggaactttaaacagaagattctaaatttatatagtcccctttgtaggggaagggtactaaggaaagatacattttagaaaaatagagctatttaaaaatcctatgcaattaaacatgtttccctttattcccccaaagtataactggcacacatttgatcatttgcctattatggacatcacttaatatattggtttttttaagattttttttatttcaatagcttttagggtacatgtggttttttattacatgaatgaattgcatagtggtgaaatctgagatgttagtgtaacagccccccgagtagtatacattgtacccaacatgtagtttttttatccctccttctcctctccccacccactcctgagtctccaatgtccattataccactctgtatgcctttgcatgcccatggcttggttcccacttacaactgagaacatacaatatttggttttcaaataataagtgagttacttcatttagaataacggcctccagctccatccactgcttagtatcttacattttgtcagctatattttctggccccatattcatttgcttatttgaccttaatgacaattctttatgggtgataagtattcttgttctcatttttacaaatgagaaaactgaggttcaaagtggttgtcatccatttttcttgctgctgttaatgtaaacgaggatccccctatagacgatgcagcttttttttttaagattaactttgtagagttttactacataaacttgcagatagtattttctcactccaactttttttatactttaggttttagggtacatgtgcacaacgtgcaggttagttacatatgtatacatgtgccaggttggtgtgctgcacccattaactcatcatttaacatcaggtatatctcctaatgctatccctccccactccccccaccccacaacaggccccggtgtgtgatgttccccttcctgtgtccatgtgttctcattgttcaattcccatctatgagtgagaacatgcagtgtttgtttggttttttgtccttgtgatagtttgctgagaatgatggtttccagcttcatccatgtccatgcaaaggacatgaactcattttttatggctgcatagtattccatggtgtatatgtgccacattttcttaatccagcctcattgttggacatttcggttggttccaagtctttgctattgtgaatagtgccgcaataaacatacgtgtgcatgtgtctttatagcagcatgttttataatcctttgggtatatacccagtaatgggatggctgggtcaaatggtattcctagttctagatccctgaggaatcgccacactgacttccacaatggttgaactagtttacattcccaccaacagtgtaaaagtgttcctatttctccacatcctctccagcacctgttgtttcctgactttttaatgattgccattctaactggtgtgagatggtatctcattgtggttttgatttgcatttctctgatggtcagtgatggtgagcattttttcatgtgtctgttggctgcataaatgtcttcttttgagaagtgtctgttcatatccttcacccactttttgatggggttgtttttttcttgtgaatttgtttgagttcattgtagattctggatgttagccctttgtcagatgagtagattgcaaaaattttctcccattctgtaaaaaattttctcccattctgtaggttgcctgttcactctgatggtagtttcttttgctgtgcagaagctttttagtttaattagatcccatttgtcaattttggcttgtgttgccattgcttttggtgttttagacatgaagtccttgcccatgcctatgtcctgaatggtattgcctaggttttcttctagggtttttatggttttaggtctaacatttaagtcttcaatccatcttgaattaatttttgtataaggtgtaaggaagggatccagtttcagctttctacttatggctagccagttttcccagaaccatttattcaatagggaatcctttccccccctttttttttttaactagtagatggaagtttgaccctgaaacgaagagcaaacatgggcttaagacaagaatgtgagatatagtcacttgcgggcggggggtggggtggaagctatgcctgaggctgaggttgcccagggaaaaggcaaacacatagtgggcagtgctctggggtgtgtgagcattgataagatgggtgaaacagcaagagcacatgaaggcaattaagaaagtgaaggcaattaagaaagaggctgggttcatctgctaataagtggaggccaggggcctagggcagagatttacaaatggtggtcctggccagaagagcagcagcatctggaaacgtgtcagaaatggacattatcaggttccaccctgacctgctaagtcagaaactctgggagtaggactcagctgtcttgtgtttaaacaagctctccaggtggttctgatgcaggctaacatttgagaaccactgacttagcagaaatgatctgggctgtcaaatgcaatgagtgaggcttgtggaagaccttcttaacacacatcccacacctggcacaaattggaatagtacactcaggatggccaaatacaaatataggtacagtccaccaggggttgggaatagttactgagtagttggccctatactaggccctgggaatacaattgtgaaaaaagacagatctagcagttgctgtcaaagagtttgttgtagtagacaatgtaagtaaattgttacaaaattaatgcattaattaatgttatgttagtagccaaaaaggaaaagcctagcatgccaaaacaacatatgtgtcatctcagcttcactgggaagtagattctaagatggattgagaagtacaagagttttggtttgggctttttgtgcattttgttgttgttgttattgtttaagggaaaggggagataacacttgtaaaagaaaataaaagaggaagtaagatcaggaagaaaacccagaatgatacgctctacaaagtcttgaccaaatccatacaaaacttcagaacacagcctgtcctttgagagttttgtgttgggcacaagtggccaagcactagtacctccactgtgctgtcattagtggggttgggggatatccaggaagaatgtggccttggctcatgcattgtagcagatcgcaaatccactgaagctggaggctgtcagctacctgcacccctcacagctaaacatcaagttccttcttgatggaaaatgtgtgcagtgcacaattagatgctccactctcctctcatactgcagatccatttctccatatacatctgggagtcactcctctggggttcccatgtgcctttcttcctgaagaaagacttaaaggagagaggttagagggatacatgacatctccgttcactggagttggtctcaaggccaactggtactcatcttcttccactgaccattttacattcctcttctcagctttcctgtctggtggtctcagtggtttcctgttggtgaatccaaatctcattcctgagagagtcagggcccctggcaaccacatctgcttcaggccagtattgctacacttgtttgtttttagtcacaattggcagagagacttccaagaagacctcaagtagatcacctgaggtctacatataattcctttcgccctcttatggcacatacacgagggcaatacatgctccttactgccatcctgacttccagcagctctgccttctcttgaagtttagtggcaactacctttgtcaagatggtaactcctcttcctgcctttttgtccctggacaaaagagtccaaagtggccagagagtagccatagcttgtagctcaatgggaccattgctgtatcctctgtccttgtccctttggggacaaggacccctgaccatgaaaaacctagagctgtgggaacataaatcataaaggatttcatcaggttattagaagcgatgacaagtggagaaactcttgcttttacccctaagtttccattcttccaatggggacacaataacatgtaggaagctcttcttcagtgtatctactgcatcctaaaggatgacccccatcctcacagactagtgcctccaagctgtgccttcagccagccattcctttgtgctatcaggccaggccagcagcttctaggtggtgcagtacatgatgcagcccatgggtaggcacccatttccactcctgctttgttgagaagtggtttccttgatcagagactgagtgaatgcagtctgtaaatccttgggtatagctggtggctcaagctcagagagtcataaaagcaaattcataaatcctcgatgccctaggtaattaattgtattttagtgagaataaccattatgggtgtgtgtttttgtgagagtgaaatattttgccctccaggaaggtagaagctcagttttcattcatttactacaggtaagtggttggtccccttgaggataatcccttatcaggagctcagagttggtctctgttgctggcagttcaacattcagaggaagcagtgggtagatcagctttggcaataaggaggccatactcttgggcctttccatggccactttctctgaccatgggtactctgtttatgtgcccataatgccaggtatgggatggttgatgccaaaggattgctaacatcaactcgaagggtccttttggctacgtagcattctaaagtgatgcttctggtaagcattaccaagtgacagaaagatctccacatagtatgcctaatcccgtatcccttccttgtccctgaagctttgaaatgttttatcccatggccctgacaagtacagtagtctatttgctattgatcatcagtctatgtatattctcactgtgggcctctttttttttttttttttgagacagagtcttgctctattgcccaggctggagtgcagtggcaggatctctgctcattgcaacctctgcctcctggattcaagcgattcttctgccttagccttccgagtaactgggattacaggcatgcaccaccatgcccagctaatttttgtatttttagtagagatgggcttttgccatgttggctaggctggtctcaaactcctgacctcaagtgatccaccacatcggcctcccaaagtgctgggattacagacacgagccactgcacccagctatgggccacttttctttctgagcaaagtgtgtaacatgcatcatcactcagctctacccattgggaaaatagtccctaaccactgtctttcaaagccaactctgaatgtggctataatgcacatacaatacagctgctgtccctttcaaccttgcaaccacataggagccaactcttccaaaaacaaagctcagggtttttttctccttcacgtgggcataaggaaaccactcttccctgtggccataggtacgaactgaggaaggacagcagttccactctggtgggtaacatgagagcctaggctacctgctcttgcagttacctcttgttaactggtcttgctcaggtcaatatcatatgtgcccttcccatcacaaggagacagctgctgacccacctgattttttgagttagtggcttccatggaacccaacccaaaataagcagttctggatgcctggccactggtgtcaagtgtttcttctctaccaggtctagtaccaggagctacttttcaaacacttgtcactctccagtgcaggttactagaggctctaaaactccaggaacctccagtgattttcacattggcattgccataaattccacactatgtactttctcctaacaccaagagtatatatgaccctggctggataggatgacccaagcatatggagtgagaagcgcgagaagtgtgttgggaattaacacctataaaagatgaaaggggaagaaataggattggacaggaaagccttgaaaccacaatttaattcagatacttctgaaaaggagggaggaagaagcaaaattggcaggattgggggggcgggaaggggcaagcagtaattgcttgtgggcagaatcctttctggcagagacaataccatgtgtaaagagtagcatccttgagctataaaatgcttcctagggaccaaaatgaggtgaatgtgggtgacattgaaaaaggtatgtaatggtagagaaattaagggatcagatcacacgaagagttgcaggtcctgtcaccaaatctctttatttaaagataaactatttctgatgattcacctcagtaagttaaatgagtgcctaatgatctcagacaaattttctcttaatttttcttactaagatctagcatcatttcatttagccattaaaaatggtgacatttgaatttggggtttgaccttcatcagctaatatttgttgaataaccacatgtatttgagcatctctcctacaaacgtgtggccagtatgtaacacttttcttaaatcttttgaaggcatttgtgaatcagtttacaaatgagagttatttaatagaaagcacacctttgtagttcttacccatggttagttaaatttgtcctagcagagtattttagatgtgagaacagtttttttttttattttttgtttgttttgaggcagagtcttgctctgttgtccaggctggagtgcactgatgcagtcttggctcactgcaagctccacctcccaggttcacaccattctcctgcctcagcctcccaagtagctgggaccacaggcgcccgccaccacacccagctaatctttttgtatttttagtagagacagggtttcactgtgttagccaggatggtctctctctcctgacctcatgatccgcccgccttgacctcccaaagtgctgggattacaggcgtgagccactgtgcccagccagatatgagaacaatttctataaacagtatgatttgctgtatgggcatttacaaaagcagtgcaatgctctcctttgtaatattgctataacggtaatagaaatcaataataggtttgataggaaagaacgtagacttcaaagggaacccttgcacactgttggtaggaatgtaaattagtgcagtcgttatagagaacagtgtggaagttcctcaaaaagttaaaaatagaactaccatatgatctagcaatcccacgcctgggtatatatccaaaggaaatgacatcagtgagatatctgcattctcattttcaatacaccattattcaaaacgccaagacatggaatcaacctaaaggccagtagatgaatggataaagaaaatgcagtatatattcacaatactaattgcctttaaaaaggcagaaatcctgtcatttgcaatatagatgaacattgtgttatgtgaaataagccaggcacggaaagaccaataccgcatgatctcacttatatgtgaaatcttgaacagttgaattcacagaagtagagaatagaatggtgattaccagggtatggggtgatgggggactggggaaatgttggtcaaaggatacagaatttcagttaggagaaatgagttcaagagatctattgtacagcatggcaactatagttaataacagtgtattatattcttgaaaaatgctaaaaaatattttagatgttctcaccacaaaaaaaagataattttgggaggttttatatatttttttatatatttatgtatatataaattagctccacttagccatcccacaatgtataaatattccacaatgtataaatatttaaaaacatgtacacgataaatatgtatttttctcaattaaaataattttttttgaaaactaaagaaactggactttgggactagacacactacatgtttttcttcctccaaaagttaatatttgtctggcttcaaacagtcaacagtcatttaactgaaaagaaagaagaaattctttgtaaaatggagataataaatgatggttataaggatgagtaataatgcacataaggtacctgatatgtgggagctattaaaaataaacagtgatgtgttgatggtatattaattcaggtaagacaatatgaactgtaatagtgttatgcttcacatgaatgtcagcaacatacaaagaagcctaataaacgagttcttatacttttggtggaagtatatatgttagtagtttttaatgaaatatatgaatatatgttattgaattctattagtcttctgtatctttcagtggaaaatctctaatgataaaaataactgctcaaaaataaaattacataatgtgtatgaatacatatcataaccataataaaaagatgttatttaaatgctattttacttgaattttaaagacagcatatgttatggcttttttatattatcctaattaacattgatctctatggcatcttaatccaaattaaaattacatattattaggagcaggttgttcagtttccatgtagctgagcagttttgagtgagtttcttaatcctgagttctagtttgattgcactgtgggctgagagacagtttgttataatttctgatcttttacatttgctgaggagagctttacttccaactatgtggtcaattttggaataggtgtggtgctgaaaaaatgtatattctgttgatttggggtggttgggtacataacaaaatgaaggtagaaataaagatgttctttgaaaccaatgagaacaaagacacagcataccagaatctctgggacacattcaaagcagtgtgtagagggaaatttataacactaaatgcccacaagagaaagcaggaaagatccaaaattgacaccctaacatcacaattaaaagaactagaaaagcaagagcaaacaaacacattcaaaagctagcagaaggcaagaaataactaaaatcagagcagaactgaaggaaatagagacacaaaaaaccctctaaaaaattaatgaatccaggagctggttttttgaaaggatcaacaaaattgatagactgctagcaagactaataaagaagaaaagagagaagaatcaaatagacgcaataaaaaatgacgaaggggatagcagcactgatccacagaaatacaaactaccatcagagaatactacaaacacctctatgcaaataaactagaaaatctagaagaaatggataaattcctcgacacatacaccctcccaagactaaaccaggaataagttgaatctctgaatagaccaataacaggctctgaaattgtggcaataatcaatagcttaccaaccaaaaagagtccaggaccagatggattcacagccgaattctaccagaggtacaaggaggaactggtaccattccttctgaaactattcctatcaatagaaaaagagagaatcctccctaactcattttatgaggctagcatcatcctgataccaaagccgggaagagacacaaccaaaaaagagaattttagaccaatatccttgatgaacattgatgcaaaaatcctcaataaaatactggcaaaccaaggggaggagccaagatggccgaataggaacagctccagtctacagctcccagcgtgagtgacgcagaagacggatgatttctgcatttccatctgaggtaccgggttcatctcactagggagtgccagacagtgggcacaggccagtgggtgcgcgcaccgtgcgcgagccgaagcagggcgaggcattgcctcacttgggaagcgcaaggggtcagagagttccctttccgagtcaaagaaaggggtgacggacgcaccgggaaaatcgggtcactcccacccgaatattgcacttttcagaccggcttaaaaaacggcgcaccacgagattgtatcccacacctggctgggagggtcctatgcccacggaatctcgctgattactagcacagcagtctgagatcaaactgcaaggcggcaacaaggctgggggaggggcgcccgccattgcccaggcttgcttaggtaaacaaagcagcccggaagctcgaactgggtggagcccaccacagctcaagaaggcctgcctgcctctgtaggctccacctctgggggcagggcacagacaaacaaaaagacagcagtaacctctgcagacttaaatgtccctgtctgacagctttgaagagagcagtggttctcccagcatgcagctgaacatctgagacctggcagactgcctcctcaagtgggtccctgacccctgaccccggaacagcctaactgggaggcaccccccagcaggggcacactcacaattcacacggcagggtattccaacagacctgcagctgagggtcctgtctgttagaaggaaaactaacaaacagaaaggacatccacaccgaaaacccatctgtacatcaccatcatcaaagaccaaaagtagataaaaccacaaagatggggaaaaaacagaacataaaaactggaaactctaaaacacagagcacctctcctcctccaaaggaacgcagttcctcaccagcaacggaacaaagctggatggagaatgactttgacgagctgagagaagaaggcttcagacgatcaaattactctgagctacaggaggacattcaaaccaaaggcaaagaagttgaaaactttgaaaaaaatttagaagaatgtataactagaataaccaatacagagaagtgcttaaaggagctgatggagctgaaaaccaaggctcgagaactatgtgaagaatgcagaagcctcaggagcgaatgcgatcaactggaagaaagggtatcagcaatagaagatgaaatgaagcgagaagggaagtttagagaaaaaagaataaaaagaaatgagcaaagcctccaagaaatatgggactatgtgaaaagaccaaatctacgtctgattggggtacctgaaagtgatggggagaatggaaccaagttggaaaacactacaggatattatccaggagaacttccccaatctagcaaggcaggccaacattcagattcaggaaatacagagaatgccacaaagatactcctcgagaagagcaactccaagacacataattgccagattcaccaaagttgaaatgaaggaaaaaatgttaagggcagccagagagaaaggtcgggttaccctcaaagggaagcccatcagactaacagcgggtctcttggcagaaaccctacaagccagaagagagtgggggccaatattcaacattcttaaagaattttcaacccagaatttcatatccagccaaactaagcttcctaagtgaaggagaaataaaatactttacagacaagcaaatgctgagaggttttgtcaccaccaggcctgccctaaaagagctcctgaaggaagcactaaacatggaaaggaacaaccggtaccagccgctgcaaaatcatgccaaaatgtaaagaccatcaagactaggaagaaactgcatcaactaacgagcaaaatcaccagctaacatcataatgacaggatcaaattcacacataacaatattaactttaaatgtaaatggactaaattctccaattaaaagacacagactggcaaattggataaagagtcaagacccatcagtgtgctgtattcaggaaacccatctcacatgcagagacacacataggctcaaaataaaaggatggaggaagatctaccaagcaaatggaaaacaaaaaaaggcaggggttgcaatcctagtctctgataaaacagactttaaaccaacaaagatcaaaagagacaaagaaggccattacataatggtaaagggatcaattcaacaagaagagctaactatcctaaatatatatgcacccaatacaggagcacccagattcataaagcaagtcctgagtgacctacaaagagacttagactcccacacattaataatgggagactttaacaccccactgtcaacattagagagatcaatgagatagaaagtcaacaaggatacccaggaattgaactcagctctgcaccaagtggacctaatagacacctacagaactctccaccccaaatcaacagaatatacatttttttcagcaccacaccacacctattccaaaattgaccacatagttggaagtaaagctctcctcagcaaatgtaaaagaacagaaattataacaaactctctcagaccacagtgcaatcaaactagaactcaggattaagaatctcactcaaaaccgctcaactacatggaaactgaacaacctgctcctgaatgactactgggtacataacgaaatgaaggcagaaataaagatgttctttgaaaccaacgagaacaaagacacaacatagcagaatctctgggacccattcaaagcagtgtgtagagggaaatttataacactaaatgcccacaagagaaagcaggaaagatccaaaattgacaccctaacatcacaattaaaagaactagaaaagcaagagcaaacacattcaaaagctagcagaaggcaagaaataactaaaatcagagcagaactgaaggaaatagagacacaaaaaacccttcaaaaaatcagtgaatccaggagctggatttttgaaaggatcaacaaaattgatagaccgctagcaagactaataaagaaaaaaagaagaatcaaatagacacaataaaaaatgacaaaggggatatcagcaccgatccacagaaatacaaactgccatcagagaatactacaaacacctctacacaaataaactagaaaatctagaagaaatggatacattcctcgacacatacactctcccaagactaaaccaggaagaagttgaatctctgaatagaccaataacaggagctgaaattgtggcaataatcaatagtttaccaaccaaaaagagtccaggaccagatggattcacagctgaattctaccagaggtacaaggaggaactggtaccattccttctgcaactattccaatcaatagaaaaagagggaatcctccctaactcattttatgaggccagcatcattctgataccaaagccgggcagagagacaaccaaaaaagagaattttagaccaatatccttgatgaacattgatgcaaaaatcgtcaataaaatactggcaaaacgaatccagcagcacatcaaaaagcttatccaccatgatcaagtgggcttcatccctgggatgcaaggctggttaaatacatgcaaatcaataaatgtaatccagcatataaacagagccaaagacaaaaaccacatgattatctcaatagatgcagaaaaagcctttgacaaaattcaacaacccttcatgctaaaaactctcaagaaattaggtactgatgggacgtatttcaaaatagtaagagctatctatgacaaacccacagccaatatcatactgaatgggcaaaaactggaagcattccctttgaaaactggcacaagacagggatgccctctctcaccattcctattcaacatagtgttggaagttctggccagggccatcaggcagaaggaaataaaaggtattcagttaggaaaagaggaagtcatattgtccctgtttgcagatgacatgattgtatatctagaaaaccccattgtctcagcccagaatctccttaagctgataagcaacttcagcaaagtctcaggatacaaaaccaatgtacaaaaatcacaagcattcttatataccaataacatacaaacagggagccaaatcatgagtgacctcccattcacaattgcttcaaagagaataaaatacctaggaatccaacttacaagggacatgaaggacctcttcaagaactacaaaccactgctcactgaaatgaaacaaagaaatggaagaacattccatgctcatgggtaggaagaaccaatatcatgaaaatggccatactgcccaaggtaatttatagattcaatgccatccccatcaagctaccaatgactttcttcacagaattggaaaaaactactttaaagttcataggaaccgaaaaagagcccgcatcgccaagtcaatcctaagccaaaagaacaaagctggaggcatcacactacctgacttcaaactatactacaaggctacagtaaccaaaacagcatggtactgggaccaaaacagagatatagatcaatggaacagaacagagccctcagaaataacgccacatatctacaactatctgatctttgacaaacctgagaaaaacaagcaatggggaaaggaatccctatttaataaatggtgctgggaaaactggctagccatatgtagaaagctgaaactggatcccttccttacaccttatacaaaaattaattcaagatggattaaagacttaaaccttagacctaaaaccataaaaaccctagaagaaaacctaggcattaccattcaggacataggcatgggcaaggacttcatgtctaaaacaccaaaagcaatggcaacacaagccaaaattgacaaatgggagctaattaaactaaagagcttctgcacagcaaaagaaactatcatcagagtgaacaggcaacctacaaaatgggagaaaattttcacaacctactcatctgacaaaggtctaatatccagaatctacaatgaactcaaacaaatttacaagaaaaaaaaacaaccccatcaaaaagtgggtgaaggatatgaacagacacttctcaaaagaagacatttatgcagccaaaaaacacatgaaaaaatgctcaccatcactgaccatcagagaaatgcaaatcaaaaccacaatgagatatcatctcataccagttagaatggcaatcattaaaaagtcaggaaacaacaggtgctggagaggatgtggagaaataggaacacctttacactgttggtgggactgtaaactagttcaaccattgtggaagtcagtgtggcgattcctcagggatctagaactagaaataccatttgacccagccatcccattactgggtcccaaaggactacagatcatgctgctataaagacacatgcacatgtatgtttattgcggcattattcacagtagcaaagacttggaaccaacccaaatgtccaacaatgatagactggattaagaaaatgtggcacatatacaccatggaatactatgcagccataaaaaatgatgagttcatggcctttgtagggacatggatgaaattggaaatcatcattctcagtaaactatcgcaagaacaaaaaaccaaacaccacatattctcactcataggtgggaattgaacaatgagaacacatggacacaggaaggggaacatcacactctggggactgttgtggggagggatagcattaggagatatacctaatgctaaatgatgagttaatgagtgcagcacactagcatggcacatgtatacatatgtaactaacctgcacattgtgcacatgtaccctaaaacttaaagtataataataaaaaaataaaattacatattataaaattcagtatatggaaaggtttaccaatgtgccaattaagatgggtcagttgattttcgcttgggttctgatagtctaacatttctaaagcagctaagcttaacagtgaatatagttaagattgtttaattaaatgttttgatcttgctaaacctaaacttcattatttaaaataaggaacagaaaaatatttttttttaattgcagatgtcttttctctcctcttttaggattttgcctaccattttacagtatttgtcttctattttggagcctttttattggaagcagcagccacatccctgcatgatttgcattgcaatacaaccataaccgggcagccactcctgagtgataaccagtataacataaacgtagcagcctcagtaagtattcatattcaatgagtaccattcaccagcacttccgctccactgtcaaggcctccaagaaactcctcaggcaacaatagttttcttcaatgctagccattggcattaaatatgtaatagctatttatctgtacaataaccttgtaagcaaagtgccatgatcacccccagtgttgtggatgattaaactgtagcacgaagaggttgatgttcatgtaagatcatagcaagccagtaggactgcttggctttgcacagcagtgtctactttgcaaaaagagttgtgttttttgcttctgataactttcagagatggtaaaggagatttccagttttgttctttagtattcaatagctgcttgcaatttatttctattgaatgaatagttactgtgggcctaccatttatcaagtaattttgctgggtgttgaggatggggtgaataagttgcagttcctgccattaaggaaagtgcaggtgagaaagggaggcaaatatgccagccattgcagtagatgataggcagatgaaatatattccttggggtatttattaaattttttaaatcatctttaattcgtatactggagtgaatttgtcattttgtgtagataatttgaggaaataatatattatttttgttgttagagatcattgttaagatgtcagaagtccaaattagtttctgaaatattgtgatatttaatataagtatatggcaagttagtgaccctaatgttttattatgttccccaggtagcctataaataacccagtactcatat

SEQ ID NO: 450 - DNA, 21989 bp, Homo sapiens
  source 1..21989: mol_type = other DNA
aaacacgcccatggccgccttggcgcgctttcaaacgctcaggtttcctaccttccggctgcttgggaacttctttcttgcccgccaagcccgcagccacccgggcgcggcgggactcctagacccggcgctgcgatgaagaggacccgcgacgaggtggatgcgacgctgcagatcgccaagctgaatgcggccgagctgctgccggcggtgcactgcctgggcttcggccctggggccagcggcgctgcagccggcgacttctgcctgctggagctggagcccacgctgtgccagcagctggaggatggacacaggtgagccctggtcacgcggcgcccccagcctctggccggccacgttattttctcagcggggaaagtcgggataagaaaacagggccagagagatgcactgacctggccgggggctcatagcaagctgcctgttcccgaggagtccacgcctccggtgggccgtccagttagctgcactgcggtgatgagtagcactggtccagctgaccttggaggcatgtgtcagcgggagcaagtcaggaaatactaatacaacctccgtgaagtttttgaagagttaccggtgattacagggactctacaggacacctgtcactctaccttaaaatacagtggtgatacccaatgtttatagaactcttgccttccacttatatttattttactcagatgatagataggaagtgctgggaatcagcttacagacttggtaattgggtgagacccctacccaccccgaagcaaacttgcttagtagggatctgaagctgtttctaattccaggtcagatacaaacttgctgcaagatcattgattagaagtcgaagttgaggtagttttttaaaggcagtcttgagaagtctagagaatcgttatatccctccaccctgtgcagccccagctcctgcaaaatagggagctccagcttgattctcttttgcacaattggtcctccgacacctatattttattaggctattttttctcttttttcttaatggaatcctttaggctgtctttcagttttcgtactttgcccaccaaagagtgttagagtaaactggccattcttcagatacctgctatatacctcaaagtacctttaagggaactgaaagaacttcactagtctgtttccatcccggttcagttggtggagagttgagaaaggaactcaggtgtgaggactttctctcggtccagttctagttaatctagctggcaaaaacaaaacaaaacaaaaacaaaaaaataaaaacaggccctggaaacgtgtgtttttaattttggggtgtagggagtgatggtataaacaaaatatttcaaagtgggggtagtgcagttagagaaataaatgttaaagactaggtacttgggcctattaagcattattagcattaggaatctaaaaaaccttttattctttttacttaaatgaagacttagtcaaaaataaatacacagtctgctatttcaggtttcttattatttattcaaaagaaacgagttgtgcacaggagaattaaatgctttacagacaaggaaaactgctagaaccaactcccctgtcattgccatcatctttgtctttaatccttccttttcctccgcttcaccttcatcctttcctcttccttcttttttctttatcttttttttggggagagagtggtgggaacagggtctcactctgtcagccaggctggagtgcagtggcacaatcacggctctctgcatgatggtgccatgactacttggggtcaggcgatcctcccaccagcctcctgagtagctgagacttaaggtgtgcatcatcacacccagctaacttttaaatttttcttttgtagtgatggggtcttgctatgtttctcaggctggtctcaaactcctgctctcgagcgatcttctggcctcagcctcctaaagtgctaggattacaggcatgagccactgcgttcttgcttttcttcaaaatccctttgtcaaagtctttggtttagtacagtttttaaacatatccttttcatatttttcattcaccactgcatcctttttttcataaggtcccaatttttttgcaacacaacttatggttaggccaggatgtgctcctttgattgtgagggggtactcagaacaaaacaaggacgacacttgggtggggtaccatgagcagcagcttggccttggcctttcttcgggaacttgttagaaatacgggaccctgggtcccatcctagacccagtgtatcccactctgcttttgaacaacactctctaagatgcctatgcataaatttgagaagtaccactttagcatgttgtagaaaattgagacagcttgactgaagcttcaggatgctttgtcttgtgttctttccagcagtttgcacaagatgccatgtagtgccatttggcctcttggcctctatggatctgtcttgcccatctttaattatttttccttaatgaggctctgggtggggcgtctgtgtggctctcagttggcccaatgcttgctgtgtggaatccagcattgtgctagcagggggcagaggcagcatcaaaacttaattctaagttctgcaagcctagagggtttgagaactgtttatgatgaaaatggctactggattgtcaataaactatatatttttcccccattttgctacagtcttgtgattcgtggtgataaagacgagcaagctgtgctgtgcagtaaagacaaaacatacgacttgaagatagcagacacttccaatatgttgcttttcattcctggttgtaaaactccggaccagttgaagaaggaagattcacactgtaacattattcacactgaggtgctcttttctgtactctgatttataaaagtctgagaatgaaaacagatatggtaatttgatctttagttaaaaagtttacgtgtaaaatctataatcagggagaatctaagaagttctttaaagaaatttgaatttctcagcattattattattattattgcttgtttgttggagtcttgtgaacttgtctgttttttcctgttttgattttcaagtcccaatttgatcttttttctataatgtgcaaagtttgttattcaatgagtcattctaaaaattctacccatttttagtagattttgctgtggatgtgttttgaaaggagactccctcagaccgtaactggttcatttggtaatatttatgaggtggagaaatgaagaaatttgggccaggtgtggtggctcacgcctgtaatcctagcactttgggaggccaaggtgtgccgattgtcggacctcaggagtttgagactagcctgggcaacacggtaaaaccctgtctctactaaaatgcaaaaaaattagccaagcgtggtggcgtgcacctgtaatcccagctacttgggaggctgaggcaggagaattgcttgaatccaggaggcagaggtttcagagagccgagatcacgccactgcactccagcctgggtgacagagcaagactctgtctccaaaaaagaaatgaagaaatttgagtttttgaaggaagtgtgtttcttagctttgaagttggtttagttcattaatatctgtagccaagtataacaaacttttaattattttggagaatattgatggcagtaaccaaacaactgtctaagttgttacatatataaaacagtaactaagttcttacatatataacaatccaagcatagcccttatttctttgggaatgactttaggccaactatatccttaaatacagaattggagaggaaagaagggaaaatgctgggaagctccagtgattcatatgatgttactagaatagaggaacatccagtaaatatactaggttggtttttgtaggttttaagtctttcattgtaattaactaaaaatattggcagttcatcctattgtaaaaaagtgttattttttcatcacttatctgttctgtaggtgtttttgtgagggcataataatgtctatgagaatctttgagctcttgcttgttatggaaattctatgtactgagattggctaaaacttcaagatccactaaccaaagccataatccgtgattgaacctcagatgcttaaaggggttagatgagaaataggctggggttgataaatggtggtagatacccaggagtaacggagtggttgggtctacagcaaattggaaagcacagtccccaagtaggtggacggccactactcagctgccttgtgggaaagtaggcccagcgctgctagatttttgatttattttttccaagtaattcttgaaatttagatttttggggtgaaatctcctaattttttaaatgttggcatctaattgaaacactatgccaaacctcccccagcacacaaaagcataccacaatatctgtgtattggacgtagccagaaggctgccatttttttgttttgctttgtttttcctgagatgacaataaaacagcaaaccacttttaactatggataaaatcagtctgtcagatttggtccttaagctcttctttgggaagccttagattcagcaacatctccttcaggctctaggcctcatcttgtcaatcaagccttatcctagcttgaaagtagaagcatcccctgtccttccatttcagagttggagggcatcccaaagataatccagttgagccttttttcttttatgaaacacttgttgggcacctactcagagctaggaactaggcaagtcctgtaagtgcaggcaaggataacagatattcatccattctctagcctcttatcaactggattttgagtggtaggcctctcactatttcacaaatcgaacagtggaattagctgcagttctaaacattagaaagatcttgtattaaacagaaatctctgtcccttaacttctgcctcatttcaacgtgagcaacacaccccctcttccctttaatgtccctatttgaagactataataccttttctctgttttgtttttttgtttgtttgtttgttttttgcctaagtatattcatttttagttgtttccacttggtttggagaattgtcaccatcctgtcattttttctgggcatactctagttttcagagtacatttgagatgtgacattcaattattgattcttacaatgttgacagtatcttattaaggggatttgaaaagatgttcttgaggatgcccatccatctagttgagatggctggataaataccttcctgatacaaagcagaataccttggagcttcctttgtacttgttgagggggcagattgattagttgtaattttgtatgaaattttcctttagaatggcccctaaaaggttacgatatatataatttctagatctttggtttttctaataattattgggaattaagaagacgtagacccaagttaaagaagctaaagaaacttttgatggaaaatccatatgaaggacctgacagtcaaaaagagaaggattcaaatagctcaaaagtaagacttattttcacttttttatttggaatttaacaactataatcagaggcacttaatagtcacattcttactttttaaaatttatgttatatagctgttataaatgcttgtgttaaaaaagttataaaatttcaagcacaccccaaagcacacatagtataatgacccccatatatttgtcattcacttgaacaattaatgtcttgtcagtcttctttcttctatcccctttctatccttccatctttttaatttttctagagtattttaaagcagatcctatatatcataatgccatttatatagctaagagcttctcatattcttaactttgaaataatagtttttttagaggtaaaaaatttatttaattaaaattatgactagatgctcttgagaggggacataatggaagctattcttactccagtgtcaaaattaactaattcctgaaagtatggaaaaacataaacaaagtaaaaaacagttttaaaatttttaatttaaaaattacagaactctactggtatatgaagaccatgtttgtactagaagttcccttttttcccaatggactctttctaaaaatttttttggtaacagctttattgagatataattcacataccacacaattcaccagttttaaagtatgcaattgaataattttttgtacattctcagagttgtgcaaccattaccaccatcaagtttagaacatttttataaccccagaaagaaaccctgtagcctttagctgtcaccttccagtaccactttcttctctcccctttcccctaggctaccactaataaactttctgtctatatagatttgcctattctggacatttcatataaatggaatcatataatatgtggccttttctgactagcttctttcacttagcgtgatcatttcaaggttcatttatgttgtagcatgtatcagtgttttgttttgttttgtttgcagacggagttttgctcttcttgcccaggctggagtgcagtggcgcagtcttggctcactgcaacctctgcctcctgggttcaagtgattctcctgcctcagcctcccgaatagctgggattacaggtgcatgccaccatgcccagctaattttgtactttcagtagacatggggtttcaccatgttggccaggctagtcttttttttttttttttttttttgagagggagtctcgctctgtcgcccaggctggagtgcagtggcgcgatctcggctcactgcaagctccgcctcccgggttcacgccattctcctgcctcagcctcccgaatagctgggactacaggcgcccgccaccgcgcccagctaattttttagtatttttagtagagacggggtttcaccgtgttagccaggatggtctcgatctcctgacctcgtgatccacccgcctcggcctcccaaagtgctaggattacaggcttgagccaccgcgcccggccggccaggctagtcttgaactcctgacctctggtgatctgcccacctcagcctcccaaagtggtgggattacaggcatgagccaccatgcccggctgcagtgttttattcctttttgttgctgaatagtatctcattttatggacatactcatattttatgcattcatttgtcagctaatagacatttgggtaacttctactttttggatattaagaataatgcttctgcgaacattcgtatacaagattttaatgtggatctatgttttcatttttcttgggtatgtacctaggagcagaattgatgggtcatgtggtgactctgtagaagctttcaagctgccgtactgtttccagagtggctgcactattttccattgatgttgaacatcttttcatgggcttattgacgatttgtatatctttggagaaatgcccattcggtttctttgcctgatttttaattatttatctttttattactgagttgtaagcgaattctttagatagtccagatacaagtcctttatcagatatattatttgcaaatattttctcccattttgtgggttgtctttcgactttcttgcttttttcaattggagtaaaatatacataacataaaatttaacatttttggggttgggggcaatggttcacacctgtaatcccagcaatttaggagggcagggtaggaggattgcttcagtccaggagtttgagaccagtctgggcaacatagcaagaatctgtctctacaaaatatttaaaaattagctggggctggctgcacacctgtagtcccaggatgaggtgagaaaatcgcttgagtccaggaggtcagggctgtaagtgagccgtgatcacaccactgcagtccagcctgatggcagagtgagactctgtatttaaaaaaaacaaaaacaaaaacaaaaagaggccaggcggggtggctcacgcctgtaatccaagcactttgggggaccaaggcgggcagatcacctgaggtcgggagttcgagaccagcctgacctacacggagaaaccgtgcctcaactgaaaattcaaaatttgccaggtgtggtggcgcatgcctgtaatcccagctattcaggaggttgaggcaggagaatcgtttgaacctgggaggcagaggttgtggtgagccaagatcgcaccattgcactctagcctgggcaacaagagcgaaactccgtctcaaaaaaaaaaaaaaagaaaaagaagaaaaaataaaatttaccattttaaagtatacagttcagtagcatcaagtacattcatagtggtgtgcagtcattagcactatccatctctagaacttctccatcttctcaaactgaaactctgtacttgttcaacaatcactcccatttcccctgtcccctcagcccctggcagccaccattctactttctgtctctctgaatttgactgctcttaatacctcagataagtggaatcatacagtatttgtccttttgtggtgatagtgttttgaagtgcaaaagtttattattttgatgatgtccaattgatctactttttcttttgttgtttgggtttttggtgtcatatttaataagccatcacccaaacccagtgtcatgaagatttacctctatttgttttctaagacatccattgattttgtgtagaaatcattacatgttaacaaaagaaactgagctagtgcataaatattgccttaatctgttctatgtatttattcctcaatattcagcaagaaatctaaaaacaaaatattcttcaaaggccttaaaatatttttttctttttgcagtatacaactgaagatttgcttgatcaaattcaggcaagtgaggaagaaataatgacccaattacaagttctaaatgcctgtaagattggaggtagcgttacttactactattttaacaatgatgaaattgggcatcataagggagagaagtttttggacatcttcaccctactgcgtatagtttatttaatattcttttgggtttaaggatggtgtcatttgggccgggcgcagtggcttacgcctgtaatcccagcactttgggaagctgaggcgggcagatacttgaggccaggagtttgagagcagccttgccaatgtggcgaaaccctgtctactaaaaatacaaaattagctgggtgtggtggtgcatgcctgtaattccacctactagggagggaggctgaggtacgagagttgcttgaacctgggaggcagaggttgcagagagctgagatggcaccactattctttagcttgggcatcagagcgaaactcttgtctaaagaaagaaaagatggtgatatttgtctttcttgttgtaggatagagatttcatctttacatgaggtcaatctgctaccagtgactttaatcacactttgactccttccaatttttttgaattaggtggtaaaggaagaaccatgttagattaagaaaggtccaagctgggcatggtggctcatgcctgtaatgccagcactttgggaggccgaggctggccgatcacgacgtcaggagtttgagaccagcctggccaacatggtgaaatcctgtctctactaaaaatacaaaaatcaaccaggcgtggtggtgggtgcctgtaatcccagctactcaggaggctgaggcaggagaatcccttgaaactggaaggcggaggttgcagtgagcggagatcgcgtcactgccctccagcctgggcgaaagagcaaaactccgtcaaaaaaaaaaaaaaaaaaaagtccttagacatcaaatagtctaatcttttattttttataactggtgaggaaactagggcctaggaagggcaactaacttgtccagggtacatgtggagttagtgacagcatatggcatagaacccaggtccttgaactcctagcaaaattaattttttttcttttggatggagtctcactctgtcacccaggctggagtacagtggcgtgatctcggctcactgcagcctccgtctcgtgggttcaagtgattctcctgcctcaacctcctgagtagctggggttacagtcatgcgccaccacgtccagctaatttttgtgtttttggtagagatggggttttgccatgttggccaggctggtcttgaacctctcagctcaggtgatcctcctgccttggcctcccaaagtgctgagattacaggtgtgagccacggtgcccagccctaaagctttttttttttttaaaggcaaatgaaaccatgcattttaatgcagccctctgcattattaacttgcagcatggggatggatacaatttctctagggggatgcgtagattacttcttgctttcttcctcagttttacatcacacaatccattttttaaatgttgtctttatgttttcagagtaagaatagaaacattctcctttagaaatggtggatgtatacttttctttctctggggtggtggtcgtgccatcaattataaaatggcatttcatggccaggcatagtggctcatgcctgtagtcccagccctttgcaggccaaggcaagtggaccacctgaggtcgggagttcgagaccagcctggccaacatggtgaaaccctgtctagtaaaaatacaaaaaacttggccgggcatgttggcgcatgcctatagtcccagctactcaggaggctaaggcaggagaatcatttgaacccgggaggtggaggttgcagtgagctgagatcgtgccactacgcctccagcctgggcaacagagtgagactccatcacaaataaataaataaataaataaataaataaataaataaataaataaataaaatggcatgtcataatctctcacaggaataggaaagggatctttatgaagcccagcccttaacttggccctcatccacattgtacctcagagtctatcatctctttggtgagctggacttcttcatgagtatagaaatgcctctgcaagatagctctgatgagagttataactatggtagtgcagcacagcagagattatcatgaatattgaacctgtgaccttcacctcatttgtatgacattctaatgaaatgactgtaccaactgcagatttcctaatttctgtttggaatgacaagattattgtgagataactgaatgtcaaagcactggagagagggggtgccatggtatgtgcctttaatatcccagctactctggaggctgaggcaggaggatcatttgagcacaggagtttaagaccagcttgggcaagagtaagaccccatctctaagaaaaaaaaaaaaagaaagcacttgagaaaagctagtcatatgtaaagtactcttgaaaaacaacttgatctccctgaagacacagtttaaaatgattgggagaaaagcttaaaaagaagcactgtttatagaaagtgaagacttttttttttttttttttggagacagtctcaccattgcccaagttggaatgcagtggtgtaatcttggctcactacaacctcggcctcccaggttcaagcaattctcatgcctcagcctcctgagcagctgggattacagatgtgcaccaccacgcccagctaattttttgtatttttagtcgagatggggtttcactatgttggccaggctggtctcgaactcctggcctaaagtgatccaccagcctcggcctcccaaagtgttgggattacaggagtgagccagcacgcccagcctagtgtctcttttttgcagtgagcaaaagtatgctgtgactttgtcaatctattagctagtttacataaaatgttctttgggccggcacggtggctcatgcctgtaatcccagcactttgggaggctgaggcgggctgacgatgtgaggtcagaaggtcaggaccagcctggccaacatggtggaaccctgtttctactaaaaatacaaaaattagccaggcatggtagtgcgtgcccgtagtcccagctgctcaggagactgagatggcagaattgcttgaaaccaggaggtggaggttgcgatgagctgagatcacgccactgaactccagcttgggtgacagagttgagaccctgccttaaaaaaaaaaaagttctttggtaaatataacttttgaaatttgtaggttattggaggattcttgaatttgattatgagatgaaacttctgaatcatgtaactcagcttgtggattctgaatcatggtcttttggtaaagttcctttgaacacatgccttcaggaactcggaccattggagccagagtaagtattttaatttcttgtctatccagatttccttaaggggaagggagttgttttacagattggaattaaacccagggcataaactacaatcattgtattttgatatctttgagaaatgtttacaattacaaccgaagaagatttgggaattttggtcactggggtgaatacatgtgcattatcttgtttgtttttggccataaaaatataaagaaataggctgggcgcagtggctcatgcctgtaatcccagcactttgggaggccgaggcaggtggatcatgaggtcaggagatcaagactgtcctggccaacacggtgaaaccccgtctctactaaaaagtacaaaaattagctgggcgtggtgccgtgtgcctgtagtcccagctgctagggagcccgaggcaggagaattgcttgaactccggaagtggaggttgcagtgagctgagattgcgctactgcactctcaaaaaaaaaaaaaaaataaaataaaacaaacaataaataaaggaaataatatgtttgagctattttataataataaatttatgcttacataattgatgttaaaatgtttagcatggggcctggcacatagtagcttcccagtatattttacttagttcctaatttaaataaaataatatttggcaaccaaaatcacttagtatttgaaatctcaaatttctttcttaattttgagttggcaatggggttaaaatatagtgcataaaaatgcttataacttttcaagtgggtgttttaaatttttcagggaaatgatagaacactgtcttaaatgttatgggaagaaatatgtagatgaaggtaagatttggaaagtattctcatttaactcttatatgttaaaactggcatacctttctaaagcctgtcggtgttaaaaataagaactctggctgggtgcagtggctcacacctataatcccagcactttggaaggctgcagtgggtgggtcgcttgaacccaggatttcaagaccagcttgggcaacatgataaaatgctgtctccacaaaaaaaaatccaaaaattagctgggtgtggcagtgcatgcctgtagtcccagctactcaggaatccgaggtgggaggatcacctgagcccggggaggtcgaggcggcaatgaaccttcattgtgccactgctctctggcctaggcaacagagtgagaccctctctctcagaaagaaaaaaaaaaaaaaaaaggccagtgcagtggttcacgcctgtaaccccagcactttgggaggccaaggtgtgcggatcacctgaggtgtcaggagtttgagacaagcctggccaacatggtgaaaccccatctctactaaaaataaaaaaattagccaggcgtgatggcacacacctgtaatcccagcttcctgggaggctgggacaggagaatcacttgaacccaagaggtggaggctgcaatgagccaagatcacgccaatgcacgccagcctgggtgacagagcgagactctgtctcaaaaaaaaacgaactatggggttgtcggaagtgagtttaggtgtataattcctttcaagaaactgcagcaaagaaaaggaaatgttagtataatatttaattgtaagatgataatatgaaaatatctgataacttttccttaggcgaagtttattttgagttggatgctgataaaatatgtagagcagcagcacgaatgctacttcagaatgcggtgaaattcaatctcgctgagtttcaagaagtgtggcagcagagtgttcctgaaggaatggtaactagtcttgatcagcttaaggtaatagcaatagacattgccaccttacttcaacagttgattaattactaggtgaatgatacttgagttggagctgaatttggaaccaatttcttttcttagacacccattaggagtgcatgtacatccaatccatcacatagtccttaaaacccaataaagtattggggtataatttacatattataaaatatacctttaaaatatttttaataattttaaaataagttgctctcactacaatacagttttagaacatatctatcacctctacaagatcgcttgggtccattttctgttaatccctcttcctactcagtgtatctcattttgttccgtttctcaccatttccatcacccctctcctagtccaaactaccttgattttctgcctctaaacagcaatagcatccctgggcatgccccttgcacttttaattttgctcccttccaatccattctctgtgacgctactagaatgatcttttgaaaatgccagtcagaccaagtgcggtagctcacgcctgtaatcccagcactttgagagaccaaggcaggcagatcacctgaggtcaggagttcaagaccagcctggccaacatggccaaagcccatctctactaaacatacaaaaattagccatgtgtggtggcaggcacctgtaatcctagttactcgggagactgaggcaggagaattgcttgaacctgggaggcggaggttgcagggagccgagttcatgccagtgcagtccagcctgggcgacagagcaagactctgtctcaaaaataataataataataataaataaataaataaatgctagtcagatcagatgaatgtcctgcttaaatcattttatttatttatttatttatttttgagactgagtctcattctgtcacccaggctggagtgcagtggctcaatctcggctcactgcaacccccgcctcctgggttcaagggattctcctgcctcaggctcccgagtagctaggattactggcacccaccaccacacccagctaatttttgtatgcttagtagagacggggtttcgccatgttggccaggctggtctcgaactcctgacctcaggtgatctgcccaccttggcctcccaaagtgctgagattatagatgtgagccactgcacccggccttaaatcagtttaatggtcacctactgcactcaggataaaaaactcagaattcatgtcttggcctataaggcccttcaggatcaccttcatagcttcatctctggctacttcccttctgctcactgcataccaaccctctttcaggttttcaacatcatcaagctctcacctaccttaggaccttcacacaaagctttttgttctagaatgatattctctctaatttcatctggtcacctcctgctcatctttgagtcacttcaaggaggccttccttcattctctgcttgaagcaaagacctctggttttactctttgatagcacgctattctttccttcatggcactctccccttagcttggaaaaatgtttatgtggttcaccactctctactttgatggcattttgtttgctgttgcttgctagtatgtagcatactacctggcatgtggcgtatacttggtaaatattttgttagttaaatgaaaagatttgcttggtatttatggagttctttttatgttgaggcaccatgctaggtgctcaggagaaatgtcataccaggtgtcattatggtgcttagcctgggaactggcaatgggggagacatattacatgcataaatctgttcttacaatgcagagtgatctacgccatgggaaaggcatgcacacgatgttatgagaacaaagaaaaggggcttagccatcagactggtcaatcacggatgactttctgacggaatagacgttttagctgctgagtatggaaagatgaactgttgctctctagatggagggaaagccagaggtggaaatctaggagagcacggtcaaaggtggggggcaaataaaaattaaggcactgttgtagggatgcatgggctggagtaaaggatgcttgtgaggtaaggacactgtggactgcgctaaggactttcaactctttctagaaagctctttgaggccactgagtgacatcagttagagaggttacctcatcaggaactcatcagtttggccttttgaaaagaatactatgacaataaacaagatggacagacggaaggttggttagattatgaaaaaggattactgtgcaggctgtcaacacatatgctcccaactaagagagtactggctaaagagataggtaatgggggaatggacagaggaatcctgaagccttaacacctattatatagactttagtgaccacataggtgtggggtttgactaatggaatcaaagctgatgcctcagtttcctgttttcctaggatagtggaactagagcaggtttggatgataaatgagttcatgtatagatttggatatagaggtctgggactcaagagagacatctcagctgaagatataagtattatagtcattagcaagtaagtggtggctcaggctacaggtttagatgaggttactcagtagagtgacagtgaagcaagtggagtggttgggatggaagcctcagggagctacaacatcaagttacgaggaaaataaaaagactgatgtcagggatggagagatatttaaaggaggaggagtaatcaacagtaacgaaaatagacggctagggactgggcacagtggctcacacctgtaatctcagcactttgggaagttgaggtgggtggatcacttgaggccaggagttcaagaccagcctaacctacatggtgaaaccccttctctactaaaaatataaaaattagctggatgtggtggtgtgcacctgtagtcacagctactcaggaggcggagtcaggagactctcttgaacccaggaggcagaggttgcagtgagccaagactgtgccactgcactccagcctgggtgacagagcaagactctgtctcaaaaaggaaaaaaaaacaaaatagaaaatagagggctaacacgatgaatccaagaaaagggcccactggatttggcaatgacaggttactggtgacctttagaaccaaagctgtcttgatagactgctgatggtagaagccagattgcagaggaggaaagaagtcactgcttaaaggagctctttgtatgaaaaaggcgattgtaaatctctggatagtttaagtttcatgtagctgacattttgaatatcttgagctaagctaaacctaaaggtaaaagaatgagtcatgtttaaacattacaacattactttaactgctctgtttcttctcatttcttgtagggtttagcgctggtggatagacactcgagaccagaaatcatatttttgctgaaagtagatgatttacctgaggataatcaggaacgttttaatagccttttctctctaagggagaagtggacagaagaagatattgctccatatattcagtaagtaatttattaaagacggattttgagggtcgttctttttatagtcaatggcacagcattttagatttatgattggaacacaattttcttgagtattccctgaggatactgcttccctagaaactcttaggtggtggctgtcttctctgtcctccataattactgcttctggaggtggaatatgtgttatctctgttcctcactattgcttctaaaaccacttctctgctctcattcctggaaaactgtcccctttgagggacaaaatacaggccctactatgactctaaggcaaacacccatctctgattgccacctcatgccttactttatttaacattttgggagaggccagattgcagtagaacacgttagccccaaagtcacttcttacaaaatcttgagtcccctaacgcttgaaatccactaacactacaactttgtcactgcatcacacctctcaggtgctctttcttctctttacccagctcgaatcctgtggctggccttcttagctcttactgtctacactttactcctgtggccctctctccctcttgccatatctccctggcaaaaagctaaaaagattagactcaactttctgcttaccctgtgcctacacgtggccagctgaaactttttggagaatacacaatgaagctgccagtcttgcttaagaacctagtggtacttacaacggcccctcaccaggcatgatttgctcatgaaacttctctacccttggagcttcttctacatcttcttttcctttttcataccagcagtaccctctctttccttttatgatcttatttttttcagaacatagaagcagtgaggccagaacaaccttctttcccactgccaaattggccaacctcctcatgtgtacacctacttcctttgcagtcctgtgtagtgtatgaattgtccctgctcctaaggccaatccttctgcactaggtctatctcctctgccttcttaaagacttggatccttgagttatccctttcatcccttgagttattaatgtctccctcttctggatcatccccatcagcatacaaaattctgtaatattgcccatcttgcaagacaacaatagcaacctactggaccctatgtcctttgctctccttcataagaaaatgccttttacaagtttcctatactcactctatgcttttcacctcccattctttcctttacccaatgacatcttcttaatccaatgacatccatctttctatactcaatggttaattatttgtccttgattacttgacttagcactatttgacagtgtctgcttcctcctacttgaaacacaagtttctcccctcttccttggatgagaggggagaaaaccatctcttttgttgatgtctccctgttcttcttctcaatctctaaatgttggagtgctccaggtctatttttgggccatcttctcttctgtttatacttttcctttggtgccctcatctaggcctggaaacaaatttaatgacttcctaattccatcttcatacttgcccttttccctgaggtccagattcctatatctagttgcttaatttacctttccagttggatatccaataggaatttcaagcttaacatgttcataacagaactgttgcttctccctcatccttaacacagttaacagcaccactactaatccagttacttaaactaaagtctaggaatcatccctgtcctttctttcccctaccttctggttcaaactatgagcaaaccctgatggatcatcttgtacctgcctctgaattggtctccctgttctatttttgcccccttctcctttctccttcttatactgtttaaatattcaaaaatgacaatataatgagacctccatatatccactgctcatcttccataatcgtcaactcattggctcctttatttatttgagacagagtctcactctgttgcccaggttggagtgcagtggtgtgatatcggctcactgcaacatttgcctcccgagtttaagggattctcctgccttagcctcccaagtagctgggactactggtgtgcaccaccatgcccagctaattcttgtgtttttagtagagacagggtttcaccatgttggccaggctggtctcaaactcctgacctcaagtgatctgcccaccttggcctcctaaagtgctgggattacaggcatgagccgccgcgcccggccacctccattatttaaaacttagatcacattgtacttttccattaattaaaacactcctagttgcttcccattatatgtagaattaagtcacaattctttttccctgtccttcaaggttctacgtgatctagctgttgccccttctctagctcacgtcctcctattcctccctctccttattatgttccggtcgtaatcttcttctctttgaggtacagaagaggaaaccaaagttcaggaagcattggtaacctagacaagttcacacaggtaccttgtatccaggttctctgactctaggccctgctgtgtaggcctcactgtattacactgcttgtatttctaatttagaggctgtgtcatataatagaaatagcatagactttgaagttgtacaaacctggtggcaggatttgactctcatttattacttgtctgagccatagttctcatatctaatatagggttaaataatacattatttctagtttttgttttttgcttttttttttgtttgtttttttgagacagagtctcacactgtcactcaggctggagtgcagtggcgcgatctccgctcactgcaacctctgcctcccgggttcaagcaattctcctgccccagcctcccaagtagctgggataacaggtgcccaccaccacacccggctaatttttttctatttttaatagagacagggtttcactacgttggccaggctgatcttcaactcctgaccttgtgatctgcccacctcggcctcccaaagtgctgggattacaggcgtgagccacccgcctggcctactcctacttttattgtgtgggttaaatgagacaatacatataatgtacttaatttaattaaaacttagaaccactccccaccctatctctcccacaaacacctacacttacgcttgttgagaagacagattcagggggagagagagaaaataagtacatagtactgtatcataatatgttccctaaaatattcatgttatatattttttattgttcctacagagatttgtgtggagagaagcaaaccataggtgcattactcactaaatattctcattcttcgatgcaaaatggtgttaaagtttataattcgagaagacccatttcttaaaagaacaacggtcttttcttcaggactcaagttgctttataaagttgctggatagaagaaaaataacttgtacttttatttctgacttttagaaacctagtcttctaaggcatttttctcctcatcttaagcattttgaaactactgttatttcttaaatgttataggatgtagctttaaaattatatttgtactatgtacacagtgtaaacaaggacaaaagaattctttcctatattatgtctgaggtctctatgatttatttaaagtttggctttttatatttaaaatgtcatttctttacttaggatttgatgttctaatcattaatacacttaagttttccagagaactaaatagtaatagtttcatagaagagaactatttattcacttaaatatcatttctcaagtgagtgagttcccctctacttttagccttccacccaaactggaagcctctaggtgctatcaattatttatatccatcgtttacatccatgaaattggctgaataattactcctctgcctggcgtagacatgcgctttgggaaaaaaacgagtttataatcctataatgaagaatactggcacaggcaatgctcactcgaaaacttcaagtaatttctagttggttttggaatgcttgataaagttcctttacagctttattttcctgatttgttttggtttagatcaaagttcaaattaattttaacttagctaatgaactcatcaccaggacagttggagggggtaggccgaggttaaatggtccacgtttcaaaaatgttaatggctaatccataattaaagaaggtttaactgttactgaagtttacaagttttattgtcatgaacatgaaatacaaacacgatggcttcgaaatgtctttcaataaatgtttctgcatttatatggattatatgatatatatacacagtctatat

SEQ ID NO: 451 - DNA, 32742 bp, Homo sapiens
  source 1..32742: mol_type = other DNA
aaatgcgtcatagcgcgcgtctgtttggatgtggaagccgagacctaaagttggggggtgatctctgaggagatggatcggtacctgctgctggtgatctggggggaaggaaaattcccgtcggcggccagtagggaggcagaacatgggccagaggtgtcgtcgggtgagggtactgagaatcagccgggtaagcgctgggatgagaaagagcgggaacggcttgtggagaggggaagaagtttgagttttgtgatcaagttctgctgaagagggatcaatatgtagttgtcccacgaagctgggactctatctgggatagagttaatgagggctgcaaaaatagcatcttcatggaaaaacagggacaaatttgtggatgcaagattccagcccttagaagttcttggcatagtaaatgtttaacttaataaattttctatgccttagtaatggaatttcctgctttttggaaatatatgcatttattatttctgctcctgtgtttcacatgcaaataatacggaaaggagcaagatggacaaagatcttgctgtcctacaatttacatctaatgggaggagacatcccacatataacctaagttttaaaaacaaatgatgaattttaaatgattttaattgtttgcgattgcactgctttttggtgcacccgtctagattcaatattgcattttatgtgttcatttgtttcgatcaaacaggcattttgaggagtaaatgtatgtggttgtgtataaggtattgtcacagaatttcccttctctttaaaattattcttttgaggggaattttgcattcgtgctaactgactggcatgtacagatcgggagccttttctattttctctgattgctttagattttctgtatcaaaacttgaacagatcttgagcagcgtttagtacttttatgtacaacctactggtcttgagagtctctgatggtgaaattggactaagttagattatgtaaatctagagccctttgagttagtctatcttttctttttcagacttcacagcagcaaatgtttatcacctcttgaaaagaagcattagtgcttcaattaatccagaagatagtactttccctggtaagtataataaactcctcttttctctggcacagcatttgtactggaaattaacttaattaatttggaccctaaggagtacaaggaaatacttcttgactgtgtacaaggcactgagttacagagataactaagggagtacaaaactgaaaaataaattacccctttcttctagatgcttgaatatagtaaagttatgaaaattattctaggttctcagcttgaattttgctccttttatgaaattttcttgcctatcttagttctgtataactaaggggagtgtggctttatgaggatgattttatcatgagtaaaaatatgtaaagctcccacacggatttccttaccatttatttatttatttatttctgttcttaattacctatttctgttctgattctcttaaaagtacttaataattactaaacacgatgagcttttctcagttcttatctgctttgactttttgaagtatttcgcttttttgaccaaccgtactttgtaaaaatctttcctcctttagcttctactggcattatacaaatgcatttactgactttgatagttatcttttcttttattcctgcttcttgtcctttactggagaatgtcctttaaacgttctgaaaatggagatgccaaaacagaccaatacctaaaaactgaaggaagtttctttccatgcaaggaagggtctgctccttttgataattttgtagttcccgtgactgtacaatctgcacctttctcttctttcattagagaacctcttgtctctcggtgtcaaataacaccattggggaatgatttctaatatgtgtatgctactctagcttgttttccaaggcctagtaatactcattaattttcaagttggtataattttagtcaataccactattattgcaggaaagattttctttgatttgtacctcaaatgtatatgtaaaagagctcttgggagtattccaggggttctcatgataaattttacttcccccttgcgtgtttagggtttcttatacacacggtccttgttttgtatgatagtgttgttctttataattgattgtgcaaagcaatcctaatataatcaatgagaaaaattagaattgtcccatgacctttaatatcttttgtcaaaacattaaaaattctcttactgttataaaattttatggaaataaaaaaatagtaaaaataaaatttattttgtaccctgtaattttaaaaccttaggtacattgagaattaaagtgttttatttctttgtaaaaaccttaccaagagtagtttgagcagtgcttgccaccttcacatcatcacgtaacttatgatacagaatgaacatcttttattggcgaattatcatattccagttgtatcaacttccaatgttttattcttcgattttttttttctttttttgagacagggtcccactttgttgctcaggctggagtccagtggctcaatcatgcttcactgcagcctcaacctccccggctcaagtgtcactatcctcctaccttagcctcctgagtagcagggactataggcatgagccaccacacctggctaattttttaactttttgtagagacagggtttcattatgttgcccaggctggtcttgaacacctgggctcaagtaatccacctgttttggcctcccaaagtgccgggattacagatgtgagccactgtgcccgacctggactttcaatgttgtgaaatatctctgagttcctttaatattaaggtttttgctagcctcattttctctgggacatcttcacctttttgatcaaaaggtgtttgtcacagcagctatttttagaactctatttacattagctttgaagattgctttcagtgttagcactttttgtttctttggtgtttctttatctctctctttttaaaaaattccctcatccatttatccatttttataaaatatcacatgggtttacactgggaaaccagaaggcaacacaattacatcctttgctacctgtgtgtgaactgaatggcacttgcacagtgaccaatcaatgacgtactttaaaagtagtaacatgattggttactgatcatgacacacatcttttatgtatacagtggttttgtagactgagaagcttgcaatgaagtcttaaactatgcagttatagttagtgaatataccatggtaactgaaatttgaaccaggttgttggggaactggtgttgtttaagctacagtaactggaatttgtgcatatcagaaccatgcaaatggaaactgcctgcgctgaatttcctgccatactaggattattgatttcagtaatatggcaagtttgagggacggaaagtacaatatgattataattgggataagggtggagaggtaggcatggctatttagaggattttgtaaatagtgtcagggtgtttggattttttcctaatggtaatcagcagccattaaaagctttaattaaggaggagacatgatcagatctgtgcttttgaggtattctccctgcagtatagtagatggattagagaaaagtatagctatttctgtactgggggattctgtagaagaccaaatgaggaatgggagaggcagccagggtggaggaaagtggatagatctgaaggaaattatgggggtagaattcacctaccttagcgttgaattggtatgatgtagaagaaggaaaggatgagaaaagaatcaaggatgacattaggtttctggtgtgggtaatggcatgatggtggcatttagtgagaaagaaccagatttggagggaatatgacgtgttcagtttggaacctgttaatagttgcctgtaagatgcaaagtaagaagtaaaaatgtaaaaatgttttacatgtttactaaaataaaatgtaaaaataaagtaaaaatgttttataaaagttggatatttgtgtcgggaactcaagatgtaggagagggctggagatattaggttggtgcaaaaataatggcaaaaaaacccaattatttttgcaccaattaatacaaattatagaaccaatgtacagatgtcaggtgaaggcatgagaaaggatgggattgcttacggatagtagggagaacagaaagcctcaaactgaatcccagtatttagaagaactgaacaccagtttttaaaaagaataaggagcagccagaaggatgggtgccacagaagccaagtgttttaaagagaaagtagtaaaatgtgtcatctttgattcttctcttatgctgagaggtcaaataacaacagaactaaaaaccgctagatttagtaacaagtcagttattggtgactttggtgagtgttctttcagtggcatattggagacaaaaaacagattgaaatgcatttggaaggaagtggaaaagttgatgaggaaatggagacagtcaggtgtggacagtaccttcagaagtttatctttgaggaagagctaagaaagtgaagtgaagatgaatttaaagggacccctttttttaaaaaagaaatactttgagaaacacttgtgtgtatttaaatggcaatgacaaagaacagacagaagggagcagactgaaatgcaggaaagatgatcagtggactagataatagaatcagtggtctcagaggaggtgtgggggataacattgaattagaaggacagtgcttcttacacgttaaaggggaggaaagaggaaagattaatggcaatacaagttgagttgtatctttcctgagaggatgttacagggattattacctaatagcttctattttgttaaggcagaaggagtcttctgctgagattgttggaagaaagtggtaataagaatttagcatcttacctagcttccttccattagttaagcctcagttacctttcttcttcctgttttgagtctaatttctatacatagctctaaattctttatgactccttgacacataccctggggtgacccttaattttatatcctcatataatactccattctccaagaagagcatcttccttatctttagactgggtttgctctttaacgcctctgtctctagtcaggctgaaccaacctgcatagtctttggagagggaattgctttcactaaaatgacttacatggttttgctttactcagtagtaattgagtagctgtattttcaacatctttatggttgattgtaatctgtgtgaaatgatgattaaaataataaaaaataataatacgaaattctgaattgtgacaaatgaaaggcaagtatttattgtgagtaaagaattttgctctttaggtagattgttgtatttgaatttttagtagggatttttaaaagatccacatatgtatgttggataattatgtaatatgtttcaaaagttatggtctgtaagtacggtatatatgctgtgtcatctgcttatttatggtatgcctttttaataataatgtggttttattttcaagcctgttcagtgggaggtatacctggttccaagaagtggttctttgcagtgcaggcaatatatggattttatcaggtaatataaatttaaagatagctactaatgaatgtctttactaatataaataatttcatgatccattatttaatacaatcttttgatttgttagttttgtagttctgattggcaagagatacattttgatacagaaaaagataaaattgaagatgttcttcaaacgaatatcgaagaatgtttgggtgctgttgagtgttttgaagaagaagacagtaatagcagggaatcattatccttggctgagtatgcttatatggtttttgtattatcattaaaatacttaatattagacagttattttaatccatgagaatgaagattatatattttagcatctttactgaagaaactctagttaattgaaatttttgactctcaatttgggccttttatttgaataaaattctttaaaatgcatgtttcttaagcttacataatgtcaagaatcataaaaagtgatattttaataaacatgttcctttcttgaagataaattctgcctaatattttattttatttttgaaacagggtcttgctgtgtcacccaggctgcagtgcagtggtgcagtcacggcttgctacagcctagacctgggctcaagcgatcctccgacctcagcttccagagtagctggaactacaggtgtgcaccaccacacccagctaatttttgtatttttttttgtagaaatatcatttcgccatgttgttcaggctgacctcgaattcctgagctcaagcaatctgcctgccttggcctcccaaactgctgggagtacagctgtgagccaccgtgcctggccaataatgtattttaaaagcttgaatagaaatgttatttaatgttaatagctagcattcataccaaagtatcattttcattttgctatttgaggctgaaatatgtgacttctttaatttatgtgtatttgcagcatttcaggtaccttttaaaatccatagagtttgtgaggattatatgtacatgattgagttcacttttaggtttttttcaattgtggtacaatatgtaagttgatccaggtgacataagttgtgataataatttttctcttgatgaaatatcccacctcttatagttaataccttttattttagtctttcataacatttcatgacaaaactgctcttattttagtattcacatattatatctgtaagtagctgtagacttaaaaattttcattttcctttttccagatcatatttgtttgtactgattaataaaaggagacctttccaaaccagagaaatatcattgaaccagggattagtagaggtagactttatttacacaatcttaggccagtcacgtaacttctctggtcgtttgttttctcatccataaagtattgaagtacttttagataatttcttaggtgctttcatttacccttaaaaactcttatcatcccatatgttttcctaccactgttaaagacaagtatagccaggcacagtggctcacgcctgtaatcccagcactttgggaggccgaggcgggtgggtcacaaggtcaggagttcaagaccagcctggctaacatggtgaaaccccttttctactgaaaatagaaaaaattagccgggcgtggtggcaggtgtctgtaatctcagctactcgggagcctgaggctggagaattgcttgaacccgggaggcggaggttgcagtgagctgagattctgccactgtactccagcctgagcgacagagcaacactccgtctcaaaaaaaaaaaaaaaaaaagaaaaggcaagtataaaagtttctgataagtgacctaataattatttccacaagggggagcctgaaaactagagtttacataagatgccttaagtttctaagacggtgggtttatagtaaaggatttaagtacctttatgctatataataaacttttttgagaaaaaaattgcatcatatagataaaactaataagttttgaagaatctgaagagggcgtcatattctttagtcaagactgttaaataccattcagagaaaaatcatgtccttttttattaaacacttagcattttcttacttttaagattcagaaaaatggctgggtgcagtggctcatgcctgtaatgccagcactttgggaggctgaggcagacggataacctgagcccaggagtttgagaccagcttgggcaacatggcagaaccccgtctctacattagccaggcatggtggtgtgtgcttgtagtcccagctatcccagctatgcaggaggctgaggtgggaggacctcctgaacctgggggattgaggctgcagtgagctgtgatcatgccactgcactccagcctgcgtgacagagtcagaccctgtctcaaaagaaacccaaaaaccaaaaataaataaataaataaaaggttccaaaaaaagtttggtctgttagttatgatttatatttaatatgctagttataatttagggagttttatttccttttttttgattgtttttggggtgtgggtaagaacttgtactcagggtttgaatcctagcttccatacatactaattatgtaactttagggaagttatttacagttgagataatagtattatagtagtacctcctggaattgtcataaagatcaaatgagattatacatctaacatgtttaacagtgtctgtacaacaatctttttagttaatattacctattatgattatatataaatatatttatggggttttctttccctaacttacccttttattttagtctctatgaagaagctgcagaaaatttgcatcagctgtcagacaagcttcctgctcctggtaatattttatgactgctttcaataatttgtatcttatcttattacactttatgaataaatgataaatttgttctttatgttagtgttctcactctaatctttaaattaaaaaatgcaaaacaatttttaattgaagttgatacagaatgtatccatgggagtacattaccgagatgtagcagttcttttcattgttttcatttagttaggcaaaaattagaactttggacattaaataactatctctgtttctttagttattgctgaagaagaatcttcctgctacagactgttgcttttcagagtatgttctatagaagactaatcctataaacagctctttaaaaaggagattatttagccttgatgatttggataacattcttttatggtgaagttactatatgcattgtcaaatggaatgtcataccataaaagaaagtgtttcctcagcatttttttatagaacctatttttttccccatagtggaaagaatacctgtgacatactgtatcataatattcctaaaactggtttttttcttttttcctttgtgttaatcaagtagctgtcatctaatatttggtacagttggtatccgcaaatactttgaagagtattcttttctgaatgctttattgaaggtcattagtaagtaaatatttgtactaggagccaagtgtaccatgatgaataaagcatctgtgattaacataaaggagcttttagcttatagtcagccagatctctatattcaaggagatcatatattagtacaaaaagccccacatagaaaaataactgaatgagttgacaaacgtatcaacttttaaaatgaaatgtgttgaggtcaaagtatgcactgaaatattacatagttgttttggcaaattagaatactttcattatcaaatttatctccagtttgtttcattttgatttttgtagtccttcaggaaatgtataattttataaaatttaaagttttgtgaagttattttttctcaggatccaatgatgatgtcagtataattggttttcagagtgttttattgtcctttataaaagagacatcatttatttgaacattacagttttgcacttattcattctcttttggataacaaaattatgtttagaaaaatataatgaaattgcacaggttttttttttctctgttgagtacaatagcattgatgatcatgagagtgatgtgtgtaattaaccactgctgcagaattggcaagtaattatgatatagtttattgttttctagtatatgctagctatttcaagataacatggctttcaataaatgatgaacatttaaaaagtttgaattcctaagggcgtatattgttttggagaatttcagaaattaaaactaaaagcttcctttgtcttctaaataaatataaaactaatttttctaaataaacataaaattcagttcttcagggtactattttgagacatttcagatctaactttttaaaaattacaaaaatgcctttttctctttctaggtagagcaatggtagatataatactgttgctttctgacaaagatcctcctaaattgaaagactatttacctactgtaggagcattaaaacatttgagagaatggtattcagcaaagatcactatagcaggaaatcattgtgaaatgtaagcttctttgttcatatttgattattgtctgccttgtctgttttcacaattaacatactattctcttttcagactcagcgtttgaaaattattttaatatgacaacataaaattctatgttataccatgattgcaaatttgtgtattgagaagaatctagatgtttcatattttatatttatgtttctgagatatttaagtttttagtaaatattattgatgctgttttacaaccattattgaggattaattctataagcacactgtgtgcttttgaacatagatacactggatttgtcatgttgtatttggttttctgttatgtgccaatgtaggaataaatatacactgttgtgttttatgatattctagcaaggattaattgtatattacaattttgatccttaaacattcagttggatttaataacttcatgatttgttttcattcaacgaatgtttattgagcaatacctttatggcaagcatagcaatagatgcttgtaagttaagaaagtgagaagacatgatctttttcattgaagtgcagggagaaacaggaatgctaacagtcaagaaagtctgtggtaagtgcgttacagaattccatgcaaagatgtatgggaacaatataggagagcagttctctttttgaagataaggaagtgacattgtgcctgtgtgtgtgtttatgtacatctgacacctttaagccaatagtaagaggaaagtctatttcttcatccttagtactaaagataattactctaaatttgtgaggatgttgggactaaatgaacatgtgtcagcaatgcacttagagactgacttaatgggtgtttcatattaataggaaaaatacagcaatataaattttgcaattttgcctcttaggcttgtagttaactataatgattaaatcagtgaaatataaaaccctgtgtttaattgttgtaatcttttttttatagaaactgtcagaaaattgcagaatacctttctgctaatgttgtatctttagaagatctcagaaatgttattgactcaaaggaattatggagggggaaaatacagatatgggaaagaaaggtaaatggattattcacagtttgccaagtaggcctttcaattttatttacaacacagatatttaaataaatcttaatgaaaatgtaccttataaagatattctagaatagcactaagtagaactttctgcaataattaaatgttctatatctgtgctaatacactagcctacaaaccacttattgctactgagcactttatatgtgagtagttccaccaatgaactgaatttttatttgattttaattaactttaatttaatcacataataatgtgattatattcaagtgctgtttccagaatgtaatgttcttttaaaatatagaatttttaatcgagttcatgttgtttatccaaactgctttattttattgcatgtgtaaactactagaaaaaactacttagagcatattgtcttcccataatactaccttaggtgatctttgctgtttattaaccagccctcagattttgaacaaatttttttaaccttactggaccccagatttctcaattataagatgagaatgttgtattaggtggactcttctaatcctgaatttctatgaaatttctatttcattttgacgtctcttactatgaaagaatgtttgtgggttttgtaagttatgtccattttgaaataagtgttcatagtaatttatgtatttttgtagataggcaaaactaaactaagaaagtttcttaatgtttatttagggtagcatgggagcatgagtagacttttgagttcctctaaagttttgttacactagttactagaaatttttcttcctttttaattcacccttaataatggtttaataaaatctctgattagacaacaggaatcaatgtggctggatttgtcttgttgatttgcatgtttgctcatcctaatctcagacaggttaaatctgcaggtgaactttctctgcaaatgttttagtataaagaaatcccacataggctgggcgcagtgggtggctcacgcctataatctcagcactttgggaggccaaggcgggcagatcacgaggtcaggagatcgagaccatcctggctaacacggtaaaacctcgtctctactaaaaatgtaaaaaattagccgggcgtggtggcaggtgcctgtagtcccagctactcaagaggctgggactcttgaggcaggagaatgaggcaggagaatggtgtgaacccgggaggcggaggtttcagtgagctgagatcgcgccactgcactccagcctgcgtgacagagtgagactccgtctcaagaaaaaaaaaaaaaacccaaaaaaaccccacatagccaagtggaagagtggaagatacagtttgctagaattgcttttgtatgttttctgaaactgcatgcttacatacagagagataatggcagagttcttttcatgtgattcttttattctcttgaataggaaattaaatgttcgtatctccactggatgcatttaaaacttgaaatcactttttttggtagagaacagctttttagtcaagaggcatcatggtgattaaggacatagattctagagttatattgcctacaatcaaatcccaactcttttttctttctagtttaacgtagcatgttgtgcaacacttagcctcttggtgctgcagttgtcttcatctgtaagatgatgataatagttcctatcgcatagatttttgtgagaattaaattatttaaagcacagagtaaccactcagtaagcattagctatcactgttgttgtgcctaccattactattattagcatccttactattactacttctgcagcaattgatcttatcagcaacatttatcaaagacaaactatgtgagacactgtgctaaggatctagtaaagaataagatagagccaggtgcggtggctcacacctgtaatcccagcactttgggaggctgaggcaggtggatcacccgaggtcaggagttcaagaccagcctggccaacatggtaaaaccccatctctactaaaaatacaaaaaattagctgggcatggtggcaggtccctgtaatcccaactactcaggaggctgaggcaggagaatcacttgaacccaggaggtggagattgcagttaggcaagattgcgccactgcactccagcctgggccacaagagtgaaactccatctcaaagccaaaaaaaaaaaaaaaaaggaacaagacagacagcttctgtctttgcataacttacagactggtaggaagccagatattgaacaatgcaaaagaggttgtttggtcctgtggctgcatagaatgagcttaacatactcttgccagctggtgaaggaccaacgagagcttttcatgaaaacctgaaaaattgatgtctaagttaaaacaggatgtgtacctaaatgtgagaagcacacttttgagctgaggaatcaaaaataaatttatacatggatttcccctcaacttttacattgtaataagatgtattaatctttatagcattattcatgatacttgtaactgtgttttcttggtctcttttcagtttggatttgaaattagttttcctgaattttgtttaaagggagtcacacttaagaattttagtacttctaatttaaatactgacttccttgccaaaaagatcataccatcaaaggataagaatattttgccaaaggtaatcgtgtttaatttttttgtgtgatcattcatgtgtatttttgttcctataaaatatgtttgaatcttgacttaatattactaatatatgtgcttaagtgtgctcactagcataatttttaatataattaagtacttaagttatactatgtcatcaacattaaattttggtgaaagtgtcattgttttagatgtttaaaaaaatgtaatgctactaaatgtgtatagtcctgaaaccacctttggtttggactttactatgtgacctttctaagactcagtttggagagaatatgacatagagaaaagaggatatgttttgatgttaggtaaacctgggtttggaacctaactgtgtcacctataagttgtttataaccttgggtagattgattaactcatttgtgaagtggaggcaatagtaacacacttatcttacaaagttatgaggattaaatgaggtgagagtttaatatgtgacatagtacctgacatatgcttaacttatagtgtaagaagtatcagttcttgccctgtatctcctatacatttattcttaaaatgcaagtaattataaaatataataactaggaaaaggcttagttggctttttaacattggaaaaataacctaagaagagatatttatatgaaggtaccttagaattcactttaaaagaactaatttaagaacatggaaaacagtgggcatgaagttaaaggatgtcaaattgatggttaatattttctaatcaaagggtggtacaaaaagagggtatcatttgatttgaactcatttctcaatatttgtttagaattgcttactttaagtaacttactatggccatctttcacaggaatattaaattcttttctaaaaattagaatcgtaagattcatgacctcaacttttcttcaagtatgaataatgtgtccaaatttttgctactgttgaagagaatcttagggtacaacttcttcaataatgtaaaattcatattctctctctgtatatgtatagacacacacactgtataaacacatatgtttatgattatagatatatatacacttaatcatgtatggtgaaattactctgctttttacaagtctaaaactttgtgtaacctcttcaagaagtgtgctcttttctttgcctttcatgtgaagcaccgtggctccaactactgaaatagcctcccttcagtaacaaactctaatttggttttaggctttacccaagaaatacagtaccgaaattttattttttctgaatggagctttctatgttaattagcacatgctggcttcactatctctctctgtaatttatttagtcttttcactagaattttttttttctaaatgtcagtgtaccactcagcctaagttcatcctggagtgtcttttctttcacttttttagtctgcagattccacctgcagaggtaggttgctaatttgtttcttcaacactatagcctattgtatcacctgtctgtctcgttgaagataaacagcaaaagttgagaacgcttgtcctctgttgcttacctcttcccatacttattttctcctgtgaaagctcttcctggttactaagtgatctccatgtctgtttctgtaccctgaaaggtagaattgaaattgaagaaattctggtctgctatagaggattaaatgctaggcatgcttaatgtgtaaaaagttgctttttaagatccattttaaagttttaaacccttaatcactaatttgtttacttttgtttatggtatttaaatattacacaattttaatttcttttctaggttttccattattatggccctgctttagaatttgtgcagatgataaaattatcagatctaccctcctgctatatgtcggatattgaatttgagttgtatcctttcatttacatgttcattttagattacattttctgtgtcaggtagaatgttctggtattgtcaggtaaatatacatgttaggtatatctttttcattatattcactgttttaatgttgatgttcaagtaggctgctggactccttatttttggagttgctggggaaggaagttcttgcttttcccaccacctggatcctatacctattttatcagaaatcttcctccctatgcaagcatctttatttttgttcagtattgttgagacttttctatggatagggctatggaaataatacagaagtgattgagccttgcttctttaatgcaattataatgttctctgcttgagcacaggactgatctactctcacacctagcctagcattaactgcaactttgtccttcccacccactgcccagacaccaccacgtatatattttatgtgcttttgttaactttactattattttttatagttttaatgctttttggaaataatttcccttttcctgaaatccaggaatacatctccatgacttctgtgttttactcaatatgtttctgctgaagaagtctgtaactgcaatatatcatagcatagagtaagcactcaatattgtcagatgaatgactttggattatgtcagcctaaatcaaaatactcattattttcttattgaaagttctttgctgcagaaaagataacatatacaaaggtgtaggagaacgttacccagctgagaactgtttgtagtctagaatcattaaagagtagtggttttttggcttgggggtgttgagggcagttgctaagtgatcagattggagagccttttcagattaatcaggtcctaaaagaccttacgtatcatgattggggttaaattctatcctaaagataatgaggaatcatacaaggattataagccagacatagcttaatgaaaagtaaattttagatcatgctggtaggattttggaaacctgagcaaagctcgaactaaacaagtggcatttggaatggagagccaggaaaagtacacgatgtgttaaagatgtaaaatcaacacggtattatgatttatttattacatgcggagaaagtgagaaggccagagagtgtagttgattccctatgttgaaactggtgtcactagttgagataacatgaggtgagccattttcgcagaggaaaaggaattcaggttcgggtagttggagtggtaatgtacattgtagtaaaaagcataataggtagtttaaaaaattttttatccattatacattactgttgagaaccatttagccagcatgctacctggcagtataactagacgttactttcagatataatctattattaatacttcttttctctgtcctcatctgttagcagcttgtaggtcagaagctatttgatgtttttatcttatattagattcttgtcttagaccaatggttttcaaactatcttccaaggaaagtcgaggactgagttcttcagataatgggattgaaagataagttgagtgggcatggctcttggccccctcctactgcaaccagagcagcacctgttctaccctaaatattgggtttccatataaaatgtcacttgcaaaaagttgctgcattaaaaaggtttgcaaagtgcactgtaaactgttttcatggtaccacccaacacttagatgtttggccgtgtttttacataatattcagtatactttttgctaccattatgttaagaaaagttctacaacttgaaaaaaaaaatcttccctcaaatactgtatttatgcttttagaataggcagaggacttcctggtatatggtgtagagaggagggagaaatgttaggaatctgtggaaaataaaacaagtaatttataaacttaaaaaatgtttaaatgtttctcctgccatcagcatgaagaaacctaagaatcagtcagctgatgtatcattttatgtatttaagtaaatataaatggtatcacatgtatctgcaaatatattcaacatattttaaactctcttttaaaaatatataagcatgtttagaaatacacctaagaacagaacattttatataaaaagaaattgttattggctggaaatgaaacactagcatagtgtttttgaatttttatttaggagctacagtttttataaatttcttgttcttatagtttatagtaatgctctatatagtagcactgtttcttagcatattttcagaatcaaacaaataattggaaaaatacttatccttagggaaaggcgtaattgttaactgctacagttaaattttttaatagatgaatttaagcaactgtggaagaattgaaataatgaaacttattttaaggagtacattgtttcatgggtaccattacatcatttctttaactccttagtacagaggattgacaaacagtaccaaacagaattctgtgttgctgttggagcagatttcttctctgtgtagcaaggtattgagggtttcttgggggttttttgtttgtttgtttttatacttgccatttaaggatgtgtaagaaaagggaatgtaacttattaatctgtttgcttgatgacttggtttctttaatgtaatataggataattttggtcctaactcatattaagatactttggacttttcataataactgtaaaagtactctgcaaacataagtgacattttgtttttaggagatattttcagaaataagctttatgactggtaattgctttaaagttttaaaattttataacatgttattgttaacctacttcttcaacatgcgatttcaattttatgagaagacattcatatacttgcattctttttctcattgtagggcaggggatgaaagtggaaaaagctaaagttctactaaattgtcatttgggagttttcaatttttctttctaaattctgatgatgtttaggagatttatggctactttaacagttattttgtatatataatgatgtaaaattggtatatttttaactttaaaaaaattacaatataaagaattttaagtggactcatctatttgaaatcaaattcagtttctaataggaaaaagtgaaagtttgctttttttctagttatttattcaactgttatgtttctgtgaaaacaatttttaatgcacaaaatctttattggcagtacttacattacattttcttattgttttaataacaagtagactagcaaatagtcctgcagggagaaagtgattattataattataacagtttccctatggtgctaaaatcaagtcttggttataattcctatagaaaatcgatatagtaaaggaaaaatgattttgaccttaagatgtatatttgactatatagtaacttaaaattttggcttctggcctctttttccataaatttaatagtcctttgaataggacgacaaagtatttatttgatgaagtggcctttaccaatattaacctggctttcatcctctaagaataactaatttactaaattttgaaattttaaaatttatcttttatcatttatccaacatatattctactgtgtatgaggtactatactagatttcgggaacccagtaatgaagtgtacagaagaagcttctgtatttgtggaacttacattttaggggaccaacagaaaataaataactacagacataataagaattatgaagaaataaacagcctgagatagggaataagtcaagagaccctagtttagatagagattaataaggccatacatttctccaaactatttgcagagacagcttatgaattagtatatattttttaagtgcactgagaataaaaaataccctgcttctattttaatccaggtagccaagtagctctctgtatatccctgtccagtcacctaattttttggagatgcttccttgtatggattgagaaaattgttatttatcattaattatctatattgccaaataagggaggaaaggaatatagatggtatagtagaaagtcttaaatagaagagcatgttttttagaaaacttgactttaagccatagctatgccactcactggcttacagctcttaatattgtaaactggaaataataatccctctgttacctatttcagagttgtaataaaaaccaaattgaaatgtattttataaactaccaagtatgatataaatgatggttgctaactaattttttattgtctttgaagtttatgtggcccaaatgatggacacacatatgtgaagcagtttccttaaaagtataaagcgctagatattagatattctctaagtaatttgaaggtatgatgaaatttatagaaattttacagagaaatttgtagaaatcttatagagacttttttttttttttttttttttgagacggagtctcgctctgtcacccaggctggagagcagtggcgcgatctcagctcaccgcaacctctgcctcccgggttcaagtgattctcctgcctcagcctcccaagtagctgggattacaggcatgtgccaccatgcctggctaatttatagagactatttcaagtcaaaatgagatctgtacctatagtttaacacaggtgtaacataagcattagtccatctagttattgaagataggcaacactaatcctagaagcaccctaaactattaatgtttaataatatattttcagttgttttgttttaaatttgttgtattagattatcattttttcttctcaaaccatgattgtaaaatattacaacatactttattagtaagaaatagagactttataactatgttcccagttcaatgcagcaaaagggattatttttgaagccatatattatgtaacttagaaaacaaatctaaatatgaagtaatttatttttcttaaacattgagttatgatttgttttttactctttttttttttttttttttagacggagtctcgctctattgcccaggctggagtgcaatggtgtgatcttggctcactgcaacctccgtctcccgggttcaagcaattctcccggctcagccactcaactacctagaactacaagcatacaccaccatggttggctaatttttttttgtatatttagtggagacagggtttcgtcatgttggccaggctggtcttgaactcctgacctcaagtgacccacccacctcggcctcccaaagtgctggctttacaggtgtgagccactgcacctggtcatttttcacatttttgaaaaagtgtttaattacataccagttctttgaaatctagtgctttataacttgggtttcagctgggcgcggtggctcacgcctttaattccagcactttgggaggccgaggcaggtggatcacctgaggtcaagagtttgagaccagcctggccaacatggtgaaaccccatctctactaaaaatacaaaaaattagccgggcaaggaggcgcttgcctgtagtcccagctatgcgggaggctgaggcaggagaatcacttgtacccaggaggtggaggttgcaatgagccaagatcacgccactgtactcgagcctgggcaacagagcgagactccgtctcaaaaaataaataaataaataccttgggtttcatttattaaacaattaatttttttaaaaatgtttttactgctgctatctgccagatgcttgtttgtaatattggatagaataagatggacaggccctttctcaagaaactttcatggtgcttaaattctattgctttgtgtgatcttcagtcagcatcttagcttaaacaaattatttatctatgtaactatgattagccccagaatataagtaaaaacttcttggagtaaagcttattttactaataattaagctagattaggaaaagacaagataggattgttagggagttatgatgttcactaatcttctggctgggaaatatttcttcagagagaggaatttgcaagctagaaacatgatttccacaatgactgcttgttggagaggacctactgaaaagatttaatcaagattttgaaactcaggccaggtgcagtgactcacgcctgtaatcccaccactttgggaggccaaggcgggtggatcacttgaggtcaggagtccaagaccagcctgagcaacatggtgaaaccccgcctctactaaaacaatagaaaatattatccaggcgtggtggcatgcgcctacttgggaggctgaggcgggagagtcacttgaaccagggaggcagaggttgcagtgagcagagatcacaccactgcactccagcatgggcaacagggtgagattgtctcaaaaaaaagattttgaaactcagatttgaaatgttatttggcgtttatattctggagatagaatgatagcttgaacagatcatcctcaagtctctcagaggttatctaatgattagtgtatgggtgagaacaagttatcagcacctaagtgtattaagaatgcattataaacaactgacaattttattttgtagggaattatagtttgtgtgatttagaaatacttattttcatatttgtagcaaatgtctagtcaatttcagtctgtctcaaaagtgtggccatttcagctaatgggtcccaccacatttatattaggttataagtaatgcattgaactgcatttagcatccctaaaatgttgagaaagctataactgggactcagtctggcatactcacattacagccttgtccacctttttaaccgtacagtctggtcacattttttgggttatgaagtcttatgtatgcaagaaagaactaggatttagtgtcgagaaaattagatatattttttatatttaatgattattttctattgctaaatatttttatttttaatttctaattcttaactacataaaatatatttgactttaaaaagattatggctataataataaagaaaaataagcatatttcttttaacctttcttattttgttcctaacatattaggttggtgtaaaagtaattatggtttcagaccatgaattttaagtcattataactaggctcaaacacatctttatgaataaaaatagaaaccattacaatcaacacatttttgccaatgataattaagtttttttattcctgtagtataaaaatccatgctttggaattctacgaactcttggaaagcgttttctgcatcctgccttgcctgtggaagcattttccctgcaaaaagttgttgagatgcttgaggaagtggcagtcagttggtgagaggtcaggtgaatatgatggatgaggcaaaactttgtagcccagttcattcaacttttgaagcattcattgtgtgacgtgtggtcaggcgttgtcatggagaagaattgggccctttctgttgaccaatgccggctacaggtgttgcagtttttggtgcatctcatcgatttgctgagcataagtcttagatgtaatggtttcaccaggattcaaaaagctgtcatggatcagaatggcagcagaccaggaaacagtgaccatgaccttttttttagtgcaagtttggctttgggaagtgctttggagcttcttttcggtccaaccaccaggctagtcatcgcccacttttcatcacacaatctgatcgagaaattgttcgttgttgtgtagaataagggaagatgacacttcaaaacaacaattttttaaatttttgctcagcttatgaggcacctacttattgagcttttgggggtttatttatttatttttttgttttgtttttgagatagagtctcactctgttgcccaggctggagtgcagtggctcaatctgggctcattgcaacctctgcctcccaggttcaagcaattctcctgcctcagcctcccaagtatctgggactacaggcgtatgccaccatgcctggctaatttttgtatctttagtagagacaaggttacaccatattggccagggtggtctcgaactcctgacctcaggtgatccacttgcctcggcctcccaaagtgctgagattacaggtatgagccaccatgcctggccttattgagctttctaatttgcttcaaatgccaaatgaccatagaatggtcgacaatgagttcttctgcaacttcttgtgtagttgcaagaggatcagcttcgatcattgctctcaattggtttttgtcagcttcctatggccggccgctataccactcatcttcaaggctctcgtctcctttgcaaaactttttgaaccaccattgcactgcatgttcgttagcagttcctgggccaaatgcgttgatgttgcaagttgtctccactgctttatgacccattttgaactcgaataagaaaattactcacatttgttttttgtctaacatcatttccatagtctaaaataaacataaacagcaagtaataagttattagccagaaaacataaagcgagaaatgctcattaaaatgatgtataacataaccacacttatttaagaacatattccaatatcaaacggcaaatttcaacagtgcaaaaaccacaattacgtttgcaccaaccttaatatttatttttatatctgtgaattaagaatgcataagtaaaaataatagcaacaaaacattaaaatattagtgatcatgtatttcatgtaactagtccatcaatataggacagttaaaagtggttttgcactagctttaagatctttggcaaatgctttgcctaaattttcccaaagttttaaaatgaaatactttttactgagatgtgattgatatagctgcatttctaaaataacaggaaaaatatagctttcagaactgtggtttgttttattcagcccttaataaactgagaatttacctaaatagattatggtgattttgttgaaccaatatttaataagcatctgtatccccagccctggcaatacaaagatgaataagcagagtttgctcataaatcagtcagaagttgctgtatgttttctagcatataattcattgtcttctcctcagtttttacctattagcattaaatctctgatttccaggaacaaagtttctgagttgccttcaaatgtattttaattttgaaactagaacaataatacatctagtcaagaagttataagatgatggttgaatataacaaaatattttggtgctagaactcagccttacactgttttgtatatatacaaataaattatgtccacaacctgaacttgaagcaaatattgtgtatttttcagagatgtatacctcagtggaaaagggaagcctgtagctttgaatgcctttgctgtttttgtttgtctgcattttagcttttattttgttttgttttgacagagggtgggccattgttcttactttttagtttttatagtggagtttttgggagagggcattactaaatgcatgttacattggtgaaatatgagtggaaaattgtcaactggcactattcaagaatgaatctcaatgtgcaatcaataaaaatatggtctgttttattcaggttggtgctctttttgtattgccatgtaccattagtaacatactgattccacctcccaaccaactcagttcaagaaaatggaaggaatatatagctaaaaagcctaaaacaatcagtggtaagtattacatgtttcggttgttttaatgatgcagcatagttaatgtatgtatcaaatttgaagtgaagataacatttctatatgagaaaacaggatttcatattattgctactgattaccaggagtccacatcattttaagatttttaattgcaacctactgtaacataaagtatctctaaccatattcatttaaaatgctagtgatctaaaggcagaactcttggttcattagatagctaattatactgaacatgggttttttagagacatttcaggaatcaaatttgtgaaaagagcagttcatttattatatggtacataaaaaacctgtgataattttttgaagaaattagtagaagttatttatttatttatttagagatagagtctcgctttgtcacccaggctagagtgcggtggcacgatcttggttcactgcaacctccacctcctgggttcaagtgattctcctgcttcagcctcccaagtatatgggattacaggcacccaccaccatgcctggctaatttttatatttttagtcgagatgcggtttcaccatgttggccaggctggtctcgaactcctgacctcaagtgattcacctgcctccgcctcccagagtgctaggattacaggcgtgggccaccgcacttgacctaaagttttttatttaacagtttaactgtatgttacacagtattccaagtattctattttagaaatattgattcatttaatttttgtaataaccccatatacttatttttatccccattttacagatgaaggaattggagcttagagaagtgacagagctgttaattggcagaacctacggctctgtcacttctccaagggtttgaatctgtgctcttgtgctctttaccactacactgtgtttccactctgttcctctagtatgttcaagatgtctttatccaaatgaaaatttctgttataaaatcagagattaagtccaaaccctagtatttcatgaggtgattctggcttagaatgttaaaattgctttcccaaagtcacattggtgaagtgtgttccatcatactttggccttgatgtgtgttttttaaattgaacaaaaattgtttactttttttttagcttatagtttttgtgacccataatgtgatgggactaagaactgtaattgaaactattatgaagaaatctgtagaaatactccacagcgcccttgaattttgaggaatacagttttaaaatcagtagcttatacagtacagattttctatttttctgtataagaaacaggagagatactgaattctattttagcagatgttgaatttcaaatgtaggtaagatatctatgtggaaatttaaatgtagagtttgaaatttagatacagatctctaggtaatagtcagggctggagatctagattttgagttttccagcagttttgtttatctattgcgtaataagccaccccgaaacttagtggcttgaaagagcaaacattttatttgcttatagtttgcagtctgagctgccctcagcagagtagttctactgatctcacgagaagtcattgatgtgggtgttttgaacttgcagatgatttggaggctgggttcagtggagctggctggctttctctctccgtttagtcttagagccttttccttgccacatggtcttctcagatgatctctcctgcaagttagctggaatttttccatggtggctcaggacaaacatatagaacttgaaactaccaagactttttaaggcttaatcccaggactagcccagtcttacttctgttacattccgttatttagagctagttacaagaatagtctaaattcaagggggaagtacctatccaaaggtgtgaataataggaagccaccaatgtaaaaagtctaccataggtgcctgtaagttaggaatgtagaatgttagttaggaatggttgaaaacaacaatacataaagaacatggctagagaagagagccaaggatagggtctttagaaatatagtcatccctcagtatccactggggattggttccaggacccctgtggataacaaaattcctagatgctcaaacccctcatataaaatggagtaggagttgtatataacttctgcacatcctcctgtatattttacatcatctctagattacttataatgcctgatacaatgtaaatgctatgtaaatacttgttatgctatattctttttttaaatttgtattcttcttggttattaatttgttatttttaaattttttttggaatattttcaattcgtggttggttgaatccacagtgtgaaacccatggatgtagaggcaaattgtacctgcatgtaaggtgaaagtggagaaaagttaggaaatgatatggtaaatggtctttggaagaccctagcaagttatcgttaacatcagcattaaaataccatttatacagagcgtggtgcaaagtgtgggaaataaaggagcatcaaactgggtttttacacttaaggaagtagattcattgtctttttcgctgtgaaatttatactcaagtgaggaatgtacctaggacaataattataagtctgtttggccaacactgtgaaggcaaaatggaaggtacttccagagtgtatgacctaacatagccttaagagctcaagaaaagtttcctataggaggagacattattactgtaacttactgcaccatactaatacatgaataagtgcagcttttaacccttctcatctcacagggaacaaatatatatttggtaattttggcacttgctaaaacaaaatcagaaatagattttctgagtggcaatatagtcaatttcgcttattctacatatagtcatgggataatactgatccatttctcagctttacatatgtctaaaattgattagacatatgtagacatatgcaatcagttaatcataatattaacatctccttaataaacttgagtgtattctggcaacccattcattatttatttttcctctcataactttctccaacttcaaactaccattatgttggaacttctgattttaaggtaatttactcttaacttaggcgtgggggtttttttggcctgatttccattgtaattttaagaatatatcatgtggcttgatttgattttttaaaattatctcctcttgaaatctgagcattaatattggtaacttgtgaataataataagacacagatcacataatctttgaaaccagattgttgattactgattaggctggatcattaagggctgattaagctgacacttaacagtatttaaaaaaaaaatcttagaagtagaaataaaatcaaactggacagttgattattcagttctattctacccataatcctctctgtaggataaattcttacccattgatggaacttttttttgtaaaaatagagaagctgagttttagttaatgtaaaagcttcaataactcacacctggaaaacttcctatcccttcctagcatcactaacaataccctttctcactatcagactctcagatcattctcctacaccatgactctgtttctccacaatctactgaattatgcccaactgtcctctattgttgccacatatattccagaatcttcattctaactttgtactgtttcctaaaagtattccctgattttattcctttgtgactttattattcattcattcatctagtcagttataccttttattcatttatttgaatatacagcagatattgtgtatcaagcatggtactgttatcttgggattactgatccatgagatagacttgagtcttcctctaatggaatttacactgtaccacagaaaatagatattcagaagttattataacattgtatttagtagtcactgactagaaaaaatccccaagacataatgaaaaaagcaaggtatgcaatagttatggtattaatggtaaaaacaagtttgtgtgtatttagcatttaaacatatttgtatatgcattaagtatctgctttttcaacagatatttttatcgagcacttacaatatattaggcactgttttacatgctggacaagcagtaaatagaacaaaatcctttccctaatggagcttactttatggtagaggtcacaggtttagtttttcccccagatagccatatgactagttcctaattttttcaggtctttactccaaaatcatttttctcttttaggaccttttttgccagcccatctaaagttacaaacagactcttctcctgacctcttattcatcttcctagctttatctttttaccttagtactcatgctgtctattatactaaatgtgtgtctacctgatgcttaacagttactcaaaaatatttgttaaataatgagtgaagtatatatttctagttagtaataactgttctccagacagataaagaaagactttgaatggactccatccatgtagtgtgaaccaaaatttgtgctccaatttttatcagtttcctaggtttcatcctttgatgaaataaaaaatatgtgtattaatttgaaccatctgatgtttttttatatatcaaaaattgttacttatcagcaatttcacatagtttgaacttaaatggacaaacaatgcccaatttgaagtatggtttaattataatagtaaatgaatgccttttaaaattggtattcaataaaatacccagaaattatgatgatacaggaaaaatgcaaaagcactgtacaaaaaaatgaaattaagtcaaccttattacatttcaaaagaaaaatgcctatatgtaaaacttttattgagaagacagatgaatagtgaaaaatggctggcttgccgtgtttacagagatattttatgaaattgtcaaaaaattgaatgatcatctgcaacctaaacaaatcatagataagtaataaaaaattgtatctcccattattgaaagcctactatgtgccatatgctgtggattcattatctttaattctcgaaacaatactgagaagtaggtttttaaaaaaacctttatattacaattgagaaaaataaggtaatcaaggaaaccaagaaccttatctaatgtcacagggtggaattagaatttctacctaattttgaatgtatctaaaggccatgcatgatttcttttgtcacatcatgtatacttttgttgaaaataatttttagaacttggtcttttcggccttcgataaacttaaacaccccttcatgctaaaactctcaataagctaggtattgatggaacatatctcaaaataataagagctatttatgacaaacccgtagccaatatcatactgaatgggcaaaacctggaaggattccctttgaaaactggcacaagacaaagatgccgtctctcaccactcctattcaacatagtattggaagttctggccaaggtaatcaggcaagagaaagaaataaagggtattcagataggaagagaggaagtcaaattgtctctgtttgcaggcaacatgattgtatatttagaaaactccatcgtctcagcccaaaatctccttaagctgataaacaacttcagcaaagtctcaagatacaaaatcaatgtgcaaaaattacaaacattcctatacaccaataatagacaaagagccaaatcatgaatgaactccaattcacaattgctacaaagagaataaaatacctaggaatacaacttacaagggctgtgaaggaccttttcaaggagaactacaaagcactgctcaaggaaataagagaggacacaaacaaatggaagactatttcatgctcatagataggtagaatcaataccgtgaaaatggccttactgcccaaagtaatttatagatggaatgctatccccatcaagctaccactgactttcttcacagaattagaaaaactactttaaatttcatatggaaccaaaaaagagctcatatagccaagacaatcctaagcaaaaagaacagagctggaggcatcacgctacatgacttcaaactatgctacaagactacagtaaccaaaacagcatggtgctggtaccaaaacagttatatagaccaatggaacagaacagaagcctcagaaataacgccacacatctacaaccatctgaactttgacaaacctgacagaaacaaacaatggggaaaggattccatatttaataaatggtgttgggaaaactggctagccatatgcagaaagctgaaactggaccccttccttacaccttatacaaaaattaactcaagatggattaaagacttacacataagacctaaaaccataaaaaccctagaagaaaacttaggcagtaccattcaggacataggcatgggcaaagacttcatgagtaaaacactaaaagcaatggcagcaaaagccaaaattgactaataggatctaattaaactaaagagcttcttcacagcaaaagaaactatcatcagagtgaacaggcaacttacagaatgggagaaaatttttgcaatctatccatctgacaaagggctaatatccagaatctacaaggaacttaaacaaatttacaagaaaaaagcaaacaaccccatcaaaaactgggctaaggatatgaacagacacttctcagaaaaagacatttatgcagccaataaacatatgaaaaaaagcttatcctcactggtcattagagaaatgcaaatcaaaaccacaatgagataccatcccatgccagttagaatggcgatcattaaaaagtcaggaaacaacagatgctggagaggatctggagaaataggaacacttatacactgttggtgggagtgtcaattagttcaaccattgtggaagacagtgtggcaattcttcaatgatctagaaccagaaataccatttgacccagccatcccattactgggcatatacccaaaggattataaatcattctactatacagacacatgcacatatatgcttattgctgcactattcacaatagcaaagacttggaaccaactcaaatgcccatcaatgatagactggataaagaaaatgtggcacatatacaccatggaatactacgcagccataaaaaagaatgagttcatgtcctttgcacggacatggatgaagctggaaaccgtcattctcatcaa

SEQ ID NO: 452 - DNA, 32742 bp, Homo sapiens
  source 1..32742: mol_type = other DNA
ggccacttccgcttccgctggggaggtcctccatgcgcagtcatgagtcgcttcaagtttatcggtaagaggagcgttttccacgcccttgggtctttctgacttgtcccgggcgtcggtcaccaaggtcacaggacccaggaattgcgccctccggcattgtaagggttgaaagggccgctcagtggaggagggcgcggggaggtttctgggtgctggtaatgctctggttcttgatctaggttctggattcacgagggtgtatttatttgtaaaaattaacaagccgtacagttatgatttttgtgctgttttcaacatctgtaatgtattcagttttttaagaagaaaactccaaaaaggccaatcactatgtttccattcatcccacgtgcacctcccggcccttcccctctgccttggcggagaggctgaccgcttctggggaccaattcactcaagcattcattcgttcatatcatagttagtgagcgcctcaagtgggcctggcactggcctaggaacacagggcacaaagctcccagttgtactgtcatcaccatctggtggagaaactagaaaacacaagtaatggggagaaaaacaaactgtacttggcaagtacaatgatccagtcggcatcagtagaacgagagggagaatgctgcgggatttaaatgggcatgatcctcgttttgtggggtttccagctacctgaaggtgggaaatgacagtgatcacacctctgctttagcaaggtaatcctgatagctattatgtaggttttgtgggaaatagggagaggtagggaagcatttcaagagcttaaactagggtaatggaaaagagagagaaatggaagagatgtgtgcagcatttagcagctgagtgttcatggccggtagtagagagtgaacaaagatgactcagggtttggaaaagtacttaaatatgaaatggaagcatgactagtttggcggtgaagagaggtacccaggtccatttggattaggttaagtttgagataattataggacatccaggtagagatatctgggcaattgggaatgtggtctggcaatcaagagattaggattatacatttagatctgagagttatttaagcagtatttttttttttcaaagacgttgtgctaagtcctgtggaactgtaaaatctagtggtgcagttttcagactggagacctaagacctatgtactgtacagtcaaaagcaaatgcaggggagaatatgttaagtgccaggaaaaaggttttgaaattgctgtgggaaagcctggagtaggggtttggggaggggttgtcaaataagacattgccgtgtcttagcctttccatcctaacctttgatataattgatgagggagatggaataaagagccatgaagtactccgtaaagaaaggccacataactttttaaaagtgtgtttatgttatacaaccaaattcctgcctcaagttaatgtcttaaatccatcctccatgtagactccattttggtgtatctaaaaatcaaatcagctaaatgtttcttttgcttcaaatctttcatttacgctcctcaggatagcctaaatgcttacacaccatacaaagcccttctgtggtccagtcctgcccacttttctagcccatccctgggctgctctataaacacttgtgcatgctgtttgttacctctgacaaggttttagagtggcagtttggggccaaaatattcctctgcctaccaactaccctgttgcctgtctgcctactcactccttaaaacttataccacattatttataattaaatatgagtatgcctttcccactagatcaaactcttaaggcagatactggtatggtatttatatttttttcctaggggcgtagtacaatgactgtttgggaaagtatgaatgagtggctttagtgctaaggtgataagaaaattagtaaagggattagcatcagataaaataagcaagaaaagacttcttaaagaaggtgactttattggaataaataattgaaataaatttttttctgtatggtttcctttagccccactctcctaaagtaaccatattaaaagtttgaagtatagccttccctaattttttaatagattgttatacagattcataaaaatacaacatatcaaggtttttttttttccttttgaaacagaaatgagatcatattatgcattctatccttggtatatgacttactctgatatttaatctttcagtttgtgtcatttaaaaaattctgcccatgaatcgctagactaatttcttagcctaataatgagttctgaacaatattttgaaaaacatcatattaaatccctggaacaagcttcacatgggacaattgcatgaaaaattgaacccattttatgaaaattaccttagattttggtttaagacagctgaccattgtaattctttctacatttctctcttttctacttgcataacaagtggctgccccttagaactataccccaacagtgggggtttttgtttgttttgagacagggtcttgctctgtcacctaggctggagtacagtggcttagatcatggctccagcattgacctcctaggctcaagtgatcttcctgcctcatcctcccaagtagctgagactagaggtgctcaccaccataccaggctaatttttttttgtagaccactgtgtcctgctatgttgctcaggctggtcttgaattgctggccttaagcagtccttccacctccgcctcccaaagttctgggattacacgtggagccactggccagcatgagaatttctttagcccagcttatactctcttttctgtctccacaagtggaattctattccctgggtgttatttacaaactcttccactctcaaaaatacttctacctgtaactattatatgccagaatctctactgcattgatcttagactacatagtacaccaaaaaatgagaaatatctgtgcaagaagaaaatgcaaaatacaaacaacagtgaaaataaaaacatcatattccattcctgatatagtttagatatttgtcccctccaaatctcatgttaaaatttgctctccaatgttgaggtggtccagtgggaggtgtttgggtcacttcccaacatccatctcatgggggtggatccctcatgaaaggcttgatggcctccctgtggtaatgagttcacactggctccccttccctttccaccaggattggaagcttactgagatcctcccaaaagcagatgttggtgtcatgcatcttgtacaacctgcagaaccatgagccaaatacacctcttttctttataaatcacccagtctcaggtattcctttatagcaatgcaaaagcagattaatacagttcctccaaatcacacataacaccaccatgtctatctttccagatcttctgtaggcataccaaacaaaataagatcatactgaggctactcttttgtgctctgcttttttcaatcacagtctccacctttccatttcaggaaatgttcatcttaactagtaccaaaatcatactcaaatttttcctgttgttccaaaaatgtcccttggtggtcatgtccaaaatggtatcccatttagagccacacatttggttgttccttaaatttttgaatcaagtgcagaggtttgcaaactttttccttaaagggccatatagtaaatattttagactttgagggccacgtgatctctattgcagctattcaactctgcccttttgtgtactgtgatgtaatagtaaatacgtgtgtgttctctgctcccatttctttgtgcacaactcctgaaacccttggaatctcctaagtgctaagtgtctttttgtatgctgctaagatgactgatggctgggggctcctggatagcctcaggatgggggtttgcctaggaaaacccatcatgtgattagagagttggaagtttcagtccctcccacccactcccacttctggggaaggggagagaaactgaaggttgagttgttcactaatggccagtgatttaatcaatcatacctacatggtgaagcctctataaaaacccatacatgtctctatgtgtctcttccacctggccgtttttgaatggcatctttttacaatgaatgggtaataagtaaagtgctttcctgagttccgtgagctgctctagcaaatgatcaaacctgagaagggggttgtgggaacctcttattgtagccaagttagacaagttgtgggtaacctgggaacctactgcttgtaattggtatctgaaatggggagagtcttgtgggactgagcccttgacctctgcggtctgatgttatatccaggtagatagtgtgagaattgagttaaattataggtcacccagctggtgtcagagaattggttgttgggagaggaaaccccacacatacctgacgtcagaagtgaatcctcacgcctgtaatccaagcactttgggaggccaaggtgggaggactgcttgagcccgggagttcaagaccagcctgggcaacaaagtgagaccccatctctacttaaaacaaacaaacaaaaaattcagagtattgtgagtatgagaatactgtaggagaaagcagtttgcattttttcctatctcacaccttgtcattcaaaagcaggtgatagacagtatgtaaataggtgtggctatgttccagtaaaacttacggtcactgaaacttgaagttcttataattttgatgtgtcacaaaatattcttttgattttcttcaactatttaaaaatgtaaagtcattcttagcttagaggcaaacaaaagtaggcagtggcttgtgggccttagtttaccaatcccttgctctagcgcatttcttttttttttttttttttttttttttttttttttgagacggagtctcgctctgttgcccaggctggagtgtagtggtgcagtctgggctcactgcaagctccgcctcccaggttcacgccattctcctgcctcagcctcccgagtagctgggactacaggcgcccactaccacgcccggctaattttttgtatttttagtagagacggggtttcactgtgttagccaggatggtctcgatctcctgacctcgtgatcctcctgcctcagcctcccaaagtgctgggattataggcgtgagccatcgcgccctgccacacatttctttttttaatgtcactgacttaccaaagcagctgtgctggttgtgcctgtgaaataaaaataaaattctaagccccctaaactggctgaacagaacccccctcgaccaagtagaccccagaaaaacatgaaaaactaagattcccaaacatgacaagatgaggggttggtcctggtctccttccttactaaccaataccagacttttttcctacaagttgaacagaaaccagccctggaaaaacaaagattggaagacttgctcctctgctgacttcagccaactgcctgacattgggaccagctcccctccttttttgcagtttcaccatgacagctgaccagtttcacaaggcattccttcctgtactgagggcagttgccaccccctcaggcctcatcaaggctaccaaaaaattactcctgggatcccctctcgttgtatatgtttctcattcaatttaggccctttgcacctgtcccctcactcagcatctttaagccagttgattgacctcctatgagatacttttctcctcttctaacctaaccataatttactgtaacctccttaatgtagctaccattttgcgttttttttttttgagacagagtctcactctgtcgcccaggctgtagtgcagtggcgccatcttggctcactgcaagctccacctcccggattcacaccattctcctgcctcagcctcctgagtagctgggactacaggcgcctgccaccacgcccggctaatgttttgtatttttagtagagacggggttttaccgtgttagccaggacggtctcgatctcctgacctcgtcatctgcccacctcggcctcctaaagtgctgggattacaggcatgagccactacacctggccccgttttgcctttaataagagattaacgcacccaaagactgtgttgtctttacagacacttttctctcacctcatatagacttaagggagacccccttacccactaatggatcctttctcaaaaattctgctggcttccattatgcagcctatgtggtggtctctgtgatgggaatcattgaatcaggcccccagccaactgcccgatctgcccaacgagcagaattagcatcccctcacttgggcctgcctactggcctggggtgaaacggttaatatttatgcagacagcacgtatgtctttggagttgcccatgattttggcatgctctagaaacaaagaggattttttacttcctctggacaacctattaagaacaaagactaggccaggtgcagtggctcacgcctgtaatcctagcactttgggaagccgaggcaggtggatcacttgaggtcaggagtttgagaccagcctgaccaacatggtgaaacctcgtctctataaaaaacacaaaaattagccagacgtggtggcatgcacctgtaatcccagctatgtgggaggctgaggcaggagaatcacttgagcctgggaggtggaggctgcagtgagctgagattgcaccactgcactccagcccgggcgacagagtgagactctgtctcagaaaaaaacaaaaacaaagactgttttgtttctcttagatgccattcaggctcattgagccctagccgttatcatagtcgaaggacatttctctgacaagacagaagacagcgaaggcaaccacctagtggatgcagcagctaaagctgccacccagcatgtggctccttcccgagttgtactcaacccactcctcctcctcctcctcctcctcccccccttgctcttccttcttccttgctcccctccccatctgaagacctttccagacttattttcacaaaagacagtcttggagtctggaagagggaaatggatgaaacaaaattgcgcttgcaatccccagacaaaattacaggaaggtccaaatggacatccagtcctacccagcaccctgcaaagacaaacaaccttcatacataatctaacccattagaatccagacaaaatgattcagtggggtagacagtactactgtatggtggctctctccagctcttgccccaccgctatgtaaactttgcaatatctaccctcagtataacccaggtgaactcctgaagctccctccaggacaatttcctctcccctagggtcccttaaccatgtgacaacttgatttcatttagttaccaccatcccacagattaaattttgttcttctaatggttgacgatgtattctcattgaggtaggtctttcacctgtaaacaagcaacagctatggtggtggccaaaatgctgcttgagaaaaaccattcctatctagggtgttcccactgaattccacagcgacagaggcactcattttacctgccaaatactagaacaagttttttaaatctgcccttttacagcactttcactgtgcctattacccccagtcctctgggctagttgaacagtctaatgggatcattgaaagcgagctggcgaaagttacagaaacttaacctgtccttgcctaaagctctcccattagcattactgattctgcagtccattcccaccagtaaatgtcagctctccccttttgaaattgttactggttggtctgtgcacttagaccaggaaatattttctcctgccaaatgacaggagggaactttaggcttattgccaggggcttgttaaagctataaagatcagtcactgcaagttgtagaatctttttacagcttcccaacaggccataaactccagtattaccacctccagcttggtgatgacaagtagtggaagagacatcagttaaaatacttcatccagcctactggatgggtgctattaattaatccttgtgctgctaagttatagagattgactcctggtcgcacatgtctcatctgaaaacaacaacccttgctgaatcttggaagttggtgccagtctctacacgagacttcagttaaccagagcctcatctttagacccagaaaaaggcaatagtcaacataaactgctttcatgagacccagggccaggactgtattcaaagacactgggtctcatttaataatttgcctctatctaaactaatagaatttgttccatgcctttctgctagataacttcgatgtttagctacctgtgtgcttcctcttcttgtctttatcagaactgagcagggcttatgacccccactcctgaggacatcattgctttgttcctgtagtgagatgttctcttacttaaggacagtcccttaagtttgtcagataatccccttggatttgtatgggatttatggtttttcccttggttcagttttctgaattgttaaatggctgttccctccattccttttactcatacctgcactgtcacctttccctctctttgcaattgtccctctgtcttgtctcaatgcagagaatggcatgataacactttagttaagctgtcccacatgttgctagtagaaggaaacctattggattgctggatttgccaacaacttccttgatccattcataatagatatgtgccattggtaatatctgtcactgactgctcagatgtccctaatgtcaccacttacccagaccaacccctttccctgttgattttccaggtccaattccttcaaagcccagatattgtcaccccttgttttgatgtgtcctgtgtttttaacattggaaacccattctttaccatgggaccttctttgttgttgttgttctttgggttttttatggtttttttttgagactgagtcttggcctgttacccaggctggagtgcagtggtgagatctcagctcactataacctccgcctcccgggttcaagcgattctcctgcctcagcatcccaagagctgggattacaggcacctgccaccatgcccaactaatttttgtatttttagtagagactggatttcactgtgttggccaggctggtcttaaactcctgacctcaagtaatccacctgccttggcctcccagagtgctgggattacagacatgagccactgcacccggcctaccatgggaccttcttgacctatgaactactggatagacaagtgtcatctacatcagataaataaagttaaaaatatatccctacagtgcccacaatatttacatttaaaataagtgagtggattctggaaagcttgcaagagaaatggcccatagtttagtttggtgatgtcagcactccgcatgaatacatctgctaattaagacatcctcaggagtatcacttgtgccccccattcaggctgtgtgtttgtatgtggcataaggtctgatccacctgcacagctttgggcacactgttgcctcggcagcctacagttagaaggttcatgcttgctgagatattttgtaaccccccgtatccttacacaaacttacagaaggaccccctttctctccattattaaactaaaaggtctgtgttggcagggtgtgaaggtgatacagatcaaagcatcctgggaatattaattccgagtgttgggatttatgtcaataaggatatgatttgaaaagtctttgccactattagtcacattgttgcgggatttaggagtatgagagacctcgggttgaaacaggagaatcttttattgagtgcactcaggcccagcagactcaggtccaaagactgagcccgaaacaaagacagcacttgacttttatacacacttcacaaaagggtgtgggctagcttgaagcaagcttacagtggtgtgaaagcagggatacagaggcaggacagactcaggattgctcatgaccattgccaagcaacccaggtgtccgttatctaggtttgcctaggcacgggcttatcccataaccttcactgtggggcccaggcagctgtagttcaggcctactcaggcttctcgtgacctttgttgtacttcttagataaaacagaatacttgaagttactagttacagagaacaagaatctataaactcataccataaagcaaaggaaaatttgtttttcttctccttatgttgagggagtgctgggagagtctccacagcacattagataccattatcaagacttttcctgggtctgggttgtgcctgttgccgcctctgggacaagtcagtctaatacaggaaaacttatttctctatctttttaattttatttttctttaatttcccacctcaagatagctgcagacactgcaaaaagccttgtagctcaacaaaagtctctaaactccttggctcaagtagtactagataataaagttgccgtagattttctcctagccaaacaaggagttgtttggcccatacctcctgttacataagtacttcaggtgaaatagaaactgttagaggccgggcgcagtggctcacccctgtgatcccagcactctgggaggccgaggcgggaggatcacaaggtcaggagatcgagaccatcctggctaacatggtgaaaccccgtctctactaaaaatacaaaaaattagccgggtgtggcggcaggcgcctgtagtctcagctacttgggaggccgaggcaggggaatggcgtgaacctgggaggtggagcttgcagtgagccgagatggcaccactgtactccagcctgggtgacagagcgagactccatctcaaaaaaaaaagacactgttagagaaagactatccaaacaaccttaaatggttacaagagctatgaactactaatcctctcaatgatctatttagttggcttccaactggcctgggaaatccctttcaaactgctaagtgtttgtcatattcatagtctccatcatactttctttcttaacatttaaattacttataataggactgcaagaagtcccctgttaaaaccagaattatgatggctcagtgcgtagaacttacaggcaagttaattttgtagccattccttttggctcttatatctcttataccttacgggttagtgagggcctgccatctctctattcctggttgatctaggatgtccaattggctatcgtagggatggatctgggacagatagccacaccaccctggcaatgacatgggacaaaataaagatttggctattggtgctgcttgcagcagatcgtggctaaaatggggaaacatgaaataaaagtaaatttctaagcacccccctgccccacccgactgactgaatggacactaccttggccaaggagaccccagaaaaactctgaaagctaagttttccagccatgattagatgagagtttggtcacacctcagtacacccccttcctcactaaccgataccagactttttttgtaagcgttaaatagaaaccagccctggaacagaaacaagactcactcctctgctgacttcagccaaccacctgacaccacagccagactcccctccttttttgtggttttgacatgacagctgaccagtttcaccgcgcattccttcctgacaagtgaccaccagtcacagactagttctggctggtttactcaggctgtgcaccttttgacatataaagcttaattttactgcattttaatgttaagtctccaccccaaagtgaacatggggtttgtgtaacatgtatgtttgcttatcatacacgcatgaatccacctttcatgaatatacatagctcctcctataacctgttaaatatgtacgttagccagcccatttagtgtaaaactcctgttccccacttcttcctttgaaatggttgcttttgttctcagccaaaggctctgcttcccagcctgcaggttgcacgtcaataaaagaaataaagttcttccctaatgtatagatctcgtgattttaagtcaacaccctacagaaagtctgtctcctggctttgtctgtttgctaaatagtagtgtcattgagcttgttctctaatcccccgtatttgctataaactcggggttatatctaaagactagcaatatctaaaaaacaaattgtgccttatttgctgtccctttgtattcctagatcataggtgacagtgatgtgacacgattcagtgagcccaataactgaggcttcaacttaagagttgtggttttctcctggttacaaacagtgccgttttctactcttactttgttttgaaaacgaaaagtcaatatttgaagaactcttaaataataaagtaggtgctgcttttcaagccagctatttgaagaaaattaatgaaaaagaaacattactgatctatatagggtgacatgctactgaatgtatgaatccttcagttttctcccctaatgagaagtagcaattttccactttgccttgtttttgttcctatcattccctcccacccgtatctcttactttcttagcttttcaagctacttactatctttagctggatctggctagacattggttttcatacagtatttgtctagtttgtttgagtttacatgccaataggcttatgtctaatagagacttttaatttaaaagatactattgtcaacctcaaataaccaaaaaggtcagaatctagtttacagagtttattcaagcacaacagttgaggactgcagcccaggacacacttccaagttgccttggggagtgctccagagaacaaaagagaggctcaaatttttaaaggacaaatcaaaaggtggggcgcggttacaaaaatggttaatcagggattctcattggtttacagaaataacattggttagtgattggctatgtattgttgaactatagggtgtatggcattttagggccacttggcgtcagtctagagcccacatagcaagcggcttcaagaagtaattatgtagctcaaaggggagtgagcttggactgctgtgaacattttaaatgcctttctgggcctgatcatttaaaggtgcttgcatttctcagatccaaggtttttgtttctcactatcccttaacatagataagaacattttgaacaaattaaataaataggattttgagtggctttgttttcatgattacatcatgagtcttaatgttcaaaacatattgactcacatttggctatttgataatgcattcttggatcgggagccttaaccacttaaggtggtatgacagtatggctaaagctgattcaaattccatttgttgttggcatgttacagtgtttgtaataacagtgttcccaataattacatgctaataagacttttaatttgcaaaatgctttcatatttgtttttggttttgagccacattttgttgctggaaggagaaagtttatgtccaccctactagtgagaaaactgaggctcagaaagactcacttatttgttgcgggtgagctgtgactatctgggccagcagtgcgagggtacaagaatttactaagactggctgggcgtggtgcctcatgcctgtaatcccagcattttgggaggccaaggtgggtggagctcctgaggtcaggagttcgagaccagcctgtccaacatggcaaaaccctgtctctactaaaaatacaaaaaattagctgggtgtggtggtgggcgcctataatcccagctacttgggaggctgagacaggagaattgcttgaacccgggaggtggaggttgcagtgagctgagattgtgccactgcactgtagcctgggcgatagggtgagactctgtcttaaaaagaaaaataaaaaaaagattaggatgatgctaaagtgtggaaggatggtgggtggtcagctgtgattaccactgtctacatctgcatggcctttaagtgcttctcactgcacttgggtcaagggacttttgaaggagtcttcctgcatttctgtctgcccagataaacccagagactatactgggacgtaggacctgctttcctcatcagccaggacctatagacctttctcatccctcatttcccccatcccagatctcaaatcctcaagcagaatatcctgacactctggcctgccttcagcaaaaatccatcaagttgagtaaacccagaatcttccctcacctttgatgtttcctcttagtaatttttcatctgttgatccccattctacttggtggcaataaatcctcacttgtccttgtattcaaaattgagcccagtccctcccccttctgcaaaaccttcccttctgtcagtagtctctcttgaataaaggcttcctcagagtctttgacaagtgttatgaataattgtttgcttaacactgcacaaaggggaaatggtctagaagagatacagaccatttctgttttcctaatgatcagtgatgatcggtgaccctagactaaacctctctgaaggattattttaggcagaaaggcctctcccctcttccctgggtttcctttctcagtctgccccatttatctaatttcctgtacttacttataaagaaactagatagtaattctttggattgggccattccaccaaacttctatattgtatgtatagtattagatgatgtttatatgttaatagcccttttaaagggtaccacatcccacccatctttgttgacatgttagtgcccaaatatctttgtagttttctgcattttactttttcccctattgtttcaaatgcctggaatactctcttcactgtctcttaaattttctaaactcccattcactttcaaggtgtgtcttattggtggagcagacactcctggggaccaacttggcagaaattagaatgagaacataccaagaagctgaaacttggcagaaataatgtagggagtctgttggtaatcagctgcctaccaccaccgcaaattttgagattctcctcctgctaaaagctaaattatgtgtattttcaataagggaggcatttttttttcttgcctgtgaccagtcacagtctgacttcatatcttgttgttccccatgttcccttatattctacagcagaacagagctttctgttgcatccagtattttaaaaacaagtgtctgtaccataactgagtctggtgtcttctgacctctcccttccttacactgtcttccctcagtatcggcaggagactggttccagaacctcctgcagataccaaaacccttacataaaatggcttggtgtttgcctgtaacctgtgcatatcctcatgtatgctttaaatcatgtctagattacttaaaatacctaatttgatgtaaatgctatgtaaatggtttttataccttactgtgcttttatttatattattttttattgttgtgttgttatttttattttctaatattttcaatcgacctgtggttggctgaatctgcagatccagatcccagagatacagagggccaattgttcttctctccagcagccagaacagcctgtagctctttacaagcactgtgctctttcccatcttgaaggctttgctcccgctgcttcctctttgtgcagttacctctcttccactggataacagtcactcatcctttaagattcagttcaatgatgacttctttctggaagcctcttctgagccagccaccagactaggttgggtgttcctcttctgtgtcccatagtaccagtgtttacttctaatatttcataattgtctgataatggatctgccttaccagttctgcggtgagtttcttgaaagcaggaattatatcctattcatctttgtatcccatgtttctagcacagtagttgacaagtggtaggcacttggatattgtttgagtagatgagtgtgtgaacaaaaagtttagtaacagaagctttttatttaagtacaagtttcatgtagagactcaataattaatcagtgacttttgctttctacagatattggtatcaacttgactgaccctatgttcagaggaatttataggggggttcaaaagcatcaaggtaaatatttcctttattaaggcgaatagtttcctatgaagacaaattttctgcctcaggagatcttgaaaagcataattcaagctgagtcttgtggctcacacctgtaatctcagcactttgggagtctgaggcaggaggattgcctgagctcaggagttcaagagcagcctgggcaacataatccgctcttaaaattgaaataataaagaactcctggctgggcgcagtggctcatgcctgtaatcccagcactttgggaggctgaggcaagtggatcacctgaggtcaggagttcgagaccagcctggccaacatggtgaaaccccatctctactaaaaatacaataaaattagctgggcatggtgacatgcacctgtaatcccagctacttgggaggctaaggcacgagaatcacttgaacccaggaggtggaagttgcagtgagccgagaccacaccattgcactccagcctgggcaacaagaacgaaactccgtctcaaaaaaaaagaactcattatgcattttggataaacctgtaaacaaagtgaaacacatttattgataaaccatgatcatgaacatttataataaagtttaattaaggtcttcttacctgtagaagtttataatttcaaatataaaacttcaaatagccatttgcacagaagctaaaaaaaaaagtcaaatttttgtctgccaggttttcataatacagagtttatcttttacagatgacttacaggatgtaatagggagagctgtcgagattggtgttaaaaaggtaacatccattttgttatttttgagatttttaaaattcattttttaactaaattttagttaaaattttgcagaatagaaaggaacaaaccaatgccacagttggggtacatattgtctacttgtgatattagaaagttaattgaaacaaaatatcaaaatactctgttcatagcaatttaagttacacaaatctcatgtattgtttttatatatgataaatggcaaaagctccttgaaaaaaaattttttaaacctatgtgaattaccaggcttaagaggcaacttttaatcaattttataatataatttagcatttgtcagaattaagcaataatcaaaaatacatgtacctgacaccaagtgtagctatttatagtttgggcataccatttaaataatggagtaaaactttcatttttacagtaataaaatgcctacggctttttagagagttctactaagcaaatgaatagatatttctttaaattagctttaaaacagagagctagcccacacatacactaagaaataaggttaaattccatactatgctaccaggacacttggtagctgctacctccaagatgaataacttgttttggaaagtgacactgctgactaaatgagtttgcagactccaactctaaacttttatttgttattattcacaaataatatgaaaagataaaagttacattaatttctcattatagtcactctgcttggtaaatcactttaaacaatgcttttctgcagactctgaaatactaggctcctaaattttcatgtgttagccatgagtaatcttaatgtttattcacacacacacacttaggaatgacagaactgaagtgatttttacttggacatggttccaaactgaaatttaattcaataccttgcatttatagtgtagtagttaaaagcatagttagggcataacaaacgtggtatccagcccctacttcatttttcatagctttataacctggagtcttttatctcactagacttcagttttctcatctgtaaaatgagaatgataatagtacttaattaatagagttgttatgaaggctaaataaaatattgagtgtaaagcatttggtattatacctggcataaacaaccttcattatgtgtatgatggaagccaccaccatgagatcatcatcatcgttatcttttttttttttttttttttttgagacggagtctcgctctgtcacccagactggagtgcagtggcatgatctcggctcactgcaagctctgcctcccgggttcacgccattctcctgcctcagcctcccgagtagctgggactacaggcgcccgccaccacacccggctaatttttttgtatttttagtagagacggggtttcaccacgttggccaggatggtctcgatctcctgacttcgtgatctgccagccttggcttcccaaagtgctgggattacaggcttgagccaccgcgccaggcccatcatcgttattttatacactgggagaggagatgatgccctcttgtcttgccgtttttttcaactatttagtaaagttgtaggtaaaataaaaagtatacttggttagtattttacgtaatttaaatactggatgtaggcatctgttctagtattaaagttttaggtatgttagtaacaagaaagttttcccaatatttttattagtctttttttttttttctggaggcgagtctcgctctgtcccccaggctggagtgcagtggcacgatctcggctcactgcaacctctgcctcccgggttcaagtgattctcctgcctcagcctcccaagtagctgggactacaggggcctgccaccacgcctggctaatttttgtattttcagtagagacggggtttcgccatgttggccaggatggtctcaaactcctgaccacgggtgatccatctgcctcagcctcccaaagtgctgggattataggcgtgagccactgcgccctgccttacatcttctgctttacagatagtcaaggatttaattatggctatgtttccggaatggatatgcaatagctaatcatattaaagatttaaatagctatatgaaaatatctatttatcatttgcaattctaccttcgttttgtgttttctccctaagttgtacctagaatgaattcattttagtgagacttttgaagtatgctttacaaaaatatacatcattatacttgaatcacgtcttcagaagaaggcgccccttacgcagcactgcttcagtgctctcactatcaacacataactctttagtgacattttcattttaacagattaggaaagatggcattctaattactgagcggactctaatgggtctatgcagaagtatgcttatttgccaaaagccatacgttttcctacagagaattcattagcatgcattaactcactgattctcaaaccttttgctctcaaaaccacttcacattctttattattgaggacccccaaagagcttttgtttgtgtgagtcttacctactgatacatactatattaaaaattaaaacaaaatattttaaatattccttttaaaataagaaactactggataacataaatagcatatttttatgaaaaataagtatattccagaacaaaaaaattagcaacatgagtacagttgtatgttttttcaaatctctaatgactgtgttactagaagcctgctgaattttcatatctttttctgtagtcagtctctggtggtgtcaaacatcgtgtagcttcttgaataccttgtggacacttgcagtagagtgagagtgaaaaagacagaaagtgtcttattattgttaggaaaatagttttgacttcacatacctactgggagttaccagactacacctggagaactgttgaatcaatcaacactattgaatcattgatttcgttattcacgctttcataacacctgatctctgtcctcaaggaatgcattgtctaataggaaaggtgggtatataaatacattttaacagagtctagtgatgaattctgcacctctacatgcacacacacatacatacatccctgaggtgtagtcaggcactactctgcataggaggtaatctcccagctgaattttaaagggtaggtgtgtggcagtcacagaggaaagagcattctggaataaggaagtggtaggaaggcatgtttaggaaactgttattgctgccctattaaagtcagcttattttattttctttctatttcagtttatgattacaggtggaaatctacaagacagtaaagatgcactgcatttggcacaaacaaatggtatcctcatatttcttttaccaaaaaaaaaatgaattaagtaattttgaagaagtctttctgaaaactgcttcaggtacaatacaatggatcatgactggaaacaataggaaaatggactgatttaaatgggacatgattaagatgacaaaattcaaagtactcattggtatatcagatgtttataaaactgtttcatactgctcaatgaagattattttaagatttcagctaatgagaataaagttctccaggtacacagtttaacctcaggtgtgttttttttttttttttgagacggagtctcactctgttacccaggctgaagtgcagtggtgcgatctcggctcactgcaaactccacctcccaggttcacaccattctcctgcctcagcctcccgggtagctgggactacaggcgcccgccaccacgccaggctaattttttgtatttttagtagagacggggtttcaccatgttagccaggatggtctcgatctcctgacctcgtgatccacccgcctcagcctcccaaagtgctgggattacaggcgtgagccactgcacccggcctttttttttttttttttttttttttttttttgagatagagtctcactctgtcgcccaggctagagtgcagtggcgcaatctcggctcactgcgcgcgccacctccctggttcatgccattctcctgcctcagcctcccatgtagctgggactacaggtgcctgccaccatgcccagctaattttttgtatttttagtagagaaggggtttcactgtgttagccaagatgggtcttgatctcctgacctcgtgatccgcctgcctcggcctcccaaagcgctgggattacaggcgtgagccaccgtgcccagccaacctcaggtgtttttgatgtggaattcatgtgtgtgttttaacgtgtttaagatacgagttgctttttatttactcttttttaacttaagctgtgaagggccattttattaaatttttactagatggaccagatactgtgcaaggtaccaggaatgcaaataataacactatataatctctcatatccttgctttatgttcatacattttgcatttgtttaaaatcttaaaagttttaagactgattattaaaggaatcctagttaggtaaaacctcatttatctggcattcacgaatttcacttttttttgcattatcttacgtgctagacactgaggaattaaacattccacataatttttaaattttgtattttaaaatactgatgtgtttcctttatgtatgaaaacttactaaaagctatatttttatggaaatctctctaaaatccacacttgtcttttaggatccattcacactttttctttttttttttttttttgagacagtcttgttctatcacccaggctggagtgcaatggcacgatctcggctcacggcaacctctgcctcctgggtacaagtgattctcctgcctcagcctcctgagtagctgggattacaggcgtgtgccaccacacccagctaatttttgtatctttagtagagacggggtttcaccatgttggtcaggctggtcttgaactcctgacctcgtgatctgcccggcttgccctcccaaagtgctgggattacaggcgtaagccacctcacccaccccattgacactttttgttagtgattaaagatagactatcttccagggagtttttgaaatatataagaacattttatccttacttttcatccccaaacagctatgctttttaaagttctcccacctccattaccagccctcttccactcctctccatgtaacttctgttcttacagctttaaaagtgctgcttcctttttttctaaacatctacatgagagcctgaggaaagcttgatacctttcccatggttcgggctcagctaagccattcaaaaagtgtttttgacttctcatttgtattctatgcaagtcaagctgtcagagtctcctccgaataagtgaacctcatttacttgctagaaaaacaaatccccctttccaccactttaaatcgcccccactattaacctgtttaagggaatacatttttattgctatattaaatacatgaatcaataatggaggaataggtgttaaacaaacaaaaatataccaatcaagatagtcacatgaatggtgaatataaaagataaaatcagtgctggtcatggtggctcaggcctgtaatcccagcactttgggaggccaggcaggtggatcgcttgagctcaggagttcgagaccagcctgggcaacgtagcgaaaccctgtctctaccaaaaaaaaaaaaattaaaaattagccaggtgtggtggcatgcgtatgtagccccagttacgtgggaggctgaggtgggaggatcgcttgagcccaggaggtcaaggctgcagtaagctgtgatagcaccactgcactccagcctgggtgacacagtggcaccctgtctcaaaaaaaaaaaaaaatttcactttgcattctacagccctaaatgccaagctttagaaaaagttgaattattttattaatacattaaagcaattttcatattcatctcctactttgtttaggtattctaaaaattgtcatatgattaacataatgcagttcttataatttgagtaatttattgccattgttgaaaaccagttgaaattacttgatatcctctaaatatcataataaatataaatatgagaaaatactttgaaaataatcctaagacattattttctgttaggtatgtttttcagtacagttggatgtcatcctacaagatgtggtgaatttgaaaagaataaccctgatctttacttaaaggagttgctaaatcttgctgaaaacaataaagggaaagttgtggcaataggagaatgcggacttggtgagtgccagcctcgcctcttagagtgacattgtttgaaaataagtaatttgttctgtataagttaggagtaattattcttctttatctttttaaagattttgaccgactgcagttttgtcccaaagatactcaactcaagtaaggaaatttgttggctttacaaattattgtaaaatcatgagtgatttttaaaatatcttgtatcaggtgagagtatagttggattaagcatgaggatatttttgtttttccctttgtatatcaaaagtaagtgaaacaaattccatgcatacttgcatgtaattcataagggatggaagcacatagttccctggttgattaaccatttaattttattgtaatggtagaaattagggatgagttttacatgatagagattttacattttctgtttgcttgtttaacagacgcattcatacgtgaacagttccaatggaatgaattaaattattttggggaatgtgattgttttgttttgttttttgagacagagtctctctgtcgcccaggctggagtgcagaggcgtgatctcagctcaccgcaacctccacctcctgggttcaaatgagtctcctgcctcagcctcccgagtagctgggattacaggcatgtgccaccatgcccggctaatttttatgtttttagtaaaaattgggtttcaccatattggtcaagctggtctcaaactcctgacctcaaatgatccacccgcctcggcctcccaaattgggagatataatttaagagcaaaggatattaaaagtgtattacaagccaggcacagcagcctgcgtctgtagtcgcagctgtttgagaggcagaggcaggagaattgcttgagctcaagagttccagaccagcctgagcaacataaggagactccgtctctaaaaaaaaccagcaagaaaaaacccacaaaagtattataggatcaatcaccaaagctagaaaagcttattttactcttgctgggcattgaatattgctagtttggaactgtgagattcctttaataggagccatgttgaatggtggcttctgagaaaactccaaagctcacgaccctgcaggacttcctgtaacccattgcctggagctaaatttggagctcctgtcatcatactggtgggtgagtgttatagattgaaaagaaaatttaggtcacagtctgaatttaaaacgtaagcattttgttgaatttcaaaaacatcttaattatgaaaatgataaaacattagactgagcttctaaagggggttaatttattcatccattgaacaaatatttatggagtactgtgtgccagccactgctgagagctcatagtatgcagaaatatgaataaggtagaatatctgtccctagagacctttaagaataaacaatcctctgtcctccttagtttcttatacacaaagaagaattaggatcagattctctcttaagataccatccagctatatcataatgtttaacaattaataattttgtcatatggtgatatgatcatatgattaagccagtgacttgatggcctgaagggatttttttaaattacgcatgaggaaagtgtacttcctcccgcttccctccctgctccccacaaatgggattctgatatgtaccccctggttgaaaatcactttggggaggagcagatctgctagtggagtctgtcataccctagacctcaagctccaaagttctgaagtgtgaagatctataaccaagtagaataggatgggttaacgtaatgctctgtggatacctactctctcttttaggtcgctcatttgtacatcccttgtagaactgtttagtttgtggtatattatttgctgatttgctgtgcctttcagggacattcatgtggttactagcagggttactgaagccctatacctctgtcgaatattatgtaggccagctcacttaaccttaaaagttctcgtgttcacattgaaatagaaaaacagttctctttaatagttctttaggttaagcccagatatcatattcctcaactttcatgtctggttttggtcaggataagccttgtaagtctaatagactgtgttatgacaagcaagggcaatggcagagtccccgtgtttttttgcccatatgacttttcatccaaaatgagttagaactgattctaaaatgcaacctcaatactttaaactcacttttgggattaatcgaaaacattgacagtatcagtttaatttaactgttctgaagattcttcaccatcatcagaatagcgtctgatcttagaatatgcatatcacagcttgtgcttgaactcacatgccaagcgttaattgctaatagagaggttcaaactacattcagtaaatgattaccaagtgcctcctcagcatgatacaaagaagaataagactttttccaagagaggacataaataattaaaataggttggaagtgcttactaaagtatgtgaacagcagagggaaggactgactttctgggggatgctctaaggtgacagcatatgacactggcttcttccagagtggataagctaatgacaaagtaggaggaaattttgataagataggcagttctacttgagatttttaaaattttaataataaaacatcaaatgacttggttaaaaaaacagccgggtgcggtggttcatgcctataattccagcactttgggaggccaaggcaggccgatcacctgagatcaggagttcaagaccagccttaccaacatggtgaaaccccgtctctactaaaaacaaaaactagccaggcgtggtggcgagcacctgtaatcccagctacttgggaggctgaggcaggagaattgcttgaactggggaggaggaggttgcagtgagccaagatcgtgacattggactccagcccgggcaacagagaaagattccgctcaaaagaaaaaaaaaagacacactagtaacaatcacattttgattattgttaaggaaacaaatacccacattctctgcccctcactccttttcccctcgcatatactcacagcatgcaatctgttttgtatacacagcactctacttgtttcagcacttaccatgttgtacagaaatgggttttcattatcccttcctccccgcaacagacaggtgtctttgagttcctcaaaggcacacaccaagtcttactcatgtgacagttccatagcacttagcacagtactctcagcacatggtaggcacttagtaaatgtctgttgaatatttaatacagagggaaggttcttttcttttttattccctttgagcagcatggataaaaagcctataattcagctttcactattgggtttatttttggaagacttcagattttggtctgcacttttctaccatctggaacaaccagtgtatgattgtgtttgtttgtttgtttgtttgttttttgagatggagtctcactctgtcccccaggctggagtgcagtggtgcaatctcagatcactgcaacctccacctcccaggttcaagcaattctcctgcctcagcctcccaagtagctgggattacaggtgcccatcagcatgcctggctaatttttttgtatttttagtagagacagagtttcaccatgttggccaggctggtttcgaactccagacctcaagtgatccgcccaccacggcctcccaaagtgctagggttacaggcatgagccactgcacccggccatgatttgtttttaagtaaatatgtagtcaggaaaaaggagatgtatgagaaaagaaaaatagaaaattagggggcaagacagaaaaattaatatacaatagatgtagtgtctgaaaaataatggtaagtgaaggcggtgtatgaccatgttaaaaggatgagctttggaatcagcagatctttgggtgagatttacaactgcctttggtgtcacttcatccctttgtgcatcccctttaaaatggggagattgctgcctacctttcttaacataaggcacataaagcccatagtgacatgagtcatgcagagtatgtgcacaatcatggctgttgttacattcctcatactagaaataattaccaccctaaaggaagatgctagctattgtttttgtttggaacttttaaaagtttttttttttaatacttttttcttgttttagtacctagaccttttctggaaaaagtattttttaaagactaagaaagagaagcaaagagtgaaaacaaggaaaggcctgatctacttatggaaagtttatcctttaagccataccctgtattttcaatttcctggccttatgctacactcctttccttgttgcaatttagagctctgttctcttgggtaggaggaatttgctttgggcatttttcttggggctttaaaatgttaacactgtgcaggtcttaaaaactacaacaagaagattttaaaacaatcctttggggatttaggggaccctagagatgagcaattgaggccatgttgccatcaagcagcttacagaggagggattactacttgtgttgaggtatacccatgaaactcactgggctttttggatttgccttgatcctaattaataacaactgctcctgaagctgaacttttccagctcttgtcgttagatagttaaacctcaactgtaagaagcagtaataaaatcagaagcttcactaagatgagcaaataactcaagtggaaaattattttcatttatgaactttaaaaaaataataagtgagtaaaacaggcagagaagtctcttaatagatgccaattcctaccctgtaacttatacagttatttctagttaccatggcgggtttttcttctctaaagataatagtcgtttgatgttcagtactagttatcctcaatttgtatcattaggaataattttttttaccacatggcttctttatgatacgtagctagcatgacttcagggacctttcttttcttgaattatgtaaaattctgtgggcccattgcttgggcttctgttattttctttttcttttttctttgagacagggtctcactctgtcatccaagctggagtgcagtggtgtgatcatggctcaccgcagccttgacctcgccaggctcaagcaatcctcccacctcagcctcccaagaactgagactgtaggcatatgctaccacacctggctaattcttgtattttttgtagagatggggtttcaccatgttgcccaggttggtctcgaactcctgagctcaagcaatccacccacctcagcctcccaaagtgctgggattacaggcctgaaccacacacccagctggcctctgttattttcataaactgtacttttgcctacattcctataggaagctaattttccatccgaccattagatactgtgaatttgtagcttggtcatgtggtttggtccatggaattgtgtgtggaaaaaataaccagtacagcgtggagcagtgcacacaatgaagagtaccgcctgctgtgtgtagtcagagccaaatatattagtaaagttgacataatgactagtgcacacttaactgctgacatttggtttactttagaggttatggaaatagtgactggttatattatcaaaatctctttttgtccaagttgtcgttaatatttcctacactgcaaaatttcagcactttgttaatgaaaggaaaatatttttgcttattctaacccagcagaatctgaaaaggagattttaaaacccaaacatttggtaatacagacatagacgacctattttaggaagactatttctatttttttaatttttaatttttttttttttttttgagacagaatgttgctctctcacccaggctggagtgcagtggtacaatctcagctcactgcaacctctgaccctgggttcaagagattctcatgcctgccgaatagctgggattacaggcatgtgccaacatgccggctaatttttgtatatttagtagagacgaggtttcaccatgctggccaggctggtcttgaactcctgcccttgagtgatccacccgccttggcctcccaaagtgctggcattacaggtgtgagccaccacgcccggcctgaagactgcttcttaagaagtacatttctatttctaattttaaaatttagcattttcaagagagcaaagggggtaaaatagtcctgcacatcaggaaatatgatatagaaaaatatagcaagagaggcttaagttaaacagagaaattgtttccccaaattaaagtgcttagaagaggtaagcacatttaagaaaataataagccacctgttatcctgattcagttgaacctaccatttgtgagaacaagggggagcactgtgttgaagtgaaaagacaaacagaatgaacattcgttgtatcctctgaatattgtcattatactccgggaccagaaggaagcttcttgaaaacgtaacaggtttttgtcgtttaggctgggacttggaattagagcagtgaagttctgttccaagttggccatgccaggtattgttatcttggacaaagtactacacctctctgacaccagcttttatactcaggttattttgaggatcaaatgagacaatggtatctggtacttggaaaaaccttcttatcaagtactctttaagatattcagggctaccactttatcatgtaattttctttttttaatagcataattgagttatttgctgtttagcaaatacttagatttcatttttgagggaaaccttgttcattttgcccagtggcaataacttcttttataacagcacataaaaaactggttgcaaaatggaatagattagcatgcagtatgaagctctcctgggcttctcgcttggtgagttgactcccactgatggtgctcccagtggcaaggggccagtggtgttactttctgaaaattaaagggcccagataattttgtaagcccagaaaatgaagtatttctttccagaagttgtaagttataaaagccctttgataagcctgatgtgctttaaatattcatgatttttgtcctgtaatttctagagaattaaatacctttaatttaaaagctcttttgacatcattaccttcctcatgctaaaatacaatttgtaatgagaattttttttttttgcattatgcagatattttgaaaaacagtttgaactgtcagaacaaacaaaattaccaatgtttcttcattgtcgaaactcacatgctgaatttttgggtgagttaaaaccaaagtctcattcagaacttaagaattttgtagaaatcaagctatttgctaaaagttctttgtttttaattcacagacataatgaaaagaaatagagatcggtgtgtagggggagtggtaagtataaaatagtcatttttaatacaggttgaacatctctaatccaaaaatccaaaatactcccaagtacaaaatgctccaaaatctgaacctttttaagcactggcatgagataatgacacctttgctttctgattattcattgtacacaaattttgtttcacgcacaaaattatttaaaatatttaccttcagggtgtggtataaggtgtatgtgaaacataaatgaatttcatgtttagacttgagtcccttcccaaagatttctttttatgtatatgcagatattccaaaatctgaaaaaatctgaaatatgaaacacttttggtcccacacacttgggataagggatacttaacatttatgtgacacacaaagcatcttggttattaaggatggcccctaattcagatgtcaacatttaaattttttttaaaaaggaataacaaagaaaaacataggaattagatagaattcaatagaattaggagcttcttttcccatcctttgaaagacatgtaaatttactgttgaatttatggaccaggtgtggcataaacacaaatcagttttaattacagttcctttgttcaaagtacaagaatgcgtacagaattccattcacaagaaaaccctgtgaaattttttttgttttttgtgtgtgttttttgtttttttttttttttggttattaagaaagggtctggctctgtcatccaggctgaagtgcagtggcacaatctcagctcactgcaacctctgcttccccgggatcaagccatcctcagcctcccaagtagctgggactacaggcatgtgccaccatggccagctaatttttttgtatattttgtagagatgaagttttactatgttgcctaggctgatctcgaactcctaaactcaagcaatctgcccaccctggcttcccaaagtgttgggattacaggtgtgagccactgtgcctggcccttgaattctacacatcctaatgctgtgcatgatattcttcgtctcttctgtcagctgttctttaatgttcttccatccaaattttgagcaaatataaactaatttttatgttttgaaatattttaccatttgttttaggtttgcctttctcatttcttgtccgctgtattcacctactattctgatctagagagtcattctcctttctgtaatttgcattctgcactaaacacttctctgatatagccattttagtcattattctggagacatttcccataaatactatctgctaaccacatacctccgatatctatggcagtgatttttttttttttgagatggagtctcgctctgtcaccaggctggagtggagtggcacaatctcagctcactgcaacctccgtcacctgggttcaagcaattctcctgcctcagcctcccaagtacctgggactacaggtgcacaccaccacgtccagctaatttttgtatttttagtagagacggggtttcaccatgttggccaggatggtctcgatctcttgacctcatgatcctccccccatcagcctcccaaagtgctaggattacaggcatgagccaccttgcccagccatgatttttagtctcttcgatcatggactcctttggaaacctgccttagaaaaatgctcagatatacatatattcatatgcaatttcaggagagtgactcagtgagtgactgtgtctagcaaaagaactgtaatccaggtagattaaatcacagttacactatgcctgctaaggaaagaggaaatagcaccaagcacttgcattcccatgcggcctgacgttgacagttttatgcgtattctctaagttcaacctctgcctcatctatactactagtaatatgtatgcatcctgcattgctgtaatgttaatattactgtgcacttttttcctgtttgtactaactctgtaattttttcctgtttttacttactctgtaatttatcctgtaggaactgtacttaagaattgagaggggttttagttttaactaatgccgttgggattattagtggtatttatcctaaccttcagactctacctctcagcccatttgctttatttcttttctttttttctttttctttttttttt

SEQ ID NO: 453 - DNA, 23805 bp, Homo sapiens
  source 1..23805: mol_type = other DNA
tctgggccgagcccgcccagctggctgagacgcgtggagcctggcggcgagtgggggcgtgcgacggttactctggttactggggccgcgccgcgctggcgagagccgccgcccgcgagggatgctggtgaggaagccgtcgggagccgccgccgccatctgagggaggtaccctggaaaccaccttttatcggtggggaagtgcagtcgcggtgggcggctctgggggccagcgaaacgggaggcctctaaatctttaggttggggctgcattgccctggagccgcactcttgagtccgaggccatcttttgttggagaaggcgtcggcgttggcgttttcccgaggttgggctgtacagtgtctccgtccgcggaaaaagaagcctctgaacccgcgccggcccgcagcccccgtgccttccggccgctgctcgccgtcgccagaggctaggccacgtttcccccagtgccgaggtgtttctgtgaccctccctccactcccattcccttctgaaagggcacctgctcttggtgagaaaagaaattatagcacgaagagccagtatcagaagagtatccatcacccgcagcaaccgctcagggaacaccatcaaaaaagaaaaaaagggaatatctggatttcctgggcgaggaggagcgagtctgctcgggagctgttccagcaggcgatttttaaatactgctttctacgccctatacaacttggcttcacatacttttacactaactttatatgatttttaaaaactggtctgatcggacttctcgtcctgggacactgtttactggagtctggccggctctccgtgctcctcttggtacctcattttggggagaaccttaaacccactcgagcagataatctccgccttgaccggtgccaccaaagaagccttggaaccatgtggacttttctgggcattgccactttcacctatttttataagaagttcggggacttcatcactttggccaacagggaggtcctgttgtgcgtgctggtgttcctctcgctgggcctggtgctctcctaccgctgtcgccaccgaaacgggggtctcctcgggcgccagcagagcggctcccagttcgccctcttctcggatattctctcaggcctgcctttcattggcttcttctgggccaaatccccccctgaatcagaaaataaggagcagctcgaggccaggagggtaggttgatttcaaagcgggcagatgaatgtcttatttaggagtaggattgggttcactcaaatataagttttatttgaattgcaaaaggcggcaggttagatgcttgtatacattctcatgtattttttattttaaactctgctgtgccttggttacatctttgaccttcttaagaatgagtgaagacatttgtttcatttagcattggttgagcctcagatggaggttggatatttgattatgaaagatggaacgaaatgttagaatttcattttgaaggagaagaacaaccactttccatgatgaaaaagtttttaaaaagttcttgggtaaggattggatttgtgcctgaggaagaaagaaacgtgctgcgggtaagtccactgcttgtaagaagtgacagctgactggggaaagtgacagaacagtttgaaaagcaggcagaaggagaatgctcaacattttgaggcattgggctcaaagttctcctcccccgaatattggagcattgagtaaatgcttgtagtaatgtcctaacataaaggccaggtcttcaaataagggtgtagttgggattcctgcaaagggagcagaggcggccactgggagaagatgagggggaagagtttaggccagatcatttagggcatgttggcaatgagtgttcgggctttttcccaagagttctcccaagaacactggaggattttaagtatgggagtaactttattcggtgtttactttttaaaaaatttttgttttttgagacaaagtctcgctctgtcgcccgggctggaatgcagtggcgtgatctcggctcactgcaacctccgcctccctggttcaagcgattctcgtgcctcactcagcttcccaaggagctgggattacaggtgcacgccaccactcctggctaattttttttttttgtatttttgtggagacagggtttcaccatgttggccaggctggtctcgaactcctgaccttaagtgatccgcctgcctcagcctcccaaagtgctgagattacagacgtgagccacggcgcctggcctgacttttaccttttaaaaagaacattgcagttgctgtatggagaatgggttgtaggcgtacaagaatggaagcagggctatcaggcaagagactatagcagtaaacgcccacttgctttttaaatttttgcgccaccatttctggatgtgagatctttggcaaattgcttaatttctgtgagaatctgttacctcttccattagacgggaatggcaccacccttgctggtagttaatacctagtctataaccgcctgataatagtagctgttaatattagcctaggggtaatatacatctcttagggtgagctttatgagtagcgctgagttcagtgacatggtgcatgggtttgaggaatgggaaaggagggagagagaatccttaatgtttaatttgaacttttttgtattgtggtctgaaataatttcccttaaggtcactgagctctagttcaggtggctggaatgctgttcctgttttcatgctgtgtagagaaattttggagtaggaaaattgggttaccagcaatcaatattggttccattttgtgaacgccccaggctttctctttatttttttgtgaaccagggagttgttagattgtgatctattgactactaagttcccattagtgcttactctactgatcaggctctgcaaggcctgttttcctccagagctctcctttcagggtgtgtgtgtgtgtgtgtgtgtgtgtgtgtgtgtgtgtgtatataaaacaggaaaaacttatgaagaagcacatttttggttaagatgacaaaaggggcttgtcttgccccctacagtaatttaaatatagtcagttctggccattaagacatactaatgggaagagtagaatattgagatcttcccatagtaaaaggacagaaaagtatttttctgagagaaattaaaaaaaaaaaaagaatagacaaattcccagtccactatagaggtaaaagaatgctgggtggatattagaatcacagagtaaagttctaaaggattttaggcttcgtcttcctttttgcttgattattttttaaaaaccccttcaaatggcatttagtcttatcttaatcattaaggtcaaagaactcaaggaaggtggttccttgcaattctgtatctgaaatgtattcaaatgtgtgaatccatctaccaagaagaaatactacaaaattgaattgttcattttaaaaagccactgtgcactgttgttcttagtggtcataaatctctcaaaacaagactttgcatctttttatgatcaaagttaaagttttgctgtcagttcagccagtgacaggtttaatgtttttccttgttccttttttggggaccacctctttgactaggatctcttagagtatcaggatggggaaaaaggagggataaattaaatatgtgcttatatgttaaggaccaaaattgtaaacaagtcaaatctaagagtcggtatgagttatttcttctcttgtaattttgtttatttagataatcttcaattaatagattggtaggcaggatttgacaatccttttgtcatataaaagtgatattaaattaacatagatttttcaaatgaaaatccagaaagagaaaataaagatgaataatgaaaatatctaaggccgcacgcagtggctcacgcctgtaatcccagcactttgggaggctgaggcaggaggatcacctgaggtcgggagttcaagaccagcctgaccaacatggagaagcccagtctctactaaaaatacaaaattagccgggcatggttgcacatgcctataatcccagccactcgggaggctgaggccagagaattgcttgaatccaggaggcggacgttgcagtgatccgagattgcgccattgcactccagcctgggcaacaagagtgaaactcagtctcaaacaaacaaacaaaaaaacaaacaaaaaaaagaaaatgtctaaaaggtgccgaatagtttgtaacatgaactcaaatcagaagttgtaagtgatttgcatcttgtcgattcccaggatatatttgaagaatttagttattaatgatacagtttgccctataataagtctttgaagccccttataaacatttattatattcggcccagtgtggatttctaaatatgtctgtataacattttccaaatatcatgtttagaaaacaataaatatttaattttattgggataatatgacacacttttatttaacgaatattttgatatcattgatttttatatattatctagattttaaaatgtaacaatttgtttggtttgataatatttagtatctagctttagcctaggatgcaaaagtccagtgtgtccacatagcggtagcatgatttgaatctaacaaatttggatacctagtttacctttttttttttaaacagcgcagaaaaggaaccaatatttcagaaacaagcttaataggaacagctgcctgtacatcaacatcttctcagaatgacccagaagttatcatcgtgggagctggcgtgcttggctctgctttggcagctgtgctttccagagatggaagaaaggtgacagtcattgagagagacttaaaagagcctgacagaatagttggagaattcctgcagccgggtggttatcatgttctcaaagaccttggtcttggaggtaggttcatattgattttcaggagagttacgtggtatgaacaagcactcttcacttagaccatcctatgaccagtaagaaggtattccattttattttcatttataaaattttctatactcatttaccaacaaatttgcatgaaagtgagagcaaaggataaaataagcatttaatagtatgattagatgtgaattagacttaatgagatataataaaatggccaaaagattgtaatggtcaaaattaaggactggaaaatcctagaatgagggcattaaattttgtgaaaggcgaagggaactgtcatttgtagagggtatgttgtatacttgttacagtgttattacttagaatcttttatttaagcaccattcatccattcaaccagtgctttttaagcactggctattcatttaggaaatatttatgcactgtctactttgtgtggggatggggtggtggggtggggtggggtggggaaggtgggagagacacaaagaagcaagccctcccctgtctttttttccaagggcactaatcctatcgtgagagtctaccctcatgacctaatcaccttctaaaggctccatctccaaatatcatcacattggggattagagttttagcttaggaattttgggaggacacagacatccagtcaataccatatttgaacattttatgtcactaatatatatactagagtccactttttcacttgacagaaacatatttccaatactgttaaccattctttatcagtatctttttaagcccaagcatagttgtttttcagttgacttcataatgtacttcacttttcaaacttagatgaatgtttaggttattttcagttatccttttttaggtaacactatagtgaacctattcttgcatgtaactttaaagattattaaatattatgtctttaggatgaatttcttacatggatttccaagagtaagattattacatcgaaggatgctaatttcttcatggttcttgataattattgttatattttctaaaatataatattagttcatagtatcaccagtagtatatgaatttatcagttttatcataatctcatcagtgattttgatggtgtcctgttgtttcaatttttacttaattttttttatcgtttgaacattttttctgatttgttcactgtttctatattgctttatatgaatcatccatacatgtttttgtccattactattggcgtcttaatatttttccagtggtttttaatgagtaaattttattatatatacatgtattaatcttttgttctatttcatatgtctttcccaaagtattgttttagtttttatttttaaaattaattttttaactttctaattttcggttggcactttaaaaatgtgatattttctattgaaagttttttatttttcaactgcttttgctgctttagatttaagaaagaagtttttacatgattctgatgaattcagtgttttgtttgctgccatttaaattatttgatgtactaaaaagttctttgcagtttgtcctgagtcacttttaatggatagtatgtaatcatcaacagttgggggataactctaccctttccatttggtttggaaaatctactttttcatatattcagtcattatatataaattggggtttttttttgagtttccatactggttttattttatttttatttctttttggtgacaaatctacatattcatacattgaaagaagtgttaagaaggactaaatgtgttcctatgtctttatggcagaacaggtttactcaggagaggattatggtttatttcatgttgcattttctttctgaagttgaagtggaattacagacctgaaatagttatgttgttatctttaaatgatattacagatttgctaagactctcattgacttccagaagcattcacagtttctgaaatagttacattagttttgttcagttctccagatttgaaggcagagactcatttttgatgtgtgtgtgtcttctttggttcttagtttaacgctgggtgtgttaacagaattgattgttttgaactcgattgctttgcagatacagtggaaggtcttgatgcccaggttgtaaatggttacatgattcatgatcaggaaagcaaatcagaggttcagattccttaccctctgtcagaaaacaatcaagtgcagagtggaagagctttccatcacggaagattcatcatgagtctccggaaagcagctatggcagagcccaagtaagaccacagtttcaaatatataattactaaagaatcaatgcatttaaatttgacctttgtacaaataagattttataaattttaatgaatttttggggcatagtctagaacatatgtatattaaaataaactgtcagtcaaaagagtgttagatattcagtgcttttgttaagaatatcatatagagaattttcctttgacatggaactatgaagagttctcctttgactaaatgaaaattacataatttttatgtgacgggaatttagaggatatatttgtaactaaggcataagtccatttgtgcacattttggagtttgagtttgtggttacgatactttctattagaagtcaggatacaaaactgcaaggagaaatccctgtttcattctcactaaagacccagtctgttaggactggcttcttctcttgtttattaacttatatttaccagtaacctttaaaacactaattgaagaagttttaagcgtgagaaccctcatgtgactgacacagactaaagtattgacaaagcaagtgaagaagcaagtggacttaatcctttggactaaaaagacttgatatccatggaagaagagtatgttcactgtatgaaaatggaaaaatcggccaggtgcggtggctcatgcctgtaatcccagcactttgggaggctgaggtgggcagatcacgaggtcaggagttcaaaaccagcctggccaatatggtgaaaccccgtctctactaaaaataagaaaaaattagccaggcgtggtagcacgcacctgcagtcccagctacttgggaggctaaggcaggagaattgcttgaacccaggaggtggaggttgcagtgagccgagatagcgccactgcactccagcctgggcgacagagcgagacttggtctcaaaaaaaaaaaaaaagaaaatggaaaaatagtcccaaatataaagattataaaaattacctgtgatctttctgactagaaataattactctttcttttttttgagactgagtctcgctctgtcacccgggctggagggcagtgttgcaatctcggctcactgcaacctctgcctcccgagttcaagcaattctcctgcctcagcctcccgagtagctgggattacaggcacatgccaccacgcctggcaaatttttgtatttttagtagagacggggtttcaccatgttggccaggatggccttgatctcctgaccttgtgatccgcccaccttggcctcccaaagttctgggattacaggtgtgagccaccgtgccctgccagaaataattactcttaacagtttgcaggatgcattccaatacttgttttcccctctgtgtatgaatgtatgagggtatgtaaagtttctctgcctatattttattttttaacaaattaatttatttttaacaaattaagatgaaaatccaatgttactttttaaaatatttttaaaatatttaatgattactaatgattactaatgtaatcattagtaatatgtattaaatgttgataaattagaaaataaaaaacacacattggacacgtgtttgcacacacatgcatgtccagtttatatggataaactggagataaggaatttatatttaatttaaattgctgaaatgtgctgctttagaaatgtatttttttttattctttagtgcaaagtttattgaaggtgttgtgttacagttattagaggaagatgatgttgtgatgggagttcagtacaaggataaagagactggagatatcaaggtgagaaataccaaatgtcacctcttcctaagagatgttgtttttcctgctttttcacttacccctttaaaaaagtaggcttaccggtttacatgttgagtatctcttatctgaaatgctagggatcagaagtgtttcagattttttatttttttcagatgtttgcattatacttaccagttgagcatctctaatctgaaaatctgaaatttgaaatgatctaatgagtattttgtttgtcacattactgctcaaaaagttttggatttcagatttttggattagagatactcagcctgtgttatttatcaaatgaactgagttctttctaagccatatgcaacaggatgggtttcagattgcaacacattgttctttagaggacttcagaatgctatgcaaaaaacattttaaacagaactaatgtgaatagtttttgaaacagtaatatacatcagcagagaagcagaggggaactagcaggggaaagaaggcaagattcaacataaaagaaatgattcagataaaatgagcaatttaactcaggtaatagtaagagaatctttttaaaaacaatttatccttttattttattttattttattttgttttattttttgagacggagtttcactcttgttgcccaggctggagtgcaatggtgcgatctcggctcactgcaacctccacctcccaggttcaagcgattctcctgcctcagcctcctgagtagctgggattacaggcatgcttcaccgcatccggctaattttgtatttttaatagagacggggtttctccatgttggtcaggctgctcttgaacttccagcctcaggtgatctgcccacctcagcctcccaaagtgctgggattacaggcgtgagccaccgcacccggccaatttttcctttttttaaaaaaaaattatcgtagtaaaaaacatgtaattctggactgctccccatagggttaccacctcttagaaattgtcctctaatgaaggtgactggaatgttttctctgctcatactgtagtattataaatacatgtagtcatttgtacaaaaattcttctaagccctagctgctgactaaaagcactatatgaagttaggaaattttagaatgaaagaatctggctagtcccttgaatttgtaatgagattgactgctctgtgttacatgcctgccttgtagttgtttcccccattgtctgtcaaagtggagagtaatcccagatggtttgcatgggagggctacaaagggagatgatcctcagggactcagaggaagtatctaaacactggtcatgcgttatctgaagcccacgtaacagtttcttcaatagtattatcttcaactactctctataatgctatctgataatatatctaaatctcttcacgcacattttttaagaatggctttttttactgtgtgtttctgactactaaactgagtagtcttcatttctgttataggaactccatgctccactgactgttgttgcagatgggcttttctccaagttcaggaaaagcctggtctccaataaagtttctgtatcatctcattttgttggctttcttatgaaggtactgtaggagtgtgttattgtaatttcaataaaagaaacttgaaatttgaaaattattaaaacattttctttttatttgttttagaatgcaccacagtttaaagcaaatcatgctgaacttattttagctaacccgagtccagttctcatctaccagatttcatccagtgaaactcgagtacttgttgacattagaggagaaatgccaaggaatttaagagaatacatggttgaaaaaatttacccacaaatacctggtaagaaatagcatcttcagttcttacaaaggctgtgtctaaaataggccagagataaggatggcaggtgaaacattcatccagtcaaccagatattctggaactgaactatttaaactagcacttaaaaacagcaaaacaaactcccaaattaataaaaaaaagtttcgggccgggcacagtaggtcatgcctgtaatcccaccactttgggaggctgaggtgggcagatcacctgaggttgggagttcaagaccagcctgaccaacatggagaaaccccgtctctactaaaaatacaaaattagccgagtgtggtggtgcatgcctgtaatcccagctactcaggaggctgaggcagaagaatcgcttgaacgggaggcagaggttgtagtgagccgagatcgtgccattgcactccagcctgggcaacaagagcgaaactccgtctcaaaaaaaaaaaaaagttttgatatgtttttgtcacataatagcatagtttttagaataattgtttttattggcatatatggtatttttaaaggtagtctctggacacgaatctgactctgaattctttatctcttatacctaaatatttttgtgcttggtttttgtagtaatgacagctaccatttcttgaatgcttactataaagtgtttagcaaacataatttcatttaatctatgtaaccactctgtgaggtaggcattatcattattctcattttacagatgggagaactaaggttcagagagattagttagctcctccaagtataaactattagtaatggcagaaccagggttgatatcaggtctgtctggctcatatgtgcctgtttgaacagacatgtcctgtccgcagaatgtgagaattgtaagggatcttcaggatcatgttagttttgagttgaatataaaggcttcatgagatttagatagctttgtaaaaacattaataaaaattactttttcacaaatctaaagttttcatggtacagtttttaggatctttttttgagaatgggatgatataggaaagaaaagtaaaaaaaatttaagaattttgataaaattgaagggaaaccctcattgtcaattatgatatgattagagtaataggaaactatttttggtatgagtacattttgtttaaatattccgtttttttcaagttattttttaaactaagtgaaaccactttagtaacaaattattaacagaaatgaagtgaaatgaagtgggcaaacttagattttaaataatgacattttcaacatgtacatggaaacatttcaataaattttcatttagttaagccacttttgaagctttcagatggggaaattatgaatatttatgaaaagggtcatccattacctgatatttttagcatttatttttcttttattgtaaatgtggtggtttttcttttttttttcttttttccaatccagaggttaattggagtagagtgccctgaaattatggagagaaaccattggtaggtttatattaatattagttagattaccaaaattctactccttaatatgaatggaataatttttaacagaggcttctgctcctctattcccagatcacactgggaattgtatgacagttcattttctatataagtagcacagaaatttaaagcttgtttggaagtatctcagagatgagctgatcaaaccatttcatttttatagatgaagaaattgaagctcagagaggtagggctggcctcgaattccttttctagtgtacataccctcctgctgtttgtgaattggtagtgtatttcatctgattattacaagaatatattgattataatacattaaatattaaatatgacagtagtctgttaacatttggaagaaaggtaggtggttttctccctgtttcatttcatctgaatttgcctcattgttttttcattcagttgtatgtatgtttatattaatgttctcttagattccttagtcattccttggcattaacagctaagtgcttaatgaataattttattaatgaaataattagttcttgatttatcacaagggatatatgtaacaaccataacagatgtatagtaggcatttgtttatacttgataagaaaatatgtgatactttgaaattgaagtgttatgacccatttctttgggttggtgggatttattgcagatcacctgaaagaaccattcttagaagccactgacaattctcatctgaggtccatgccagcaagcttccttcctccttcatcagtgaagaaacgaggtattattttttgggcttattttataaaggaatcagtattccaaatgacaaatatatgattaaatttatactgttacgaataacttctgggacagatagtttgtcactgtggattagtgcattattaataccaaaattagttttatgatctatttagttgttaacattgagtgtatacaagtattgtgctagtcagggaaacaacaggtaaaaaactgaccttgacctagagaaggcaattttctacttaggaatgtagacagataattttacaacactgttgataaataaaacccacagattcagtgtcaagaagtgtgcagagcagggagggaagcttgtgaaatgggaggggtagttagggaggacgttgttcaggaaacagtggaaacaaaggaccttggacctggaggatgagtgggagttcatgaggtggacactaagatgaggaacttctaggtagatggaataacattgccaaaggatgagaaatggtggcactttcaaggaactcaagcagtttcctatggcaggagcatagggtgggtgtcagagtgggagacagaccattaacatttaatcttacagacaatggaaagtcatttgaagtgttttcttgttactaactttattgatatataattcacaaatcagtttgcccatttaaagtgtacagtacagtgacttttttagtatattcacagtgtgtgcatcaccaccacaatcaaatttagaacatttttatcttgcccaaagaaaccccgtacccattggtattcactccccatttcctcccaacactcagccctaggctacccctaatttactttctgtgtctagatttgtctatttgggatgtttcctaaaggcattgtatagtaaagccctttggaactggcttttcatttagcacaatgtttttgaggttcattcatgttgtagcatgtttcagttcttcatttgtttttatggccaaataatcttccattgtgtggctatattacattttgtttagccattcatcaattgatagatatttgggttgtttctactttttggttattacaagcaatgctgctatgaacatctgtgtgcgagtttttgtgtggacatatattttcatttttcttggttatatacccaagagtgatattgctggattacatagtagttcacgtttaactttttgaggagctgctagacttgttttccaaaatagctgtcccagttacattcctttcagcagtgtgtgagttctaatttctccacatccttgtcagtgaacacttgtattatctttgtgtgcatagccatcctagtagtgtgaactaggccttttatcattgtgctgatttgcatttctctcatagataatgatgttgaacatcttttcatatgcatataggccatttgttgtttggagaaatgtatatttagactttgcatatttttttaattgggcagatttaaaatttatgtattgttgagtttcaagagtcctttatatattttaggtacaagtcccttattagatatgtgatttgcaaaatttttctcattctgtgggttttctttccattcttcttaatggtttccattgaagtacacatggtttaaattttcatgtttattttttctttcgttgcttgtgcttttgatgtcatatttaggaaggctttgtccaatctaagttcaaaaagatttactcctatgttttctttttctttttttttttttgagatggagtttcgctcttgtcgcctaggctggagtgcgatggtgcgatctcggctcattgcaacctcggcctcccaggttcaagcaattctcctgcctcagcctcccgagtagctgggattataggtgctcgccaccgtgcccagctaatttttgtatttttagtagagacggggtttcgccatgttggccaggctggtctcaaactcctgacctcaggtgatccacccacctcagcctcccaaagtcctgggattacaggcatgagccaccatgcctggcctgttactcctatattttcttctaagagttttatagttttacctcttaaatttagctctttgatccattttgagttaaattttgtgtctgttgagaggaaggggtccagcttgatttgtttgtgtgtggatattcagttgtcccagtatcatttgttgaaaagactgtttgttccccagtgaattttcttgcccttgtggtcaaaattcccttgactgaaaggtaagggtttctttcaacaatattttgtagttttcagagtataagttttgcatttcttttgttaaatttattcctaagtattttaccttttttgatacttttgtaaatggaattttcttaaagaggcagtggcatgattagacttttatttcaggaatatactctgacatttttgtggaggatggtttggaggaaagtctagtaaaacatacactaagattaattattctgtcaatgatgataaaaggccagaactagggttgtaaaatgaaaggtaatgaataaatttgggtaatatctaggatgtagaatgtaaaaaacgtgatgatttggatattataatgagagtgaaatctcttgatgtaaattccaggtttctggcttagatagttttgccagccatttgctgacataggaacaggaaaaggagttaattgggttttctttcttttttcttagtttgtcttaaaggtttgctgattttatcttttcaaagaaccaacttttcattttgttatcttttgtatttttttcatttcatttattttggctctgatctttattattttctactaatttggggtttggtttgctcttgcttttctggttgagatgcactgttaggttgtttatttgatgttttcctgcttttttgatgtaggcacttactgctaaaaactttccctttaagtattgcttttgctgtgtctcacaggttttatatattgtctttgcatttttatttctatcaagaaatttttatatttacttcttaatttcttcattgacccactggtcattcaagagcatgtggtttaatttccatgtgtttgtatacacagtctccaaagttcctcatagtactgatttctagttttattccactgtggtcagagaagatacttgatatgatttcaattgttttttgaattttttaagccttgttttgtggcctacccatgatctatccttgtgaatgatcgatttgctgaggagaagaatgtgtattctgcagttgttggatgaaatgttctgtgaatatttgttaggtctgtttggcctgtagtccagattaagtctgatgtttgttgtttatctgtctggatgatctattcagtgctgaaggtggggtgttgaagtctccagccatgattgtattggggtctgtctccttagctctaataatatttcctttatatatctgagtgctccggtattgggtgcatatgtaattgttacatcctcttgctgaattgacccctttatcattatctaatgaccttctttgcctctttttatagtttttgtcttgaaatctattttactgatgtaaatatcactatgctcttttttggtttccatttgcatggaatatctttttccatcccttcattttcagtctctttgtggctttataggtgaagtgtgtttattttaggcagcagatcgttggttctttttttaaatccattcagccacttacgcctttcgagtggagtttagtccatctacattgaatgttattattggtaagtgcgtactattgccattttgtttttgttttctgattgttttgctgtcttttcttccgtcctgtttcctttctgtgaaggtaattttctctggtagtatgttttaatttcttgcttttaatttttttgcctacctcttgtaggcttttgatttgaaattaccaggaagcttgcaggtcatatcttataaccgattattttaaactgatgacaactgattccacaaacgagcagagaaaactaataaaaactctacactttatcctccttgctttttaacttttgtgagttttgtaccttcatgtaattgcttactgctcgttaaggtccttttcttttagattgaagaactcacttcggcatttcttgtgggaaagtttggtgttgatgaagtccctcggcttttgtttgtctgggaaagtctttatttctccttcatgtttgaaggatattttcactggatatactattgtagcataaaagttcttttccttcagcactttcagtgtgtcttgcccctctctcctggcctgtaagatttccactaagtctactgccagacatactagagctccattgtttgttgtttcctttctcttgttgctcttaggatcttttctatatccttgacctttgggagtttgattattaaatggcttgaactagtcttgtttggattaaatcaatcaccaatccttgcttggtgttctgtagctttcttgtgcttgaatattgatatctttctctagatttgggaagttctctgttattttttcttcaaataaactttctaccctcatctttctatctccttttaaaggccaagaacttagatttgctcttttgaaattattttctagatcttgtaggtgtgcctcattcttgattattcttttttcttttgtctcctctgtgtattttcaaatagcctgttttcaagcttactaattctttcttctgcttgatcagttctactgttgagattctgccatgttcttcagtaagttaattgaattttttatctccagaatttctgcttgattcttttaaattatttcagttgttttgttaaacttacctgatagcattctgagttccttctctgtgttgtcttgaattttgttgagcttctccaaaacagctattttgaattctctgaaagctcacatctctgttactctgggattggtcactggtgccttatttattattgttaatttagtgagttcatgttttcctggatggttttgatgactgtggatgttcaccaatgtctgggcattgatgagttaggtatttattgtggtcttcggagtctgggcttgtttgtacccatctttcttgggaacgcttttgaagtattcaaagggaagtgagtgttgtgatctaagtctttggtcatagcagccgtatctgtattaaggggcaccccaagtccagtaacattgtgacccttgcagacttgtagaggtaccgccttggtggtcttgggtaatatctgggagaattccctggattatcaggaaaagaactcttggttctcttcccttactttcccccaaacagagtctgtccttctttgttgagctgcctggagctgtgggggacgggtgacacaggtatgcctgtggccaccatgactggcgtgtgctgagtcagacctgaagccagtacagcactgggtattggtgaaaggcttgtggtgatgactgcctggtcaccgctgatgttccctcaagactcaagagctctacagtcagcacaaatccagccaggcttgtgcccttcccttgagggcagtgagctcctgggggcccaggactggtccagaaatgctgtctgggagccagggcctggagttgggaaacttaggaatctacttggtgctctattctactgcagctgagctggcacccaaaccttaagacatattccttcccactcttccctctcctttcctcaagcagaaggagcctctccccatggccaccagtgctccaggcctgcagtgagtactgcctggctgctgctggtgttcactcaaggctccagggctcttcagtcagctggtggtgaatgctgccagacctgggtctctcccttcagtacaatgggctcccctctcacccaggacggatccaaaaatgctgtccaggtgccaagacctagaatcagggaccccaggaacccacttggtgctctgtctcactggccaagctggtacccaggctgacttttggttcttatgaaggtgctttcctgtgtgggagggggatgatcgccagaggacttgctttgtatacctggatacctgtagattctttttattttcttcatattttaaggaggccttacaaatgtattgacattattggacttgtcattaggtttgtatatgagcttcatgagggcagaggccacactcttgttattaccatatccccagtgcctggccacctattaggtacccaacattgattcaaacaactcttgaatttttgcctcagcaaattttaatcatgatttgttttcatgtattttcacatttttcttattattagcttacatcagtaatctttatacattgagttatcctttttgttttgtctcaagggatgctctaaaataaaatcttcattacctctcttcataggtgttcttcttttgggagacgcatataatatgaggcatccacttactggtggaggaatgactgttgcttttaaagatataaaactatggagaaaactgctaaagggtatccctgacctttatgatgatgcagctattttcgaggtaagatcaattattttgacaaaaatgtctcaaaatggatttatttctgggggttaagagcagtggggctctgatggggagatctgtactaaggaacctgatgctttataatagctcttaggcatcttgcttaggcttaaagaacctgacttgcaacctgtgaatcttagagaatttctaaatttgaatattatgtaacacttgattgctatgggccacttagctcatagtggttgtaaatttagcttcagtgtcatataacccattgctctgaaggtgattttttattttttttgtaaatgataaacataaggcaatattacttgcagatagtccttagaaggataagtatcagtttgaggggattataaacatcagtttgtgcttttttatccttaccatataataaatgagctatttcttttttaggccaaaaaatcattttactgggcaagaaaaacatctcattcctttgtcgtgaatatccttgctcaggctctttatgaattattttctgccacagatggtaagtgtagacactttttagtgaatattactcaattgcagatttttagcgtaggaaaggaataaacaagttagtgatttgtccagaaataaaaatgttacctgagtttgctaactcccaagttggtagttttttaaaattccattttgagcaatagttgtagttttagttttagtttggaaggtagtggaatttccttagacaacattaatagcaatgcctcagtaacatattcattattttgaattcctctggtgcagactagatcatgcttgtcctcacacacacaagactgtgatggaaggtgtttttggccatgtattaaaaggcaatgtagtctttttcttcctaacactagtttcaatttctttttaaagtagtattttataaaatgaatacaagctgttaatcttgtccctgttgaaaagcacaagtaacaatgcattcaccctttacttatttggattattttggtgcttttgttactgtttccatattatacagaggtcacggtcaatgtatatattagagaaaacacaacttagcagaagcagtgttagaaatggaggaaaagaggccaggcgaaatgattcatgcctgtaatcccagcacttcaggaggccaaggcaggaggatcgcttaaagccaggagtttcacaccaacctggacaataaagcaagaccccatctctacaaaaaattaaaagatcagcaaggcatggtggcgtgtgcctgtagtcccagctatttgggactatatagctcactacagtgagctatatatagtgagctatatgaagtgccactgcactcagcctgggcaacagagtgagacttcatcttctaaaacaaacaaacaaaaaattaaaagaaatggaggagaaaaggcaactgtgccacctcctcaccacagcagtgtacacatcagtttaatagtaggttaatgaaactaggcttttcagttttcaagaataaatactgactcatatgccactactctagtatatttgcaacatagctatttgtatgatctggctgaggccctagtgataagtgctgtggttataattacaaaagatgatacaataaaaatgctttctgtagcctctataaccattaactcttcctaaggaaaaaaaacaaaacaaaaaccccaccaatctcactggttatgatttttccaaacaaatttctcttgctaaattggcatagaagttaaaatggctggttgggcaaatgaaagtaactaagtttagagttttgggcaaataaaaagaactaagtttagagttttgggcaaataaaaagaactaaatttaagagtttttctgagctcttctttctaagcttttctaacttcttgagttcttaacattatgaatttaaatctaccaacaaaacaacattttttaaaagttacaagattggaggaggaaagacctttattggagcaaaagtttacctgttgcatcctttactttttaaaatctgttgtaaagaaaaatctgggcatacctgaacagaacattgattctaaatggttaaaaaggttatcaattgattacactacattgtgagggttttatgagttactttgaaaggtattaaaaactttatagatataaggaattattatttatcgctactcacagctctcttcacttgataatttactgcttagttagagatactggttggacatcttagagactgggaatttggtttctagaattgtgttaaaaagagcttccaaagtattttgcatcacttaatgaattaacagcaaaatcaaggaagtaccttttaaacaactcttccaagacctaaatattagtagttatttactaacagaaaaaagtttattcatatttatattactctccataatgctgattatggaattcagaagaaatcctggttgttgaaattctaggactagatatttaaaaattatctgcaagatgtagcgtttgttatttctcattttttctgatatatcattagcatcctacataagtgtgtacacatatttgattattttacaattttattttagattccctgcatcaactaagaaaagcctgttttctttatttcaaacttggtggcgaatgtgttgcgggtcctgttgggctgctttctgtgtaagttgtgatggcacagaggatacaaacctgccagattttcttaggactgttcagttgatgaattactgcaaatctttcttccttacacattttgatattttattatctgttagtatcccaatgagaaggtggcccaaagaaatgaagaaacgcaatatttagtactgttttctttctagggaacagcagttaaaggtggtggtagaggaagctataacccttgattaaaatagaagcttgttttttgcctatggatttatccatatgttctggtctgtgggagccaggaataattgagaaattttaatttaagaattagtttcattgaagtacggggacttatacaacccagtattagttttgagcgtacagacatatgtggaactattcttggaaagtctacaaagtgaaatctatcgagttatttctcatttgcaaagtgatcctttgagtcatttctcataatctataatctgaatgttaatactgatatttttaaaagccctacatcccaacagaccaggccatctagatatttcagcgtggtgtctcaggatgagtaaacaaacagctaaaaatatatgacttatgtaaactagagttacaggagttactagcttttctgaaagggatatattctaagtattttttcttaaaaaaaaaaaaaggggggtggggggtttgctcctgccatcaaacttaacatgcagacatatttgtgacgtcctctaaaatgtagaatgtttcatacagaattatgatgcttgggtaaaaaaaagtaggatgtttgttgagcttcgtagattatatgtaattggaacctttggagtaaattttagtttctgagtcttaccaatatgtatttttttctattacagattgtctcctaaccctctagttttaattggacacttctttgctgttgcaatctatgccgtgtatttttgctttaagtcagaaccttggattacaaaacctcgagcccttctcagtagtggtgctgtattgtacaaagcgtgttctgtaatatttcctctaatttactcagaaatgaagtatatggttcattaagcttaaaggggaaccatttgtgaatgaatatttggaacttaccaagtcctaagagacttttggaagaggatatatatagcatagtaccataccacttataaagtggaaactcttggaccaagatttggattaatttgtttttgaagttttttgtatataaatatgtaaatacatgctttaatttgcaatttaaaatgaaggggttaaataagttagacatttaaaagaaatgattgttaccataaattagtgctaatgctgaggagaactacagtttttcttttgaatttagtatttgagatgagttgttgggacatgcaaataaaatgaagaatgaa

SEQ ID NO: 454 - DNA, 32742 bp, Homo sapiens
  source 1..32742: mol_type = other DNA
acatgatgcccctccctgctcccagccgcttcggtcatgtgaccgcctggggagtcaggggcggaagtcggggtctgacccgctccaggtccgggactgcggatagaagaggaccgccgccttgagggaggggtggaaactgggtgccggctccgcgcgcgacctccggccctgcgcgtgcgccgtggcgcggcccggctgacaggtgagtggggatggagtgagcgcgccccatttttgcatggcccccttcccctccccgctgggccgcgctggccacggggaggtctgcagagtcgcgtgcagcctggatgggggactcgggatggagggcttaggggctttctggggcgggggctgtaatccagctcttcgtctccgcttagggggaaatcattttgcacaccccttcctcgctttaggaagcaccgttcagctgcttggtccgaatctcatccttccaagtttccgggaacactgctgtatggatgtcgtcgttatttctctttgcttttgagaaaactgaaaggctagtagtgaggacttttacaggctgacagacgtggatttgcattctagttatgccatgggctgtgagtttgggcaagtcattgctgctcgccgcgccttaatgccttcacctgtgacatactgatgtcaaaatcctttgcatttgggggaaaaaaaaaaagttcccagggccctgattcctgggatcggaatcaggattatgatcggacaggagaaagaaaaaaagtcacagagccataaaactgggtctcctgattgcaagcgcatggagctccctcaaacataggtgaggcgtagtgagggcgaagttttactgtctttgtgcactacaagggacaccttctctaattgtccttcacctgcctttcccaggatttcaggttcagcctcatttcagaacttttctggaaaatatatgcagcttgcatttatcttgatcagcaaccgttatattttgtttgtgataatggatttgtggagaccagtgcttcctttatggaactgaggttttgcgaaaggctaaaaatagacctgccttcttttgtcctctgaagagggtaaactgtttgtccacgacaattcgatttccttaagaaatattattctgtactcagggtaattggtgtaaggatgtcatgccttattcttgaaagcatgtcttttgattaggattacttcccaaactgaaaatcacagttccacgccaaattattaaaaatgaagttaccggcacttgtaaaagaaaataagaaaatatagtgggatctctggatttcatgccaataataatatagcctgtattgagaaaactgatcttcaagtgttcttgatccctagcaccaagagaacctctgaaaggataatttaacatagcttcttctacagtgtttatttggacctaattctaaagtggttttttaagacttagctgagtcttaacactttgtaaagccatccacctacctcttagctgcaacttgattaggcatttttaatgatggttcttagattctgttcttcaggactagtccttcagccaacgagggggctatttaccaaatactctagccaaattatatttgtacaaattatggaaattccatttgttacatggaaaatataactagtccgggttaggaggtctagtacataaaatgtaactaagtgatttccttctttcagctaatcttgttttaacttcttccatcttcaaaaacttagcaggagatgcttgcattattagaaatagaaaacacaagtgcccttcatggggcaaaacagattacaagcagtgagttcatttcagtaaaagtatattaaatataactcatatgcttttgcattaaaaatttaatataaagtttatatatagaattttagaaaggtgatttacctaggtaataaagacccataatatttgttttactattgccgaacatatttggttattattatcctcctcatgttcttttaaagttgtctacagcgtaattcttgagtaagggactaaggattaaaacaagagattgacacacgaaagtcttgatctctgtcgttatcccagactgaagcttccccgaatgtgtgcatgcaggtgctgagtctgtctgtccttctgtatgttgggagagagtagagtaaagggcaagtaatgttactttgctttaagttgtttttcccagggccacattgttgccctgtcatggtatcccaaatcgggtagccattggacctgttaatcatagcttgtcctcctcttcatgagtctagagcaagcttgtgtagcctgaggcctgcaggccacatgcggcccagaatggctttgaatgtgccccaatacaaatttgtaaacttgcttaaaacattatgagatttttttgcgattttttttaaggtcatcagctatttttggtgttagtgtattttatgtgtggctcaagacaattcttcttccaatattgcccagggaagccaaaagattggacactcctggtgtaaagtttcatcctacttagaccttctgggttagtttggtggtcttcagagggctttagtatgtgactgttttgcccactgtccattatttcccctttccctctctgctttcccaagccagaccatatccatgcagaaaatgaaatgaaattatctgaaattcagcctgttagagatcagtgtggtttaacaagcaagtatcacagaggaaactaaaagaacttgttaataatgtatgccttaatgtgtattacagggtaccttcatgggagttctagacagctgtagtggcttcttggctctcagatccaatccagtctacttcttctgtttccgcccctagctgactctgctccagccactttagccaccttgctagccatctagcacattcctgccctggggcctttgcacttacttgtaacctctgcttgggatgccattattaggatcattatctattgctgcataataaactatgccagaacccagtggcttaagacaataagctttatagcatctatggtccggagggtagggcatagctggctgcctttggctctggggcttttagaacattgcagtcaggctgggaacaaggagctatggtcttatctgaaggctggactgggattataagggatctactttcaagttcactcaggtggtttttggcaagcctcagttccttgtcatatgggcttctccccagggctctctcacaccatgatatgttgcttcccctggactagcaagctacagagggtgcccaagccagaagttagtcttttcgaaatctaatctcagaagtgcactgtatcttttgtttctatcctatttccttccccccctcccccttttttttttttgagatgaagtctcactctgtcacccaggctggagtgcagtggtgcaatctcggttcactgcaacctccgcctcctgggtttaagcaattctcctgcctcagcctcccgagtagctgggattacaggtttttgccaccatgcctggctaatttttgtatttttagtagagccggggtgatcccggctctcctaacctcaggtgatccatgtgcctcagcctctcaaagtgctggaattacaggagtgagtcaccacacctggccctattctcctctttaggagggagtcagtaagtcagcttatactcaagggaaggaacctacatagaacatgaataccaggaggcagagatcattagggaccactttagaaagctgctgaccatacccagatatccatactgcttgctctctcatttccttctgacttctgcccgaggtgctctatggaaactagcatatgccccatcctttattatgttttttcttcacggcacttatcacagcctaatatataaagctcattttcacaaatttcaagatacatttgtaatcaaaactttttcttctcctttttatgaaacatttttctgtattttgtaatcactctagcatttttcagatatgaactattcttaatagcaagaatctcctatacttgacatgtgagaaaatttttttttttttttttttttgagagagggtctcattgtcacccaggcaagagtgcagtggcacgatcatggctcactgcagcctcaacctccagggctcaagcaatcctcccacctcagcctcccttgtcactgggactacaggctcgcaccaccatacctgactgatattcttttgatttttagtagagacaaggtctcgctattgttgcccagactggtcttgaactcttgagctcaagcattcctcctaccttggccttctaaagtactaggattacaggtgtgagccaccgttgccaggcctaaaaacatttctaaagattgttccctcacctacttgttgttccctcaccgacttctagtggtttttaggacatagctctctttttccaaagataagacaaatggcacaattcctgtaaggaaattgcaataatcagcggaagcagagaactgaaaagatggggattggaggaaaatgcagtagtacaatacagaaatagctacatggacattattatacaaaagcaatgactatattgcacagcattatagaaaatgaaatatcacaataacagcatcagcatgctgtttaaattgacaacttgtactgttagtcctcaaaactgaatctcagcactatggcaaactaccccaagacttatttgcccaaaacaatacaatatgttaaaaatttatcatgatcctgtgcattaggaattgggaaaaggcacagagggctttgctggctgcagaagccgaatagcctcatcccttatatgtctagcacttcagctaggaagacttaaagagctgggggctgagtggaccaggtcaacccaagtcacacgtcggcacttcagtttctgctgtctgctggctttcttcattctcttctgtgtcaggacttttccctctcagcatggtctttcctctttgtaactcctgtgatctctctagcaagatacccagacatcttacatggcagcttcggacacccaaagagagcaaaaggagatactgccaggccttctcaaggcttaggcctggaattggtagagagttaattctacagtattctttgggttgaaggaaggaaggcacaagctgttatgagctgagttgggtccccccaaaatttatatgttgaattcctaacactcagtagctcagaatgtgactatatttggagacaggatttttaaggcggtggttaagttaaaatgaagccactaggataggccctaatccaatatgactggtatctttgtatgaagaggaaatttggacacagaaatttacaaaggagggccaggcttggtagctcatgcctgtaatctcagcactttgggaggctgagatgggaggattgcttgagcccaggagtttgagactcccctgggctacatagtgagactcccatctctatacaaagaaatgagcaatggggtggccatgcgaagacacaggaggaaaatagctggctacaagccagtgagagaagcctgagaagaaaacagtcctaccaacaccttgatcttgaagttctcgcctccagaattgtgacaaaataaatgtggttgtttaagtcaccctctctgtggtgctttgttacggcagcccagcaaactaataaaatgcaatccagactcattgagagggaaaataaggttcagcccttcacttaaggtgctgtatgggctgacttcatggcaaggaattgttgggagccatctttggcaaccagttaccacattattataatcagattgctttccaagcccctagaactaagaaaaatgattgttgcaggggaaggcacacaggcctgaacaagaaggggtactcaagtctgtgggcagaggggaatgtaagaaggagtagcgtaatgagacaaattacctacttcaagaactttctgaaacctcatcaagtccgaggagttatttcatttgtgtaagtctttctcgcttccttctccagttgcccttcgccttctaccatctgctcacccctgctatctgcactggctgtaggaggaagctagtgggaaggaaagggatgggtcaggaagcagttttatcgagagtctctgtgttacagaagatgcttagaaggcacaacctgggtagtgacatgctcaaagacttatgtgtacaggaaaacatcacatgtatgttttgttggttggttggttttcattcctagtgacatctttttttcccttttccttgttacttggcttctgcctccgcttctctctctgttctctctttgacagcttgtgagatccctttgcatgttttagaaatcaaccctgtgtctgccctttggatttcaaatccatcttctaagtcatttaccatggaaaagtttttaagtgttacatactaaaataggtcattctttttagatgctaggtttctttctctagccccgaattcctagatgtcactttactaaagatcacccagtataagaatacctttcccaacagaacacctaataaatgctccatactgacaattaaatgtatgttacacttcttatttctttattgtaaagacacactgaagcacttcatctctctgattttttttcttcagggctcatctccagcagtatagcaggcagctagagaggacagacatcacctcttgtaaccctagtattatttatgcactccttatacttgtcagtgccaaggaatgagttcagcacaaagggcacaaagataaatattgttaatttcctgtttgcctgctgcagttttctataagaccagtcattctctactcttttaatgatcctggcttcacatcagaatcatccggggagattcttaaaaacagagatgcttaggactacctctaacctacttaccagaaactctaagatgctaggtgattcccttaagcagccaggcttgagaaccactggactagaaggtgagatgtttaaacatcttcatatccagcctggcaaagaggtattcagcaaggagtggttgggtaaagatcaatccttgccttcaagaactttcagaatgagctgtaagcaacgataatattcagtatgctaagtgatctaaccatcctcagagagtgcattggaatacaagagaagcaagtaatggattctgctaacagtgctagatacctaagtgctgaattttatgagacttttggaccagtttgatttagtatttataaatcatcttcacagaattttgcagaacctagcatctgtaattttaaaaggaatcttggacatgttcttaccttaagcttgcagttccatttctgggaaataattggacaaatgcctcaaaatgatgtacagggatttgtctctgagctctctttatagcgtttgaaattatttgctaatatatcaaatagtaggagatagcttgtataatcagggtacattggaaccacacatgcccagtggttccttctccctagcacagagatgagctgtatcatatctttttctcaagagaagtgactaacatgttgaagaagaggccaagagtgttaatctagcaaagtccctccacatggaaaatatgaagagtgacagataaacaccctttcccctataaaggaactcattatttcttaaaatttttttagtgagtttgggagaaaaatgtgtttcttatgtgtacacatgtgcttccttaaacaaattgagattttcacactttttttggggatacaggttctttaatggaggagccaatctctctgcacacctggtttcatctaataatatacagacaccagctctgaggccagttaatcatccccagtgtccaggcacagagtagtcggtccgcctcacaatgttggactttctagccgagaacaacctctgtggccaagcaatcctaaggattgtttcctgtggtaatgccatcattgctgaacttttgagactctctgagtttattcctgctgtgttcaggttaaaagacagagctgatcaacagaaatatggagatatcatatttgatttcagctattttaaggtaatcttcctctatagcatttttattgttgtcttttctacaaaagcgtgttttctctgggaaccatgaaactctgtaaggttaaggaattatggaaaaagctaaagagaagagcttttcgactaaacttaatattagctactaacttgaaaataagttgaaagtattatgtcaaagccctaacacaatataattgtatttttaaaagataactttgatatttcacattgaagggccccatacttaaaagcatgctaatcttgggtccaattcaaattcatttctctcaaagggattttatatctaggcttctattatcttcactactttctgttgctctgctttaagtttgggatgtctaataacataagaacaaatttttaaaagactatttagaaattgtcaccaacaagtatgcttttattgacatttcacatgtgtttttttttctcagggtccagaattatgggaaagcaaactggatgctaagccagagctacaggatttagatgaagaatttcgtgaaaacaacatagaaattgtgaccagattttatttagcatttcaaagtgtacataaatatattgtagacttaaacaggtattgatctatttaggaatagcttattctggtagtaaatagtggagagggaaaaggacacatagcaacgtgtaaatctctctgagttactacaaaatttcctaatttagtttatactgtatatagttgtcttttcctacctgtggcactggtcatcttaagaattttgaagttttactataatgtcctgctcttatgaggtgttgtaataaacttagtttaactaagtcatatagtttccaatcctgttatttattatcatatcctagtgtattatatgtgaaaagtgggaaaaagaacttatctttatcattaactttctgtctcttaatacacttcttaagaattcattactcattaacttttagactagatattccatgttcttctgcctttactcctagatacttgtaattcacaaatcaggactagggaatatttcttttacttggaacagcgataaatatcaaactgtggccctaaatcagtttataagactgtattcttaagagcatgaaggaccatgaactagtggaaggccagaatgcctggcatcctgccttatcttttaaaaatctttccttctttaaagatgttaaagtttctattataaattaataacttgcactgtggttttatttctagatatctagatgatctcaatgaaggggtttatattcagcaaaccttagaaactgtgcttctcaatgaagatggaaaacaacttctagtaagtaataatgattatttaaaatgaaattcaagaatatcaaacatagtatcacttttttttcttttaagtcacaaatatatacgaaataccattctttaaagagaagcgaaatgagcttttaattatcttctaactggcaggtccatatctgagtttagaacatagactttgaacagaatttaaaacagttaaaagttatgtggaagttatgagcctcctcggtgtaagaattctgtcttctttactttttgcatcccagccatctgtcctgatacctagtacatactaaccatttaagaaatgctgattgaataagtgaatgattttatgatgaagaggtatacacaatattgggttgctattttggtgtcccaagcaacatagccaaaataggtcaactgaaaaattatcactatgaattaaaatctgttttacataaacttttcaaggcccattcggcaagaaggtaagagctccttggaggaaacctaccttttccttgaaatctaaaactttttgaagaagtgtgagcaaagcaatatttttcatgattaccgactttactccctaagaatgtataatctagtgattttggcttttgtcctcttctcttcttagtgtgaagcactgtacttatatggagttatgctactggtcattgaccaaaagattgaaggagaagtcagagagaggatgctggtttcttactaccgatacaggtattcctgggctaggactacacttccgaaacgctgctgtcggtaaaatgcagtgtatgtccccatattccttatactgtgaacagcagtaatccaagaatagataagaaagtatacgattcagccgggcacagtggctaacgcctgtaatcccaacacttttgggaggccaaggcaggcagatcatctgaggtcaggagtttgataccagcctggccaacatggtgaaaccctgtctctactaaaactacaaaaattagccaggcacggtggtgggcgcctgtaattccaggtactcaggaggctgaggcaggagaatcgcctgaactcgggaggcgaaggttgcagtgagcgaagatcatgccactacactccatcctgggtgacagagcgagactatgtctcaaaaaaaaaaaaaaaaaaagtaagattcttatgtcttgtgagcatattgtaggtatataacaattacatatttcataatgattataaattatataatctatgtattacatatcaagtattctatatattatagattattagaagtatggattatgctgtccctaatgataactccaattttaaaaaggagtctgaattgtgaactttctttaccttgaggctaaatttcaaagaatcttagaaatctaatgaagattatttttgcttttgttgtttaagttttcaaatattactccttggcagatataaggaaataagtgtgctttctgttgtcatttcagtttgatgactttgaaaagttgtcattcagagtcaggttgaaagtgaattctctcccatgtttacatagaaacaaaaacaaatcaagcaacagcacatatccacaaatcatttgttgtgtttatctatacagaactgtgattcttcaggaagtaaggtcttgaaaacaggagccaccttaaccaactttttaattttagtgtctaacgcacagattttcaattggttgaatgagctaaaaatggaataccaggtcaatgtcggagatagtcaagattcagagaagaaactgtcaagaaggaggagtcaggagcttgagctaaagatgtaaagagtagaattaacattttcaaacttaaaaattaggacaaagtagacaaggagaagggggttctttggggacattatacttttcggcaataccaggtactactgtgtcctcagcagcaaattagtcttaggctcctcaactagccttttcctttcagctgaagggagtgttctagcagtgttcattcatgtcagtttgaccaagctgttttaacatccatgtttttaaaaatgagatttgaatggcctttcctatatttctgagagtacctggaaaaacaaaaactatacacagtgtaaagaagaagaaaaaaatattggcttatgaagcccagttttgaaaatatggctttgtcccctttggtacaacagctaattcattagaatgtgagcatttattattgaagtgacactgaacacttccaagtcacagtcgtggcaaaagagatccttacagcaaatagcaggtcatatccaagtctaagattctttgaatctagttcatttctttcagagcttactattccacccggaaaaatcacagacctgtttattagatctctgtagaaggaacagcttgccaagaaaaaagttagatatattttactttaaattgacataatatttttaaattattttttaatttgtaaaatgtcaggttcacattctttacccacaattttcaaatccaaagagctctgaaaaaatatatatacacgagtatacacacaacacacatgtacatatacatagtaattcatttggcagcaaaacctgatgtaagctgaaatcatttggagtcaaaacttgcctggaataggtgtgaggctatatatagtcttcacttatctcacttttgtaaatatttataaattttcctccagaattattcacttatgttgatcatgagatgccaattcagaccctgctggagtgttgtattgtgtatgatctatatgccatatgactcttactatttgaaaaatgctatattccgaaacaaatccactcctaaggattttggaaaagggattatggacctttacatagtatgaatacccatcttctaaacaggctttcaaaaatataattttgaggccgggcacagtggctcacacctgtaatcccagcactttgggaggacaaggtgggtggatcagttgaggtcagacatttaagaccagcctgggccagcatggtgaaaccccatctctactaaaatacaaaaattagccaggcacggtggcaaatgcctgtagtcccagttactcaggaggctgaggcaggagaattgcttgaacctggaggcagaggttgcagtgagctgagatcacgccactgcactccagcctgggtgacagagcaagacaccatctcaaaaaaaaaaaaaaaaaaaaaaaaggttatatatacatacatagcgagactccatctcaaaaaaaaatgtatatatatatatatatatatatacacacacacacacatatatatacacataattttgaatcttgaggatatattgaggatatagatggacctgtgatcatatctgaaactatattgagtcaaagtagaatggaattctactttattggacttttcagtttctaatatgtgtgttttgggtctttgtttcccattgtgaatatgactcagtgctgctcgatcttctgctgattcaaatatggacgatatttgtaagctgcttcgaagtacaggttattctagccaaccaggtgccaaaagaccatccaactatcccgagagctatttccagagagtgcctatcaacgaatccttcatcagtatggtcattggtcgactgagatctgatgatatttacaaccaggtgggaattaaatctattaagacctattaagacagtttaacagactgatttcacttccctctttaattactcctttccttccttctttcccaaaagagtaaaagcaggtagaaccttttaaaaccttttgagctacaccccaggatgataaaggaaagagggttattaattttgccagaatcatatatttcagggagaagatggaatttgagctattgggaagaagatgcattcttttagtcattcattcaagaaatggttgttgagtatgtgatacgtgcccattcacatgcgcaatgctggggacccatcaccgaagaagacaggccatgtccctgcccctactgagcttgtagcttaggaaaggcagatgacaggattatagtaaagcaagatgggtgttatcttagggtaagcacagggtgccactggagcatgcagcagtggcagcaaggtcacaacaggtgacaaaaggaaggtaagaggagtgccaggaaaggaggcagcctgagcaaggctgtgaagatcatgcagcatttgaaaatcgccccactccccttgccagtatgtgtagtagtcacttccttttaaaaaacgccaaataaaattaccatttgacttcattcttctgaagaaaacataattttagatgttatatatttaaatatttgtaaaaattataattagggagtaaagaggcctgtgataactgtggatatcatttatcacagaatgaacctgatctgtgcagttctttaggtagcttgttagttttttgtgtgaatatgttaagtataaataagagggtttttgttggtggtgttgttgttgttgttttaagacaattcaaaatcagaagctacccacagatgccaggtctccataataattgttgccattcattgagaattcagtccaaaccagccacaaaggaggttttgttcccataccattttctctgttcctcacaatagccctgtaaagtagatggcattatcccccatgttgctgttgagaagaataagacttggagagcttaaataatttccttaaattcctgttactaagtagcagaaccataacttgaatttggtctgtgtcaattcagagcatctcattcctgattgcctctcattccacgtccttctgaaggcaatgtgcttccatttcctccttgccccatgatctttattagcacaagggttaagctgtgattgtgctgtgtgtccaccccactctctgtcctgcacctcccccatccctggtcatgggtgatggaacagattctgtctccaggtaatttggaattgggcctgagaaacagtttctggattggagtttatccacaacatgcaaaattgggagtttgtgggcagcctcattctgccatgtatatggcgagtagcctggagggagagaaaaggtgggccaacacatcaaggggagaaagagcgaaggcattccggttcccagccccagccgcttcctgtggcctggccacatacctgcctgcaggtttcatgtgacatggctatgtctgcccttataacaatttctctcctttttgcttgtggtagctcaaggtgatatgtgctttgtgcatccaaagatttctagtacgtgaggggatgaacccctggggaacaccaacatttaaaaggcagaagatgaggactcagcaaaggagattgagaagagagagtggtatctaggaaaccagagaaggagagatttcattcctcagagaatttaagtgagagtcttaaaaagaagccgttgaattggatggttgtgaggtcatgagcgaccgtagggaattccactgggatgatgatggaggtcgaatttcagtgagttgaataataaacagaaagtgagaaaatagcaacagtgagtggagcctgtcagttctaagggttgtctccaacaggaaagatacaaaaatggagaagtggtgggagacacaggaatgggactttttttttttttttttaagaaaagacttagaattgcagcggtcaagggctggaagaagagaatattatggtgttaggaataagaaggaagaccttggcaagcaatggtacagtctgagaagggcttccagtgtccaggatcctgaaaggtgatgggctttggaaaaactgatgtgtcttacaaccagagagtttaatttgagcatgtctacgtgcaaatgttgccaacagctttctcggggtgtcgtcttgacattgcaggtctcagcgtatcctttgccggagcatcgcagcacagccctggcaaaccaagctgccatgctgtacgtgattctctactttgagccttccatccttcacacccatcaagcaaaaatgagagagatagtggataaatactttccagataattgggcaagtattgctaatttttttcctctacagtaaatgtgttagagaactaacttcccattcttttggcctttaacccacaggttgtaatgttgtaaataatgggacataacatcacttaggtaaacttgctctaactgtattgagaattttataattataacatgaaggaataaatgagtcagtaaaacttcctgaagaacccactagtctttttctaaaatggatactctcaagattaaatcatttattaaaatgtctcttgctttagctactgagattacaactaagttgtgtaagaatttatttattcttttccattttctgaatctaagatagccaaattcatctaatttgtcactttgtgaataggaatttcactttaataataaagttttacctataagctaactgtaatggggttactaaagtttatattattgcaaggatatgcttgtacctttgtaagcattgtttcatttaaaaatattcttataggaataaagcttgcttcataatatatatgaaatgaaatatatgaaaacaaagaggctttaacaaaatgcagggagttggattatattcgcatgtagcagattttgttctgcttctatatcggctgttgaatcacataaactatcgttatgaggggccttcaatttattggtagtatgagaacagcctacattaggaagtggtggttcctggccaactgtgaatcatattagtgagctcagagttgagcagccaagaggaaaacactgatagtgtggcttcaggttcctaagtttaataaagaagttttgaccatgatactataattaaagacatatttattattaagaaagaccaaaatccaattacatgaaacctgtaagatacacacctgaaaaaataccctagcacagtgaaaatgaagggattttaaaaaaagatatcccaggcaattgccaaccaataaaacaactggtgagaaaacattaatattacacaatagagaatttcaaaaagcaacgttaataggtgtaaagagatctttatacctattaacgtgaattaacaatcaggaacacttacttaacaatcaggaacacttacctatatatttggaaaatcttggtttttcattggaatggaatttaaacatggagtgggtattgccttctataactttagtattcaaccctttgccttgaagtgagtaggaatttaacaaattctgaatgtctcctctttcaggtaattagtatttacatggggatcacagttaatctagtagatgcttgggaaccttacaaagctgcaaaaactgctttaaataataccctggacctttcaaatgtcagagaacaggtaggttctaatctggggacattctctgataactgcaggcctagtttatgaagtagcaaataagctaagtagatttcccaaggaatttggaagataatcacttagataatttaatgcaatgattaataaaaggtgaattttataggttagaataagataggtaattgtaggttttgttatatagtatatgtaaattgaagattaggatcccaaggaagagtcagtaccctaagacaaagaagcatggcatatgccccaaatgacttagtttacttttgcttaaagactatattctcatggccagagttggttgtaccaatagctggaattaatatgtttttataagtaggatgaatgatgaagatgataactgaatatggataatatgtcctgtcactgtaatttaaatttatcatttgtgttgtgctaaataagcaacaagactcaagacattcatcttaaaggttaaacggttatattctatctcttttgttcttacacaaggcagaagggaacatccaagtaagtagaggaataaagataaaatcttggggagcatacttgatatttctaaatggttatgttcctcatcctggctcagttactgagtttcctgtgtggataaaacaatattgactcaaaaaacttcatcatgttttattcaagtaaattgaattccataaataatgcacaaaataatttcaatgttggcacatctcctagaaatatattagagaaagtggcacttttatacttagcaacatcagatcattaatttttcattgctaaaatccctttctaaaattgcattttctcatttgtgacatttttaagaggtttcttgataccacagatttcaactaacttgatgaggttaatgatgtttaacatttgacttcctttaagtaaagcagaatgaccaaattttccaaaaagctggtttggaaattcatttttgatatactaaggtgtattttttgctaagctttcataagcctgtagaagaagtcttatattttaagtgtttctgctctgttctgccttctttgtcaacagtattagcaagaacaagcaattgaacttctgtctttattttctttttcatctaagttaataatagaagagttctgaggaaccacctggtccaagtctccgtttgaaatttgaagaaaccaatacacaggggttaagccccaagtcacaccaaagtttaatcacagccagaactaggatgtagtctcagaattctaagtccagtgcttttttcaaatatgttcaataagccagttgtctttgagcccaataagtatagtccatatgttattcatcttatatagaaatgttatctttgagccctagaactatagtccatatgtcattcatcttatatagaaattacataaaaatgttaatgtttgagccctataactgtagtccatatgtcattcatcttgtacagaaattatataaaaatgttaaagtttgagccctataactgtagtccatatgtcattcatcttatagaaatgttatcttcgagccctataactgtaatccatatgtcattcatcctatatagaaatgttactatttgtcagtgaattcatttgaatgtgatttattttcaagataaatgactttttaaatgtaattcaagtttcttatttgtcaaggcaagcagatatgctactgtcagtgaaagagtgcatgctcaagtgcagcaatttctaaaagaaggttatttaagggaggagatggttctggacaatatcccaaagcttctgaactgcctgagagactgcaatgttgccatccgatggctgatgcttcatacagcagactcaggtaatgcacaaaaggggtggccgtttatattactccacataaagactctcagaatcaggacctacttcacgatgcagagtggtttagcagggagagaggccttggatgagaatcaagttgctttttaaagttagtcattttttgtcaacttggataggccactagcatacctgaaaagctctcccctgtcaggtactgttaggtgctagggaataagaggatgtttatctctcatgttcaaggagcttgtcactgatcagaatggggagatcaaatgtagacatatgaaaaaatagaactgcagatctgtggtaggcagaatagtgccttccagcccacacccagagatgttcatgccctagtccctgaaccggtagatatattacatgaaaaagggggattgaggttgcctattagctgacctttaaggagatgtttctggattatcccagtggactcagtgtaatcataagggtccttgctgtgtgtggtggctcatacttgtaatcccatcactttgggaggccaaggcaggaggagagcttgagcccaggagttcagaaccagcctgggtaacacagtgagatcccatctctacaaaaagtaaaaaaattagctgggcatggtggcacacacctgtagtcccagctactggggaggctgaggtgggaagatcacttgagcctgggaggttgcagctgcagtgagccaagatcatgctactgcactgcagcctaagtgacagagcaagaccacgtctcaaaaaagaataataaaataagagcccgccccccccccccactttttttttttttttaagacaggatctcaagttccccaggtttgagtgcagtggcacaatctcagctcactcagacctcctgggctcaagcgatacaacttccgcaatccccgcaagcagctgggactacaggtgtgtgccatcatgcctggctaagttttttgtatttttttgtagagacagtgtttcactgtgttggccagggtggtctcaaactcctgagcccaagcagtctgcccacctcggcctcccaaagtgctaggattataggtctgagccaccatgcccagcctgtaaatataggggtccttaaatcaggaagagggaggtagaagtgtcagaaccagagagatagcattgtgacaaaaacctgactggccattgctggctttaaagatggagggggccacaagccaaggaatacaggcagcctttagctgctgaaaacaagaaaacagacttttcccctagaatgtccagaaggagcccagcgcagccatcaccttgattttagcccagtgagccccatctcagatttgtcacttctgggatggtgagagaataaatttgtgttgttttaagccactgagtttgtggtaattgttaaagcagcagcgggaaactaattcaaggtccaaggcagtaaacagacaccaggtgtgtcaaacagacagttggtgtgatttgagttcagagtagagagggaaacattgcttgggataggggagcagaggaggtcaggaaaccccatacaggaatcaggagccaaccaggcgtgtgatgaggttttgaagcaaaaagcagaagaaattctagactacagaaatgatggaataagtgatacgattttgaaagtacagaaaaacatatgggcccactgagttgatgacctggctggaccagagtgcttatttaaggtagattggatcttagctttttatgagtcatggtctcctccgagaccttctgttcacacagtttgaccatcaagttcagattgtgagaaatgcttcaacctctggtttaatggtagaaaaataagtaagttgaattaacatctctgagcttgttcagggctggcacagtttcttattcttcgtaaatgctggatcaacactaattaaccaatgcattccctcatccaggactgtatacccctacccctaagaggtgtgtcattcagcaggcctgtgaagccctctgctttttgtttttcactcaacaaactttccttgaggaccaactctgagacaggcactgtgtgcagcacttctttgttcttccagataagactgtgtctctttaaaaaactgtgcacacaagacttctctgtagccttcctttgtaacatggtagcccctgtctcacagctcttccagccaagatgacttcacagtccttctagctaccgtctgcttccacttcctatgggtggtccacagtgaaaacagcagttggacttcctcatccttcgtatctttgaaaatgtgtggagtttcccctcagccttctctccagcttcttaaacctttatcctgagagctgctttccagtttgtttcatcatcttgtttgttggcctatatccatttacaatttacccacagtatgaacacgatggctgaagtttttaatccctgaatctgtttttaattagttgagtttattttttacataaactccagttctaatttgaggattttactacattgactcagcttttaatcttctttaccaaaagtcttgcattcacaagcgtataaacaactcaagccctcactttatcctgtcataaaaccaactggggttttctagtgactcagcctcatcttcatcttctgtgtgactctgcctgacggccctgtctatgttcggaaagccggcagtctcctgaattcgcacccatgccagggacaaccttggcttgccagaggtctgtggttttatcttcagccacatttgtcttttgcgtttgtgcctggcaattgtctgacctgattgcacagggtcgtaatttatcagaaacaaatgattgacctatctgattgtgagtcacacatgggaaaagcaactgcttagttaacttttgtggaatttcagtcatggtgttcagaaaagcaggcctagtctcattgcctcctgttgagttgctggaggcatttcccagtcttaggatgcttgtacagaaccttgtaaagaaatattctctgaggaaataagggatgagaaaggctggctggctactgaagtttgaccccaaagttctgatggctctgcagttctctgggtatgaatccttaagggtcagatctgagagagatggtcaggccctgggaaccccagaagcaaacctggtttataccaagaagctaaatgttaaagcacattgaggaatacagagtgtttgtccaacaactgggtacttaaacattccctatgcaaacatgaaagcagattaaaatcaggagatttctagtttaattaaaattagtataaagacaactggagctccttctgagtttgtttgatttttgtttagttaggtaaatatggagctgaaaattttcactttgtgtaatcagtgtcaccagttccaatatatttcttcccacatagttctggcaaattcatgaaaaatcagaactttgcagtttcccatgaaaactgagcctcttttccaggttgtcacgagtctcctcctgatggagtaacttagaaatcagcatataagatgaccttccacaggcttcatcataactaaagcaacaaaaccacccatgacatatacatatatctatacaacattgttgttctgtacctgccagacatcctgagatattgatgggggcaggactaggaaggcaggagggggcacatgtaatactagtgtaactaccatataccttatacctatcagctgtgaactttttgacaaagtctgtttaagtcttagagtttttattttgactttatttgtcttagttcattttctgctgctataacagaataccacagagtaggaaatgtataaagaagtttatttggctcatggttctggaggctgggaagtccaagagcatggtgccagcatctagcaagggtcaatatatgccagataggcagaagggcaagatagtgggtgcaagagagagctcacttttatagcaaagccactgttggaataactaacccactcccaagataatggcattaatccattcatgagggtggacccctcataacacaattgcctgccaagggctctacctcttaacgctgacacaatggcaaccaagtgtctaacatgtgaacttttggaagacgcattgaaaccgcagcagtagctttgccttgtaagtattttgccttattctacttactctttcttagataagtaattggccttataaaccaatctaagcaaatatcaatattttttattctattcttttaacttggcgtttatttcatttgaaatggtttagcttggcagataggatcatctaagaattaggacatccagtatttttaccttgggtcaatcactgcctaattttgtgaccttggcctagtgcctgggtagtggatagttcagaaaactctgactgcctgccatgccctctggcctctacaagaagcaggatggccagaggtctgctgcttcttgtttgggggtccctcatctttgtgtgaggaacccttccttgttgtgtcgggcattccccacgaccactctggcttcagtgattcactacagggacacagaggactcagcatctagtagtactcacagctatgatttattatagcggaaggatagaaagcaaaatctgcaaaggaaaagggcacacggagtgaatttggaggaatgaggcacaagcttccgagcatcctctcccagtggagtcccacagggcacacttaattcccccagcagtgagtcatgacaatgcatatgaagtgttgtcaaccaggaaggctcattagactcagcttccttcggtttctattgggggctgcttacataggtagcctctgcccagcatgtaccaaaattccagacttccagaaggaaaacgttgtttgtacaatcatttaaggcttagtgagctgatcttgtgagttctcaaaatgatggcagctcttcgtgaaattcaagttcccagatgccagccaagagccaaccttgcaaacaggcctctctagggatagcagtccgttactgaatggcagggatcaatgtctaaagcaaaagcaactccgaacagacaggacgtgaggaagccacccagctatgaagtagtacaaggaggctctgcccattcgttttagacagttgctataaacaaaccgcagaatgctcacaaaatttggaaacactgttctgcagcttgctttttgtcattcaacaatctttcaaggatggcactccatgtcagattcaactgtcatttaacagtttaattgtactccatggcatagatgtactatatttcaccatcttttattgatatacattttgcttattactttttaaatggttaaaatgaaggaaaatatttaataatttatcttatttcatagatattttctacacatttagtaagcaggtaacacttttcctgtttctagcctgtgacccaaacaacaaacgccttcgtcaaatcaaggaccagattctaacagactctcggtacaatcccaggatcctcttccagctgctgttagatactgcacaatttgagtttatactcaaagaggtaaaaatatttgaatgaatatcaccacagtcttagcttttttatgcttaaaaatattttttaaaaaaaagactaggattgcttgctctgtctctgattcaaggtacagatttgagctgttgagatagttcttatagttaaaggacaggaataaacatttaacaagcctgtagtgcctcctttcactggggatacagtgatggggaaaggtactcaagatggtagaggttatagcctaatggggaatatagacattaatcaaagaatcacactaggccaagtgcagtggctcatgcctgtaatcccagcaccttggaaggcccacgtgggcagatcacctgaggtcaggagttcgagatcagcctggccagcaggctggtgaaacctcatctctactaaaaatacaaaaattagctgggcatggtggcacacggctgtagtctcagcaactggggaggctgaggcatgagaatcacttgaacctgggaggcggaggttgcagtgggccaagatcgcaccactgcactccagcctaggcaacagagtgacaccctgtctcaaaaaaacagaatcacactaataaaaatgtaaatatgaactcagatatttgctctgaaggaaaggaatgtagttctccaggtacctagaataaagtatcctgttgcatcctggtagacttccatgagaagagacgcaagagcttctgaaggggcctggggaagggatctgttagtgttaggtagacaaaggtagggagcgtgatggagaacattccagggacaggaagaatatcaagtcgtctttggtgaggaggaacataaacaattcaaagacctgaaagaccagttggctggaggagagagagtgagagaaaggtagtgtgaaatgaggctgaaaggtaggcaggagtcagcccatactaggccttgcaggactttggtctttatcctaagagccatgagaaccactggaaagggtattaactggggtgggtgatttgcatttgtacaaggtcatcttgaggacttcaggcatctgagttcactgaaggaaatgctgaggttagtcttacctctgaagaagcctgtatgggcataataaaaatgatgggtacctgggaatgctcaggttttataaccagtatccctgggggcttggatcaggtgggcccaggaactagcccagacatttatacccattcggaacagatcctcatcttgcttcagtatggttactagtatattagatgtttctttatcttctaggtttctgaggatactatattcccctactaagtagctcagaaaaaatagatactgactgctaacataatgataatgcctgtgcttagtgttttcagtgatttgtctgggcataattttatcaaatcagataaatgctgctcctttttgatctattaataattttaatggtttccctctgaatagcaaatagttattgaatacctactctgttctttgccaggtgctggaaatttaaatatgaacaaaatgtgtccctaccgtctaggagctgccctgtcagtatagtgagggaagaaagacagattaagccaagatgagaaaacaggaaagatccaagaacaggaaccaggtcaaagcaaaagtggcctttcaaaggcaaatgaaaaaatgcccgcaaggaagaaatgcccagtcgagtgcagtggctcacacctgtaatcccagcactttgggaggctaaggcgggtggatcacctgaggtcaggagttcgagaccagtctggccaacatagcaaaaccccatctgtactaaaaatacaaaaattagctgggtgcagtggcgcgtgcctgtattccaagctcttcaggaggctgaggcaggagaatcacttgaaaacacaggcagaggttgcaatgagccgagatcatgccactgcactccagcctgggcaacagagcaagactctgcctaaaaaaaaaaaaaaaaaggaatgaaagaaatgccctcagaccagttagaattatgaactagagccccagggacccaagagttctatagataatatgtagttcagcattgttgagtggaaatcaggacagacctaggctatctgactgaccaagcctgtatttctaatgataagtctgttctctggaatctattgaaacagaatggacagcttccttctgtctatccaggtagacaggaaacaagacagcataaaggagtaccacctcattagaggtcttcaggaaagctctggtaaaaagaaaaaaaaaatacccaatacaaattgctcaaagaaatgatacatttgaatttctgacatttcagctgggttctttaacctgtgcttcctctgtcctacttcccatcctgcacagttcatagagtcactttctgactatcctatagacacagtaattggacctgtgttttttctaatctttatatgacagcacatttcctaattcagggaccatcccctatcccaaattccatcctgtgagatgtgaaacctgtgagttcatgtgaatgagtgtttgaagggcttgacgccatgtagtctcttacgaaggcttcagggtgctcttatgttgttgctttgccattatcaaatggcattgattgatccgagggactcagaaagttagggtagactctataaataatttcattattcctcatcctctccgtcatcattttattggttagtcattctgccagatcactaagattcttcctctacaggccccgcaaaattccacagagccctgattctccacctgcagatggagtctccctatcccattgctcagcttttcaagatttattatgatgctggcaagtgaggaatttcttaagcgagaaatcagagttcatgcctgtttacctcctaagagcccggtgtaaaagaccatctacccttgtctgagatggcgtgtcctttagtgagaaataagtatgttttttaagtttgtttcagaaaaaaaaaaaacccaaccctgagttacacccgtttcttctctgcccaagactttgtagaatttaaatgttatgaaggagtgaattaataaacagaattaaggcggtacagtggctcatgcctataatcccaacagtgtgggagaccaaggagggaggatcacttgacaccaagagtttgagacaccagcctgggcaacatagcaaggcccccatctctgcaaaaaaaaaaaaaataaataaataagaaaattaaccaggtgtagtggcgcatgcccatagccctagctacttgagaggctgaggcaggaggatcacttgaacccaggagttcaaggttgtagtgagccatgatcaccccactgcactctagcctgggcaacagagtgagaccctgtctctcaaaaactaaataaataaataacaataaacacaattacttgtataataataaataaataaataaaaataaacaattaaacttgtataataaaacaaagaacttttgcaggtaatctagttcattccccagtcattggagaaggtaatacacaaactgtccctgactgtttacgttagaattgcagacattgttgcctagaaggaaccatagagcagtggtcacaaatttaatctcacattaaaaatgcggatttctggccctattcaagaccgcctgaacgagaatctttgggggtgggccttgagaatctgaaaactttaaagcctcctggtggtgcttatgtgctgttggtgttggtgtgagaactactgttttggaggtggtctggctttgtccctgaatttctgcaaagtatcagtgcctgaggagatgacatcagggtcaatgttaatttatagtgtagcttcttatttaaaatttaaattgggtttcctcaagctctcttcataagctgcctagtctggatttttctcttaagtaaataaatattttctgttgcttcaacagatgttcaagcaaatgctttcagaaaagcaaaccaaatgggagcattacaagaaagagggttcggagcggatgactgagcttgctgatgtcttttcaggagtgaaacccctaaccagagtggagaaaaatggtaattactgaagaggaaatactggtgtgtttggaatgtgtgcacaggttatttgaaaccttggaaactggcaggttaaaaagactttatgttctcattattgtatcctatgatattccatctttagtgttgctaataaagatctgaaggttagttttggctgcgtctagctctctgctctcttgggcaatgttcatattcattttagagttcaggttttatatcttatctttgaaatgtgaggttatgctaaaccaggggttttggtaactccagttcatagacaagagtttagagagtcacagttggcctccatctccatggtatgcaaaactaatgtgtcagtttagtgatttggggaaaggggggaaaggatctataattctcatgatcttctcaagaagaatacgtcacccaagaatgtcataatctaccagcatagatgatatctaaaattcttctgattttgcttgattcttgttcacgaatgcacctgctatctagtagcagaagagggtactgcagactagttttgaaaaaacacaaactaaaattttactttaatgattttgatcctacttcttctaggaaattttatttataggaaagttctggcatcatttcaaattttttataaataagaaatttctaactgctcccaaaaaaccattctgaattttatggtgacaaactatttttttaacgcttaattttgttttaactatcagatctatttctgatgaagttaattatactgtagaattgcttagtagtgtagcttcttgtttaaaaactattatttttaatcagtatgagcttgtgattactgtattttagcttttgtttatttctttgatgctgagtggttggtcaaaaatatatttccaaattgtattattgttcctatagggaaaagccagccaacgtataacgatgtgatataaactagaaacatgttttgcaggtcaccatattgtgatatgaaacctgaagtctagaatgaatattatggttatcatattgtgacctgcaaaacaatcacgtgtaacaatctgacccggttagctgcctagaattagtgcattaatctctgtgatagtgtcttttaggcccttacaaataccaactttgtttcagagatgaaataacaattttacatttttttccagctgtatagtttaattacagcttaggacatactttcacagttttttctcatccttacaaccctgtaagatacacatcttaatccttattttatatataaggaaactgaggcttaaaaatgtaatcatttgctgaaggtacaaaggtggagagcctgggtctcactcatctcagaccccaaatttcatgctctttctactactccatcgctgcccctcagccctacaaaaatcttcaaaaatgagtgtttgtcatgccaattcttgaaataacttagatcgtaagtctttaaggccttttaataacgtgggaccaccccattgataaacaaacaaaaaaaaaactttaggggatcaacttggtgaggtaaagagcacagagtttttgaacctggacagataattgtaaatcctggctctgccatttagtcaccgtgtcaccctgtatagcattctcagtctctctgagcatcagcctctttatctgggaaatggctaacaatttccacctccctgtattgctatgaagatcaaatacttagaactttgcctgacacactgagggtaatcagagcatgtggacacccttctctttctctactgtatgaaatgtctgccggttcctaagtgcaaatggcaccccctgcattgttcagacatccctgtgactcaccagtcacaccttacacttctgtcatattggtctcttctttgccctccaagatatgctcttgtcattcttgccctgaagcctctgcctgtgtctgcctttcatctggatacaattcccttcttcatctctccgatgatctgatctttacttttcctcgcttctccagaaaattctccctggtaactagggtcatccttcagttcctttccaactcttctccactgccaccaccacctctacactttatagcatgcacttgagcctttagtatttgtctgccaagtgctgtagactaagctatttatgtagaaagtttattctactatgtcgcatgctccaggcatttttgtcgtttggaaaattcctagtgttaggcccacggttaaagctctgaagaactgaatttataaaagattatttagttaaattcaaagccacagctacaggaattcgaggatttcagtattttcttatttctgtattactagaaaaccttcaagcttggttcagagagatctcaaaacaaatattgtctttaaattatgatgattctactgctgcgggcagaaaaactgtacaactgatacaagctttggaagaggtaaggaaacgctttttaaatgcaggttcttggatcatgaatcacaccttatgacccacccagcagtctgttcctgtaaatatagctgagagactatttcatcagaagtaaaagcgatgtgaattaatatgtttcctgtaacgtatactgtcctaaatttggggaaataaataactagtatgaagagaatggtagcaaaaattacgatattgtaacttgaggaaacatgtaatcttagaaacataattataaaaataatatagaaacattgggcaaattgtgataaggaggtaaaagcaaaaacaaaattgcatgtgtataccatttttagggttgtaaaaaagtgtgtgccttgggggaaaaaaccagaaaggaatacacaaaaatgaaaataattatataatggtcatatgcttataagtgatatattttcttttctgaaaaaaatagtttattgtttttctttcaactcaaaaatgattgtaccaaaaaaattatacctcaccactcttaaattttaattgtgtatttaactagatttaaaatgataactaaaagcagcagaaaaataatcataaactcttttttttttttttgagacggaatccagttctgtcacccaggctggagtgcaggggcacaatcttggctcactgcaacctccgcctcctgggttccagcgattgtcctgcctcagcctcctgggtagctgggactacaggcgcctgccaccatgcccagctaattttgtatttttagtagagacggggtttcaccatgttagccaggttggtctcaaactcctgacctcaggtgatccacctgcctcgggctctcagagtgctgggattacaggcatgagccaccgtgcccggccaactctattatttaaaacatcatttttactcataatctataaccctatccaattggtatgattatatatttttagagatataattaatactgttttcacttggaatattttcttacaggctttttcttatttctgcaaggtttttaggatggtcgctataaacagcaacacagtaaaataattctaccaaagtttcttattccagaacaattgcacacttgtattatttctactttgcttgtttggatttttttagtctataatatgatcgtaaacaactttgtaaatctcaaatgctttttatcatttgccttatttattttgtcatataacccaggcatcttcagttatatacattaaaatttcaagacattgtagaatcattgttttgtttttaaaagtgcatcaaaagaacttaataatacacaaattccaacacatggttgtgatatacacaataagcagcggaacattttctaatcctagaaacttgtgcattttttaatagcttggctcacgtttctgaaatttataatttgaaataaaaactttatcaagaaattgtcagaagtagtgtgctttatttgaagtgttttcaagaacaaatgagcaccatagagtccattcaggatttttaaattaagtatatttctgtaacacaggttcaagaattccaccagttggaatccaatctgcaagtatgtcagtttcttgccgatactcgaaagtttcttcatcaaatgatcagaaccattaacattaaagaggaggttctgatcacaatgcagatcgttggggacctttctttcgcttggcagttgattgacaggtaatgtaggcagcctgacatttgctgtagatgaaaggccctaggaacatcttcttaccgtttcttttctttttacagtttcacatccatcatgcaagaaagcataagggtaaatccatccatggttactaaactcagagctaccttcctaaaggtaagcaaaaaacagtgagattctctgttgctaggaaagagttggccttcattcatacctcattcattaattcagcccaggattttatccttttaggaaggtaaataatttcaatatttttatagactgaaattgttagcagtt

SEQ ID NO: 455 - DNA, 32742 bp, Homo sapiens
  source 1..32742: mol_type = other DNA
gcgcacgcgcgcgggcccgcgccgacgcagcacggcctcgagggcgcgagcccgcgccgccgccgccgccgccggtcccggaccactgtgagcccgcggcgtgaggcgtgggaggaagcgcggctgctgtcgcccagcgccgccccgtcgtcgtctgccttcgcttcacggcgccgagccgcggtccgagtgagtgcggggcgccgggcgcggggcgcgggtcgggggctgggcgggctccttctgtgcagcggtcgtgggctgggccgcggccctgagggcggaggggcagagcggggccgcccaaccagtcccggggcggatgcggcggagaccggcccctcccgcgcccccggcccgggttctgggaggaggggaggccggtggccgtgaggaggttgggggccctcgcggaggccgagaggcttaaggaggtcagggggcgcgctgggaggcgggggttcggggcgctgggtggtcgggaggcttggggaagactgggaggctgagggacgtggggaggccgggagctcgaggaggtcgggggttttgggggcgcgcggggaggccaaggggttcggggaagacagaaaggctgggggacgtggggagtccgggagacgtgaggaggaaggggggggcggctttcgaaaaggccgggcgcgcggagaggccgaggggcctgaggaagacgaggaggccggggctctgggggcgcgcagggcggacagaggcgcggggaggacgggccggcctccgccggagcggacccaatgcctgaaaaacaaaaggggagaggcaggaggaggaagagggaaatcgcagggacgtcggcagggttcgcccggacgcgagagggaggctcgcgacggcccgacctccgtcccccgggcgcggcctcgcgggcagccaagggtgggctccgagcggcctgccggtgcccgagccccaagcccgccgtgtccccgaacgcaaaccctcaagtttggtagagccccgtgggcttcttggcgggagccctggagccctcactgaagtcctcactggagtcattgtgcttcccaagttttctcctcttccccgcccccagcccccgactctgccgcggtggcttaggcgcaactgtttgccgaatttctctctgggttccttgtgtagcggcatcctgttctttcttagaagaaggggtgtgtgtgtgtgtgtgtgtgtgtgtgtgtgtgtgtgtgaattggtttcatttaattgcagaattttgtagctaaattcagtgagggtaaagtttctttttttttttttttccgagtcatttcaacagtgtctcattcttgcatagttagcctgcagctgggtttttggcaatgagactaagataatagtaatattgtagtaattatgggaactggttatacattcaagctgaaagctgaaggcagtgcaagagtttggggatttgtatttaagacttaaccatcgctaggatttttacttagaatgtaaacgttttcatggctggaaaaacagaccagtactatttgaaatgaaataccagagcctcaaccttaatattttatttgggaaacgggtaatgaaaatgatgtcttcgagagttgagcactccgtcccatatttgaaaacttatgagcagtgcgatgcaagcacacggatgaactagttacaagacacataaaagtaaactagcattcaacgtatttttgttggggtacagtatagataatattttcatccagttatactagccaattaattagaaaagccctatgatattcaaacaaggaacattttaaggatgtttgtgtcccaatatctttgtgttttgtatttgtggttatccttggtggggaaaaacaggctgaacctaccatcattttgaaccttcttgtttattaaactgcagaaacaacaagatcaatattacaaggttttcctttaaagaatttcaggtcactatcaaataatctagtttaataatgaacacaggcacagattatttaaaacacatgcttcctttataagggagccgacaatcacctaagacttcagtgtagacgctgattagaaggacccatacatcattcagtggtgatgcatcaagaagcaagtcattggttaaataaagacatggaaatcaaaactccatgtttacggtttggggcaaagaatactggggcaaactctgagaggagatgggacttaaaaagccttattatttgaggctggaagcccattgaaagtgaataatgttagattaggagtgaagttccatgaatccagcagtgaaattgtgaggaggcagtgaggatcattaaaacgttttatactaaaatgttttctgaaaagcaccatgcttcttgatggaaattacataacttactccctcagtcctcaaaatcatgttctccagctagtcagataactgttctttctagggagttggagaaattgtctaagaaaatagtttttttttttttttttttgagacggagtctcaccctgtggcccaggctggagtgcagtggtgcgatctcggctcactgcaagctccactgcccgggttcatgccattctcctgcttcagcctcccaagtagctgggactacaggcgcccgccaccacgcccggctaattttttgtattttttagtagagacggggtttcgccgtgttagccagggtggtctcgatctcctgacctcatgatccgcccaccttggcctcccaaagtgctgggattacaggcgtgagccactgcgcctggcctgaagatcctgttgttttaaaggtagcctctttaaaaaaaaaagattaggtcctgtagatgaaattatttatattgtattctataatgtaaaaaataattttgaaaactgtcctttcctgaatgttgatttgagttagagaggtaggatcttagttcatatctctaaaggttatggaaacctttttccccttgtattttatgatgtcttaatttttagaaaataattaaaattatcttgagttacaaaagatgcatttcaaagtgtttataaagtttcagttttgaaatttaacattttcagtttaggcattctaaactgatgtagatttagacctagatcaattcttgttttaaatttcagtaacattaaaagttatactgtttgtatcatatttgaagtgaatttttcttttttgctggtgaaaaacatctgagaagtttagttcctgtagtataggcatatcttggtctgtttctagaccactgcgataaaatgagtcacacaaattggtttcccagtgcatataaaagttaggtttacactatagtaagtgtgcagtaacatgtctaaaaaagcaatgtacatttcttttttttgagacaaggtcttgttctgtcacccaggctggagtgcagtggtgcaatcatagctcactgcaacctggtcctcctgggctcaagtgatcctcccacctcagcctcctgagtagctggcactatacgtgcataccactactcccagctaatttttacatttttcgtagagatggggtctccctatgttgcacaagttggtcgtgaactcctgggctcaagtgatcctcccaccttggcctcccaaagtgctgggattacaggcatgagtcactgtgcccagctaatgtacatgacgtagtcaaatactgttgatcatctgagccttcagcaagtcataatctttttgctggtggatggtcttccctcagtggtgatggctgctgacaaatcagggtggtggttgctgaaggctgagatgtcaggcagtttcttaaaataagacaacaattaggtttgccacatcagttggctcgttctttcattaaagatttctccagagtatgtgatgctatttgaaagcattttatccacagtagaacttctttcaaaattggactcaatactcctaaacactgccattgctttatcaatcagtgtatgcaatattctagatcctttgttgtcatttcaacaatgttcacagcatcttcaccaggggtagattccatttcaggaaaccactttctttgctcatccctaagaaggaactccttatccgttcaagttttatcatgagattgcagcaattcagtcacatcatcaggttccacttctaattctagttctcttgctatttctaccatatctgcatttactttctctactgaagtcgtgaatccctcagagttatccatgacggttggaagcaagttcttccaaactcctgttcataatgctattttcacctcctccaatgtgtcatgaatgttaatggcatctagaatggtgaatcctttccagcatgttttctatgtacttagcccagatctatcagaggaatcactatctatggcagctatacccttatgaaatatatttaagacttaaaagtcaaaatgtcttcttaatctatgggctgtagaatggatgtggtgttaacaagcatgaaaacctcattgatctctttgtacatctctctcagagctcttggacaacaggtacttggccaatgaacagtaatattttgataggaatctttttctgagcagtagatctcaacagtgggcttaaaatattcagtaaaacatgctgtaaacagatatgctatcatccaggctttgttattccatttgtagagcacaggcagagtagaattagcatcgttcttaaggaccctgggattttcagaatgggaaacgagcattggcttcaacttgagatcaccagctgccttagcccctaacgagagtcagcccatcctttgaagctttaaagccaggcattggcttcatctctctggctatgaaagtcctagatggcatcttccaatagaaggtggtttcttcatttaaaatgtgtttagtgtagccaccttcatcagtgatcttagctagatcttctcgataacttgctgcagcttctccaccagcacttgctgcttcatcttgcacttttatgctgtggagatggcttttttccttccacctcacgaaccaacctctgctagcttccagcttttctgtagcttcctcacatcaatttacagaattgaagaggaggagctttctctgaattaggccttgttaggccttgggtcaagggaatgttatggctggcttgatctatctggaccactaaaactttctccatatcaacaataaggctgttttcttttcctttgttttgttttgttttgttttgttttaagagacacagtctcactctgtcacccagtggcgcgatcttggctgactgcaccctccgcctcacgggttgaagtggttctcgggtgtcggcctactgagtagctgggattacaggtgtgagccactgcacccggctaaggctgttttactttcttatcatttgcgtgttcactgaagtagcacttttaatttccttcaataacttttcctttgcattcacaacttggctgtttggcacaggaggcctcgcttttggcctatcttttttattttattttattttatttatttattttgagacagagtctcgctttgtgccccaggctggagtgcagtgatgcaatgttggctcactgaaaccttctgcctcctgagtagctgggactacaggcatgcaccaccatggccagctacttttgtttgtttgtttttttagtagagacggggttttgccgtgttccgcaggctgttctcaaactcctgagctcaggcaatccgcccaccttttcccaaagtgctaggattacaggcatcaccactgtgcccggccctatcttggtttttgacgttttttctcactaagcgtaatcatttctagctttcgatttaaagtgagataggcgggactcttcctttcacttgaacactttgaggccattatagagtttcttttcttttttttttttttttttgagacggagtcttgctctgtcgccaggctggagtgcagtggtgcgatctcggctcactgcaacctctgcctcccaggttcaagcgattcgcctgcgtcagcctctggagtagctgggactacaggcacgtgccaccatgcctggctaattttttgtatttttagttgagacagggtttcatcatcatgttggccaggatggtcttgatctccttatcttgtgatccacccacctcggcctcccaaagtgctgggattataggagtgagccacgtgcccgtccttttttttttttttttgagacagagtttcactcttgttgcccaggatggagtgcaatggcgagatctcagctcaccacagcctttgcctcccagttcaggcgattctcctgactcaacctcctgagtagctgggattacaggcatgtaccaccacaccaggctaattttgtatttttagtagagatggggtttctccatgttggtcaggttggtcttgaactcctgacctcagatgatcctcccacttcggcccattatagaattagtaattgttctaattgcagtatttttgtatctcagggaatagcaggccacaggagagggaggagagcagaagagacaggggcccagtaagtggaatagtgggaatgcacatgtttatagagtaaatgtgtatctcatgtgggtacaggtcatggtccccccaaaacaactacagtagtaacatcgaagaccactgatcataggccaggtgcagtggttcacatctgtaatccattgttttgggaggattgcttgaggccaggagttcaagatcagcctgggcaacatagtgagaccctgcctctaaaaataaaaagagatccctgttcacagatcaccacaacagatgtaataataatgagaaagtttgaaatattgtgagaattaccaaaatgtagcacagagactcaaagtgagcacatgctgttgaataaatggcactgatgacttgctcgatgcagggttgctgcaaatcttaagtttttaaaaactttttagtaaatgctgttaattgtagcttgatttgcataaatactctaatgaaatggtttgtagacaaaagcaggaaatagttgtttttgccttagtggcactgtcctcccccttagcagttggaagcctcagagagacactagtagcatcactacaaagtttacatgtttttaagaacatgaaagtatttccttacaatgtttaattaaattttatttaattgaaatcctacccgaatcttactgatatacattttctttactataaattcacttttttcagaaacagataaatgacaaaaatcatacctttgggtggggtgcggtaactcacacctgtaattccaccactttgggaagccgaggtggacagatcgcttgagcccaggagtttgtgaccagcctgggcaacatggcaaaacttggtctctacaagagatgcaaaaattagatgaatgtggtggcgtgtgcctgtagtcccagctacctgggaagctgaggtgggaggatcacttgagtctgggaggtcgaggctgcagtgagctgagattgcaccattgcactccagcctgggcgacatagtgagactctgtctcaaaaaagaaaaaaaagtcatgtttgtgggttatctgtgcctagggtctcttttttgccctcatattcttattaaaattcctgcattttgggtttggattctgctgtgaactgtaggtgcttgttgtgtctgtgtctctcttgaccaaaacactatatgtttgtctttgttggtccaatgaaagagcttaacagttttatgtgttacatattttgtagtaaaatgtgtgttgtcttgtgagaatgtaagctccacgagggcataaactttgttttatacattattgaatcaccagtgtcttacacagtaatatttattgaatgagtaaatgaaagaacccaggtgtattgattattggagaactgttacttgcatcagccaggtgtttactgttttgtttgccctggtaaagaacgtcacttaaaaatcacataggggccaggcacggtggcgcatgcctgtaattccagcactttgggaggcagaggccagcggatcatctgagctcagactcacatagggcttgataccagggaagaacttggagttatctttttcacctttgtctactgtatttaaaattactactatcagacttgggccaggaaaaaaatattgctctgctctttcataattttggaactttttttctagaaatcaatcttgtaggaattgattgggactcatcctaagttctgaagacatggaaaattgtttgaggtgacacaaaatgatggaagtttttattactgatccagaagctctaatgtaccttttgctaatcaactggattaattggatgctttacaaaggtttaacattatgcccctaaaccatttaaaagaacaaacgtcttcttaatgttgaagtgtgagttatgcactgtgccgctcatccttgaccttgttcagagtcttttgctgctgtgctgctgttcagataaaacattttgaaagtgacagttcaaaatacattcactcaggtaatggaagtcaacatttgggtacagaatctctccctgagattttgcagtttgcctctcagtgaattccaccatagtcttgctatagtgtgagggggtaactcattcacactgttcacgcacacgttccagtaagctccaggggctttcagtggttttcagagtagtgacggaattgtagcatcactatcatctagaaacttgctagaaatgcaagtgctgaggccctacctctggcctcttgaatcaaacactgagggtggtgttcagcaagcttttttattttgttttgtttttgagacggagtcttgctctgtggcacaggctggagtgcagtggcactttctcagctcactgcaacctctacctctagggttcaagcaattctcctgcttctgcctcccaagtaactgggactacaggggtatgccaccacgcccagctaatttttgtatttttttttttttttttttccgagatgaagtctcactctgttgcccaggctggagggcagtggcgcagtcttggctcactgcaacctctgcctctcgggttcaagcaattctcctgcctcagcctcttgagtagctatgattacaggcgcacaccaccacacccggccaatttttgtatttttggtagagacggggtttcaccatgttggccaggctggtctcaaactcctgacctcaggtgatctgcccacctctgcctcccaaagtgctgagattatgggcatgagccactgtgcctggcctgttgtttcatttttttttgttttgtttttctttgagaccgggtcttgctggagtgcgcgatcacagctcactgcggcttcgacctcccagcctcaggtgatcctcctgagtagctgggactacaggcgcatgccactacgcctagctgatttttgcatactttgtagagacgggtatttaccatgttgccagggctggtcttgaattcctgggctcaagcagttctcccaccttggccttctgaagtgttggggttacaggcatgagccaccatgcctggcctcgcaaggtttttaaacttgccatcttggtgctttgatgcatgctaatgtttgtgaaccactgctttagggtgttttgaaagaaatgcaagtcataggaggcaaaaattagtcttaatttgaggtatgtgtatgttgtcttcttgaccacttagatttgctaaggagattgccctcacttcaggaatctaaatatgttttttaggattttcaaaatcttggaaagatctcaaaactgcttttgttagggattttgaatgttttatgctaatactgattaattatttttaatcttggtttggaatttgaatgaacaattttacattgaaatagcagtttgtatggctcctggacttgtggcttttggcaaatatcaggagagtgtgtgtacatgttggtgcttaaggcacaagctccctggtggttttgttttggtgctgaaaaattggctagcatataataacagggtcagggtgattgccaagtcttggggtaactaatgaagctgtattgtgtgaattgatttttattcctggtgttgaattattgcctaaattcaatacattcttttgccttttgctcttttctcctaagaaaagggtaaataaaaattagacagtccacaaggatgaagttggtgatgtcgcttaaatctgttatatcttatgcagaattagacgcataacttggcagacagaatgttgtgagctcagagatgaggattctgtattatctgttaggtatctttgagtcccccacagcttgatcataatatcattataggtggtcagtaaataatgtaaggagtgaaaaagagtctcccgtccattctctgggttttcagcatgttgataattgaggaatatagatatgtgaaagccccgtaaagagtttcaggaaagatcaaatatctgaagggaggcaattagaaagactaaaatgactttattgtatagtctttgttgtaaagggtatttaagtatatgaaagttaacaagatagagaagaagagtagggataaacaaaattaaaataatgtaatctaaaaacaatgagaaggatgtttccacatgaatttcctactgtgatctttcactcaactgtgcagctcaatgaaagcaaaaataatagaaatgagatggtgggaaaatcgacctggaacaatttcttcttgagacaatttgttggcctggcatgttgactcacgcctgtaaccccagcactttgggaggccagggtgggaggatcacttgagcccaggagtttgagactagcctggtcaacatggtgagatcttgtctctcccaaagaatataataataataattagccaggtgtggtggtacatgcctatagtcccagctattcaggaggatgaggtgggaggactgcttgtgcctgggaggtcaagtctacagtgagccatgatcacaccactacactccaacctgggtgacagagggagaccctgtctcaaaataaaaaaaaaaaaaaattggtcaaggagagttaaagttataacttatagtcagttatattctgcgatgaccattaaatgtacttttaagagtgcttggcctgtagtagcttttcaggaaatgttagtaaataagtgattcttctgttacttgtcactaaaaggttaggctccaatcattgaccattttctctggttacttcagcactgtttcctcttctctgctcttataacctgtctcccctctgcaccccttttgatggtttatatagtgtaccgccttgtggttttaaatactctttttctgattataatgaggttgctctttttttttttttttgagacaaagagttttgctcttgttgcccagactggagtgcactggtgcaacctcggctcaccgcaacctccgcctcctgggttcaagcgattctcctgcctcaacctcctgagtagctgggattacaggcatgcaccatcacacccggctaattttgtatttttagtagagatgaggtttctgtatgttggtcaggttggtcccgaattcctctccttaggtgatccgcccgcctcggcctcccaaagtgctgggattacaggtgtgagccaccgtgcccagccgaggttgcactttttaaaataaatttgctggccgtttgcatttactgttttgccaagtgcctgtatttttctattaggtcttctttttttttttttaaattcattaatttgtagcttctgtatatattcagaatccaagtcctttgttggtttatatatcttgccagtgtctcctgctttgtggcatgcggtttcactgagtctcagtagtttttttgtttgtttgtttttttgagatagggtcttgctttgtttcccaggctggagtgcagtggtgcagtcatagctcgctgcagcctcctactcttgggctcaagcaatcctcctccctcagcctcctgagtagctgggaatacaggtgtatcaccctgctggctaattttaaattttttttttttttttttttttttttttagagacagggtcttcctatgttgcccaggctagtctcaaactcctgagctcaaccagtcctcccgcctttgcttcccaaagtgttggaattacaagtgtgagccgctgtgcccagcctcaaaagtgttttttggataaacagaagttaagtttaatgtagtccagtttatcagtcttttcctttatagttcctccttttttttgtcttccccaccctgaggctgtgaagtaattcctctgttattttctaaatgtttaataattttgcattttatctttaactgtataattcacttggaatagattttggtgtatagtataaggaagggattaaatcaacttcattttaatatgtggacatctagttatcccaacaccatttattgaaaagagtatctttttccctacttctctgcagcgccacctttgttgtaaatcacttgtccgtatacgtgtgtgtctttttttttttttttttttttttgggatggagtcttgctctgcaacccaggctggagtgcagtggcacgatcttggctcactgcaggctccgcctcccgggttcacgccattctcctgcctcagcctcccgaatagctggggctacgggcgcccaccaccatgccctgctatttttttgtattttcagtagagatggagttttactgtgttagccaggatggtctccatctcctgaccttgtgatccgcctgccttggcctcccaaagtgctgggattacaggcatgagccaccatgcccagccatgtgggtgtcttgtagactctgtgtttttagattctttgattccacaagcactaagctgtctaagttattatagctttataataagtcttatctcattgtggaacccttcctacttgtctcttcttcaagagtaccttggctgttcttgaccttttgcagatcaatatatgttttagaattacttgtcaacttctaaaataattcttccagatgttgtttgggattacattgaaggtctacatctattcgtggagaactggattattatagatctctgaatatttttgtacaaggctttgtatgggtgtagactttcatatctcttgggaatggttggactaggactggaatggctgaatcatatggtaggtgtatgtttaactttttttttttttttttttgagacagggtctcactctgttgtccaggctggagtgcagtggtgtgatcactgctcactgcagcctcaacctcccaggctcaagtgatcctctgacctcagtcgctggagtagctggaactacaggcactcaccatcacacatggctaattaaaaaaacatttttgtagagacgaggtctagtcatgtttcgcaggctggtgtcaaactcctgtgctcaagcaatcctccagtcttggcattccaaagtgctggggtcataggagtgagccacgtcacctggcctgttgaaattcttaaagtgccaaactatcttctagatttgtaccattttgcattcccaccagcagtggatgagagttctggttgctctgcatcattagggcaacactcgttattgtcagtcttgtacattttagccattttaattcagtgtgtaatggaatttcattgtggttttaatttgcgtttcccaaatgactgatagtgttgagcatcttcttatatggttatttgccatccgcatatctctgtgtttaaatcttttatgcattttaaagttgttagctgggcaccgtggctgatgcctataatcccagcactttgggaggccgaggcaggtggatcacttaaggtcaagagttggagaccagcctggccaacatgacgaaaacccatctctactaaaaatacaaaaattagctgggcatggtggcggacgcttgtaattccagctactcaggaggctgagacgggagaattgcttgaacctgggcggcagaggttgcagtcagccgagattgtgtcactgcactccagcctgggagacagaatgagactctgtcttagaaaattttaaaaaaaggtgtttttttcctccatttttttgggttttgagagttctctatatgttctggatataaattgtttatcagatacatactatatttttctcccaggttatggctggctttttcattttcttaacagtggcttgaagagcataaattatacgttttgatgatgtcccatttatgagtttgttgctttacgggttgtgtttttgtgtatgtgtcatatttaagagttgccaaatcctaggccacaaaggtttttctgatttttttctcctagaagttttagattttacttttaggtttatgatttaattttcatttatggtataagatttggatccaaatgatttgtaggattcttttgaggcctggaatgagggtcgcttcctccagagaacacttacttttgcgtcagccagtgtgggatctccttaaaccgaattcaaggcttgagattgtttggacccctcatagctctagttctgctggatagttggttcattactggtttactctctggaggtgtgtagccttttgggttcttgcttactgtagtggggttttgggttatatgttttggaggacccagtcttttattcctgtctccccctctctgcactgtcttaaaaatgaaagttgagacttttcagaattggcaagtgcactgagggcagaggtagtttctgtgcttatctctttgacttcctggtttcacttcaatttttgcctgttatttatttcttgtcttgtcaggttgtggttgcttttaagattataaaaatattctgtccatattttcttttagtctttttcagaaggagggttggaccaaataacattgcttgaaattaagaagccaaaacgcgttcttttttatttcactccagagtctagacctgaacctgatgtttgatatggtaactgctagccacatgtggccaattaaattgaaattaattacagttaagcgaagttgaaaggcccattcctcagttacactagtcccatttcaagtgctcattagccacatgtggctagtggctactacattgggcagcgctggtatagaacattttcatcattgcagaaagttctagtggatagatatggcttgactatcaaaacctcatcagggacttgcactggtacgtggatctgcatttgaaaaccactaatatgggtatccttgctgtttaaagtttgaattttttggaatctatatagctagacagatgattgagttcctttaatagacttactgtgaaatctatccctaaggtacagtgtagattcttagactgatttaggtggtgaaatgtgaatctgtggcacactgagtagataactattaagtattgatattttaacttacaaatatgtcagttttaactgagaaattttgtgaaagcatttattatatgttgatctgtgtcttagacccagtgtctcccattgcacttgccctgccatccctgcccttaggcagtcatagtgctgtgcaaagttgcagggcactgtggggttctggcgggggtgtcacagcacccactcttgagggaacaatgggaattagccaggtggggagaggaattagccaagtggagaggggaaggatgggggaaaaggttctagggagaagaaaaacatgggcaaaagcctggatgttgatgagaaccgtgtggagattggtttgaagcatcttaaatttgatttctagtatcaagagaggtagctgaaaccatagatttttaaaaatgtcatgaggccaggcacagtgactcaatgcctgtaattcgagcactttgggaggcctgggcgggaggatcacttgagtctaggagtttgagaccagcctggggatcatagtgagaccttgtccctacaaaaatttaacaaaattagttgggcatggtggtgcatacctgtagtcccaggtactcaggaggctgaggtgggagtattgcttgagcccggaaggttgaggctgcagtgagttatgatcatgccactgcactctagcctgagtgacagactgaaacccgcatctcacaaaaataaaaaaataaaaaaagaagatgaaaagctatgtcaggatattctgtccatttgcacagtatttcctattaactggtaatataatgttattacagttgtgttgggatctctcattctagctcacagagtaccaatcttttgattatgtgtccacagttgttagggtcagaggacatgcctgaagtagtcccagctgtccctttctgccaatttaaccgtgcactagattcatgcttggtagttcctgggcacatttcaaggaactcgggggatgttgagtggagtcattcccttattgtctattactctaggaggaggaagggttcagataagtcagtaagttgagctgtggtttaggctctgtacaagaggggcggtaaagatgaaggagtgggactgaggatgggtgtggaggaaaggttagggccacttttcatcgccacctggggtagcttgccagcacatgtttacctttggtttgggatcacagcaagcagaagagatgaaagctccctttaaccgttctaggatatgtatttgaattggagaaactacctcaaaatagagtgtgtgcaggcactatatgaaggcttctcagcgtttaagtgcatacatgccacccagggatctcgttatattttaagttccaattcagtctgtctgggaagggctcagacttgcatttttcctaagttcccaggtgatgccagggctggtggtctgtggaccatacttggagtagctaggcattggttttcaaagtgtgggttgcaaggtggcactgagtcttagtttgaaagttgaataaccactgttgattgcggtagttaagggcatggagttggggtcagaatcctggctctatgatcttgggcttgtttgttaagttttctaatctctatttccttgtgtggcatgtgattgtactacatgattatgtaatgcttagtcttttttttttgtttttttttgagacagagtcttgctgtgtcacccaggctgccaggctggagtggagtggcatgatctcggctgactgcaacctctgcctcccaggttcaagcaattgccctgcctcagcctcccgaatagctgggattacaggcacatgccaccacacccggctgatatttgtatttttagtagagacggggttttaccgtcttggccaggctggtcttgaactcctgacttcaggtgatccacccaccttggcctcccaaagtgttgggattacaggcctgagccaccgtgcccggcagtgcttggtcttattaaacgctttatgaaaggtaacagttattaaaagtaaatgtttacattaaaagtttgccagttttcaaagtgctgagtcttccctgcatctttgctcagtttgtaaaattgcacctccctccctccctcccttcttctctccctccctccttccctccttcctcctttccttccttccttcttccttccttccttccttcacttccctctctctaggacagtgatgaaccagccttcttgtactggaggaatacaccatccgtcttcataaagactggcaggcacatggacaagtttaccagttataatgcttttcttacacattaaagaagtaggtgtttgtattggggcttcaacaaggacttggaaaactttaagataatacaactacatagtattcctttaggtgaatatcgtttcagtttctcagatcattgatgaaagccttaacaaagattttttttttttttttttttttgagatggagtcttactctgttgcccaggctgaagtgcatgatcttggctcactgcaaccttcacctcctgggttcaagcaattctcctgcctcagccttccgagtagctgggattacaggcacctgtcaccatgtgtggctaatttttgcatttttagtagagacagggttttgctctgttggccaggctggtctcaaactcctgacctcagaagatccgcctgccttggcctcccaaagtgctgggattgcaggtgtgagccaccacacccggcctagattttaaaataagcatctgtttgtttctttttttagttgccactagtaaggatgatggaaaactatattttgtactaaggattttgaaagatagaattctttcaagtgagaattctgtgacttttctgttaaatgcgtatttaataactaaaaatacaaagcttcaatgtgaaaaccttgtagaagttttcaaacatatacagaaacaatgttgtaatgaattccctgtttattcattaccactttcagccatggttattatttaataagtattgttaactctttaaaggtactggttcatacttaaaagttgtgaagtaacttgcttctgaaaacgtacgctaacattggacaactcctgctaaaatgtgacataattcatgatgcatttctttaaaaaagatagggaaggaattgaatatagctctgctgcttttctaaggttcttctgtgagtgggtgatgcagctgactgtcctgtgtctttctttctttctttttttttggagattgagtcttgctcagttgcccaggctggagtacagtggtgctatctcggctcactgcaacctccgcctcccgggttcaagcgattctcctgcctcagtctcctgagtagctgggattacaggcacccgccaccatgtctggctaatttctgtatttttagtagagatggggtttcaccatgttggtcaggctggtctcgaactcctgaccttgtgatctgcccgcctcagcctcccaaagtgttgggattacaggcgggagcctccgcacccagcccccgtatctatcttaatgatgcagtgtgtatctatcttaatgatccaatgtgtatcttaatgatccagtgagctaagcaaggcggtggggactctccacagacttggagcctttagttggaaggttcttttcttaaaactgtacttgaatcaaaataaactgtagcttgctatgctttgctgtattggtttaatgttcctgatagcagtacatgtctgtttttaactgagtcatttttttttttttttttttattgagttggtgaagcgtggagctttaatagagcaatatttatgaaagaaatatgctaatctttttcaaaaaatgattaaactgaagaaatacaaaagaatatgtgtaaaatataaggtagagataatctctaccttcttcaagaatgctctgagctctgagaacctggaggaaggacacccaagtcagccttggttaagtccctagttatgccctaggtcaggggctagcagactttcttcgtgaagggctagacagtaaacattctaggctttgcaggccacctgtgacctctcacaagtactcagctctgctgtacagtgctacagcatccatgggctgtatgtaaaggaatgagctggctgtgtctagtaaaactttagacactgaaatctgaattttctataattttcacatgccgtgaaacattgttttagtttctttaaccatatacgatgtaaaaccatttttagctcacaggttgtacaaaaacaagtggggccacattggcctgtgggtcatagtttgctgttctcgtgtagagggtgataacaaagcaaactcctaggtacctcctgcccagcttcaacagtgggattttcccatgcccttgaaaggccagtgtgtgttccctgatcacatacccttccctcctgccccacaggttctgtcccatcccactcccacccctcacaccggtgccactctgtaagtgaagccttaagtcacctctcctgaagacatccttccttggccccgctcagtgtttcatttcttttcaagcccttttcaccatctgttactgtttgtattttacttactttttagtttctttctctcttggtggtgacataaagtctgagggcaaaatgtttctctgttccctgttgaatccctgacatttaaaacagtggtcattgaatgatattgtttttttccatttctttttcttttctttttttttttttccagagcaggagtggaagtttattaaaaagctttagaggctgggtgcggtggctcatgcctgtaatcccagcactttgggaggccgaggtgggcggatcacgaggtgaagagttcgagaccagcctggctaacataatgaaaccccagctgtactaaagatacaaaaaaaaaaaaaaaattagctggccatggtggcgggcacctgtaatcctggctactcaggaggctgaggcaggagaatcgtttgaacctgggaggtggaggttgcagtgagccaagattgcgccactgcacaccaacccaggcgacagtgtgagactctgtctcaaaaaaaaaaaaaaaagctttagagccggaaagaggaaaagtagacttggaagagtcccaggcaggcgacttgaaggacaagtacctgtttttgccatttcttcgtgttttgtctgttttgaactttattttattttttatatttttgagatgaagtctcgctctgtcgcccaggctgaagtgcagtggcgtgacctcagctcactgcaacctccgcctcccgggttcacaccattctcttgcctcagcctcctgagtagctgggactacaggcgcccaccaccatgcccggctaattttttctatttttagtagagacggggtttcaccatgttagccaggatggtctcgatctcctgacctcgtgatccaatccgcctgcttcggcctcccaaagtgctgggattacaggcgtgagccaccgtgcccggccgaactttatactaagggtatcatgctatatgtctttatatgacttgattttcttttttcctcccatcctgcactctgattttaaaacttaggtgctgtatgatagttttcattcattttcactgttgtgtaatctagcctacaattgatgggcagttggtttgcttgcagtctcttgctgtactgcaaacactgccacacaaatgtgaacactcttattgctcatagacatggatgtgcatagcctatgtatctaggagtgtgattgctgagttatagggctggccagtcttcaacctgactagttactgccaaattgcttcccaaagtagttataccaatttatatcaccactaatataatgactccttgtattagtttgttttcacgctactgataaagacatatccgagactgggtaatttagaaaggaaagagatttaattgacttacattccacatggctggggaggccccacaatcatggtaggaggcaaggaggagcaaagtcacattgtacatggatggcagcagtcaagagagcttgtataagggaactcccccttataaaaccatcagatctcatgaaacttagtatcacgagaacatcacgggaaagagcccgccttatgattcagttacctcccaccggtccctgccacaacacataggaattgtgggagctacaattcaagatgagatttgggtggggacacagccaaactgtatcactcctgttgttccacatccttgtctgtagtttattttgtctgactttttcagttttgtcattttggaggttgtgtcatatcttattgtggctttaatttgaacttcccttattagtaatgatgttgagccacttttaatatatttgctatctgttttgtcttctgtgaaggacctattaagtttctggcctttttttttttttaattgacttgtagctgttctttctatgtgtggattgcaatcctttatcattatgtgttgtgaatattttcttccagtttgtggtttgttttttttacctgtgaggtgtcttggagctaaagttctttttttttttcttttttttaatactttaaggtttagggtacatgtgcacaacgtgcaggtttgttacatatgtatacatgtgccatgttggtgtgctgcacccattaacttgtcatttaacattaagtatatctcctaatgctatccctcccccctccccccaccccacaacaggccccggtgtgtgatgttccccttcctgtgtccatgtgttctcattgttcaattcccacatatgagtgagaacatggggtgtttggtttttttgtccttgcgatagtttgctgagaatgatggtttccagcttcatccatgtccctacaaaggacatgaactcatccttttttatggctgcatagtattccatggtgtatgtgtgccacattatcttaatccagtctatcactgatggacatttgggttggttccaagtctctgctgttgtgaatagtgccgcaataaacatgtgtgcatgtgtctttatagcagcatgatttatagtcctttgggtatatacccagtaatgggatggctgggtcaaatggtatttctggttctagatccctgaggaatcaccacactgacttccacaatggttgaactagtttacagtcccaccaacagtgtaaaagtgttcctatttctccacatcctctccagcacctgttgtttcctgactttttaatgattgccattctaactggtgtgagatggtatctcattgtggttttgatttgcatttctctgatggccagtgatgatgagcattttttcatgtgtctcttggctgcataaatgtcttcttttgagaagtgtctgttcatatcctttgcccacttgttgatggggtcatttgatttttttcttgtaaatttgtttgagttcattgtagattctggatattagccctttgtcagatgagtagattgcaaaaattttctcccattctgtaggttgcctgttcactctgatgatagtttcttttgctgtgcagaagctctttaatttaattagatcccatttgtctgttttggcttttgttgccattgcttttggtgttttagacatgaagtccttgcccatgcctatgtcctgaatggtattgcctaggttttcttctagggtttttatggttttaggtctaacatttaagtctttaatccatgttgagttaatttttgtataaggtgtaaggaagggatccagattcagctttctacatatggctagccagttttcccagcaccatttattaaatagggaatcctttccccatttcttgtttttgtcagatttgtcaaagatcagatagttgtagatatgcatgcggcattatttctgagggctctgttctgttccattgatctatatctctgatttggtaccagtaccatgctgttttggttactgtagggaactaaagttcttaattttaatgtcataagctttatttcttttttcctttatgatgagtactttttattgttttgatttttttaaggaatctctctttatccaagggctaagttttgatgtgaagtatttttatttagttcataaagcatttattattattattttgaggcaaagtctcattctgtcacttaggctggagtccagttggacgatcacagctcactgcagtatttttttttttttggacagtcttgctctgtcgcccaggctggaggggagtggtgctgtctcgtctcactgcaacctccgcctcctgggtgcaagcagttctcctgcctcagcctcctgagtagctgggactacaggtgtgcaccaccatgcccagctattttttgtatttttagtagagatggggtttcaccgtgttggccaggatggtctcgatctcctgacctcgtgatctgcccactttggcctcccaaagtgctgggattacagacgtgagctaccgcgcccatgctgcacactgcagtcttgacctcccaggttcaagcgatcctcctgcttcagccttctgagtttctgggactagcaggtgtacacattaccacacctggctaatttttaaattttctttagagatagggtcccactatgttgccaaacttggtctctagctcctgggcttaagcagtcttcccgccttggcctcccaaagtgctggatttacaggcaggagccaccacacctggcccataaagcatttattgttctatttaataaagaagtttaatatttagacatattttgtaaattctactgattcctttgatgattcatgatttattttaaagtgtttgataaattacaaacaaatgagctttttttcattgtatcttgtgacatttctagaattggattgtagtcagaaaatgtgttctgtatgttaccaattctttgaaattaatgttgtcttaaatagacctatattgtagtagaatttggctaaaatcttggtctcaactcagaaacttttaggtacctagccacttaaactccagctatgcctaagttataccttagttatgaaaaaaagattagactaacattattaggctttttaaaaagttaatagagtttctattttctgcctctggaaacacttgtgttgttttctggctgaagttgaggtgttaatgtacattatcagcttttggattctgttctacccaaactgaagcttaaagacaagtgactgcctcaactgccagtttgttttagcttagctgacaggcaaggagttcatgctgtgactgcagctgctttcctttcagtggcatttgttaattaagctgtttaattttgtgttgctttcccaaggactgattcttaaggaaaagagaaaatttttagcttgtggttattctgggaccttttagcctagtgtttattttgggtgtccatttcatttttttctccccagaaagtagcattaacttgaaaattatcagttaaatagtggctcagaaattaaattttatctgtctcctgaatctcaggcattagtaattgaagtgtctaggtattgtgatttttgtagagaggtattgtgtaagtgtctagatattgtagttgtgtagtctgtttaagagaaaatgcattttatctaagaaacaagacccaacttcaaatattggctctgcctttagtcatgtgacttttggcaagttagtttctgtgcttctcaagtccttatttataaagtgtagtttttatggtcttagcctttgaggttatatgtgcagttactgtgtagagtggtatacaaatgtaaggtgctaatgttgttaatagtatctttaacagacgtaagtagtgttttactactaaaggcacaggtcctttccatttaatgtgatttcaccagttcttgagctggttcattcagttaattcatttgttcgccatttaaaaaatactgttttgtgcctggtacggtattaagccctgaaggtatagacttgagggggagtgagactgttatagttccctggcatgcagcatgatgtgtgcagttgtctcttagcgtgctcaggcaatctggagggcaagtcccttgtgatgcccaacctcaggggtcggcagacttcccctcttaaaggccggagagtagaaacttcagccttcgggggtcgcatatacacatacagcctatcgcatttcctctaattttttcttcctttcttccccctcccccctctcctcaacgctttaataatgtaaaaatcattcttagtccaggaaccatgtaaaaactggctgtggactagatgtggtgacctctttgtaaagtatttttcagcggaagatgggaagtggattccactcatgtgcaaaggcatggaggtgtgagaggctggggttttgtggaactgaatatttttatcacatgtggagaaataggttgggtcgggtagagaaggatatgcagtcgatactgggcaggatcaaagcagtttgcacttgattctgatataaattttttacatcctagggcagcaagaacagatttagatggtaggaggatgactggactagaggcacaagatcagtaaggaaggtagtaatccacattagaaggggaaaagtcacccaacctttgtcattaaggaaatggctcacctgctgttatttagtaaagtgagagggataaagttcagaggtcgaatttagtaacatacagtctatttaataatagactgtatgttcttttaattatgttgtacatataaatgaaggacttaagggcacaactgaggaaatggagagtagggattgatgtgaagcctgtttctgagttcatctacaggcgtgactaagtaagtgaaatggcaaggctgagagagaaggaatccagcgtaattccaggatggcttccagattttttctttggtgatgagttcatgaagatctttttgctcttaattttttttttcctggaatatcttagtgattgctttgatgagggaacattgtctcttaggtccatgaacccctgaaattctaagcagaattgtgtgtgtatgtgagctgtttttccctggggagagaattctagagctttcatcacattatcagaaaggagtccaaccaaaaggaggaatcactttttgttagattgtacacatctggtgtactctaaaggtttgtgttggcaagggaaacatcatcccaatcacaggatttttactttaaatgtaatgcatctcaaactgccaagtaaaatgcaaacacatgcaactgttttctaagttgaactgtatcaaccagcaattggaatgtttttccctagtttctcctcctttccgaaagacagaataagacacatttttggtacataaaaagcgagctggagactgacgggcatggaatgcttcaacatgctatgaacattagagaaagctaaagtttgtagagtattaacgtatcttagtattcatgtggctatgagagatggtgtcacttttaggtaggatacaccagtaccataaatgagtgtagtttcctcagttggattagaaatgtgtaaatagtgagttgtaagacaatccctaaatcgtgctgtcatgatgagcccttagttgagcaaagcaggagaagcagggtggccgccgagcagttgttgagatatgagcatcaggcagattcgtattgtgttctggagtctgcactggattggttcatacttgatgtcagcattattacatgtaatttagggattacagactacagataatagcagtccctgcagagatttgatgaacttggtaagctgctccatatggagcagagagaacttaagagagtgaaaatggggcaatctgtaagaaagtttcttctttcctgttgagaaaaattgtgacttctattaaaggcaaagtgtgatggggcaaagatataagaaatgatggaatctagcagtggcatagaagtcaaaagtgaaaacctagactggttaagatatcactctcagaatttcacgctggggctaattgtaattccaaggtaggaaaaaagctttgaatctactttgcctaggtcatggcaaagtttaggtggcaagttttgttttctgtttggaaaaaatagtattggatcctaaggaattgccttgagaaatcagatagcagaaataacttagtttaagtgcatgttgtcaacatgtgggttaattttaaacagtacatggttgattatgtggttggcaaagagctgatgtctttgatttacatctatcctatgagtttgcctttttgaccattttattggaaagcaaacttttctgctgctttttttttttacgtgtgtgtgtatgtgtgccccttttactctttgctttacgtaatctagaattttaggggtatatctaaatttaggatccaaagcttttactttagagatgagtaagtaaataacccagaaaagtcaaatgaccatttgatggagaatcataggtgagcttactctccagccccatccaaaggtcaagcctggtgtttgctgtgggtcagggtccccaggtaaacaaagacagctttatcggacgagcttccaagagcttaaagattacctcccaggatctgggcaaagggccaaacttttctttgagcaaggcggttaatcctttactgcataagccctagcaaagcaaattattatttctgtcattactagggagttcaagaaattattattgctcctagatataagatatgttgtaaccacatacagtaacatttaccacgaaactgaaaaattagaatttctacacacaggtgaggatgtctccagaagtgtgtcatacttgacatctgttctaacatttctatcagggatttgaataaagaacaggagtcacactgggagacagttcatttttagaattttagatttttaaaatattttgacaggtggtaatgaagtggtaaaatccatagggtgaaatttgtcagcaataaatgtaaaatggcagacttagtttaaaaggaaaagcaactgagaaagctaaagctggacaaaacgtgtcttaactctaccagtgtgcggaagacctgggaatctagttgactaaaacaaggatcggtgaacttttttgtaaaggggcagatagtgaatattttaggttttgcagatgaataggcaaaacaagaatattatgtaggtatttaaataatgagagaaaacaaatttccacaaattttcatcgactgaattcaaaatataaaaacagtaattgaggctgggcacagtggctcgtgcctgtaatcccagcactttgggaggcggagggaggcagatcacttgaggtcaggagttaaagaccagcctggccaacatggtgaaaccccgtttctgctaaaaatacagaaacttgccaggcgtggtggcgtgcgcctgtagttgcagctactcgggaggccgaggcaggtgaatcacttgaacctgggaggtggaggttgcagtgagccgagatcatgccactgtactccagcctgggtgacagaatgagactccatctaaaaaaaattaacaattatttattaattaaaataataaaaacaattgagcataattaaaaaaatacaggtctaatgagaggaatggatttttttttaggggaggaggtggataacatttggctaaattagagtttgaacttagtgtttgctattatcaacatcaattacaagtgttcatctcttaatgctaatctgcaaggagattttacatattttatctttgaaaaatgtcttaatcctgacaggatacatcgaaatactgatagcagttcaggagcatattcattgcttagaaggcatttatagaattctattagattctccttgataattgccttctagcatgttattgcattgcagattaatcacttcctattggtggttagatggaagcacctcaattgcacagttaaatggattttgaaatatgtaaattttctttgtacttgcatcggagtttgaaaaatgctactggaatgtagtttgaacccagaaaatatatccactgcaaatttgcacagaattgaaatcttgctttttgttttaactttcacatacgagaagtatataaagaagcttaatgcaacttgtgattcaaatgttagctgtcattgaaatgactttactacagtataaattcctcatataagtactgttttcctttgtaaacttaaattgaatccattaagaaacatcaagtctgtagaaaaaattgattgcagagctattcagtgtttggtaacagtgttaactgaaggaggctcttttagaaaaatttgagtcttgactctaaggtcataaagttagaataaaacctaccactgtccatttaactgctgtgtggtaggccaagtcaagatactcagtttctatttctgacaaattcaaggaactgacaatggttaagtctacaagagctaatgaagttcactgtggatgctactggtccaataacacctgacagatttaaatactttctacatagtacttgctgatgaataaccataatactttcataatttttgtaaatttgtgcagcaaatcatttgtctgctccccatatatttttactatcaccagttattatcatgcatcttagtagattccacttcagattgtactaaattagtgttttctcagctttgaaaatattatttgtagttccacacagactattcttagagactaattttttagttacttcaaggttggcattgactccttgaataaacagttgagcaacgtcaacaaccaaggaaaatcattcaaaaatatttgcctttttttgactgacattgatgttgttatcagtatcctcaactctttgagcaactgttcttattgaaaagcttatagtcttaagcaagttttttgttttttggtttttttttttgacatatttctttgtctgttgtagtcagacatgttgtagtcagacaacttaacatggttaagttatccacataagatggagagccatttagggttttgagcagagaagtgatgacatctgattgagatttgacttcatctgcaatcagattgagatttgacttcatctgcaatgttgaggataggcaccagagcagcaaggttagaagcaggggacctgtcaggtggctgttgagttcatttgagtgaatggtgatgatggcacaagtcgtggtgatggtggaggatgtggagcaaagtggacagtttcttggcagatttgccaggaagagctgacattatttgctgacaaggttgaacatggagtgtgaggaataaaagagacaaggatgacatccattgttttttggcctggacaactggaaggagagagttgccaagaactgacatagagaagagtgtgtaaagaaggtttggaggagaaagatcaatatctgagctttgaaatgtctcttggacatttttattcgcttaactgatgtttcacttctctgaggatctagaagctggtccccagcatagtgtatccatgaggaattgttcaggaaaagagaagctgctctagacacttttttaaatacacaggattatagtccttcactactgttggaagggttggagaattgaaggtccaggaagcagctgttcacagtgtgtacttcccaggagctcatctgagatgggcagaggtctcagaattgaagcctctgctgctgtggttgaagtggatggttcttggagtttctccgaagctgctgggaattcctagtaggagctgctctatctaggtcttagtttcagaagtaggtcagttatttttttctcccagcacatcagcctacagctgcctccagagggtagtgtgctcttttatcttaccagtcttgcacgagttgcccttattagttgactctaaccctgagttgtagcaggaaggggtttgtaggaaatgtagttctggcttccctatgtcacacaggtgaatatagaaggtggtaatgatgcagaattgacaacagtctagcacaacaaccaggcaactggattttcaagttgggattttggaagaaatctgagctacagttagcataaaggtagcttttaaagtgagcttgcctaggaggtgagcataaataagagaaaggacagagtcttggggaactctagaattgacaagtttgcaagaagaggaagaacagctgtagagactggaaagaaaccacctgtgaggtaagaagaaaaccaggagaagatggtgtcctggaaagcaagagaagggaagcaggaataattacctgtcagttgcagctgacagaggaagtaatatctaagtattgaccattggatttagcagtattgaggtcattggtaatcttggatagagaagttctggtggagaggtgagataaagggaagataattagtgatagcaagtatattgtgtgtgtgcttgtttataggattatttgtataatagctgttttaaagtctttgtgagataattctgacctttgtgtcatctcagtattggcttgtcttgattttctttttctatgggaattgaggttttcctggttcctcctgtgcagagtaagtttggattgtatccccgactttttggatgttatgttaggaggagactctgggtcttgtttaaatatgctgatgtggtggtggtttgaattctattcctccctcatccacctgctactgtttacttttcagagtcctcaaatagcttctgcagttactctgttcaggctttctagttgctttcaagaggagtgacagggtgcaatgtgcttatttttccttatctaaacctgaagctgttcacttcgcaaactgcttctgttactcaggtaatggtcaccagtttcagctgggccatgatgctcaaatgattttgcgtccctgatcagttacctcttccagcccccataggagttgctgctcgaattatttcttgaatttggcttatagatagatcctttttttggtgtctgttcccatagtttcttttggtgtttttctcaggtagacaacatggcccttaccatatatcatgatagccattagttttctcaagtatgatagaagagttgtcttgtgttgaatgtattgactatgcctattgattagtttaagtagaataatgtctctttgacattttaagcctttcacacaatataattttgtggggatattttttacaatgcagaatagaacagcggtgaagagcacaagctgtagacagat

SEQ ID NO: 456 - DNA, 32744 bp, Homo sapiens
  source 1..32744: mol_type = other DNA
agatttgattcccttggcgggcggaagcggccacaacccggcgatcgaaaagattcttaggaacgccgtaccagccgcgtctctcaggacagcaggcccctgtccttctgtcgggcgccgctcagccgtgccctccgcccctcaggtcagttctcccgcctgcccgccgcagtcgcagttgatggctggggtctgggctgtgcggggcgcagcggcccaaacccagtttgctcctggctctcgggagactggaggatttcatcggagccccgcgctttaccagccctgttccctggataagatatttgacctttccgacccgcggttttcttctccgtaagtggggataatgaccgtgtctacttaacagggttattgaagaggtgttcaggctaagcgtttgccacctaggaggctgcgatagacgtgaattcccatttcccgtttccagtttccgtgactcttccccgcgaaaaaagttgacagaagggtttcgagttttttctgtttgtacaactcagtttactggggcagtgcaataaaaaaggagatgtgttatcactaccttttcagagtccaaatccatcctctcctatcatctccccagagtagtggcttcagaggctcacactaaaaggggaattttttttctttttcttcaagacggagtttcgctcttgttgcccaggctggagtgcaatggcgcgatctcggctcaccgcaacctccgcctcccaagttcaagcgattcttctgcctcagcctcccgagtagctgagcttacagacatccgccaccacgcccggctcattttttgtatttttagtagagacggggtttcaccacgttggccaggctggtctccagctcgtgtcctcaggtgatccgcccgccttggcctcccagagtgctgggattacaggcgtgagccaccacgcccggcctaaaaggggaattttcaccgaatgctgtatcagtaataggagcagcaggattgctcccaccaagaaacctggtgtagggttgtgggagctggaaagggtagactcagggaaggctgcccaagagaggaatcaggtccctagcacttaggacgggtaattacctttggtatttctcctttgttagtggaatgaggtgagtatcaggagcctggattgttgtttagaggccagtgttcctaactttggtttaaattttggtttctgtttcccatggagtctggctagaaaatcagaaaaatcagaaaagcccttactgggccttcgtgggcttgtttctcccaagggtctgtcctttctgtgtaactactgtggaccaactagatgggcagatcaatcccaatgagtgcctcattgttggtgctcccagaagcctttgcaagggagcagggcaggatgctaattaaatgtgttacaggccacattataaaccattctgagcccggcgtggtggctcacgcttgtaatcccagcacttggggaggccgaggtgggcggatcacttgaggccaggagttctagaccagcctggccaacatggcgaaaccccgtctctactaaaaatacaaaaaaaaaaaaaaaaaaaaaaattaaccgggcatggtggcgcatgcctgtaatcccagcaactggggaggctgaggcacgagcatctctggaacccaggaggcggaggttgcggtgagccgagatctagctactgcactccagcctaggtgacagaacgagaccctgtctcaagcaaataaacagacaaaacccaaaaaaccattctgtattctacttcctgtttgaaattatcctcagcatcagtgtctttccaagctctgtagataaggtaaatgtatttatgcggcaagtaatagaatagcccaaataatattgttaaaaaatgcccccaatttgttgctatcctttaaaatttaaccataaacgtcttctcattatcccaattccttgctcttctgagaagttaaagaccccaattataggccgggcgcggtggctcacgcctgtaatcccagcactttgggaggccgaggcagatggattgtgaggtcaggagttcaagaccagcctggccaagatggtgaaaccccatctttactaaaaatacaaaaaattagccgggcgtggtggcgcacacctgtaatcccagctacttgggaggctgaggcagaattgcttgaactcagagggcggaggttgcagtgagccgagattacgccactgcactccagcctgggcaagagagcaagactccgtctcaaaaacaaaaacaaaaacaaaacccaattatatatacccccaattcttctatttatttagtcaagcccagaagggcactcaggtgtctgattggggtctaatttccttcttcattattcacagttgagaggctgtcttccgcgttgactgataatatacctccttcagcagctacaaagttgggttactctgttctcaaggcttttctgtattctatattaacaaactctagaggataaacagggcacatgagaatatttagaaccagctccacattcacaaagatttacaaatcaagtataatctgctattagtgtaggagtttgtaatgtaagcaccagttttctcacattgcagcaacaacgatattcccttgattcagtagctataatctaggcccacattggtattactcatccaaagacatgatgtaatttgagagaagcgggtagatagagaaaatggaagaaagaaagaaaaaaaaaagtgcatggcttcagtcttaccttagttgttaaataaacaacttgcccatctctgctagttttccagaggccatgactgggatgtttataactcttttgggagaagtctattaagttaattatgacactcttaaatccctaatctgggaagtgaattccagcatcttacaaattgctttctctttctgagtgacaatttgaaatagcccagtcctttgcatggaatgtaaacatgtgcattcagatttatagtccagtgttcctccatttccattctcctgctctcttttttcttctgtatcaggattccaaagatttctgagccttaggttgacctctatacttttactgtttttattgccttttggaatttcttagtcctatggttcctgtttgtttttaggatgaggttccagtttatccccacatttgccccactgacaaatgccctttaaaatatttctgaattagtgttgctgtttaaagtatttaatcctgtgccttcaggtgcccagtgagaataaatttgtcctctgtgatatctccttgccttgagtaactttttctactccagtggaagcagaatgtttcattttctatcaacagttttccctcagtactgggacctgaccttgcttcttctaatgtttgcctactgtgttcatgcagatttcgttaggttaaatgttcaacctacttattaagttgggtccagtgtgatctcttcctaggaaatggcttaatattgtttattttatcagaatgtcgttttgcatgttatctttttgtgtgctatttctgctttgatgttgaagactgaaccttgttttttaaagctgatttaatttttttcttgagtgtcgatatttttccttctaaagcttctgctctagttttctattcattgaccaaattttttttgtttgtttttgagctggagtctcactcctgtcgtgcaggccagagtgcagtggcgtgatcgcgggtcactgcaacctccacctcctgggttcaagcgattctccttcctcagcctccctagcagctgggattacaggtgtgcatcaccacgcccggctaatttttgtatttttagtagagacggggtttctgcatgttggtcaggctggtctcgaactcctgacctcaggtgatccacctgccttggcctaccaaagtgctaggattacaggcgggagccattgtgcccagccgttttttacttgctgataataattttctttttctctccaagtaaaatgattcatggaatcagtgtttcaggcatagaaaaatgatatttttaaaatgtcctttgtggcttttggggttttgataagttcattcagaattttttccacctcaattttaagaagactactcatcattgtatgaagggccttctcttattaagctctgtcttcctttataagctcaccacacttctgaggttgaactcacactctaggtcttccaaattcatggccattattaaggcttagtaacatgctagtcactcagttctggataagggcagggtgaagaacagagaatttgaaggtagtttacgtggcacctgccactcatcagtttgaggcttaaacaggcttgcttggccagggcgatggctcacgcctgtaatcccagcactttgggaggccaaggagggtggatcacctgaggtcaggagtctgagaccagcctggccaacatggcgaaaccccatccctactaaaaatacaaaaattagccgggtatggtgttgttgttcgcctgtagtcccagctacttgggaggctgaggcaggaaaatagcttgaacctgggaggcgcaggttgcagtgagctgagatcgcactactgcactgcagcctgggcaccagagcaagactccatctcaaacaaacaaacaaactagccaggagtggtggcatgtgactcctggcctcaagtgatccacccacctcagcctgccaaagtgctgggattacaggcgtgagccactgcacctggcctcgactagattttaatttttaatttttatttatttttttgagacacagcttcgcttgttacccaggctggagtgcagtggcatgatctcggctcaccgcaacctctgcttcccgggttcaagtgattctcctgcctcagcctccctagtagctgggattacaggcatgggccaccacgcctggctaattttttatatttttagtagagacggggtttctccatgttggtcaggctggtcttgaactcccgacctcaggtgatccgcctgcctcagcctcccaaagtgccgggattacaagtgtgagccactgcgcctggctgttttttatttttagtagagacaaggtcttgctatattgtcctggcttgtcttgaactccaggcctcaagcaatcctcctgccttgacctcccaaattgctgggattacagacatgagccaccatgcccagctatctttacgcttcttccttttgccactcctagctgtaggtttggtatggggaagaccttagctatctatgttttcaacatttcaaatatttgtcttttgcttttaagtctttacaactgttactgattttgtatggtgtgagatagagatccaatgtgtttttttttttccttcacctcatggctaatcaattgtcccagctccagagctgcatttccatcacctgttacctctaaaagcagcctcagttcagtacctgtcaacttttacttcctctaggatctttgcacctaaattccctctttctggaatattctccgtctatttctttgtgggctatgactgttaaggcctacagaccaaagaccacatctgtagtaaaaatcattagatgtatttagtttgctgcgcaagagaaaccatactcttgagaattttgggtagtctcagagtgagttgaaaggggcagaatgagggaagaatgaggtgggcctgaggatgtcattgaagacaatgaagtcagtcaaataaaggatctttattttaacagccttgtatggaaacattgtttatatggttatgttcagattctattgaaaccattgttcaagttttgataggaatatcacagtctgattactggcagggctgattttctcaattctcatcctttgaattagagcttggcttaaatgttaccttctcagaaaccactgttgcttatttttatttcagtatttagtatagataataataatagtaattattattttttgagacagaatcttgctttgtctcccaggctggagtgcagtggcacgatcttggctcactgcaacctctgcctcctgggttcaagcaattctcctgcctcagcctcccgagtagctgggattgcaggcgcacaccacaaggcctggctaatttatttatatatttatttatttatttatttttgtgagatggaatttcgctcttgttgcccaggctggagtgcagtggcacgatctcggctcactgcaacctccgtctcctgggttcaagcagttctcctgcctcagcctcccgagtagctgggattagaggcatgtggcaccacacctggctaattttgtatttttagtagagacggggtttcaccatgttggtcaggctggtctcgaactcccgacctcaggtgatctgcccgtcttggcctcccaaagtgctgggattacaggcatgagccaccgcgcccagcctaatttttatattttttagtagagaccgggttttactatgttggccaggctggtcccgaactcctgacctcgtgatccgcccaccctggcctcccaaagtgctgggattataggcgtgagcctctgcacccggcctataaattataagtattaatttgttgtctacttatttgccttttgtcttctccactagaatatacactccatgagggcagaatcatatttcttctccattatagccctagtgccaagggcaggtttggcatatcataggtgctcagtaaatatctgtatgaataaatgaataagagcaaattcaagagttttctagaactgcattagcagtttttccagacacactgctgatctctaaaagtcaaccacgaggttattttccacaagtaagatggagatggtatgagtgtgactttgtatattaatgtgcataacagggccctacttagctctatggtttttaaaaaataaactacttaattttaaaactcagggagacaaaatcaataagatctacctaattttttttacaactaatttttatttattatttgatgtataattaacagtatatgtaacccacataagttgtgaagcataataataaaatacatatcatatacataataaaattgtgtatgactggggtcttagtttgggttttcctgatgactactgataattttttcatgtcttcttttttttttttttttttttttattttgagacagaatctcgctccgttgcccaggctggagtgcagtggcgtgatctcggctcactgcaacctctgcctcctgcctcagcctcccaagtaggtggaactacaggcgcgtgccaccacccctggctaattttttatagctttagcagagacagggttttatgatgttagccacaatggtctccatttcctgaccttgtgatccacccgcctcggcctcccaaagtgtgggggttacaggcgtgagccaccgcacccggcctttttttttgagacggagtttcactcttgttgcccgggctggagtgcaatggcacaatctcagcttactgcaacctccgcctcccaggttcaagtgattctcctgtctcaccctcccaagtagctgggattacaggctcctgccaccatgcctggctaatttgtgtatttttagtagagacgggtttcgtcatgttggtcaggctggtctcgaaccctgacctcaggtgatctaccctcctcagcctcccaaagtgctgggattacaggtgtgagccaccttgcccagcttcgtgtcttttttttttaaattattttttcttcaggtagcctcccgagccagagtaggctcagagacacccttttccatgtttttgttggccatttgtgtttctttgagaaatttttttttttttttttgagacaaagtctggctgtttcgcccaggctagagtgcaatggcacgatgtcggctcactgcaacctccacctcccgggttcaagcgattctcctgcatcagcctcccaagtagctgggattacaggtgaatgccaccccgcttggctaatgttttgtatctttagtagagatggggtttcaccatgttggccaggctggtctcgaactcatgatctcgtgatctgcctgccttggcctcccaaagtgctgggattacaggcgtaagccaccatgcccggctgagaaaagttttttgtatcatttgcttattttgctgttgagtttttcttattgttttgtcagagtttatgtgtttcctgtgtacatccactattatatttgttgcaagtatcttctcacatttatggttttctttttttgatggtgtctttggttgtatagaagtgcttagttttatttttattttttttatagatgtggtcttgctatgttgcccaggctggcctcgaactcctgggctcaagctgtcctcccaagtggctgacaacacacgcaccactgtgcccagctgaagttcttaattttaatgttgtttaatatattaatttttttcattattattattagtactttatttaagtgatcctctcctatcctgaaataatgacaatattctttaaaaagttttaaaggtttatgtttcatactttttaagtctatctggaattcatttttatgtatggtgtgagataagaatcctttttttcatatggccaataatcagttttttcagtatcatgtaaatgcataagacttatttagatttgcagttacaagaatggaggagatgatccggtattatttcctttattgattatgtactctctgtcttctaggttctttttctaattccaaataaacttgcaagaggactatgaaagattatgatgaacttctcaaatattatgaattacatgaaactattgggacaggtaattgttatttttttttggaggcagtggatagatcaactatttgagagtatagattatttgggtaggtgtgagctttttcgtctaacccacacagttttaaaattcttctacctacttcagtaagaaaaagtggagcaagcagagaggagaatagtaggagaagccctgtaggttattgcaaggactttgacttttattctaaataatttattctaaatatttcttttatttctttttttttttgagacggagtctcactctgtcgcccaggctggatggagtgcagtggcgcgatcttggctcactgcaagctctgcctcccgggttcacgccattctcctgcctcagcctcccaagtagctgggactacaggcgctcgccatgcctggctaattttttgtatttttagtagagacggggtttcaccgtgttaatcaggatggtctcgatctcctgacctcgtgatccacccgcctcggcctcccaaagtgctgggattacaggcatgagccaccgcgcccaggcttcttttatttcttgacttttattctaaattaaagtcattggagagttttgagttaaggggtaatttgacctttgtttttacagagttgctgtggctgcttggtagataaaaggttggatgaaggagggcaagagcagaggcagggagatgttagcagactattgcgataattcaggtgttgatgctagagatgatggtggtgtggatgagggtgatgtaaaagcagtgaaaggggtgggacattttacacacacatatgtacacacctatgtgtgtatgtttttattaaggtataacatatagtaaaatatgcaaagtgcaataatctcagtggagttttacacatatatatgtatacacatacccatatattccctgtgcggatcaagacatagaccgtttccagggagtatctgcctgctttcccccaaggtagccattgatatattttgaggacagagctaatgggatttattgatgggttggagtgctagagaaagagaagggctaaggatggttccagggtttttggcctgagcaccagggaaaatggagttgccctttgttgaaaggaagaagaccatgggagagactactaggaagttctttttggaaatgttaatttggggatttcttttagctgcctgagtggagacatttgtccagcttttggttcagttttgaaaaataattgcttatcttcaaagtttttttttttttttggagatggagtcttgctctgtcgcccaggctggagtgcagtggtgcgatctcgggtcactgcaagctccacctcctgggttcatgccattctcctgcctcagcctcccgagtagctgggactacaggtgcccgccaccatgccaggctaattttttgcatttttagtagagacggagtttcactgtgttagccaggatggtctcgatctcctgaccttgtgatccgcccgcctcggtctcccaaagtgctgggattacaggcgtgagccaccgcgcccggcctcaaatatttaaaactgagtggaagtttcatataatttgtctttggcctcagcaactttatattgtgttctagcagtgttaattataaaggaaatttaattgcaggattattcataaagcagatttctaaagtgagttctgttttttttttattacaaagtttgagatacactatcatggttaaaaaaaaaaaaaccttcagctagacattggataacaagcagcaacaggaaaaaaaagccacaaacttctaggaaaatttggcttgatagagtcttttaaaattattatatataaaaaggtgtttgtgcctgagtccttgcttatgctttcataatacattttcctacttaggtggctttgcaaaggtcaaacttgcctgccatatccttactggagagatggtagctataaaaatcatggataaaaacacactaggggtaagtttagatttatttaaaaaatagtccacttatagatcagtttcgtgaattaaaacctgaattgttctaatgttctagttactgctcttagaataatatttttataccttttaaaaaacgtatagatctgtggttttaaaaagtaatctgggggaagggattactttgttcttcagattttaacgcagtgcagtgggacatatttgaagtctgtagcatccatctgcagtctgtagtctgtaggtgtttctggatattaatgtgtcccatctttcttttcttttctttattattttttatttttttttgagacggagtctcgctctgtcgcccaggctggagtacagtggcgcgatctcggctcactgcaagctccgcctcccgggttcacgccattctcctgcctcagcctcccgagttgctgggactacaggcgcccgccactacgcccggctaattttttgtatttttagtagagacggggtttcatcgtgttagccaggatggtctcaatctcctgaccccgtgatctgcccgcctcggcctcccaaagtgctgggattacagtcgtgagccaccgcgcccggcctcttttcttttctttacttttttttttttttgagacggagttttgctctgtcgcacaggctggagtgcagtggcgcgatcttggctcacggcgacctccgcctcccaggttcacgccattctcctgcctcagcctcctgagtagctgggactacaggtgcccgccaccatgcctggctaatttttttgtattttttttttttttttttttagtagggatgggatttcactatgttagccaggatggtctcgatctccagacctcgtgaaccgcgtgcctcgacctcccaaagtgctgggattacaggcgtgaggcaccgcgcccggccccatctttattttcttatgatactcttactaaatataaatcattttggtactatagataggcaaatagataaatattatgtcctagcttttttttttttttttttgagacagtctcactttgttgcccaggctggagtgcagttgcacaatcacagctcactgcagcctgtacctgctgggcttaagtgatcctcccacctcagcctcctgagtgggtgtgaccagaggcacatgccactatgcttgcctaatttttaaacatttttctagaaacaaggtcttactctgttgcccagggtggtctcaaactcctggcctcaagcagtcttcccatctcagcttcccaaagtacagggtatgtaggggtgagccactgtacttggcctgtcccagcattttattcaaaatggctttagaagttatctaattaaatccttttccaaatcagcctctttttcctctatgtgaattcttccagggggaacagcttgttatctcctaaagcagcccattcagtttgtggtcttggctacaatgtataaaaagttatttttatgttgagataaagcctgtctcttttggtggtttttctggggcttctgtacccattccagtgtttgaagtcaccttgagtcatcttttttttctaattccttctaccattctttgtttttttttttttttttttttttgagatggagtcttgctctgtcaccaggctggaatgcagtggtgcgatctcggctcactgcgacctctgcctcctgggttcaaatgattctcctgcctcagccacctgagtagctggtactacaggcgtgtgccaccatgtccagctaatttttgtattttcagtagagacaggatttcatcatgttggtcaggctggtctcgaactcctgacctcaagtgatgcacccacctcggcctcctaaagtgctgggattacaggtgtgagctaccactcccagcctaacattttgtaattgtccttaattatcaaacataaaaaataatttttggttgggtgtggtggctcatccctgtaattccagcactttgggaagctgaggccagaggattgcttgaggccaggagttcgagactagcctgggcaatatggcaagtcttgtccctacaaaaaataaaaaaaatttagccaggtgtggttgtgcatgcctgtagtcccagctacttgggaggtggtggtgggagggtcccttgagcctaggaggttgaggctacagtgagctgtgattgcaccactgcactctagcctgggcaacagagcaagatcttgtctaaaaaaagtttttttttgatgtttttattgttggaatgagatagggcttaatattaattgttacctacttttttaattgttaaagatataagttctgattaacacataaataagtcaaagggagccaggcactgtggctcacacctgtaatcccagaactttgggagaacaaggtgggtggattgcctgagctcaggagtttgagaccagcctgggcaacaaggtgaaagcccttctctacgaaaaatacaaaaaatttcgctggacatggtggtacacacctgtagtcccagctacttgcggggctgaggtgggaagatcacttgagtctgggaggttgggctgcagtgagccgagatggtgccgctgcactccagactggatgacagaacaagaccctgtctccagaaaaaaaaaaaaaaagtcaaagagtatgtaagtagttttgttacagcaatgtcattaaatcatttgaatttcttcctaaatatatgctaaaatcatacaatgaccagtataagaaattatttttaattatctgtcagtggacaattcaggctttcctccagtttttttgttttattcaattttttgttttctatttattaatctaagaaaaaagcattaaaaccatttttcttgagcatttaaacatgagtatcaattagattaattcccttaagcagtttaaatttcagttataactttagtatgacttactttaacacttcaaatacttaaatagcaaacaaaatgttattacaaaatgtgttatcacactgatgctcaaaacttattctaaagcgtaatatgacattaattcatgatttctaaacttgtttttatattttctgttgttattatgctcattttagttattttctaggattttaataatattttgattacttccatggttttatttatttatttatttatttttgagatggagtcttgctctgtcacccaggctggagtgcagtggcacgatctcggctcactgcaagctctgcctcccaggttcacgccattctcctgcctcagcctccagagtagctgggaccaccacgcccagctaatttttttgtatttttagtagagacgggttttcaccgtgttagccaggatggtctcgatctcctgacctcttggtccgtctgcctcagcctctcaaagtgctgggattacaggtgtgagccaccacgcctggccgattacttccatggttttagtcatcaggcttcctccccacaaagaaagaagattatcataccaagatagtgaaagttacagttgattctttgtcaagacatgatatctagttgcatagtcctggataactgggtcctgagacactggccattaagacggagtccctttttattttatttgtttttcaagatggagtcttgctttgtcacccaggctggagtgcaggggtgtgatctcagctcactgcaacctctgcctcctgggttcgagcaattctcctgcctcagcctcccatgtagttgggattacaggtgcctgccaccatgcctggctaatttttgtatttttagtagagacgggattttaccattttggccaggcttgtcttgaactcctgacctcgtgatccgcctgcctcggcctcccaaagtgctgggattacaggcatgagccactgtagagcccccccgcctttttttttctgatacggagtttcgctcttgttgcccaggctggagtgcaatggcaacctccgcctcctgggttcaagcgattctcctgcctcagcctcctgagtagctgggattacaggcatgtgccaccacgcccagctaattttgtattttttttttttttaattttttcgatacagagtctcgctgtgtccccaggctggagtgcagtggcacgatctcggccactcccaggttcaagtgattctccttgcttcagcctttcaagtagctgggattacaggcacccgccaccatgcctggctaattttttcgtgtgtgtttttattagagatgggttttcaccatgttggccaggctgatcttgaactcctgacctcgcgatctgcccgcctcagcctctcaaaagtgctgcaattacaggtgtgagccaccacacccaatcagagtccttttttttttgagatggagttttgctcttgtttcccaggctggatcgatctcggctcaccgcaacttccacctccagggttcaagcaattctcctgcctcagcctccagagtagctgggattacagacatgcgccaccatgcccggctaattttgtatttttaattttgtgtttttagtagagacgggctttctccatgttggccaggatggtcctgaactcctgacctcagttgatctgcccaccttggcctcccaaagtgctgggattacaggcatgagccaccgcgcctggcccagagtccctcccttttttttttttttgagacggagtttcgctcttgttgcccaggctggagtgcagtggcatgatctcggctcaccgcaacctccacctcctgggttcaagcaattctcctgcctcagcctcccgagtagctgggattacagccatgcggcaccatgcctggctaattttatatttttagtagagatggggtttctccatgttggtcaggctggtctcaaagtcccaacctcaggtagtccgcccaccttagcctcccaaagtgctgggattatacgcgtgatccactgcgccctgcctcagggtccctttttataatgaagttttacttgttacttgatgatatctctaggcttctgtcctttaaagttttttcagcttggcttatcttcctctccccacccaactttttattttgaaagtttcaagacctcagaaaagattggagactgagacagtgaatacccatatacctttcacctaagttcactggttttttgctcagcatgcttcttaaacggtgttgctgaggctgaaagtggtagctcaggcatgatgactgagtagtgtttctgtcattttccttgtttggaatgctaaccttctaaggagtctgagattgttttctggatgttgtactgttgacccacattgaacctgtctttcataaaatctccaatgccctttttatgcacatgcaaataaattttgctatatttttctgtagtgttgaacagtttttggggggctttttgatagcttttgctacttagtattttttttttttgaaacagagtcttgctctgttgcccaggcgggagtgcagtggcgcaatctcggctcactccaagctccgcctcccggattcacgccattctcctgcctcagcctgctgagtagctgggactacaggctcctgccaccacgcccggctaatttttttgtagttttagtgagacagggtttcatcgtgttagccaggatggtctcgatttcctgacctcatgatccgcccgcctcggcctcccaaagtgcgggattacaggtgtgagccaccgtgcccggccagctacttagtattaaagctgttagtattggagcttggaacaccacctgaataagtttattgctcattccatatgatgttttgtcacagagtgatttgccccggatcaaaacggagattgaggccttgaagaacctgagacatcagcatatatgtcaactctaccatgtgctagagacagccaacaaaatattcatggttcttgaggttagtagtatgttccagatacctgaaaacatttgatcactttatcaatagtaaaagagaaaagtacatttcacctgaaagattagaagagatgttaagcgacttacctgttttgttccatttgtaacaatttagattaaatagatgtatataataagttggagattcaatgtaaatgtcatttttctaatacacccctaatggggtagtatggtttactagatagaatatgttagaattttctcctagagggaaggactcattctagtttttttttttttttttttgagacggaatttcgctctgtcgctcaggctgaagtgcagtgatgccatctctgctcactgcaccctccacctcccgagttcacgccattctcctgcctcagcctcctgagtagctgggactacaggcgcccaccaccatgcccggctaattttttatatttttagtagagacggggtttcacgtgttagccaggatggtctcaatctcctgaccttgtgatctgccctcctcggcctcccagagtgctgggattacagacgtgagccaccgtgcccagcctcattctagttttatatggtatattaatttcctagggctgttggaacaaattactacagacttggtggcttaaagcaacagaaactcattgtctgacagttctggaggtttgaagtctgaaatcaaaatgttggcaaggctggttccttctggaggttctgagagggaatctgtttcctgcctctttgctagttgttggtagttgctggcagtccttggcactccttggtttatagatgcaccactcccatcttggcctccgtcttcaaatggtgttttcctctctgtgtagctgtgtctctgtccaaatgtctctcttcttaaaaggacccaaggtttaggcttaccctgatccagtgacagttcaacccccagcactgggtagcttccagtgtcttttatgtaaaccaagcaatttcaagttttaacttgccatttttgtcttgaaagatgtctttagaacttgtattattcaacttctttagttttcgttagtctcagccaaataatatgtaatttgcacatgattttcacaggatagcactgttttaaaagcatattttaaaaatcataattttggccgggtcctctcatgcctataatcccagcactttgggaggctgaggcgggaggatcatttgaaaccagtggtttaaaaccagcctcagtaacatagcaagaccctgtctctacatacaaaagaaaaaagaaaaaaaaaagccgggtgtgatggcgcgtggtgcgcacctgtcattccagctcctcaggaggctgaggcgggagaattgcttgagtccaggagtttgaagctgcagtgagccacgttaatggcactgtactccagcctgggtgacagaacaaacccctgtctctaaaaaataaaaacaaaaaaattataacgttgaatgttttggatctagagctattgtatagtagtacattgtattactacactgtagatctacctacatggtccacattttaaaacctctttgattttaaaacctctttggtaattttaaaacctctttatatttttaggtgatccctttgttcaaataaaattcttagggccaggcgcagggggtcacgcttgtaactgcagcactttgggaggccaaggctggtggattatttgaggccaggagttcaagactagcctgggcaacatgggaaaaccgcatttctacaaaaaatacaaaaacttagccagttgtggtggtgcatgcctatagtcccagctacctgggaggctgaggtaggaggatcacttgagcctgggaggcagagcttgcagtgagctgagatcatgccactgcactccagcctgggtgacagagcgagactctgtctcaaaaaagaaaaagaattgttaaaatctcccaagcatccatgaacctaggagaaaatttaaaaggtacaagagagtggccgggtgcagtgtctcgtgcctgtaatcccagcactttgggaggccaaggtgggaagatcacttgagctaaggagttcgggactagcttgagcaacatagtgagaccttgtttttacttaaataaaaaaagaaaaaaaggctgggtatggtggtgcacacctgtagtcccagctacttgggaggctcaggtgaggagcctgggagatataggctacagtgagctatgattgcaccactgcactccagccttggcaacagagtgagaccctgtctcaaaaaaaaaaggtacagggagtatatattaaaaaacaaaatcctctctttcccctacatcccagtcatccaatattctttaatttttaaattttattatattgttaatagaaatgggggtcttggcctgttgcccaagctggtcttggactcctggccttaagcgatcttccctccttggcctcccaaaatgttgggattacaggcgtgagcaactatgccccaccctagtcatcacatttcttttcttttttttttttttttttttgagacggagtctcacactgtcttgagtgctggagtgcaatggcgtaaccttggctcactacaacctccgcctcccgggttcaagtgattttcctgccccagcctcctgagtagctgggattgtaggcacgtgccatcacccccggttaatttttgtattttttagtagagacggagttttaccatgttggccaggctggtctcaaacttctgacctcaggcaatttgcccacttcagcctcccaaagtgctcgggattacaggagtgagccaccgcgcccggccctcaaattttcttttctctgagccattcatgtacttttcttgtgtctcttgtagatacctacatatattttatacgtatgtgtattttatatgtgtgtgtgtgtagcttacacacacatggtgtgacacaaatggtcacaaattattactttgcaccttgtttttttcccaggtaacaattgatcttagagaccatctgagcacattcagatattttagacatttttatttctctttattttgtatttctttatttgaaaatatgaagtaggctgttttctttttgtaaaacttactgtataacattaaaacatttcctattgaggtataaatttacatataataaaatgtacacattaggtatgcagtttgacaaatgtatatacccatgtacctcccaccccaaagtataaaacatctctatcacctcagaaagttttctccagcccttttgaagttttccctgtaaccatagccaccctgcccttaccagcaactgctcatctgatttctatcacagcagatcagtttaatctattctagactatgatgtaaatgactcatacagtattcttttgcttattcttttgttaggcttcttttgctcagcataatacttttgtaagccactatatcaatctatagtcttaataacttagtactggacattgtttcatatcagtttgtaaagagcttcctcttttttttttttttttttaattattgcctagaattccattccgtgtcatagtttatatagtatcagcatttaggtctgaatgctgttattccccacaaattcgtatgttgaaacttaatccccagtgtgatagtattaagaggtggggccctttaaggaggtgattaggttatgagggcagagcccttatgaatgggattagtgcctttatacaggaggctttagggagcctgtttgctcccttccaccatatgagaatacatagcacatgccaactgtgagcaacagaacctcactagacactgaatctagtggcaccttgatgttagacttcccggcctccagaaatgtgagcaatacatttctgttgtttataaattacccagcgtaaggtattttgttatagcagcccaaatggactaagacagttgtttctagtcttttgcttttacaaacactgctgctgcagtaaatgatctttaaggtacgttttttgttgttgttgttgttgttgctgttgttgtttgttttttgagacgaagtctcactttgtcacccaggctggagtgcagtggtgcaatcttggctcactgcaacctctgcctcccgggttcaagcgattctcctgcctcagtctcctgagtagctgggattacaggcgcccgccaccacgcctggctaattttttgtatttttagtagagacgggttggccaggctggtctcgaactcctgatccacccacctcggcctcccaaagtgctgggattacaggcctgagccacggcgcctggccaaagtactgttttttgatatgagtgagtacatctataagagcagtaactaaatgtggaactgtgaggtcaagtctatatgcatttgtaattttaattgatattgctaaaatggaaacccagctcacagaaaagtggagaaagttttctgtgccctgggaaagggatggaaagccttgagctttgtgctctggtacctgttctgcagcctctgagatacctctgtagacctgggctccttctggtacagattgaaaaccactggtctttgggatagagaaacaataattactgctggctttttaaatttcaggtaattacactgaatgagagtacattaagatgagaatggcttttaatactttgctataaaaatataaaaccctgggtgagctttttaaaatcacagtggtagttggttttacttctacttactggtaataaaactgttcgaagaaagagttattgttctcattcctggagtcattattgacttgtttgatcctgagagtgtacttttgaatataccttactcggttccattccctataaagtcgaattaataatatctctgagttaagtgtacttttttattttaaatttctgtgaagtgattttttaagttgtaacaatatctgtgattccattgctgttgaagtactgccctggaggagagctgtttgactatataatttcccaggatcgcctgtcagaagaggagacccgggttgtcttccgtcagatagtatctgctgttgcttatgtgcacagccagggctatgctcacagggacctcaagccagtaagtgactgcatcacagttagatgctcaccttcagcgtcatttacctgttatttttaggtttacaaatgatctgattaggaatctatctttggtttgctttttgttgttgttgctccagtcatacctatcagatttcttttttcctcttactttttttttttttttttttggaggtggtgtctcactctgtcacccaggctatagtgcagtggtgtgatctcggctcactgcgacctccgcctcccggattcaagcagttcccctgcctcagccttctgagtagctgagattacaggcacagggcaccatgtccggctaatttttttatttttagtagagatggggtttcaccatgttggtcagtctggtcatttttttggagacggagtctcactccgtcgcccaggctggagtgcagtggcgcgatctcggctcactgcaagctccgcctcctgggttcacgccattctcctgcctcagcctcccgagtggctgggactacaggcgcctgccacaacacccggctaattttttgtattttttagtagaaacagggtttcactgtgttagccaggatggtctcaatctcctgaccttgtgatctgcccacctcggcctcccaaattgctgggattacaggtgtgatccaccgcgcccggccaggccagtctggtcttgaactcctgacctcaagctattctttcgccctggcctcccaaagtgctgggattacaggtatgagccaccgctcctggccttggtaggctttttggatgcatttatgagcattctgtgtatctgtcaattgtgtgtgactttataaatgtcttgtttttttttttttttttttaagcaagatctcactctgtcacccaggctggagtgcagtggcatgatcagggctcactgtagcctcaacctcctaggctcaagtgattttcccacctcagcctcccaagtagctgggactacaggcgtatgccaccatgcctggctaattttctgtatttttattttatatatgtatgtatgtatttatttatttttatttttatttttgagactgagccttgctctgttatccaggctgaagtgcagtggcgcaatcttggctcactgcaacctctgcctctcaggttaaggtgatcctcttgccttagcctcctgagtagctggaattacaggtgcctgccaccactctcggctaatttttgtatttttagtaggcctggggttttgccatgttggccaggctggtttcaaactcctgacttcaagtgatgcgcctgccttggccttccaaagtgctgggattacaggcgtgagccagggtacctggccggaaactatctttttccatctgtttatactgaactcgtcgatttcaactcactcttttggtttaaatttgcttttggcacaaattgtgtttgcttgtagttgactctcagaacaccaaggagaaaataggagaaaatggtttatgctagtgagtcttatggggaagtgatagagtgatcgcccaggctggagtgcagtggtgcgatctccgctcactgcaagttctgcctcccgtgttcacgccattctcctgcctcagcctcctgagtagctgggactacaggcgcctgccaccacgcccggctaattttttttgtatttttagtagagacggggtttcaccgtgttagccaggatggtcttgatctcctgacctcgtgatccacccgcctaggcctcccaaagtgctgggattacaggcgtgagccactgcgcccggccctttttgttttttttgttttttttgttttttttgtttttttttttttgagatggagtttcgctcttgttgcccaggctggagtgcaatggcactgtctcggctcaccccaacccccgcctcccgggctcaagcagttcttttgcctcaacctcccaagtagctgggattacaggtatgcgccaccatgctcagctaattttgtatttttagtagagacggggtttctccatgttggtcaggctggtctcgaactcctgacctcaggtgatgtgcctgcctcagcctcccaaagtgctgggattacaggcgtgagccattgtgcccagcccttcttttcccttatatacttcttgtcatttcgttagtttctagtcattttcagtttgttgtacccggactttttaacagaaacaaccttaaatcatttttactcattttaattaatttatttatttttaaaaagtgagaccaggtctttctgtgttgcccaggctggtcttgaacacctgggctcaaataatcctctctcatctgccttcagagtgctgggattacaggcatgagctgccacacctggccttaagtcatttttagaaatggctagaggtgggatgtgatataaggaagtcagtatacagttatcaaaatatctttgttttcccaggaaaatttgctgtttgatgaatatcataaattaaagctgattgactttggtctctgtgcaaaacccaaggtaagtgcagaaataagatgcatctatgttctttgtaaatgcatttatttcttagtgtgtgattttgtcctgacttccacttattctttattgagcttggttgcatccattgagaagaatgttaaatttcatcccaggtatgggtagtttttgtaagttctctagatgatcataacatgcaatcaagattgagagtcactgccctagttctaggattggtcctgctgaagactccatgggtatgctgtgagaatttgcagtgcagaggtgacttgaggctattacagcaagaatgctgacttgaccagtgcttgcagtttgagtatattgccactagatgatgcctttgtttgtttagataaaagttgagaatttagtgcaaatctgttatccaaatggttctataactaacaattagttacattttgagaaacaatccgctttccttttaaaagaaggaaaaagcccatatgcacttctaaatttataactgttatatatttccttaatttgcattccatggttatgtattggtgttctccagcataacttctctttgaggtgactttgaactttctggctctgctgtctgcagcagatctcctgtgtggctgcctgttggaagcttcctctggagttctctaatcatggtactcacaatctctaaaatgagctgtctacactcattaagaatgttgaaattgcagacttgtctcgggctttggtaatcccataactgtttcctgccctgatcagaattagctaggtgcaaagggaagcagattttgcccctttggcagaaagtctgattctttctgattcttctctccttcccttggctctttagaaactataagtggaaccttttttctgggaaccaaatgctagaaggcaggtttttttttttttttttgattgacaaacatataaagaaaaaacatactttgaacagataaactggtttaagttgttctccatgggaggcagtggagaaggtttgtgacagaccctgtgagccttcatttatggctgccacggattacacacatagacaccatctaaggaaagtggggttgcctgggagaggattgcctcagccttcttccaaggagcacactcctgggcatgttgtttcagttgtaaatgacatctcacaattcacaaatcctttgccagctgtaagaactctatacagctgttggactgtagctttattttcattatgtcttggtatttctgtgggagggcagaggaggatgagcagattactcattttaacagaactggaagctaagggagtgatttataactgcatctagaaaacagactttcaaggcactgttctatgtaacatattgcttttttccctctaagaaaatagagctcttctgtatttgtgaagatttcatactggagataaggtccagtaaataaatttttccccccgggatacttggggatggaaagacgtggatgcttggatatatgctgggcttatttatgtatgtgggtatttagggaagtatgaacctgatttgactgagctaaggggaaaggatttgttcatgccaggttgtagtggtgttgggaatccagagaagcagagaccacacgtgcatgcacacatgtatacagagtattgtgttggctgcagaaatcctttattatgtggggtggtttttcatctagcttctctttgcttgtgctcaaataatttttatcggccaggcgtggtggctcattgcctgtaatcccggcactttgggaggccgaggcgggtggatcacctgaagtctggagttcaagactagcccagccaacatggcaaaaccccgtctataccaaaaatacaaaaattagttgggcatggtggcacgctgcgtgcctgtaatcccagctactctggaggctgaggcaggagaatcacttgaacccaggaggcagaggttgcagtgagccgagattgcgccattgcactccagcctgggtgacagagtgagactccgtctcaaaaaaaaaaaaaaaaaaaaaaaagaatgtttatcaaggtttaattctcttaagcgttgtaattaataagtttcatttttatcttattggcagggtaacaaggattaccatctacagacatgctgtgggagtctggcttatgcagcacctgagttaatacaaggcaaatcatatcttggatcagaggtaattattcattgattaattcattatataatcagcagacatttatattggtcacctgtagtgagtcaggcactgtgcgttgggggtataatgatgaagtaagaaataatcttgttaatcagagttcagtctatttggagagtgagacatgattacttataaatgaaattaataacttgcaataaatatagtaacatatacttatgaagcagggatatttctggtgtccttgttgtggctgcttttgtattaaatagtgccatagtttggactggttagtctagctggatagaacaaaagacgaaggttccaggctcagtttcagagatgctggttagcacagagaaaacctgtgcttcgtccatccagagctgactctccaaggccagcagccctgtgtaggagtccaggctgagaaggagtgggatttgcctgatttatatttgctgtatctcaaattatcaaattagctcctctcattctctggagtactagttttgctgatgtgagtgtcataagattaaaaaaacactttagttgtgaaaagctcaggaagtgctcaaacaggtttcctatttcaggacatgtccaaatctttttttgttttgttttgttttttttttttgagacggagtctcactctgtcacccaggctggagtgcagtggcgcgatcttggctcactgcaacctccacctcctgggttcaagcgattctccttcagcctcccaagtagctgggattacaggcaactgccatcacgtttggctaatttttgtgtttttagtagagacgggtttcaccatgttggccaggctggtttcaaactcctgacctcaaatgattcacccacctcagcctcccaattataggcatgagccactgcgcccagcctccaaatctttcttttcttttggagatggagtctcactctgttgcccaggctggagtgcagtggcacaatctccgctcactacaagctctgcctcctgggttcacgccattctcctgcctcagcctcccgagtagctgggactacacgcgtccgccaccacgcctggctacttttttttgtatttttagtagagatggggtttcaccatgttagccaggatggtctcgatctgctgacctcgtgatccgcctgcctcggcctcccaaagtgctgggattacaggagtgagccaccgtgcccggctctggcctccaaatctttaatgtgctcttgtacagtgtgatccttcaggaaaggaacatcacagataacagctggttctgattttatttgcctatgggatccacttttgatggagagcatcttttggaactagcataaggaactttgggaataccaggttacttcataaaatgagaagatgggaactgtttccggtgactttttattttgatataatctctaacttacaagatagtgcaagaatagaatgaggaactttggtatatcttttactcaaattcacagttatttacatttttccttatttgctttatcattctctatgtttatatatatgcatgtttttttttgaatcatttgagagttagctagaaatatcatatccttttattactcaatatttctatatatatttttcctaaaagcaaagaccttttcttttataaccacactttagtatcaaaatttaacattgatacaatttatttaattcataattcatattcaaatggtattaattgtaccaataatgtcctttatagttttattttccccccagtctaggatatggtgcaggatgcatttagttattgcatttagttattgtgtctctttagtcccttttaatctggaagacttccttaggctttctttattttttttgatctcagcatttttgaagaagccagttatttagtagaatgtacatcaatttgaatttatttaatgtttctttatgattagattcaggttatgtatttttggcagaaataccacaaaaatgatgttgtagccttcttagtgcattataggaaagggaccaaatgttttctgaacgtttatcatagtcctggaatcatgctggatactttttatttttaattgtggtaaaatacacataacataaaatttaccatcttaactgttttaaaatgtatagtttagtagtactgaaatacaatcacattgttgtgcaaccgacctccagggctcttttaattttgcaaaactgaaactttatacctgttaaacaattcttcatttctgcctaccctattcccctggcaactacccttctgccttctgtctctatgaatttgactaatctaggaacttcatgtaaatggaatcatacaatatttgtctttttgtgactggttatttcacttagcataatgtcctcaaggttcatgcatgttgtagcatgtatcagaatttcctttctttataaggctgaataatattccattgtatgtatataccacattttgtttattcattcatccattggtagatacttaaattgcttccaccttttggcacctgtgaataatgttgataggaatatgagtgtacaagtatctctttcagatcctgctttcaattcttttgggtatatattcagaagcggagttgctggatcatattgtaattctatttttaatattttgtggaatctccatactgttttccatagtgagtgcaccatcttacattttcaccaacagtgtacaggagtttcacatgggctgggcgcggtggctcatgcctgtaatcccagcactttgggagactgaggtgggcggatcatgaggttaggagtttgagaccagcctggccaacatgatgaatccctgtctctattaaaaatataaaaattagctaggcatggtgatgcgcacctgtaatcccagctacttgggggttgaggcaggagaatcgcttgaacctgggaggcagaggttgtagtgagccgagattgtatcattgcactccagcctgggtgacagagcaagactgtctcaaaaaaaaaaaaaaaaaaaaagagtttcacatgctggatacctttaataattttcaattaagctctacagactttttttttttttttttgagatggagttttgctcttgttgaccaggctggagtgcaatggcatgatcttggctcaccgcaacctcagcctcctgggttcaagcgattctcctgcctcagcctccagagtagctgggattacaggcatgtgccaccatgcttggctaattttgtatttttagtagagacaggatttctccatgttggtcaggctggtctctaactcccgaccccaggtgatccgtctgccttggcctaccaaagtgttgggattacaggcatgagccaccacgcctggccacagacatcctttttagtgaatactgttaccctatcccataagataaagaagatgaagaaactgaggctcagaaatttggtgcctttgcagggtcacacagctggtgactgagtgagatttgagtggagtgaggtactgtttccactattccatttagtttcccagaaggagtgataatcgtatgcctgatctcacaagattcctagaggtgatgagaatctgctgatttgagtgtatctgggtttttcctatgtaattttaaattgttttcttgtccgtgttagttcaacttcctgtccttctcagagtgtctaaaggatagtggactgaggagtcatttgagatacttactaaatgatgcagagctcagggtggtaactccctcagagattttggtttcgttttctgagatggggctttaagaatcttcatttaaaatactaataaaatagttgattctgatgttcacagtcctgatcatgctttaaggacatgttccattgtaaatatctctaatttcttcagtaatttttcatgggaaatggtttcagttctctcttcctcccaattattttatcttttttttttttgagacagggtgtcactctgtctcccaggctgaagtgcagtggcatgactatggctcacggtagcctttacctcctagactcaagcagtcctcccacctcagcctcccaagtagctgggactacaggtgtgcactaccacacctggctaatttttaaaatttctttgtagagatagggtcttgctatgtttctggggctggtcttgaactcctgggcctaagtgatcctcccgccttggcctcccaaagtgctgggagccagttattttttcatgtcaactggtagtttatggatttacttgcatttgctttggtttttttatgattttagttaatttattctcatattcaattcaaaacagcgaagtaaaggtactttcagttaactgaaaaatgctttttctgctttcttttttctaataagtgttggtagcactatggggatgttattatcattttatccctctttaagtttaaccctagacataatctttctgttgacttcttgtgtgtttttttgtttgtttgtttgttttttgagacggagtttcgctcttgttgcccaggctggagtgcaatggtgtgatcttggctcactgcaacctctgcctcccgagttcaagcgattctcctgcctcagcctcccgaattgctggaattacaggcatgtaccaccctgcctggcaaattttgtatttttagtagagacggggtttctccatgttggtcaggctggtcttgaactcccaacctcaggtgatctgcccacctcggcttcccaaagtgttaggattatgggtgtaagccaccgcgcccgggctttttttttttttttttttttttttttgagacaaagtctcgctcttgtcccccaggctggagtgcgatggtgcaatctcggctcactgcaacctctgcctcccgggttcaggcgattctcattgggttcaggcgattctcattcctcagccttccaagtagcttggattacaggcacatgccaccatgccctgctaatttttatatttttagtagagacagggtttgactcaaccctggtgggattgagtgggagtggaaggactgcttgagtccaacaggaccatattggccaggctggtctcgaactcctgacctcagctgatccgcccaccttggcctcccaaagtgctgggattacaggcgtgagccaccatgcctgacccttttttttgagacagggtctcactctgtcactcaggctggagtgcaatggcgtgatcttggctcactgcaacctccacctcccgagttcaagcgattctcctgcctcagcctcccgaattgctggaattataggcatgtaccacgccgcctggcaaattttgtatttttagtagagacggggtttctccatgttggtcaggctggtcttgaactcccaacctcaggtgatctgcccgccttggcttcctaaagtgttaggattatgggtgtgagccactgcgcccagccattatttatttatttatttttttgagacgaagtcttgctcttgtcccccaggctggagtgcaatggcctcctgagtagctggaattacagacatgcaccaccacacctggctaatttttttatctttttagtagagacagggtttcaccatgttggccctgctggtcttgaactccctacttcaggtgatctgcctaccttgcttcccaaagtgtggattacaggcatgaaccaccatgtagttcactctttcctgtgcaacctctttgctttgaattttttttgagatggagtctcgctctgttgcccaggctggagtgccatggtgtgatctcagctcacttcaacctctacctcccgggttcaagcaattctcctgcctcagcctcccatgtagctggtatcacaggtgtccactaccacacccggccaaattttgtatttttagtagagatggagttttaccatgttgaccaggctggtcttgaactcctgacctcaggtgggaggtggctggttttggcctcccaaagtgctgggattataggtgtgagccactgcacctgatctgctttgaatttaataccatgaatgagtgtcataccatcatgtctcaatttatagattaaatatttgacatctcggaggcgtaaatggtcaattt

SEQ ID NO: 457 - DNA, 32744 bp, Homo sapiens
  source 1..32744: mol_type = other DNA
agtcttagtctgcggtcactgctgaggttttcagaactttccaggcaaaggccagccaggtcctttgcctccaacccactccgcgcctacctcccgcctggggacacccctaggcccaggagatcctactctcccccgagcaccgacgttccaactcgtctgcgcccccgactgctgtccggctcctgtgccaaggggcgcgcgcatcttcccggggccagcaacgctcccaacttctcgactcgccctcctcctccccagagcgagagtggggcgggctgagcccggatccggggtgcactcgagcgttcccagcgctcggcattcaccccgcctcagagccgactttcgaagggggattgagcctcggaggtccaggcgtcttactccaaagctcaagtcggcccccgtcttttctttccacacccctgtgcccgtcgcatgctggccgggtgagcggccgggccgaggattcgggtgcccggggccgcgtcgccccgtcgggtactgagctgagcgcaccatggccggctgctgctgcctgtccgcggaggagaaggagtcgcagcgcatcagcgcggagatcgagcgacagcttcgtcgggacaagaaggacgcgcgccgtgagcttaagctgctgctgctgggtgagtggctgcgtctccgactccagtgagccgggcgtttttcttccgagccctcccggcctctccactggcacccgcgcggccctggagcccagcggggtgcagggcggcttcgtccttctccccctcggagctcacggatgccagcaacttggggccttaggtgcctgttctttccatctctggctgggcgacttgcaaaagcaacaccttcccctgccccaaaacaggatagggacctgtaacacttaacctcttgaccgctgtaccttatgtgttccggtgtgcccctctcctcaaaaccccgtccactcctccgcccgcagcacacccagcttggggtctgtggtgacccacatcttgggttcagcgctagctctgacccgtacgctttcagttctagatgaagcatcttgagaatttaccatgtgccagatcgtgctaagttcttaagggcatcaccacctggtgatgcgggcaggtgatatcgctattctagagaattaaaacatggaggcctggagaactgaccaacttgccctgattgagaaaaggcaaagccgatgctaggtcagctgtgggggtgaagcccatgccgttgctgctcctctgaccgtgagctcctatgcctgcctcccatgggggtccctcaggcctttgtgtttgcagcggacccaaacctcccttgcccagcttgactcagtgtgtccacgtcctaggattcagcttggctgccctggtgcctctggcaggtcttcatccagctcttttggtgtctctgcaaaggtctgggtaggacatccactttcaaacacagaaagaacacagtttaaggtttgcccaagttatgccatgaggcaaggatcccatctcagactttctagaacgctgtcaacacatttgctgtttgaggaatattttaccttttctacctttcagaccatgatatcagctgtcaatttttttctagatagccacaaagatttcaactttttttctttcaccccttttgaacaggaatcttctcttataccatctatttattcatctttattccttgtataggaatcaccctcccagaaagcttcaaggaaagaaaaagttgatctagttagtgtaatatagagaaggctctcagccagtatggccttcagacctgggcggaagaacccccttatccttatcccctgggtttaaagggcccagtctggccttctgggggttgggggggggtgtgcccctccccacagagctggaagtctgtaggtccaaaggggcttgctacccagagaccatgctgccccctccctcccaagacctggatggaatgaatacccagcccaaagggacccataccagcttctaaggcctgagccctagaaaagaaggcagacctgatccctggagagctcacaaaggggcagctgtttgctggggcgtaaaagtgcttggaaatgtgggctgggtaggagtggagggagtccccgtgggtgcccaagaggcccccctaggagagagggagcttgggtggggaagggaaggggctctgttcattggccaggtctgctatttctgtgtctgacccataactttgaaaagtctgaaaattctaaattgtccctggccttctaggctgttataaagctacctttgtcaagggaggaggaatacgtgagaatttgctagcttgattaacactagaaaataactatgggtgcggggctttgtacttttgccctgaaccccacaaaccagaggggtttagttgcgtatgtaacttttttctttataagggcaggctgaaccctatttcattttgcaatgctttgatttgtgtcaatgtatgaagtacagtgtccagaatataccaggagcttgacaaatgctggctctttgtatgaaaaattgtgtagtcagctgagctgtactgtattggtaataagcctgtttgatgtaaaattctcgcatttacccacaaactaggggagaaatgtttgtaggtaaattgtttgctctgaaagtcacattaatcagggtgacccgagggtcttctttatcttcccaggccattgctccaaccctcctcctaccaccttgaggcactgtctgacctctggaaactcccattttcatcttgcggagttgtgactagcatatccccttagtgaaaactttcctgtgaaaaatagtttctaaaccacacagagccgttcagaactccaaggatggacttcaaaacctctgatttatttcaatctgtaaagtcctggggcatagctccatttcttctcaaggaagagccaatgactcagaagtgacaggaattaggggaggatgtgcaccattttgtctgaagtcatgcaattcgagtgaaaaattcacccatctctctagtgggtagattagagcatccactgctcaggtgcctcagttaaaaacctcactttgcaaatgggagtttggaatccttttgtggagtatgggatgacccccaaagacaccatctctttcacaatgaagcatgcttttgcaaaaaaatgatgtgaggatgtttctgaagtgcagtatcctgtttctgcttaataaaagcacaggtcagtgtctactagggaaagataaaagctgttgtttggttaaggctaataattgcaagatgttggtgtgacactttctcatcagaaagagatggagaaaataaaggagatggttgaatttagtagaaagaaatttcttatcagttccttgcataaaagtaggacaaaaaagttctgataagaacattggtgagtactgatcagcatagggagaaagtgtcaggacaatagctattaaataagggaaaatgatgttttattgattttcctgttaaatgcagattggtgaagtgtggcttgttaattgggttgagtgttttaattctggatgcagaccttaccttggagctctctggaaggaagaggaattgagcatttaacagatatggctgaattagtttgctagggctgccataacaaaataccacagactgggaggcttcaacaaaggaaattaattttctcacagttatggagctggaagtccaagagcaaggtgttggcttggcaggtttggtttttccggaggcctctctccttggcttgcagacagctgccttctcactgtggcctcacatggcctttcttctgggcatgcacattcctgtgtctttttttttttttttttttttttttttgacactctttaggttggagttcagtaatacagtcacggcttcctacggccttgacctcctgggctcaagcatcctcccacctcagcctccctagtagttgggactataggcgtgagccaccatgctgggcttatttttatttttcttggtttttgttgcctaggctggtctcaaatgatcgctgggctcaaacgatccctctgcctcaacctcccaaagtgtcgggattacaggcatgagccactgtgtcgtgccacttcctcttcttataaggataccagttcctattttattagggccccactcattttatcctaatcacctctttaaagacattatcttcaaatacagttacattctgaggtactagtggttgggatttcaacataaaaactttggcgggaggactaaattcagccagaaacactggtgtagagatgaaaaatgtagattcttagcccagtctgcctgggtttgaaccctagccctacagtgtcttagctgtggactaaattctctgggctttggatggcagtgagtgctcagtatcagctatcatcactctgttttttgagtattttcaggccctagagaggtgtcattttccattttagttgaccaactgtgggttgcatagaagtttgtataaactgttgtggtagtgctttaacagaaatgttttactttgagtttcccttagtgttttctgagccataaactgatttaaaattcctcttcctgcttacaccaaaaagttgaaaatctggtcccaaaaagttttattggattggttataacaaaatcccatttcagaattagccatcatgttcctgggcaggaagtccattccagaaaatggtgcaaatagtgtgagttttaaggtagaaagtgacaacaccgattgggtgcggtggctcacccatgtaatcgcagcactttgggaggctgaggcgggcggatcacctgaggtcaggagttcaagaccagcctgacaaacatggagaaacactgtctctactaaaaatacaaaattagccgggtgtggtggcacatgcttgtaatcccagcttctcaggaggttgaggcaagataatcgcttgaacctgggaggtggaggttgcagtgagctgagatagcaccattgcactccagcctgggtgacaagagtgaaactctgtctcaaaaaaaaaaaaaaaatgacaacaccttcccactctgaagaagaaaaggaatgaaatggtaaatatgcccacgttcctttatctgagcttagttcaatgcaacagccttttccaaggtgccagccacagtgcagggattccttcccaagggctgagttggagaaggacagttcacaaatagctgttatgaggaagatggtcataaaagcttaacagagattaagaggtagaacaggcagagcgtaaagggggagcctctggaggaggcatcatctgagtgggccttgaactatggtgagggtaagatgcaaacaattgtctgcgcatgggggcttgggtgagacatgcacaaactctcctcaccatctagggaaatttctgaggacagtaaatggtgttcttaggatctgggatcatatgaaggatcccttggggaccagatttcattgagttttgtgtttgattttatttttgtttgtttgttttttgagacagagtcatgctctgttgctcaggctggagtgtaatggcacgatcatggctcactgcaacctctgcctcccaggttcaagtgattctcctgcctcagcctcacaagtagctggaattacaggcatccactaccacgcccagctaattttcatatattttttagtagagacagggtttcaccatgttggccaggctggtctcaaactcctgacctcaagtgatctgcctgcctcagcctcccaaagtgctgggattacatgcatgagccaccgtacctggcctgtgttttattttaaccagttatgtgagtattgtgttcactctaaaatagacattaaaataaaaatgcttgcttttttgccataatatgcttcagaaaggaggattgtgtggttttgtctgtggcttctgttcatcctggctggagcaaaccaatctcactagatagtttgcttccatctataacacagcagttcctgaggcctttcaagaggcaaatgcacgtacctcttcttctgtctacccttaaatgaatacagaaccttttgaaatactggacttttaccctctgtaccttttgcaaatcatctttattgaatacagtaagtcaccaggcttaagtgtacactttgagttttgacaaatgtatgatcacaatctataaacacttccatcatcctggaaagttccctgtgcctttgcagtcaatctcctgctccaaatctttttttttgtttgtttactttttatttggaaccgatttaaaatttacaaagaatttgcaagaataagaatagcacaaacaacataggtatgcccttttcccttggcagtgtttgagggtaagttaaatgtattgtggcctttttttccctaaactcttaagcgtgtttttctaaaaatagggataatctcttacataagcgcagtacacttatgaaaggtctgtacatttcactttgatgcaatatttgtgtccaatctattatccatatcccagttttgttggttcacccaataacgtccttagtggtgttcccccacctccagtacagggtccagaggaggctcagggattgcatttggttctcatatccttttagtttctttaatctggaacttttccacaaagtcattgcttctacgacactgaatttttgaaaaatacagtcccctctccctttttttttaacagacggtttctcatttgggatttaactggtgattttcttacgattagcgatccccactgtgcttttctggctggaacactggatacgtgctgttgtgtccttctcgggggtggcatctggaggcacaccatgtccatctgctcctctgtggtggtgataactctgatggcctggttaagatattgtctgttttatccactgtatcataattttgtggagagacactttataaggctagtaaataccctgcttcttatcaagatttaggagtcattgatggtttccagttgatccaatctataacatggtatctgcagaatgattttccaactccagcactctccacatttaccagttggcatttgacattctactgcaacagccttacctttgcccttccttccttccttccttccttccttccttccttccttccttccttccttccttccttccttccttccttccttcccccccctcccctcccctcccctcccctcccctcccctccttccttccttcccatgcaaattcgtgaatacctaggtttttttccctcaatgattttttacttcattactgttcttaatcattttggtgctcaaatcatacccgacttgtgcaatgagatccccttcaagctggctcctgtgtcactgtgacatgcctctgtctgttgtttttttttttttttttttttgagcattttattgttttctggcataacatgccccaggctcgtcttgtaccaattcttccccagctggggaagaaatcagctgtttctcagaggggctctgcttccttttattggagaactggatcttttaaaaaaaatctttaagccacttgaaacaaagatatcaagtccctaattcagatcaattactagtacagtatccaagtacctaaagaatcaaggtgctaagtcatgtcattagaggatgaaatttttgaggctttaataagtcttaagctgtgggcagatataaagtggaaaaatctgacagtggagtttggcaaaaagcaatgcaaataaagtcttaatcttcaaatggtctttttttctttttctttttaaaagatgccttctagtctgtcatcttttgctttctcatttcccatgatacttaaaccacaaagggaaaaataccactgtaacaactcccatgtgtagggctatatgaagggagttcatgatattgggaagtcagagagggattttcagtgaattattggagcaaagctatgatgatactaaagatggttgaaattcaaagaggagacaatcatttatcggaaggactgtcaccagggcatctcatggaattcaaagaggatttgaataataaatgagaaagagcaagtgccagggcagttgggttaggggactcaaggcacagccatcaacaggacttgaccccatccccttccaagcttgagagccctctctgcagacctttatagccaggttgtggcatcagggtgcactcctggatcaatcagttctggccaggggacatgtatcatggacatgactgtcacctgagtgcagatggccggggactgggatccctgtgagccaggtagccacagctacaactactgttagaggaagaaaatatactagcggaaatccaagggctctaaagttggaagggaccacaaaagcctctgcaagagccctcacattcattatgaagattggctctctgctgatgggtaaattagccatgctggccaagattcttgattgttgaccatgtaagcagagtaataatttattagagtggaagcaggaaatagaattaatggaaattggagaggaggctccgcaaaagggcaggatttaagggactctggacatagcaaatgctagtaccagacaagactgtcaaggacacagtcagtggactccaccaccctgccagtcgctgctgctgctgctgctagacacttatattcacagcagagctgcaaatcacctgtgaccatcttctgcaccctggtgtcacttttcaaaacctccatctgtctgattgtgctcatctaccaggttgttggggggaggcagtgtgacacagcggttagcatgttctttggagccagccttgctgggtttaaaatataggcttttccactgataagctgtgtgcatcctggaatgtacattagtttcttcatctgttaaaggggaataacaacccaatgaggcacgtactattatgaggattaaatgagttgtcatttttagagcgtttagaatagtgcctggcacatagtcagtgctatttattttaggtgcttgttaaataaaattctgccagccttagctttctaccatagggaaagggggtgggctgctgcctcctacctttcttgaaactcttcccccagaaggtaagtgctcagatgctgggcagcgccaaattacaaagatctacaacaaaaatgtgatattttccataaaataacttttcctaaatggattggtaaaggcaaactcaaaaactaaaatgtaagctttcagacagtggaatcatgaaaagaaaaggaggcagatgtctttaaatattaaggtgtatttaatattgctctagttaatttcttgaatttgttttttaaaatcatgcctttattctacagggctatgaaaatttcacacatgtatcctattatcccaggaaattgccacagcccatctgccagcattgtctctggtgttaaacatttgccaaatctcaccacttcttcccctatccaaagctgcaattcacctgcgttattgcagtgtcctcttgatttcccatctcccacatttgcccttctttggtccatttaaaaacttagatttatattattaccttacttaaattcagtgtcttttacttacacttggaataaatgccaaatgctttcctacctctcggaatgtacacagggtcattctcccactggtttgctgggctgaagccaaactcacctttgtgtttttcaaacacaacatttgttacctctgggtctttaagcttgctttttttcctgcctggaacattcttttctgttccccactcttgttccacatacatggctgtttcttccttatcttcacgtctcagctcaaaagttcatctcttgacaaggcctttccagatcacactacctgaaattatccttgcaccatttactcttagttgcctggttctataacttggctttatttcttcatagctgttatcttggaattgacctgatattcttatttgcttacttgttgacttgtctgcccccaaatagattgcaagctctgtgagagtggggctgtgctatcttgttcctgtatcctggcacctgaaccagttttgtgcctggtgcaatgttttaataatgactggatggtacagtgtgagcactgaaagccagaatgatacttgaccaatctgaaatgagataggctagttgactatcaaatatgaaatattcttccatgaatacatgttgatatacccatgttacagatagaacaagcaagtgctcatgattattcagagagagagtcgttaattacttcactataagactacatttgatatttaatatattgatcttccagtattttttcagaataaacttttgcatataaaaccagagagtagcaataaaagctaaagttttctagaatatgaacacaaaagaaaagtattacctatgtgatatgcctgctcctggtactctctgtattaacaacaaaaacaatttttcttttcatggtttactaaagccttggcctcctgggctcaagcaatccttccacctcagcctgccgagtagctgggactacaggcatgctaccacacccggctaggttttaaatatttctttggagatggggtcttgctattgcccaggctggttttgaactcctggcctcaagcgatcctcctacctcagccttcagagtcattggaatcacaggcatgagccactgcacccagctcaacaactttaacaatagaatagataacaagttaaaatatactttttaatttaagaaaattatagggttgctgataagatatagaaattccttccatatgtggtttgaattgtgcaaaatttaaattttctctgaagttgatgggtgagatgaggtcaacatcttctcaatggccactgcaggttttagggccagatctctgtttttttcccttttcagtgtgtgcttcttaggtttaaagagtctattataacgagagtcaaggtaaaggagacagtgatattcttggaattgtggaacaaaaaaggaaattaatagcaaagaacagtgaaaagtggtaagactttggaagctgaaagttcaagccagcagaaatctgattagttcatgacccagtacctcttaatggaaactatttttttcttcaagaagttagtactccaggagctgtaaacatcaccagtaaatgtatgttttaccttggcaagaatcgtttcaaaaagtagcaaatgttcatgtttgcatagatccttgtacttgcatgtactcttcaaaaaactgtgctcctaaaaactgcaatgatcttatggctaataaccattaggtagttatgcttctattaatggacttaggagtgctgaggaaccatattctagtaagagccatcatatatcagtcttctcgttgaaaattcactctccatggaacattggcttgtgctgcggtttgaatgtttgtctctttcaaatctcatgttgaaaatttgatccccagtgttggaggtgggacctgctgcgaggtgtttaggtcgtcgggtcagatccctcaagaatagattagtgccctcccttgggagtgagttctcactgtattcttgagagagctggttgttcagaagagcctggcacttccccacctctcttgcttcctctcttaccacattatctctacacacaccagctctccttcaccttcccccaagagtggaagcagcccaaggccctcatcagatgcagatgcctagttttgagctttctagccatgagattcatgagccaaataaacctcttttctttataaattacccagcctcaggtattcctttataacacagaatggattaagatggctgatatttccatccaaagagtaatactcctgttgtcaagtttgctttttaaaaattgactgacaaattctaatattttgtgcttttttaatgaatgagagaaaaaagtaaaatgtatgttttattgttttgcctgaaagccatcttctgtattgatgatcagttgtcagttattattagatggattatccatgccatttctctcttgaatctgccataaataagaccttcctttctgagtaacccatcccagaatatttgcttctgttgctcagctactgtgtaattgaaaaatatgttaattatattactaataaaaatcaaatgaaggtgattaatcttttgtagaattatcttctaatccatttagtggtaagccattagtagtcttcatcaacaccactcaaaatgcacctgtgtttagaaacctttatagcaatttaacattgctgtggcatcaaagagtatttttattgaagactgatacatttatgaaatacaactgatggaaaattttaaaaattggttccttcctacagtgtttgagaaacacaagtacaaactttgatcctatggatggggtggcaaaggtccagaggagtgaagggactcagcagatgtcacggggccaggtgattagtagctaattggcagaagggcccagagttagtctgagtcttcatgttgaatttcctagtttctaaggcaacattgattatgagatatgccattgatttgaaaacagcctttcagaaaagcaaatgccaccatagtaaatatacacatcaatgcaaaggcatttcaccctcaaaaatgttaatttatatggacataagccttggactcaaggatataggtaatttacttttctctcttttttccttaccagatagtacaaatttaaaacaaagcaaaactattcaaatactatgtcaaaactagttattgacatagtatttgattttatgaaatcaatttaagtgctaaaattagactagaaaagaaacctctgtgtattgccatcagcccactggtttctgtttcaagtggtcttatatgcgatcttgaaaatagttacttcttggaatagcatgctgtcatttatacagaaggcttaaaaacataatagtgaccatgcactcacttcagcagcacatatactaaaattggagtgatacacagaagattagcatggcccctatgcaaggatgacatgcagattcatgaagcattccatattttttgatttttgggactcagggaaaatggtgggggagggggtgaaggctagaagactacacgttgggtccagtgtacactgtttgggtgatgggtgcgccagaacctcagaaatcaccacttcagaacttacttgggtaaccaaacaccacctgttccccaaaaaaacctattgaaataaatgaaataataatagtgaccaaacgtgtgtgggaactccaatgtatgatattatatgctccaatgtctgaataactgtggattgactacatcctggcaatttgatgagtgttgaagagtttcacatgagaccttgaactccatgagatctctgctcactattgaacccacaatgctaagtgcagaacttagctcaaatactggttgaatgaagatatgtctctctctttatagtggtttacatgaaataccagctgagtagtataaagaattccttacagtagctgaaagtcttttttgtttgtgattgtctaagaaggttcataaaaggaacacaggcctgggctgggccttgaagaaaggaaaattggagaattccagaattgattttttttggataagtggtataaggatatgaaaattgagcctggattccaggaataagatgagatttggaaaataatacttctcgtattctgcctgcctgcctgcctttttgcctcctccctccctccctctgtccctcactcccttccttccttccttccttccttccctccttcctttcctttcctttcgcttccttccttcctttttttttttttttttctttttgagacagggtctcactctgttgcctaggctggagtgcagtggtgtgatcaacttctgtctcaaacttctgggttcaagggatcctctcacttcagcctcctgagtagctgggactgcaggtgcatcagtatgcccagcttatttatttatttattgtagatacaaggtgtccctgtgttgcccaggctggtcttgaactcctgctctcaagcaatcctcctgcctcagcctcccatagcacagaagattataggcatgaaccagcccattttcttgtattttcataaagacttttcctagtaactatacatggtaagattttgatatgtaaccaaaactacagttgagaaatttgtaaattgttcttttctgttgctttactttgaaacagttggctcaccagaatcgagtctttttttattctttttctgtcatacctaatgctaataatggaaaaggcaatattaaagcagtgacgtttatacattcagtcattattctgggtactttaatcagtgatttcatttatttctcaccatgtttgaggtagaggtagtatcctctccattctacagatgggaaaattgaggcctatcctatggcaagattgactggccagagtggggccagggtttgaatccaggtggtctgatgccagagccttggttcttaatcacagttctgcttttgcctcctagagccagacagctcaccaaaatctaccccatgggggcaaatatctgctgtgcccgcttcttgccatcctctctgccacccccatctctatctgaattgctaaatttatctatcattccctagccccaaattcactattcactctgccagccagagtgaccttttaaaaatgtaaattggattgttgtttttctgcttagaacatttctatgtcttgggtgcaaatttaaatctgtgcatggcctgtgagaccctttatctgtcccctaatgaccctctgccattattccccatgattacttagttctggccacagaaccatattttagaatcttcaacgggccagactcatccttcttaggcctctgcacatgccaatctgtctgcctacaacactcttttctgctggtcttctagtgaactgatactcattttgagaatgcatcttaaatatctcttcctcctggaagcctttgctgacaccccagtccaaattaagttcctcagaatatttctcccatagcaccttctacatttctttttaaaaatagtgcttttcctagtttgaaattgtacttatcatcctccttctccgctagcctctaaattttatgagtgtagagactattgtaacatgagaatcctcagcaacttgtatagtgcctgggtgtttcataacatttgctaaatggagaaatacattacttttacaggatctttggggtatttttctgtctggaaacctctgtggctggtggcacctttgcctgagttttgctaaggcccattgagcttgttttgctcacttggcctggcaagctgtgcttggctcacattaccagcctgagtcccacacctgccaagggagagtcaggcatggaatagtgaggggtgtgtgagcgagcatggggtccggccactgtgcagagtcagacatgccttttgctgtagcagggtgggcagctccaggtgccagcaaaggcaccggctctctgtgaggctgcggccagaccaggcacgccacaagcagcttccactgctggcactggggaacatggtggcatccagaagcttggagactccaggaaccttagggccccaaagggagtcacagccctggcttaggggacgcctaggtctggggtcctcaaagggccacagctcttctctcctctttgtccacaatgtggcaagcaaggggcatatttcagccctgtttgtgttacagctcttttagcccctacagggccacagaggggaggaagtgtgcaccgattggtccatgggtggccatgggtaggcctggaaaaggcaccacaagttcccactctggtccatgggactggcagcccagccaacagccttcaggccctcactagggacccacctcctgtccaggagcctgtctgcctccagctgctgttcatggcacccatggcacccaggatgcccatgtgccaagaggtgcctgtggcccagcaccaagcttccctcagtgccccccttggcttcccatggccccaactttgctctgagattggagtgggtgccaacagcagggagaagccaggcagcagaagcaggcacttccaagcctgcaagggcagtgggggccttcctgggctgccaagggtataggggtgcctgggtctgcagctgtggttttggcagctgcagcggtggccagcagggtagggctcctgcctgctcctgagccctgagagcacagggatgcctgggtctgcagctgcagtttgggcggctgctgcagcacccaggcagcttccaccccaactcagaaggggcgaggatcctgcttgtgcctgcctcttaccagctccatggaacatgcagccccagccacgctttcctgctgcagccggcatgatggcagcggctgctccagatggcccgccactgccatcattaccatttagtatcaacattattgcataaagaaagaatacttgaacttcaaatagtagaagggcctaatggaagataacactttaaattgaataaacttaaatgtatgatgaactcatgctcattatgtgtttttgttttattttactttttgctaatgaaaacttcactagatactgacattgtactgtgggccaatgttctagagccactgatttattgtatgcatcttatgtgcttcctaaactttcagattttctttatgcacatatgtgaatagatgctcttgatggttttttactttttttttttttttttttttacataaaaagtggcatatttgtggcagagactgctagcagtctcctgaatacagattctctgtaatacaagatgttttatctgggcacatggatacccagctaaatactatagttcttagcttagctgctgctaattgtggccatgtgatgatgggatgtaaactgaagtgatgtagcaatttctgagtgatgacctgaaaaggaaaggaggctttcttcccttctagaggaagatgtaacctgacggtaggagctgcagcagccatattttaccataagatggaagtaaggtgttaagggtgaaaaagcaacatgataggaagggtctatgactctgagaccatgaaggtgtcatattagccttgaactataaatgattagaccctttttaaatggcagctaacctgatatcctaactaataaaataatatacgctgttttgctcttagcctcttgatactcaacaatatatctgggaattctttccaaattttttgcaatcctaaggcagaaaaaaatagactctaatgttgggggaagggtataggatgatgctgtgggccagctggtgagcagtgctctgttgatgtctctcatcctcccatcttcatcagtactgtaaggggatacaactgttttctctgctgctgagttttcaaatatttgatagggtctttctgtgtgcaaagagacatttgtagctgcatgttttagttgatactgactttattagagcggaatataagctaaaaaaaactagtttttctaaggctttaatgctcattttaatttttataaatctagttttttgcatataaaaattaaagggatgtttcttaatcctttgattaggtttcaatttactgtttgcttcacttattaattcagttaattaaattattacattttctttaaacatttttaaacctatttacacattttaaaaacccaagtatcctcaaatatttcaaacctccgaaaaagctgtcaagcaaaatctaagcagttaagtgattctggtagatcgattaaataaatcttactctcttggccaggcatggtggctcatgtctgtagtcctagcacttgaggaggccaggacgggaggattgctggagaccaggagtctgagaccagtttgggaagcatggagaaaccgcatctctacaaaaagtgtaaaaattagctgggcatggtagcacacatttgtagtcccagctactcgggaggctgaagtgggaggataacttgagcccaggaagttgaagctgcaatgagcctcgacatattgctaatcaagccactgcactccaacctaggtgacagagtaaaactctgtcaaaaaaaaaaaaaacaaaaaacaaaccccacaaaaccatactctcttaattctaaacattctaatattgtttctaaatgtaatcaaatcaaataatcacatttattactgttaaatcataaactaatcacaactctgatagattatttaatatcagatttaaataccataaataaggacaagattttaaaaattcagtgctgactcatgtttacttattttaaagtttgtcttgagagtattcttttttttatactttaagttctgggatacatgtgcagaacgtgcaggtttgttacataggtatacacgtgccatggtggtttgctgcacccatcaacccgtcatctacattaggtatttcttctaatgctatcacttccttagctccctaccccctgacagaacccggtatgtgatgttcccctcactgtgtccatgtgttatcattattcagttcccacttatgagtgagaacatgcgatgtttggttttctgttcttgtgttagtttgctgagaatgatggtttccagcttcatccatgtccctgcaaaggacataaactgatcctttttatggctacatagtattccatggtgtatatgtaccacattttctttatccagtctatcattggtgggcatttgggttggttccaagtctttgctgttgtgaatagttgctgcaataaacatacatgtgcatgtgtctttatagtagaatgatttataatcctttgggtatatacccagtaatgggattgctgggtcaaatggtatttgtggttttagacccttgaggagtcgctacactgtcttccacaatggttgaactaatttacactcccaacaacagtgtaaaagcgttcctatttctccacatcctctctagcatctgttgtttcctgactttttaatgatcgccattctaactggcgtgagagggtatctcattgtggttttgatttgcatttctctaatgaccagtggtgatgagctttttttcacatgtttgttggccacataaataccttgagaggtgtctgttcatatcctgtggccactttttgatggggtttttttttcttgtaaattcgtttaaattccttgtagattctggatatgaaccctttgtcagatggatagattgcaaaaattttctcccattctgtaggttgcctgttcactctgatgatagtttcttttgttgtgcagaagctctttagtttaatttgatcccatttgtcaattttggcttttgttgccattgcttttggtgctttagtcatgaagtctttgcctatgtctgtgtcctacatggtattgcctaggttttcttctagggtttttatggttttaggtcttatgtttaagtctataatccatcttgagttaatttttgtgtaaggggtaaggaaggggtccagtttcagttttctgcatatggctagccagttttcccaacactatttattaaatatggaattctttccccattgcttgtttttgtcgggttggtcaaggatcagatggctctagatgtgtagtgttagtcctgaggcttctgttctgttccattgatctatatatctgttttggtaccagtaccatgctgttttggttactgtagccttgtagtatagtttgaagtcaggtagtatgctgcctccagctttgttctttttgcttaggattgtattggctatatgggctcttttttgcttccatgtgaaatttaaagtagttttttctaattctgtgaagaaagtcaatggtagcttgatggggatagcattgaatctataaattactttgagcagtatgaccattttcacattattggttctatccgtgagcatgaaatgtccttccatttgtttgtgtcctctcttatttccttgagcagtggtttgtagttctcttgaagaggtccttcacatcccttaaaagttggattcctaggtattttattctctttgtagcaattgtgaatgggagttcactcatgatttggttttctgtgtgtctattattggtatataggaatgcttgtgatttttgcacattgattttgtatcctgagactttgctgaagttgcttatcagcttaaggagattttgggctgaggcactggggttttctaaatataaaatcatgtcatctgcaaacagggccaatttgacttcctgtcttcctatttgaataccctttttttctttctcttgcctgattgctctggctagatcttccaatactatgttgaataggggtggtgagagagggtatccttgtcttggccagttttcaaaaggaatgcttccagcttttgcccattcagtatgatattggctgtgggtttgtcataaatagctcttattattttgagatacgttccatcaatacctagtttattgagagtttttagcatgaatgggtgttgagttttattgaaggccttttctgcatctattgagataatcgtggtttttgggcgttggttctgtttacgtgatggattacatttattaatttgcgtatgttgaaccagcctggcatcccagggatgaagctgacttgattgtggtggataagctttttgatgtgctgctggattcagtttgccagtattttattgaggattttcgcattgatgttcatcaggtgcctgaatttcaggtggcctgaaattttctttttttgttgtgtctctgccaggttttggtatcaggataatgctggccacctaaaacgaggtagggaagagtccctctttttctgttgtttggaatagtttcagaaggaatggtaccagctcctttttgtacctctggtagaatttggctgtgaatccatctgttcctggcctttttttggttcataggctattaattactgcctcaatttcagaacctgttattagtctattcagggattcaccttcttcctggtttagtcttgggagggtgtatgtgtccaggaatttatgaatttcttctagattttctagtttatttatgtaaaggtgtttatagtattctctgatggtagtttgtatttctgtgggatcagtagtgatatcctctttatcatttttgtgtgtctatttgagtcttctctcttttcttctttatttgtcttgttagtggtctatctattttgttaatcttttcagaaaaccagctcctgcgttcattgattttttaaagggttgttcgtgtctctatcttcttcagttctgctctgatcttagctgtttcttgtcttctgctagcttttcagtttgttagctcttgcttctctagttcttttcattgtgatgttagggtgttgattttagatctttcccactttctcctgtgggcatttagtgctataaatttacttctaaacactgctttagctgtatcccagagattctggtacattgtgtgtactcattgctttcaaataacttatttatttctgctttaatttcattatttacctagtagtcattcaggagcaggttgttcagtttccttgcagttttatgattttgagtgagtttcttaatcctgagttctaatttgattgcactgtggtctgagagactgtttgttattatttcagttcttttgcatttgctgaggaggtgttttacttccaatgatgcggtcaattttaaactaagtgcaatgtggtgccgagaagaatgtatattctgttgatttggggtggagagttctgtagatgtctattaggtccgctttgtccagggctgagttcaagtcctgaatatccttgttaattttctgtctcattgatctaatattgacaatggggtgttaaagtctcccactattattgtgtgggagtctaagtctctttgtaggtctctaagaacttgctttgtgaatctgggtgctcctctattgggtgcatatatatttaggatagttagctcttctttttgcattgatccctttaccattatgtaatgcccttatttgtctcttttgatcttcgttgatttaaagtctgttttatcagagactaggattgcaaaccctgcttctttttttttttctttccatttgcttggtaaatattcctccatccctttattttgagcctatgtgtgtctttgcacatgagatgggtctcctgaatacagcacaccaaggggtcttggctctttatccaattggtcagtctgtgtcttttaattggggcatttagcccatttacatttaaggttaatattgttatgtgtgaattttatcctgtcattatgatgctagctggttattttgcacattagttgattcagtttcttaatagtgtcgttattctttacaatttgatatgtttttgcagtggttggtactggtttttcctttccatatttagtgcttccttcaggagctcttctaaggcaggcctggtggtgacagaatctctcagcatttgcttgtctgtaaaggattttatttctcctttgcttatgaagcttagtttggctggatatgaaattctgggttgaaaattcttttctttaaaaatgttgaatattggtccccactctcttttggcttatagagtttctgctgaaagatcagctgttagtctgatgggcttccctttgtgggtaacccgacctttctctctggctgcccttaacatttttttcttcatttcaacctgacaactatctgtcttggggttgctcttcttgagtatctttgttgtgttctctgtatttcctgaatttgaatgttggcctgtcttgctaggtgggggaagttctcctggataatatcctgaagactgttttccaatttggttccattctccccgtcacttttaggtacaccaatcaaatgtaggtttggtcttttcacatagtctcatatttcttggaggctttattcattccttttcattctttttttgtcttcatgctttatttcgttaagttgatcttcaatctctgataccctttcttctgcttgatcgattccgctattgatacttgtgtatgcttcacgaagttcttgttctgtgttcttcagctccatcaggtcatttatgttcttctctaaactgtttattctagttagcaattcgtatagcctttttttcaaggttcttaggttctttgcattgggttaggacttgctcttttagctcggaggagtttgttattacccaccttctgaagcctacttcggtcaattcgtcaaattcattctccatccaattttgttcccttgctggcaaggagttgtgatcctttggaagagaagagtcattctggtttttggaattttcagcctttttgtgctgatttttcctcatcttcatgaatttatgtacctttggtctttgatgttggtgacctttggatggggtttctgagtggacatgctattcctttctgtttgttagttttctttctaacagtcaggcccctctgctgcaggtctgctggagtttgctggaggtccactccagacccagtttgcctgggtatcaccagcggaggcggcagaacatcaaagattgcagcttcttctttcctctggaagcttcttcccagaggggcatctgctagatgccagctggagctctcctgtatgaggtgtctgtcgacccccgctgggaggtgtctcccagtcaagaggcatgggagtcagggacccacttgaggaggcagtctgtctcttagcagagctggagcattgtgctgggagatctgctgtcctcttcagagctggcaggcaggaacatttaagtttgctgaagctgcacccacagctgccccttcccccaggtgctctgtcccagggagatgggagttttacctataagcccctgactggtgcttctgcctttctttcagagatgccctgtccagagaggaggaatctagacaggcagtctggccacagcggctttgcagtgctgtggggggatctgctctgttggaacttccctgctgctttgtttacactgtgagggggaaaccctctactcaaacctcagtaatggcggatgcccctccctcccagcaagcttgagtgtcccaggtcgacctcagactgctgtgctagtggcgagaatttcaagccagtggaacgtagcttgctgggccccatgagggtgggatcctctgagttagaccacttggctccctggcttcagccccttttccaggggagtgaacggttctgtgccgctggcgttccaggcaccactggggtatggaaaaaaactcctgcatttagctcagtgtctgcccaaacagcagcccagttttgtgcttcaaatccatggcgctggtggtgtaggcacccgagggaatctcctggtctgcgggttccgaagaccgtcggaaaagtgtagtattggggccagaatgcaccgttcctcatggcacagtccctcagggcttcccttggctagggtagggagttccccaactccttgcttcccaggtgaggcaacgccccaccctgctttggctcactctccgtgcgttgcacccactctaaccaatcccaatgagatgagccaggtaccttagtttgaaatgcagaaatcacctgccttctgcattgatctcactgggagctgcagacaggagctgttcctattcagccatcttgccagccactgtgagagtattattaatatgtgtttgatttacttattcttattctttctcctttatggggcttacaaaaattcaacccaattaggaagagatttacaatctcagcccaagatttaggatgattcttcaagttcacacattttcttacagcccaaagtgtcacttattttttttattccagtttttaccatttcaaatttttttttctttttctttcctttttttttttttttttttttttttttttttttttttgagacagcgtctcactcttttgcccatgctggagtgcagtggtgccatcttggttcactgcaacctctgcctccccgggttcaagcaattcttctgccctcagcctcctgagtagctggaactacaggcgcatgccaccacacctggctaatttttctatttttagtagagtcagggtttcaccatgttggccaggctggtcttaaactactgacctcaggtgatccgctcatcttggcctcccaaagtgctgggattacagtcatgagccacctgtgccccacctgaaactgaaaaaaaaatttttctttttttttttttttgagacagagtctcactctgtcacccaggatggagtgtagtggttctatctcagctcactgtaagctctgcctcctgggttcacaccattctcctgcctcagcctcccaagcatttgggactacaggcacccgccaccacgcctggctatttttcttttttttgtatttttagtagagacggggttttcaccatgttagccaggatggtctcaatctcctgacttcgtgatctgcctgcctcagcctcccaaagtgctgggattacaggcatgaatgtttttgtatttttagtagagacgaggtttcaacattttagccaggatgatctcgatctcctgactctgtgatccgcccaactcggcctcccaaagtgctgggattacaagcatgagccaccctgcctggccgaaaaaaatttctttaatcatctaatttagtgattcaattctgtacccacacccatctacaatggcaactggtttcttcattgtctaacttgtgttgaaggggttctacactttctaagttcttttagctgcctcacgaccaatatttcttattcttttgctgttccttaaatttgaagaagaaaattagatctcagtttcaagaggtgagagatatgagctcatttcttcttgttgttgttgttaatttcaaagactgtgtgcacatgaggtcatttcttaaagcttgtccatattctgatttgcatgttctgtattcaaactcatcagtctaatattgtttacacaagtttcttttctttcatttaaacatttaagctatttaagagtaaattaggcctggcgcagtggcttgtgcctgtaatcccagaactttgggatgctgaggtgggagaattgcttgaggcaagggattcaagattgcggtgagctatgatcatgccattgcactccagcctgggcaacagagtgagaccctgtcttaataaaaagaaaatgaattaacgaacaatatgaaatagagcaaatgaaatataaagcactagtcataaacaataggcctatcaaaaactccaccagctggcagccttcaaaacaaatatttgtgtttaaatgcggcttctttgttctaaaatgcctaaaagtcgacgaaatcatcccttttaatatctctctgctttttatttgttgatatggaattgtagatggtctacaggtagctcatgtgtcagaaaactgcttgagcttcccctaaccatcttcaaattgccattggtttagggtaatgatgaagtctctctcttacctaataatttaatttgtgtctatattaacgggtggggcaggtggaggaaatgagaaagaggttttggtttgttttacgtaagccaaccaggataagagtggacactaaacatagggtctatcaattaggcatggtctggtgaagccaatttattctgtgtgtgtgcacttgcatgcacacttacccatacacaccaccagataatttgaaattagcacttaaatggccatttgaatttgttattaggctaatcaaacctattctatctacaatgtaattatatcttggtgcaaaccagaaaatgaccaaaaatttatccaaaaaaattatcttcatttgtttaaagtgttcattttgagcatctgaaatttctgtttaaagtcatctttgctgggtgcagtgactcgcacctgtaatcacagcacgttgggaggctgaggcaggcagattgcttgagtccaggagtttgagaccagcctggtcaacgtggcaaaactccatctctacaaaaagtataaaaattgactgaacatggtggcatgctcctgtggtcccagctacatgggaagctgaggtgggagggtcacttgagcctgggaggtggagactgcagtgagctgagatcgtgccactgtactccagcctgggtgataggagtgagaccctgtctcaaaataaataaataaaaaataaagtcattttaaaaaattttatttaaagagaatcatgttggccaaacagaaagggatttttttttttttttttttttttttgagacaagattctccctctgttgcccaggctggagtgcagtggtgtgatcttggctcactgcaacctccacctcgcgcgttcaaacaaattctcctgcctcagcctccagagtagctgggactacaggtgtgcaccaccatgtctggttaatttttgtatttttagtagagacagggtttcgccatgctggccaggctggtctcgaactcctgacctcgtgatccacctgcctcgacctcccaaggtgctgggattacaggcacgagccaccacgcccagcaatggatttgtttctaattattaggatgattaggaaaacttaatatgttaattatattatgatatttgctagagctctaattagaaatattgtttctaatttgtattttgtccggaattctaagcattccttattatacttgctgcatcatctgtttgatgaattgcttttccctttaatacttttaaactttcaatcacctgaaaaagctggatgttatctaaagccttgtggatgagttgccagaaatctttggtataaatcccagtatggcttctaatgtgcatggtgaccttcaacaagtcacagagtcacagaggctcctcatcagtaaaatgaaaaggctggatttggcaatctctaaatccttccagccctgagtttccgtgttaactcttcaacaatagtggaaagcttagttaccttgatcattcaaggcagatagactctgtgtgtgtgtgtgtgcacgtgtgtgtgtgtgcacacacacgtaatgtgcctccagtgtaactgaggaaataatatctagttgctgtttgacttggtgacaaacggtagaaatagatttctttatatttctttgttctctgtgtttgaatttttatgtagcaagaggctttacatgtgcagtaattccagtgtatcaaaacaggtttgtcagggacagaaatgaattggtagtctgactggtacttctaattgcagaattatctagtagcataaaaatggctcatggactgacacatttgtcactagctaaaaatttagcttcaattcaatgtactttaaaatataggagcatttaatagtaacaatagcaataacattatgtagtgctgactataggccagacaccattctgagggttttatatctatcagttcatttcatccttgcaagttgttgtggtatgcactatactttgtccattttactgatgaggaaactgagctaaagaaagatgaaatgagctgccccatatcacacagtactaaatgcggagctgggttccagggatttcttgctcttactgttccctactgctgcccttggtaaatatctcattcggccaggcatggtggctcatacctgtaatcccagcactttgggaggctgagcagggtggatcacttgagatcaggagtttgagaccagcctggctaacatgctgaaatcttgtctatactaaaaatacaaaattagctggatgacacgcgcctgtagtctcagctactcaggaggctgaggcaggacaatcacttgaacccaggaggcggaggttgcagtgaactgagattgctccattgcactccagcctgggcaaaaagagcgaaactctgtctcaaaacaaacaaaacaaactcgttataggaatgcctggctgggttgacgtctgagtggaggcaagggtctggtatgtgctcttgtatcttctcttacagttcagtggaactttgaacaagtcatgtaatctctccaaaccagggctgtccaatggaaatagaatgtgagatgcaaatgtgagccacacatgtaattttaaacttcccagtagccatatttgaataaagtaaaatgaaatatgtaaaattattgttaatatatgtcttaagtatattatttaaatatattcaaggccgggcgcggtggctcacgcctgtaatcccagcactttgggaggccgaggcgggcggatcacgaggtcaggagatcgagaccatcccggctaaaacggtgaaaccccgtctctactaaaaatacaaaaaattagccgggcgtagtggcgggcgcctgtagtcccaggtacttgggaggctgaggcaggagaatggcgtgaacccgggaggcggagcttgcagtgagccgagatcccgccactgcactccagcctgggcgacagagcgagactccgtctcaaaaaaaaaaaaaaaaaaaaaaaaaaaaaaatatatatatatatatatatatatatatatatatatatattcaaatgtaatcatccagcatataatcaacaatgaaaattttcagtgagataccttatattcattcactatccacattttaagtacacaatggctccacgtaactactgggtaccatattagacagcacagcaccgaaccctggagagctactgtaaaatgagaccatagcaatggatcatcactaaaaccttagatctgaaattctagaaatctatcatgagaagcacctgtgctccttaagtagtttacctttatgagatcacttgtttcttacctgcttcagtagcacggagaaaacattttaagatactaattcaacaatgaaatgatcctttaagaatcacaaaggcaaagcagtgtcaagagaatgtgtgctatgagagaagattttcagaaagcagccatgctttagtgggttttgttgttgttgttgttttttaaatcaattagtccttcaaatatctgagagctttctgtgggctaggtcctattctaggcctcaggtacttagaagagaacaaaggccctggtcttatggtgtctttactgtgatttaacagtaaatagacatgaaggatgcctttgggttaggtaagtactatgaataaagcagagtaagagattagagagtggaggctggagacctgggaactggtgggcctaattttgccaggagtaattctctgaagggtgacaatggaggggagactggattaagagatggtataaactatatgaagacccagggaacaatgtaccaggaagtgactgggcattctaggctggggagacagcctgaggtggaaatgggcttggtgggtttgaggaagaacaggaacgcattgtgtttggagttgagcaagagagagagtgataggcagcatggctgggaagtaggagtttggattttaatttaagtgttaggggaggccaagaagagtcatgattggcgtggagaagtgatttgatggtctttttaaaaagaaagctctgattgctggacagataacatgtggtaatggtggaggcaggaagaccagttgagatgttatggaatgtccaggtgacctgtcatggtgacttggactagcataaaagtgaagggggttgatcaaattggttagatttgatatacgttctgaaggtagagttgattggatgtattggtagatggcccaggagtatgcaaggatgtcatcaggatgactcccaggtttttggctcaggcaactgggtccttggtagtgtcacttactgagatgggtgagagaggttggagaatggatttggtggagtgagggggtggaggtagacagtcaacaaacagttctgtttttagacattttcaggttgctacatctttataattgtgaatatcccattcacaattataaccacattgtggctagaggccgagcgcagtggctcacgcctgtaatcccaacactttgggaggccaaggtgggtggattgtgagatcaggagatcgagaccatcctggctaacatggtgaaaccctgtctctactaaaaatacaaaaaaattaaccggtcgtggtggtgggtgcctgtagtcccagcgactcaggaggctgaagcaggagaatggcgtgaacccgggaggcggagcttgcagtgagccaagatcgtgccaccacactccagcctgggcgacagagtgagactctgcctcaaaaataaaaaataaaataaaaattgtggctagagggatttaacatctttatctaacacatttggagaagggactttgccctaacacagagagctggaggtggagttattgtttcatcaaggcatggactcaggataaggatgaggcctttttgatgcttttctttggatagtgatgttagtgacagaagcaggaattatgacgtagagtaaataaaaactttactgctaagaggtcctgtttctgtgcttaggaaagagctgtttccaaagtttgtaatcacctgctgagcatcagcatgcctgtacctcgtgtgtaatactgaaatattcctatgtctcttggtaaatacccactgcccctgagtgcccccatcttcctgctgctgacttagccatcagagccttgcttctggtggtactcctgacctccctctactcagcacataataagtagtgccttgcacagcagttagcttccttggcttcgttccagccattacagtggaacagtatccgttctgattagtcagtgcccatgccatgccattagcattgccaaatcttttgagtatcaccaatggttctacccatgggtagggtcacgcctaagcaatgtgaagttggaaagagtaatcttaatgaaccagccacttccaaatagtcaagaatgttgatgtccttgatctcttgaatgaattttaggtttccattctgctttaccattctgtgaatactgcacaatgtgtgctatggtagccagtgtctgggttgacaaggcctctcatggtttacttgtatcccaacataaatgcgatagattgggcattcctcatcctatcctattgcaaagaactctgagatttcagacaaaccctgcatgtatagcatgaactgtgggtgaagaccaagatatgaagtatttcagtgaccataatgcaacaacaacaacaacaacaaaaatcttgctctttccctttgactctatgttatctactttgggatttctccaaaaaaaaaaccccaaaaaacaaaaaaacaaaaaccaaaagaactgatgattctgttggacttggaaggttcgcatgcaaagtgaagtgttggatatggtaaaattcttcactgattatttaaacgtgtgtgtgtgtgtgtgtgtgtgtgtgtgtgtgtgtgtgtgtgtgtgtgtatttcattttcaaccaccagcagtgggttgggatggtctaagtacagaaatgtgtatgatgataaacatgttgatgaaaagacaaaaagcttttggtcttgggtggggaggagtgtgagtttggaccctg

SEQ ID NO: 458 - DNA, 30992 bp, Homo sapiens
  source 1..30992: mol_type = other DNA
gcttgaatcccggcgcctcagaggactatgaggcgggcgccaactgcttgggccgcagggcgggaggcagcgcgggagtggggcgttgaggggccggcctagcttggggctctggccttgcgtcttccgaccgaatcaccgctcctgagcccggtgcggggctgccgctatcgcctggccgtgggtgccggagcggccgggttgcgactcagcgttcttgggtgggcgcgggcggcgtctccgcggcgggcatcccccgaggccgccctcgggccatgatcgactccgtgaagctgcgccgcgacagcgcggcggacttcttctcccactacgagtacctgtgcgcgctgcagaactcggtgccgctgcccgccgtgcgcgcctgtctccgggagggcgtgctggatttcaacgccgaccgcctccgcggggtggactgggcgcctctgctgagcaccctcaagatcaataaagacctgcccttggtctccatcaagagcttcttccagccctggctgggggacacaggtttgtagttcccgcctccagggcccctcagtcggtgcggcgaagtgggtttttaggtgagtggtgtccattgtcggggtatgtgtgcaatagaaggggtgtgcggcctggacactcacgagctaggtgagtggcttaaggtctctagggcttcagtgtgctcatccgtaacatgggcttaataacgagacccaggttatgtgcgccttcgcaaggattccctgcgctgctgatgcctgcagagctcttagcacagtttgggacatcattaaacatttgacagatgttacctattttattgaatgactttgatttgcctgatagagaactaagcaggtaggaaattaatacatgtcagcctttgtctttttttttttttttttttttttttttttgagacactgtttcactctgtcgcccaggctggaatgcagtggcaagatctcggctcactgcaacctccgcctcccgggttcaagtgattctcctgcctcaacctcccgagtagctgggattacaggcgcgcgccaccatgcccggctaatttttgtatttttagtagagatggggtttcaccatgttagccaggctggtctcgaactcctgacctcaggtgatccgcccgcttcggccttccaaagtgctgggattacaggcatgagccaccgcgcccggcctgtcttcattttttaaggtgtatataagaagtttgtaaagtgctttacaaatacaagccatttgtaaatgtatagtggtataattagggatccagactctctgattattcggaaaatatgttaggtcaactatgatatatgacaaaatgctgttattcctttgagcacttagcattttctacataatggaggcagcttcctatagacgctagctaggtaacaggaaggaacagtttgtgcaaaagttttggaaataggagagagtatgcaagctgagttacaggactggaatttaggtttgagaaagagcagagagagttgaggctggaaaccttgtgggggccaaacagggagggtcctcgtttgtcctgtcatagagttggatgtttatcctgaaggttttgggaaaccgctgtaggatgatgagatggaatttccgtaggagctcagtctagcctccatatggaagacaaattaaaattggaaggatggtgaattgtaatctaatggcccaaactaaggtatagaaaagaagggctggggccgggcaccgtggcttatgcctgtaatcccagcactttgggaggccaaggcgggggggtgtggatcacctgaggtcaggagttcgagaccaggctcaccaacatggtgaaaccccatctgtactaaaaatacaaaaaaaaaaaaaaaaaaaattagccgggcgtggtggcgggcacctgtaatcccagctacttgggaggctgaggcacgagagttgcttgaacccagaaggtggaggtcgcagtgagctgagattgcaccgttgcactccagcctgggcaacaagagcaaaactctgtctcaaaaaaaaaaaaaaagaagggtaggatttcagatatctaagagaatggatgggcgtggtgactagttagaagaggggggcagcaagtatgggtgacagtttacagcagcgtctgtaagtgaaacacagcagcgtctttccatgacacagccgagttaactcgaatgagattgggggtgggaggaggatctcagtttgtctttaatgttttaagaggggcctgtggggcatccaaatgtgtctgctaggcagatctgggcccaagatttaggctttgtgggaggacaggtatttgaaggcatgggagggacctagattacccacaaagaagatccagataattgtaggtctgaaaggtgttttttaagtggatatggacgtgaacatgtttataagctgagagaaagagggagggtgtgcgatctgggagaggaaatgattattgatgtatttaaaaacaacctgaccacttgtcgtgtgcccggcccttttctaggctctggggttagcaccatctcttctgcaaggacagttcaacacatctgcttctgaaaataagtcagattattctctacatctcattcaggtgcaggaactgttctgtacctctgaatggactttagttaaccaaaataatatcaggaaccaggccaggtgcggtggctcacactggtaatcctaacactttgggaggccaggagtttgtgactggcctgggcaacatagtgagactcctgtctctacaaaaagtaaaaaatattagctgggcttggtggatctcttgagcccgggaggttgaggctgcagtgagccatgattttgccactgtactccagcctgggtgacagagcaagaccctgtccatgaccctccccctacaaaaaataaaaaaaccaggaaccaaaataaattaaagatgggagggacctcagagtcaaggctagcctactagatcttgcctaatattttgcactgaatgtaagaaaaatgtattacagaccattctcgtcagatattcttcactgaaccttctttatctcttgcatctagtgggtctaggttgtagattttaacctcctacatattgcttgtccatccttaattacattttgcctggactattgcagacgctcctagctagttttgctgccgttgagcttggtttttctcagttcatctgcctactttggttcaagtgatctttcaaaaaggaaaagacatgcttaaagtggcatgcccacgcaggaccagtgtgtattggttgcttgtgttctgcacagaggcactgaaatctcagctgtgttctgttaagcctcctggggttagttggtcttgaggaaggggagctttttctcatttcctttatctctttgatactccaacagtgaggcacatttttctaacctgctaggggtatccttaatgtgtcagtggtagccctgatcctcatcacctgtgaggtaaaagtgaactctcctaggcttgcttctccctgcctctttgtaaatttctgactcttccggctacggctctgggctttagtcggatccacctgcagttttccagtgcccggcaggtgtcaggcttagatgcctttgctctcgctgctccctctggttaatgcatcacccactctcaccccatgttgtcattctcatctttctagattcagcttcaggattatcttgaagccatcctttcagtgcaacttctttgcttccataagaacctctatgtacatagtttggtatatcccatgtggcttgagtttacatgtgtctgtgcttaagaggactttaaaggacatggctcatttctatgtcttagcacagagcagatgtttttgaatgatacattgtatgattgaagtcactaactttcttttatctttgttttaggttctgacatgaataaattttgcagaagtcgtgttcctgcgataagatacaaagatgtgaccttccagttgtgtaaagctcttaaaggctgtttaagtatatcaagtgtgctaaagaacctggagctaaatggactaattctgagagagagggatttaactattctagcaaaggtaagctttgtctcatttggcttgtagacatttgatagttgcttttagaggaaaaaaaacctcaataacatttttaacttttccccctcattaaagggattgaataaatcggcttctttggtgcacctgtctcttgcaaattgtccaattggagatggaggtttagaaagtgagtttaaatctcatttaactcttgtcctatcaggctggtttcatgtttccctacatgccatgttaattcctgtctgtaccttttttcttactactgcctcatatgcttgttcaaaccttggtccagtctcaagtctaccatgaaagcttggcatgctgaatgtaatctgaactaactttacttaagtttgtgttaaaccacagaccacacaaatatataccatctggtattctctgttttttgtgtttgttcatcttttagagtttttcttcaagaaatatttatgggaaggaaatagcaaaatgtaaagaggccgggcgtggtggctcacgcctgtgatcccagcaatttgggaggccgacgtgggcggatcatgaggtcaggagattgagactgtcctggctaacatggtgaaaccccatctctactaaaaaaatacaaaaaaactcaccaggcatggtggcgggtgcctatagtcccagccactcaggaggctgaggcaggagaatggtgtgaacctgggaggcagaggttgcagtgagccaagatcacaccactgcactctagcctgggcgatagagcaagactccgtctcaaaaaaaaaaaaatcatcattactttaaataattaaaacatatatacaatcaattttaatgcactgtggtatgttccaaaataggaaatataagcaaagtgctgtataggagcatataaaaggctgacagacttggggggaaagggttgggatcatggaaatagtcacagaaggtgactgttcgttgggatcctgaagtcttgtgttcgttgtgtgaaatagtggtctggaggggtaaggaaacctgcatttcaatttgagggagcagagagttaaaaggcctctgtcttctattgttctagtacattaggtgctctagtataacacctaataaaattctgggtttatagttgacactgaattgttggttaataacagattgaggtctgctcttggaaatgaaaataggaagagttttattttttttatgtttttctttcagatgtctcaaaaagtatatagaactttactgtggtctggagtaaggttgcaatattcagtctattcaattttggcatctaaatagaattgaactattgcaataaactggagtaactctttgttactgacttattttagaatgtaccaatcagttgcttaggtagattgtaaatagtgattttaagaatacaactataaaatagaaaagatataagaagagcaaataaatcaagactgactaggttgtatatgctcttcatcttattgtatgtggtttttttttccattttagttatttgtcaaggtataaagagctctatcactcttaagacagtcaacttcacaggatgtaatctgacatggcagggagcagatcacatggccaagatcttaaaggtaactttatgttccaactttcatgaaaatgtgttatatgattgccacacgttaatattttgatacaagacagcagttatttttgtcttttgatacatatgggcattgcagttttagttttgtttaaagaatgtgaccaattttcagcctggggttctaccatttattaaaggtagtatgcttaatcttagaaatagaagacctaaaatataataattagatttttctgtaaatacagtttgtaaaacagtaattttaaaggtgccttaacaactttatagtggttattactactgtatttaggataaaattacataataatgtgacatgaagcctttttagtaatttgatggtgtagatcggggtagtcaaactatggcctgtggaccaaatctagcctatcacctatttttgtaaataaagttttgaaacatagtcatgcccatttgtttacatattaactattgctacaccctacactaggagagttgagtagttgcaaaagaaactatatgacccacaaagctgaaaatgtttattttggggcctttacagcgtaagcccactctccgtgggatagataatggttactcatgtggattctgaagccagatggcctaggctaaaacccgagctctctcccatttaataacttgtgaccatgggcaaattagttaaccgctctgttcctcagttttcttatccataaaatgtgtataataagaaaacctactgtgtctgtcattgttaggatttaatgaactaatgtgtataaaatagtgcctggctatctaagtgtttgctgttatttcctcttattgcttttatacagttattatgaatagcaaatgacactgacagttttcatttgacggagtcataggagctttgaatcttttgtttcagaatgtaatgagatttttttttctcttaaaatcagtgtttcctgttaccgaaatttactttatggataaagagaagtgattatgtctgtaagataatacctgtggttaaaactcaaaccaccaatttccgaaggcatatcaaccttgctttgtatattctaggcctctaaatttggtgtgcataccctaagaaatatgtgagatcccttgggttaggagaagaaaatattaacctctatatttttgtatcatttaaaaaatacctattgtttctgtttgatttgtaatatacataaaatatgtatatagaaattcctgtatatagtttattaataaataacttacatgttaaatgtttacttgtgggatgtccagtcaagtgtttagagaccactggaggacagaatgatatgatttagaggctcagcaatgatagaatttagaaccagtaccttcacttggcatataaagaaaataaaattcttagaagttaactaagttgtcagtttacataaagcaatcagtaacaggtcattagtggttagggtcacatagctagtcagtgacagactagtatctgggtcactggactccttactcaaaatctactatttaatcagtctgtcagattaacccacctggcatatgtacctggtgtgtgtgtaaagctctgatgtaatcagctgtacttagttccttttagtgttcctatctctttatccaagtgtattaatttcatcttattaaatctttgaagtatcagaccatgagaaggcatgaagaaacctgggctgagagtcttcgctataggagacctgatcttgactgtatggctggcttaagacgtatcacactgaattgcaacacacttattggtgacctaggtgcatgtgcttttgcagactctctcagtgaggatttatggctgagaggtaagttaaatgaacttgtaaggtggaaaatattgaattttttgatattaaatatgcttaactcttggcacagtaatgttgtccgaaggttttttaaaaagcctcttttttctaataggttttattttgtttttaagcctttataaaagttatatatattctttatagaaaataccaagtaacaaaaaaaaaaaaagtacatataatctcaatgcctagagataaactgttcattttggtgtatacactttcagtattgttttttcctgcagatacatttgtgtgcttagagttacaagaacagaactatagtgcacttaccattttgtaaccctgctttttttatttaatgatgtatcatgtagtactctattatattgaggcataatagtttaattccctactatttgatatttaggcagtttgtgcttttcccctgttataaacaactctgtagtaaactccttatgtatacatctctgtgtccattgaagttactttttttttttttttttttttttgagacagggtctttctctgttgcccaggctggagtgcaatggtgtaatcataccgcgctgtagccttaaactcctggctcaagtatcctcccactataccctccgagtagctggcactacaggtgcacaccaccatgccaggctaatttttgtggagacagggtcttgctgtgttgcccaggctagtttcaaactcctgggcccaaacagttctcttgccttggcctcccaaagtgctgggattccaggcatgagccactgtgcccagcctgaagttactcctgtaggataaattactaaagttgagtaactcagtataatgtatttcttaaagacttttgatgcatgtcaccaaattgcctttcagaaatgctgtgccatattatagtctcataaatgctggattgtgtctattttaaaaccttaaactttacaaaaatgagaactcccctgctttttcttttttgatgcaaatgggattggtctctgaattttacagcttttttcactcagtctagcatatcttaaatcagtaagtttacatttaccatgtcatttttagtgactcttcagggttccattatgttaatatgcaatagtacacttggcttatccgttcctattagatatataagctatttccagtttttcattgttataaacagtactttgatacgtgttgttgcccgtgtctcttataatttccttctggtaaattcttagaaggagagttgctgtgttaacagagtctgcacattttaaaggtttttttaaaatgtgaccttcgccaatctgatagaagcataatcacatttaattgttttagtttatattcatttgatttactagtgagatttactggctatttttattaatttggctaggtggataattacatcctatgctcattcttctgcagcaagagtttgtaaaggttttaccatattctatcagatccatatatctgacttatttctgtgtgtcttgtggtgtcttagtcagttagggcttcatagaatattctatattatatatagtatatattatataactccattatagaagcatataacagaattatattctgggtggcttaaagagaagacattcatttctcacagttctggagtccgagaagcccaagatccagatgccagtagataggtgtcaggtgagggcattctccctagcttatggaaggcttttatatccttaaatggtggcgagagagaactctagtctcttttttttcttgtaaggacactaatcccatgatggctccactctcaagacctcaactaaacctaattacctctcaaaggccccaattcctaatactactaccctgttgtggattagggtttcaatatacatttttggggaatacagacatgtagtccataaaatgagattctgaaagacttcagttattttaatgtaatggtatacacgtgcttttgctctgatgtaatctttttttatgcctgtacttttgtgataatccttttgagttgaaatgagtagattgttcagcctcagtattactagtattcatgagcatttgtttagttctttgaccttttacttgagagagagttcttgaccattattttttcatgataggtttttagtatataatctctataatctctattcacacattctttggattcattatttctatctccttagagttctttctttgtcatttttattctaaaactaacagtttacatttttgtattttcttttcacttttttaatgtaattttttgagagtcacttggaatttgaatttgaatttgatgatgaatctagtgcaatttctgagctccacccagtttttgcctgtgatgtttacactgccactagcatccttgttaattatgaacaaatattcattctgtgatgttttatgtagagttatttttcaactctgtaattgtaaaatatgttgggtaatttattggtactaaagggagggtaatcatgacacatctatgaagagggtttcttttttgtattatgtgtgtgcatatggttttctatttttattttttcaatacccaagattaaaaactggccatgagtagtcttgggcaggagtcttccaggcatgaataagtgggagttgtctgtatgttaaatctgtatagaattggccgggcgaggtggctcacgcctgtaatcccagcactttgggaggccgaggtgggcagatcacaaggtcaggagatccagaccatcctggctaacacggtgaaaccctgtctctactaaaaatacaaaaaaattagccatgcgtggtggcgggcgcctgtagtcccagctactcaggtggctgaggcaggagaatggcgtgaacctgggaggcagagcttgcagtgagcggagatagtgccactgcactccagcctgggtgacagagtgagactccgtctcaaaaaaacaaacaaacaaacaaaaaatctgtatagaattagcaagtgaccctttgtctttcatcgaaagctcttgacctgcaacagtgcggcctcaccaatgaaggagcaaaggctttgctagaggcccttgaaaccaatacaactctggtcgttctggatataagaaaaaatccactcattggtatgtcgctacaatattttttattgactaacaaatagcaaaagaaaaagaatttctcatgtattgacagttttgaaaacttaatgtgtttccttccctaatcttacacttttgtaatcttgcactttcttatgtttttagtagataatttactgatgaaaagagttgtacttaaattgctcttggctgctactctgaataggagtgaacctagataataaatctgcttccaccaagtgcattattttcttcttgtggaacttctgaattcttggaaatagtatttcattcatttgttgatttgacaagtaatttttgaatacttctatctgctagatactggtttaagcactaaacatacagcagtaaaccagctagacaaattcttggtctcatagagcttacattctagttggggagttatacgtaatgtaatttagatagtaggaagtgcaaaaataccgtaaggtaagaagacagatgggggcaggtgggactatattagataggttttttaggggacagcttcactgaaaaagggacatttgaacagagacctgattaggaggggaacaagccgtggaagatgcagataaagtaccttccaggatgaggaagcaatgaatatgtagttacataggtggcagggtggatggagtatttaaggaaaagcaagaaggccaatatggttggggcactgagtgatgaagagactggtatgctacaaagtcagacaactagccaggggcctgatcttgtaaggtttgaaggtcacggtaaggacttagataattctaaatgagctgaaaaccatgggaggattttgagctggtaagggttatattccaagtagtaattcaatcagatgacttggtgtggagaatacacttgtagggggctataaaagggaaagagggaggccagttaggagactcacactggttcaagttagagatggctatggcttcacttagggtggaaggttggaggtggtaaaaagtggttgaaacaaggtgtagctaacaagacttgtggggtataaaggaaatagtaatttttttaaaaagtcctaggtgattttgcatacaactgggtggtactgtttatagagaaaaggaggctgtggagaagagcagctttgggggcgcatcatgactttgatttgggtatattaggtgccttttaagcatctaagtatctggacagtgtttaggcttttgatttcctatttagaggtatctaaagctactttagttccaaagtgtttacatttgatctttgctgctgccaaaatagtagccatcagggacaatatgtgtgtaggaatactttgtttttgaggaagaagttagaatactcaaagggggaaaaggtatttaattacattatgtggaattcatattcaatttcatgggaaaaagcaataattggttggcttttgtttttaaatgggaatagccactcattgggaaataattactataatttcaatttttattttactttagatcattctatgatgaaagcagttatcaaaaaagtcctccagaatggaaggagtgccaaatcagaggtatatcatgttttatttctccagaaagaattcttatttaattgcttttcttctgggatctcactgtactgcccagcctggcctcaaacttctgagctccagtgatcttcccccttcccagcttcctaggtagctaggactgtaggtatatatcgttgtgcccagcttttcgtctgtttttaataaaatgaaactattaaggcacttttctgccatcttaaatttacagtcaaatcaaatgtcttttctgtttttgtaaataccgtatgattctttaattttgggtcccagaactgctgattgcaaaccttttattaacatagagtatcttaacaatttccatttaagatgtagccctcataaatgatctgtaactgaaatatagtgtttattctgtctcttttagtaccagtggataacttctccatcagtgaaggaaccatccaaaactgctaaacagaaaaggagaactataattctaggaagtggtcacaaaggaaaagctactattagaattggtaaccttttctgtcttggctttttaatgctactagtgttctagtgtgttaaaattaaaatctcttctcattgtatgatattgacagtaacaaccaatattgactccgtgcatattatgaggtctgtaattgttctgataagattatgagaatttatggaatgtagaaatagtaaatgaatcattaggaaagggatgctagtgcttccatttaaaaaattacccttatttgtttttcatacaatattcatcattttggatatgttttctgattcatgattacttttgatactttgcaattgaaatttgggatgcactttgatgacagttttagcagtgcttttgtatgattttgttgttaatgaagaattatcctttcatacgatagaaaacaaaatttcttcccagttccattttttttcccttgtttcctcctccttccttgcaaattcttacccaaagttgttgaattaggtagcaccttgcttctttcaatgatgaaataaccttaaaatatatgtaatccttataaaacaatactgcaggtaagtttattacccagagatggaacattttagacaaacattccctaaatgtttgctatttatggtttatttaatctgccaaataatagtctagaattttgaaattgtctataattttgtgaccaagaataatgaaaaaagactttataaactgtttatcagctaatggcataaattttacattctcctgaatacataaatttggtataatctagttctactgatattttctttttttttttaaagagtctttaacttttgtagaacacattatctttagtcataagtagcctttttttactgataagaatgagtgacagtggaataagttaagccaaatctaatgtgaaagtgaccttttcttgtaagtaactttgaattttgaaacagtaaaaccatgaagactactacagagaaaaaaattaatgtttttatgtttataatctgccagtttcccagaaaaaggtttgtggtgactttagttcataccctgtacattaagatcaccaaacaattaacaccagataatcttttatttggatgctactttaaatttttgaaggatatcacttgacttaatatcactgaactgtacacttaaaaatggctaagatataaaacaatttaacataaaatataaaacattagaaattctataattttagtagctagtggtatataattggacatcattgaatgagaataaaaaacaaaaatcttttttcttagcatgattaaagaaattggaaatgtgactgaagtttacaagctcactgagctattttaagagtaactttatttcttgggctttttttgtatttgcctcagtaatttggagacacagaggtaagccaaatcagtgtctggctttatatttaatagttaggtgtcagtgagtataggggttatataatttatgtaaattatgtcacattcatattgcaattacgtgtgcagacagaagataggaaactttataatttttttcatctaacaagataagtaaattagtttggttttaattaaaatttatatttgcggccgggcacggtggctcacgcctgtaatcccagcactttgggaggccgaggcgggtggattgcctgagctcaggagttggagaccagcctgggcaacacagtaaaaccctgtctctactaaaatacaaaaaattagccgggcgtggcggcgtgcacctgtaatccaagctcctcgaaaggctaaggcagaagaattgcttggacctgggaggcggaggttgcagtgagctaagattgtgccactgcactccagcctgggcgacagagcgagactcttgtctccaaagaaaaaaaaaatttatatttgcattactttctacacatactacaaacaatacacagtaacttttttttaggataattaaaaacagcacacaatgaactgagctcctatatatttataagacgtgtataaatttgtccagagaaattgcacagcacaatgtggtaattatcaataagttacaccacgggaaatatttgtcctgtattaccaaatacatgttcttgtagatgctgtcctaaagctgctaaagtagatcttacgtagtaaaatagattggaaggataaatataaccgttttaataaagttatattatttgttctcagtgatatcagaaacaattatatatttaagtgtgaattttattaatattaataggtaggtctagcttttactaccaaatatttctttaaaaaaacttgactctttaaactgaaatgtaggataagactttatacttcgttctattatccagtaggtttcatttgttttctttgtgttctgtaaaagcaaatgaacactgaaggtggacagacttataggcggcaacattggctcacctactacccagctaccttcagtcttacaacttggatagtttttacatgataaaattaatccagctacctttagtcttacaacttgaataccttttacatgataaaattaatctcaaattgaaatttttttccaattcagaaggttctgtttggtaggagtcatgggtgtatctatgttctgtccttgagattcaggaatgccaaaaatattctgagatttaataacttaaaatttctgcataatgcataatgaaatgtatcacgtataatctttcattctttgggttacatgttttatttacctttgcgtgctctgcatgtctcatatattcaacttatattttagttaaagtgataacttgttactctagacaacttatatttttatatatttattacttatatttaagtatattaaaaatatatttattcttatatttattactggcctgtgtaaaaaggtatttacaaattgatcctgatttaatggacttggtgtcattgtcaggtgcccatttgtattcttttaagagtatgcacatgtgcctattcatctgtagacctttagtgcatcttgattctttctttttaacacttctcaagtaggattggctacaaagaaacctgtaagtagtggcagaaaacactcccttggtaaagaatattatgcgcccgcacctcttccacctggtgtgtctggtttcttgccgtggcgtactgcagaacgtgcaaaaagacacaggtagggtatttttatttcctatcttttaggataaaaatgggattcaaaattctttattttggagcttctattatgtgagagttctctgcttatgtctgtagggtaaaaatgactcatgtggcttctgcctcatgaatcctttaaggaagaaaaacaaaaaataatcctaagtagggtttcaagttattaagtgtcacagcaagctgtatccctgtgggagtccagaggaaactgaaattatctccaattgtgcaggtgagaaaaggtttcatttaaagtatgtgcagttaaaccaagtcctatagggcagaaataggaatttggatatttaagactggggaaagggcattgtaaagcataggaaattgttcaatgcaaaatgataggaagtgttgattagacttaatctaactcagccaactggcctaactcattttagtgaatcaaaccagatataactagttttagccagttacctaggtgatagctattcatagtaatttttgtcagaaaagtcttttaaaaatgttgtactataattttatgcttaataaatgaattagattactataaattattttcgaatgactgacttttagtattcaagaaattggagattaacaattgcttaagaaaacaaagaggattgaatttaaataggactggaaataggtgctatgtaaaatatctgttcaattgctcagattaaattgaatatgtataatctttgttaggcaactgatgactatacttatttcacaactggtaatgtgaattattattgcataaactatagtgctgaggccccagtctttacacttccatttaataacttcacagtttcatatcttcttgagatacttactaatttcaagtcccatcttggtcacaaggagttgtgaattagagaacaattaatatcaccagttaaagaagttagattagaaatctgaaccatcctaaacataagaagtacctgcatcttcagagtcttatcccaaagccgttctgctaaattgttcaattttctccatagcagagctttccaggcccttatttggaagtgatttatctctatgcacagttatgtatggatagtatacataatactagcaagtgttattacctagtgttaactggtggtgtatttacatcaaaatataacttaatttatcgatatctttttaggggtttcccattaatcaaaacacgtgatatatgtaatcagttgcaggtacgtagttaccatgtttataatatgtaggggattggaatgggaagggtggaagatcattctctgtgctctttaaattgaatagagtcgtaagaaacatttccctccctgaagtaaattctttaaaaattttctgggttctcccggtgccacagtataggcgtgtggatatgtcacacaatggaggccttgtggtttcatctgtgtagacaggaagtcatttctctgggtccacaaatcagctgttgcctccagcaaaacaaatttgaccaccatttctcacccgacacatggagctatcatagtcaagaatgtccttaagtttaaaagaaatgttcttgggggatacatattttatatgtatatatatatttccagattctaaagctaaaacaaagcaaccagtcctaaagcctctgctttctcagagcttttctttctcccttgtcaggatcaaacacattccctgtcattctgcatcatggtattagagcaagtgaattctgtcagagtatcagattttccttttcagttgtttttagagaccgtaatttctctgtaaaagatagcactactgagatgaaggagcacctgtgtgtccgtactgcccctcgcatagccaaaagtaggggcgtgcatctcattctaccgtctaggattttcaggtactgcaggatttatgcttgtagttgatactgcattctcatgacttctcttctgtacagttatgtatcccggcacttttctttttgatctgtggactttttatgggattgtgacacagtcaattttgaaatatttggaaacgtattggacaacattccagtggcattgaaacttgacaggagaattgcgttgttattacagtagttttggcttaagaatgaggaaaagatgaggtttttgatgtctcagttttagttgtgtgcatgtatttggttaattttttttttaattctagtttttattttgtagagacagggtcttgctatgttgctcaggctggtctcgaacttctgaccttaagcagtactcctgccttggcctcccatagtgctgggattacaggccattctagtgtttattattcacaatttaaattattcttccaattctttgtgaggcctccacggatgaattttttctcctaaaaatcgtcctgtctttaagactctgtgtgtgatggtagagaataaatttctcatctgcagttgatctgagaaaaaatgtttatcctgcctccttgcttggtttatgtgaaaaaagtgtaataaaataatatgggttattttcggaaagattttatgtaaaaaagaaaaaaaaaatatgggcgattccagtattaattataaaccttatatgagagaattatttcagtgacatagcaagaataagttagtgtctttttactttgttattgattgtgttagactaaggagtagtgatagacatttatagagaatgacttaacacttcagaaagatcactttgattagatgtcctttagtatttggtattcggtttatattattatacaatcttgtcctctttttttaagcaaccaggttttcctgtgactgtgacagtagagagtccttcatcctctgaagttgaagaggttgatgattcttcagagagtgttcatgaagtgcctgagaaaactagtatagaacaagaagcattacaggtacaaagctatcactttaaagatatggagaagatcatttcaaactctagttagtttttggtgaaagcttgattatgaactggacagcttgcatgggaattctgttttcgccttccttctatctcatatcccttgaatggttctttatcttagaacaaggtaaaagggaggacgtctgcactctaagaaataaaaattgaaacatgtcatcagtaatatattttcctttccttagaatcatagaatattaattagatttagggaaggccttaataatcataagataaactcaaagaaattaagcactgaatgaatgtaaccagctgattcagggctctttgggaggccttatctttttgtgtgtgctaggaagtccacaattaatttttaaaaattaatacaattttcttttatatgaaacttacaaatatagaagtaattatcctttttttatatacttacatgtagcttataaacaacaggaatgtatgtctcacagttctggaggcaggagagtccaagatcaaggctcaggcagatttggtgtctggcgagggcctgctttctggttcatagatggcttttcaccatgtcctcacatggtggaagggcagttatcttatttttatgtgactatggaaatcactttttgattttcaaaaaatgaagcctgattttcattttttaaattaaaattagtgatatttatatagagaaattttaagataattacaaaaatgatagaatattagagggaaaaatctatagataatgtagaattgtccctattataaatgagcaccttttgtttgtagcacctaagtggtttattactaagttccagaggaaaaacaaaatcctagaatgtctgattcatgttcattattgttttaaatgtgttgtatttattttcttcaccaggggattaggaaattttattctaaaagtgattatagccattggggagaccaagaaggttaggaaatacaacttgggaatttctgattcaagatgcactgagaattctcttagctcttttctattttaagaactccataaaacgatattatcaaaatttctaacatacgtaagcctacaataatcaagataattgaagagatttcaacatatttttgaaatagagatgacagatggaaatgagtatgaaaccgatgcagtagaacagaggaaaaccatcgcctagaatatacacaggggaagcctacagctcagagggtatctaatctaactccagaaacagctccatacacagatatgcatataggaaaaaggaagggagctagaaatgtgactaacatggagggagctccttgacagtttgtatatggaagagttgactcctagccttaccttcactctcctgaaatgagatcatttggctttgaaaaacagtaaagtaactggggagaactagggtagatagtgtggattttgcaccctagaaaagggtagctgagaatatcctgccatactggctacccacttcttcatgcataacagaagctagtcatcagctcccagtgatcctctgctcccttattttttttttttttttttttttttttgagatggagtctcgctctgtcgcccaggctggaatgcagtggcgggatctcggctcactgcaagctccgccttccgggttcacgccattctcctgcctcagcctcccaagtagccttattcttaaatagaaaataaccatggttcacctgagagttgagtaaaactcacaacttgacagggaaaataaaagatgaaaaatatgtcctgataggaccagagctgattaaaagaacaaaaatactttaagaaaaaaactctacttaacatccttaggtttgttaagcacaagtacaaaagaaagatacagtgcctgtaaaaaagaaatagggtgttgtttaaaaaggaatagcagaaagcaagggtggtctcttggaaattataatggttgaaataaattcagtaggaattaaggaaatttctcagtagatagaacagaaaggcaggaatggaaaatacaacagaaatcatatgctagtgaggttgcatctaggaggtctaacatgttactgtaagaaatctcagaggacagaaaaaaatggatggaaggaaattacaaaaaaaaaaactataagaaagtttaccttagatagacacatgtaagtagacagtcttcactgtaaaatttcaagatactgaggaaagaaagaaatcccaagagaaaaataccggtcacttaaaaaccataaaaaccagactttattatacttctcatcagctaccatggatcctggaattagaaagatacctccaaagttttaaaataattgacaacctggagattcccatccagccaaactgtcaatctaagtgggggctgaataggacattttggacctcctgcgctatactttttcttgttatttgaaaacatagtcccgcaaaatgagggtataaaccaagaaggaagataataggatatcagggatcagtggtttcagtgtggagagcagcgggtctggatttgagaggcttccattggttgtgtgactgagagcttaaaaaatccttgaagcatgttactatgtattaggcactgttagaatgagggagggggaaagagagaggagaaaagagggaaggagggaatcaaactccagaggagaaagttctgttggcatgaacataaaacaaattaaactatggcagatttttgagctaccactgatgtacaaaagggaaaaaaatccacttgagcttgtccgcccttttcagtggcacagcagtcggtgaccacctatctaatttgttgtacaaaccagaacacttttcaatagtgtaagcaggtgctgttaacactaacatcaagacaagggttgtaaactggaacagtccagggcaacttaagataggcggtcactctatacaagggctgtggcactgaaactgtatagaaggcggtgtaacctgtatatacacaagagttacaatataactctgcagtaggcagtattaatttaatcgtagtaatggaaatactgccgtggtctgtagctttgattatcaatttgcatgtgatagcaaaaataactagcttgtatcagatttagcacgtattggacactgttctaagtgttttgcttatattaattcatttgatcctcagaataacctgtggtaggtgttactattagtcctacttttcagaaaagaagctaaatttaagtaagcccaagctgtacttaaatttagagttggatcagggatttgagcttaagctttctgcctgttctcttaaacactgatctatctgtctctcaaaaaacaaacagctctgcatatagaacagaatataaatattaactttaacagtgtaaaagctaagtttggaaggtggacacaggtggaaagaagggacaaaagtatacatgtccctattttacaaagcagggcattgagagaatttagagttgataaacaatttaaatttttaagtaatgtatatcactagaagttgaagagatcatgaccaatggaaaaactaatggtgataacaactttattgagaggagtggctataagtaagtaaataagtaagaatgaaccaaactcttacttagtaaagcaggaagttagtaaataatgtctaaaatccggtcatgtagttacctaatacgttatttagaactagagaaggattaaaaagaagaatggttgacttaaacctcacacacaaaaaaatccaagtagcccataagtatggaaaagtgttcagccatataggtaatcagagaaaaatgaactgaaatcagtatgagatgcaactacactcctatcagattggcaaaaaataaaattttatagtggcaggtattgtagatctggagtgtaataagaatcttccaccctgcttacaccggaagtataagtgagcacacctactttggaaagcgtttagcattgtctatcaatggaaagtatataaatacgttgggacccaacaagtcatctgagggtatatgcaccagaaaaacaggtgcaaaagggtccacgtgcattatttgtaatagtccaacctgaaaacaacccgatgtccattaagaattaaaaattagattgcatttgtacactgagaaaactataaaagtaataaaattgaatgaacaagagctacaggcaacaacagatgaattgtaagaacaatgttgaaagaaagaagatgcagaagtgtgcattcactatgattccctttgcataaagttagaagtaggcaaaactagattgttagggatgcatgcatataaaggaaatgatcattaggaaaatgaggacggtgtttaattctgggagaaggagaggggcttgtgatgagtagaagatatgggggatttcagagatgctagctagttgtacttgcaaacttgggtatatggttacatgagtattccctgatagtgtgttttatgcacttttcagtatgtatagcatattttgtgatttaaaaaacctgcttaaagaaatggttgcctctgggaagctggatgtgtgagtgaggaggagattaactttcattttaagctcttctctactaattctgttcgtatgtttattcattttgcgttgatcatattttgtacaccaggcactcttctcagttttatatgtgtgttaatttactcctttcaagagccctatgatacatgaatttatctccattttatagatgaggaaattaagacctagagttactgaacttgcccaaggttatacagctgatgggtagggccagaactttgcctcagagaatctgaatttccaaaaaataacctaaaagagaaatttaagtactaattagtaagcaaagaaatgcacatttaaggaagacagtgcacatttaaggaagacagtaaccttttatctattagagaaaaacacacattctgtctttaacacacacataaatcttatattggcagggattttctttattcagcaattatttattggttgtctgctttgtggtacacataaatgctggggataaacacttaataaaatatacttccttctcttgaatatcttgcactttaagtgggaaggtaagtcaacagagtagaggtgatatatccaagtgatagactgtttcattgccagtagcagtataaaatcttagaaatcttttggaaagcaatttggatgtaagtattgcagagccttaaaaatgtttatttgctttgacctaaaattccttttttatttattgcaagaaaattattctaaatatgggagaacaaaaccttcatgcttaaaagtggttattttatcttataatgttgaaagttggaaacagtcttgttagccataaaggaatgattacatgaaccagtaagctggctcagtagaatattttatttagcccactaaaaaagtcaaagttggccaggtgcggtggctcacgcctgtaatcccagcactttgggaggccaaggcaggtggatcatgagttcaggagatcgagaccatcctggctaacatggtgaaaccctgtctctactaaaaatacaaaaaattagctgtgcgtggtggcggacacctgtagtcccagctactcaggaggctgaagcaggagaatggtgtgaacctgggaggtggagcttgcagtgagccgagatcaggccactgtactccagcctaggcgacagagcgagactccatctcaaaaaaaaaaaaaaaaaaagtcagagttatgagttctctgattcagtgttaaatggaagaatgtctaacataaaattggatatacagtcttccctcagcatactcgggttattccatgaccccatcctccagcatatacccaaatccatgcaggcatgctcaggccccacagttgacctgtggaaccagggtatataaaaagtcagtcctccttatgaacttttgcgttggagaatacttgtttttgtttgtttgtttgttttgagatggagtctcgctctgttgccaggctggagtgcagtggcgcaatctcagctcactgcaacctctgcctcccgggttcaagtgattctcctgcctccgcctcccgagtagctgggattacaggtgcgcaccaccacacccagctaatttttatatttttagtagagacggggtttcaccatgttggcctcaatttcctgaccttgtgatctgcctgcctcggcctcccaaagtgctgggattacaggcatgagccaccgtgctcagccagaatactgtatttttgatctgcatttggttgaaaaaaatctgcatataatgggcctgcatacttcaagcccttgatattcaagggttgttgtacaggataacatttgatatttctggggttgtgttccagaaaaaatataaacttttccatgggtagaagggagaaaggggagcagctgtcagggaggaaaattactacaacactttatcattagtcgtttttaagtagtggaatgttaagtgattttactttctaattgtttcatttcatatttccttattttctttaaggagcatgaattactctttaaaggagtaatgaggagggaactttcataaatatgtaacattatgttctcacttcctccactagagggagaaacaatttcatgtaattgtgctttgatgtgatttttagaactagttaggaatggaggattttattcttctttctccaattgtgataagttttttgcttatttccatgtttggttagaagttctttgataacagttctaaatattaaaaccattatataaataataagtagaggaattttgcaatttctttttcctttttcccataaaaacttggttggctttaactgataatgaaacattaaagaatttgtagttattagggcatttactgatttttcaaatgtgttctgagtataaaaatatatgccctttgagaaaatttttgaaaatcgtgaaaaacattgagggaaataaaaaccacctctgcatggtacacacacctggatattttgtaatttgcccttttatcttaaaaagatatcaaaatattttgtcacatcattgaatgctcttccacatcagagaatcttacttagcttatggaccatctcccaagaaaaacgaccattcattaactctggttaagacccatatcattgtttttagtggctccatagagcatttcatcatagggatgtgctatttttttttttttttttaccaatcacaatttggaggcttttagttgtaaacagtcctgtgacattatgttggtagataaatctttgtccacatgtttggtgatttccttaaggtaaattcccagacattgaattggtagtatttactaaagattactccagaaagtggcaccaatttccttttctaatgtaagtgtatggtagagttccttccctcaacactctggaggaattggagaatctccatcatgtctaattccttttgtatttcaatctttaccagaaagagccctgtcccttttaattggttacttgacttttaatttgctgttacataattcaggtgtgttaagtgtgttaatagggcttcctattataagggatccacaaataagaatagaatttctttttcatagccttaatttttatttgactcaataaatatatgtgtatgccttctatggtgagctgtcataaatttattttggaaagagtggaaataaatctgtaatgtgcgaatctgatgtttttggtaattaatttccctagcatggtatgatattatacaagcagtaggctataatcctgatatctgagttcacttctggctctgtccctaaacacttggtgagctcaacagctggaagagttttggggatcatattgggaattaattataatatttactttattacttaatactaggaaaaactggaggagtgcctaaagcagttaaaggaagaaagagtgataaggcttaaggttgataaacgagtcagtgaggtaaataaaagttttcttaccttttgagagttttttgttttggttttggtttaactttaagtcatacatacacacactttataaactttaaaatgagaaaatatagtgtattgcaaatggtcacagtatgttaatgtttgtatttacttatatttggtgaccgtgtgatctgtattccaaaaagcatgttttttaaaaatgtaaaaattgtagtttgttttcttttcctctgtttttatatgactggagcttattttctgttcatgatgcatcaattcaagaatgcatttattaggcttatactgtatatacaattgcgtaaaagatggggatgagactatctactgaaggggaattaggaaaatgaataaataaggtaaaagataatggaaaaccggtaagaatgcaatgaaagataaaaatctataccatgaggactaaattaggtgaatgtgcataagagcagggcataaactagaaagttctacataactataatttattattacaaagcaagtttaaggaggaatttttgaaagtatatgcattggtttgaaagacagttaatcattcaataaaggttgagcacctgattgtataaggcaaaaggtgctttgtgaacacagtggcctttctgagaaatactagagttagacttatgtgtagtattagataaatagatttggtgtacaggagagtacatattttcaagaagcaaaggggcaatattggtaattgtacagttagtaaattgggtatgatttaggacttttaaatttatatattaagtattttactggcaaaaattagtccttaacagccaaattgtaaaatgcttactctttatttcattgtctaatttaagggaaaccttaaacagctaatttttaaatatagaatgatccaggtatgtatttaagctgttagaaatgtgatctttttgaaagataattaatgaaatactatttatattatttatgtaggaggttttgtcagttatctccaggttttgattgttatttaatatggtctgtctttactggtagagagttagattaactgcaaattaattacatttttaaaatgttttattttagtttcataaaaactattttggtgataatgagagaaaatcatgtcacacattttcaatcttcttttatagctggaacatgaaaatgcccagttaagaaatataaatttctctttgtctgaagcccttcatgcacagtcattgacaaatatgatcctggatgatgaaggtgttttgggcagcattgagaattcttttcagaagtttcatgctttcttggatctccttaaagatgctgggttagttactttctccctatgacattcgtccctccatgactttaatggtgttttgctgaggaacttgagcaatttttatagctttctgaagtcatatttactgtgtaattataagtaatacacttgattttttaaatgtggaattaattttaaaagaaatgcaaaatgacaaacctgccttggttgagggcccaatatgaaagagtaaacttatctggcttggtggtttgcacctgtaatcccagctacttgggaggctgaggcaggaggatcacttgagcccagaaattcaaggttagcctgagcaacatagcaagagcccatctcttaaaaaaaaaaaaaaaaaaaagagtaacttgtagatagagtaattggtagctgtgattcttgttaaagaccaaattgaaggtagttttaattgaaagtattcaggaatgtataggaatttttcttttattcactttgcttgttaaataagtttgaattaaaattaagtttgagatattaaaattgttattaatctgcagggtagatatagatatagatatggatcagtggtcctcaaccaagaatgattttgctgaacgaatatactgaaagaaagagttggagatagataattgatagagttatgttttgtaggtgaacggtttggtgaggaaaggaacaaacatattcttgaggactggaggaaaggtggtatagatgtgtggggatgaaggtgagaggcagtaggtgtgtggtagaaattgcagcttctactgagacagtatataaaatacggaataagtaaggaaatgaagtcaagaggtatctaatacattgttgggggaagagacagtgcttaaaggattggatgatatgatatggtttgtctcagagaataaatgtgggaaggtctgagaaattgggagggatgggggtgtagtctggagtaggataatgggttttaagattttagaagtatttaatgattgtaggtttggggaaatgtaagctgttcttatgtgcttctagtaatccttgccttttcctccttttcttctctcgaccaggcttgggcagcttgccacaatggctgggatagatcagtcagattttcaattactaggtcatccccagatgacttctactgttagtaatccacctaaagaagaaaagaaggcgcttgaagatgaaaaaccagaaccgaagcagaatgccctagggcaaatgcaaaatatccaggtaaatgaatagaacagaacttagtgattctacaagtgattagcaaaaaagggaattactaagtcagagagaaaagaataatgatctgtgcacatgctcagggaccagaagcatctttggggtcctttccaagactgagattagtaagtttgtgcccatttccttatattgtattgttgtaaataaaaaataagaaagttcttttgaaactttatgatttaaagtagactatcctcagtgaagaaatgaaagattagagaaatgattttcaattttcaattttataaatgtctattctattcatattccatctaggtttctatttgtatgcagtcagcttacaatgaaggaacactaatgaaggtacaagtactgatatagataatttttcagaataagtaattcatatataacaggcagtatattataggcatcatctagttatgggaatgggaggggcaaacctgtctgccacaggagtcccctgctgcttttcctctggccttacttggagcccccatctgccatctcagccagtctcagactggtcttggcaactgacgacttgaaaactcagtctacttataaattggatactgcttacatgtgcatagaggataggaaagatactaattttcttatagaataaggttcttttttttttaatgagggagacataaattagtaataattacagaaaacacagaagtctgaaaatgtgctggacctactcctggctatagctaagttaagttggcaatcacttggcaagatataattagggcaaaaatgacctggaaatcttctaagatcacagaataacattgacgttttgaactcgatttttaaatggatggctttgtttgtcactaaatttttgttttgtttttccttctagtttcagaaaattacaggtgatgctagaattcctttgcctctcgactcctttcctgtcccagtttctactccagagggcttaggaacttccagcaacaacctaggagtcccagctactgagcagcggcaggagtcttttgaaggattcattgctagaatgtgttctccttcaccagatgcgacttctggaactggaagtcaaagaaaagaagaggagttgtccagaaatagcagatcttcttcagagaaaaagaccaaaacaggtgaatataccaaaaaacactctgataagcaacaccctggaaaggacctgcattcctgatctgactgtcctgaaaaccagaaaagcaaagaaactagggaaactagttctttggttaatgaaccaattaaaagtaggtctttgaaaaaatacgtttctgtcaagaaagaaaatagaatagtgactgtttcatccaagacaaataaaagtaaatccagtccactagaacattctgaaagtgatactcttggatgtgattttgaatttcaagaaagcatccattctctatcacacctttcatatgactaaatcttttgaaactatgtttttacctttaaattttaataaattttcttatgttttta

SEQ ID NO: 459 - DNA, 32744 bp, Homo sapiens
  source 1..32744: mol_type = other DNA
cggtgcggagcctgtctccttcactggatcccgcattttcagcgcgttgcatcacctccgtgcgcccggttgcagcgtggacgccggatgagttgcttttaggcttgctggcccgcggggctgtccaggcacgcgaggcccctcaggtacgccctctcttccctgcaggatccggccctcaaagacgagggtcacgcacgcgttacaaccccgaaacagtagcacaagatttaatttttaaaagagcgtgtttcttcggggcttgccgttcgttcgtttccagcctcaggaatttatggtcgcctttttgaatgaggtagtgtttgaaatgagtaaaatctttttaaaatgatatacatagtataaattgatatagctgtgactttatgtataggcaatacgtatttttatatgtcttaatttattaccttcaatggctgcgagatacttattttattgatgtaccgtaatttacttcagtcaccatgaatatttagattgttttcagttatttgcctggagaaacaattattcggtgaatgtcattgtatacacattttgtacatttgcatgagtatacctgtggagtctatgttaataggatataactaaattgaggaaacgtttgagacggtcccactttcaggttacatttgacttaatagattatgaagacctgagaataaaaggagaaacagaaatggatttagaggagaatgaaaagggggaacagaaataggcttataggtaggatccacatgacttgatgattaattggttgtgtgtatcttctgagtagtgtcaggggtgactcaaaaatgtcatgcctaagtaatgggaagaatattggaaccactaatacagtagtttaaaagggaagcaattctggaaggaattatgaaattttaaacaaaacatggttttagtgtgcgtttctaaaatatattgaggcaaaataatatgaagtaatgtgaataatatgtagttaatatcagggagggtggtctcgaaattgctgaacgggaagttgaggttaaggtgacctgaaggagttgtggagcagcgaagagtcaagggcctggattataataagagggaagcaaaggggatggcatccctctgcacaacaaggttgttgtgcaaggttaacctgctctgtccctgccctgtggttgctggatgctgttgtgcatggacagctctccagtggattcgatgggccatagcaatcctgtgatttatgcatggaggctgcttctcctcagcagctgccatagcccggtcgctggtacatgattcttcctgaatagtcaatgctgttatactgagtgtttatgcttgacgtaataatgcagtgattcttaatctttggggaaagtagagactccctaaaaaacacagtaaaagctgaatgagctggccaggcatagtggctcatgcctgtaatcccagccctttgggagcccagggcaagaggatcgctttagcctaggagttgaagaccagccagggcaacatggcaaaaccctgtctctacaaaccaccccctccccaccaaaaaaaaaaaaaaaaaaagctgagtgtggtggtgcacacctgtagtcctagctacttggcgggctaaactgggaggaacacctgaacccagggaggtcaaggctgcagtgagccatgattgtgccactgcactccagcctaggtgacagagtgagccactgtctcaaaaaaaaaaaaaaaaaaggaatgatcctcttctcagaaagcttaaatcttattttctcaaaaataaaaattcagatagatattcctgaataattgttagaacagtgcaagagtggtgatgttcagactttgatgtgaatgctcatcccctagggatcttgttaaaatgcaggttctgactcgtaggtgcgaggtgaggctggtaagtctgcatctctaataagctcccatagatgtgggccatagtaggaccagccttgaagagattagaatgtgttggtatctaaaggtctgttagtcttcagataacaatcccataagtttcagttggcctctgataaggtacacaatgaacctaaataaatcagtaaatgcacaaacacttattttggtccttgaaaggctagaggttataataagagttgaagatctaaaatgccttaaaccttctgtttaataccttttaatggcatactgtgatcagaaatagctatttcagttagttaaacagcccaactgttcttgtcctgttttttcttaaattaaactcagaggcactcacacatctgaaaaattaatgagggtaaaagaaaatgaaagatactacttgtcacagacttttttttaaatgataacttgaatcaataacttgattagactatgatgcttttgatgctttcaaaactgtttgaggtatgtaggtgtcttttcctgtagagttgattaccctggtctgttgtggttcttgagtacttaagattttttatcttctctgttgttcccttattagcaattttatccccttctgatctgatactgacttggaaagctcgtcacccaccttgttagaattgttaagtaaatataaatagactttgagaaggaaaggtctcaagggtggctcactagatacttaagtcatagattgatcaagtatctctgcatgaggttattagcaaaacatttaaaaagacactttaagacttctctcattagggactaaaccagaaaggtatagggctcatccttcataaaaatcatgaataagcaataaaaagggtaaaatggaaaactggaatctatatttgaatgtgagattctcatctttttagctttaagattttttaagttttaccagttttcctcaaagagaagatgaagttacttcaagagaactgatttctgtcatgtgagtgtaggtaagaaaattcttaactactttgagatatttttcttcagattattaatgagttttttgcaccactagatagaatttccaagattttcctgcttacttttggaaacattgtctctaccattactgaatattaaataatagccatgtacccctccctcacaccatatacgaaaataaaattatttgtggcctaaatgtaagcgaaaaatctataaccttgtttaggtaatggtttattgatgacaccaaaagctcaagcagcaaaaccaaaaattgacaaattgggcatcattaaaatgaaaaatctttgtgcttcaaaaaatgccatcaagaaaataaaaagacggcccacagaacaggagaaattttttataaatcatatatctgataaaggatttgtatccaggatgtatacataacccttaaaacccaaccacaaaaagagcccaattagaaaataggcaaaggataaatatctatccaacgtggatacgcaaatggccaataagcatgtggaaagatgctcagcatcattagtccttagggaaatgcaaatcaaaaccacaagatactacttaacatctcctagaatgactgtaattcaaagatggacaataagatgtgttgggtaagatctgaagaaattagaatcctcattcactgctgagggaatgtaaaatagtacagtcactttggaaaaattttggcattttctcaaaaagttaaatacagaattatcatgtgacccagaaattctacttctagctacaaacccaagagaaatgaaaacatagatccacacaaaattttgtatgtgaatgttcatagcagcgttattcgtaataaccaaaaagtggaaacaatacaggtatccaagaaatgatgaatggataaacaaaatgtggcatattcatgaaatggaatactattcagctatcaaaagtaatgaagtatgaatacatattacatcatggatgagccttgaaaacatgctagagaaaggaaaccagatgcaataggccacatatagatgattcctataaattttcccatttatatgaaatgtccagaataggtaaatctgcagggacagaaagaagataaatcgttgccactggctatggagaagaaagaatggggagtgactgctaatggttttggggtgttttggtggggaggggaggttgaaaacgttttgaaattaggtattactagttatactaccttgtaaatatactaaaaagccactgaattgtacactttttacattacactatgtaaattgtacatcaataaagctgtaattttttaaaagtatggatagtgtcatgtacacccatgttaataatatggtactctgttattcctagatttctcttttgacagtaataaatttgatttcttttgcagcaacaaaatgcttcaacaagttccagaaaacataaattttcctgctgaagaagagaaaatcttggagttttggactgaatttaattgttttcaggaatgcttaaagcaatcaaaacataaaccaaagtatgtgaattttttaggttaagttcccttaagaatagtcatttcttagactgaattccattaaagcagatactttttttttttttttttttttgagatggagtctcgcactgtcatccaggctggagggcagtggtgcaatctctgctcactgctacctctgcctcccggatgcaagtgattctcctgcctcagcctcccgagtagctgggattacaggtgcccgccatcacaccagctaattcttgtgttttagtagagacggggtttcaccatgttgcccaggctggtctcggactcctgacctcaagtgatccacccacctcggcctctcaaagtgctgggattacaagtgtgagccatcacgcgcggcctaaagcagatactctttattaatctttctattcccagaatcccccagctccctatgtagtgggtactcagtagtagatatacattgaatgaatgagttctcaattattggggtaaattttgtttctttaaaaggtcatctgagtaaaatttatgtgtcatcctccgtgtcaccctctttccacctttattttcatcaccaccctcgtttaggcacttatacctaagtaccccatagaaggctactatagtactacctgcctttagtcctcattcacctaaaagactagtcctttaatcagtgttttcattatatgtctcctctggtcaaaaactatgagataggggtttattgccctattttactgatgagataactcaagatcaggataaataatttgccttatgtcatggaactaataaatgaaaaatggataatcaaatggaggtctctgtagctctaccacaattgtagcctttctgaaggcaggaccaccagtaaatatcaaatcaattatgtctgtcggtttcctgatcttgctgcttttctccttgaagactccactatgacaagagctatctatagaaaaatgccttaaattttggctgtttttaaatggcttgatatatttttattacctgttagatttaccttctatgatggtcctccttttgcaactggactgcctcactatggacatatacttgcgggtacaattaaagatatagttacaagatatgctcaccagagtgggtttcatgttgacagaagatttggatgggattgccatggcttacctgtggtatgtttgagtatccagctttataattttctgattttttttataagcattagattttgtcatataatatgttcaagtatgatgaacgttgactgtcagaccttctagttcatttctataatatttgtagtttgatttgttttgttttctagagttgcatagttgcagttgttttcatagggcagcgtggtaacagtcttatcacaaattttcaggaatatgaaattgataagacactgggaatcagaggaccagaggatgtggccaaaatggggattacagagtataacaatcagtgccgagcaattgtgatgagatattctgctgagtggaaggtatgttgggtttttttcagtagaatgaacagcaaatgtagttactaaatgggcattgaaatggtttatggtcccttgtgctttttttattaatttattttttgtagaaaaagtgttagcttccaccttcaaccctattacttaaacggttagcttaaactgaaccatctctcttctgacttctgtgtgcttaattggtctaactttcttgcatgatcaccaatagggaaaaattctaataagtataacatgatatataggccttttctttttttctcaaatacttttttcaatttttttaacttttcattttgaaataatttgacttattaaacaattgaaaaagtagtatgatgggttcccctatatccttcatccatctttcccagctgctaacatcttcggtaaccataatattaatagaattttcaaaagcagttgccccattaatttttatttctgaccaatcacatattgcatttggttgtcatgtctttttagtcttcttaagtatggaacatttatttagtcctttgtatttcatggccttctcacttttgaagattgcagaacagctattttctataatgtctctcaatgtgtgaggtttcctgatttaatttaggttatgcatttttggtgacaatgccacagaagtgatgctatgcccttctcaatgcattatatcaggtggcatgtgttgcggctatgtcacattgatggtgataactttgttcacttggttaaagtgctgtcagctttctgctttgtaaagttgtagtttttcctttgtaattaataagtatcttgtggggagattctttccaaatattcttttttttgtcatacattcacttattaattttaacatccatggatggtttttgccagtaataattatgcctgtgatatttgccaagtggtggttttggtagacttttataagtgaatatttatacttgtaaataacattttgtgcatgtaggatgaatgccgagaaaactggttcttaaccttacataatatgttgttggcagtatagatttacttgtaccattgattattctgttttcccaaaattttcatttgtgatgacaacagaaataaacacacattgatgtacaattataaatatcattgtctaatactgttctaatattaatattttaaagtctactgttagcagacttggccgatggattgactttgacaatgactataaaactctgtatccacaattcatggaatcagtctggtaggtttatttaaaattgtaaatatggtaaatattctattctgttgtattgataattggaaaaatgcactagcatgaatcagtttatttttgagtccatcgttatttctctgaaaatctttgggaacaggtttgtttttgaatgtagaacttttatttttatttttttgagactgagtctcgctcagttgcccaggctggagggcagtggcacagtcttggcccactgcaacctccgcctctcaggttcaagcgattctcttgcttcagcctcccaagtagctgggattacaggcgcccgccaccatgcttggctaatttttgtctttttagtagagatggggtttcaccttgttggccagggtggtctcgaacttctgacctaggtgatccatccaccttgatctctcaaagtgctacgattacagacgtgagccactgcgcccagcctgccagttgcttttcttaacattatgtgttaaatatcattcgatatcagtagatattagcattttaatgtctgcctgatgtcttactatattgatctgttataatttaccagccagtctcccaatgaaagacattgttttttcacttatttggcagacagaaactctaaaaagaaaatggcataaatgtttgcattttcagaaatagaattttgttctgtaattgtgaaactccatctcttaccaggtgggtcttcaaacaactctatgataaaggccttgtttatagaggtgtgaaagtcatgcccttctctacggcatgtaacactccactttccaacttcgagtcacaccagaattataaggtacgtgaaatgtagagacattattcagcattgagttttgtaggtggaagctgagtagttatgatcacagtaggtattcccaagtagacccagtgtggaatgttgcccacgacatccaccactttgaccacttcttactgagtgctggaaatattgccagttagtatactaaggctctgttaagatgagggattttttttccacattggatttatgatgtgtcttaatgtgataggttttgcttgttttgaccatatttttgtgcctctctgttgggttaacaagtccagctttgacatacttcctgtagtcatcgtttcttaagggttgagtaattttatgccttatctgggacctcatgatatcatttatttgttaacggtatttggaaaaaaattaatttgagatgccaaatggtattatttttcctctgatgagatagaatcagttgttgttgttgctatgattgaggtgtttagacatgtttgatgtttacagagtgtattgttataccatatctagacagatattatatactagtaagtcttctgaaatgtgaaccatctcttctcgtgtgtatactgagttgttttcagttttgagagtttatctgaccctctgtttttaaaggatgttgacttgtttggaattcttgtttcatggcctaggtttgaaaattacattagtaaaatttgcctttcaaagcacgttttatttatagaatgctttcacatatcctgtttgattgatctttgtaaatccttgtaaggcaggtatgatgatttctattatctccttaccacctctctgtgctcatgtttgtatttttttagtaaaatattttaagcacttaacaatgtagagaatgatatggtaaacacaaggtttccaaggcttacctttgtcaaatcttaatatattgctatatttggtttttgtttgtttgtttgtttgagtcagagtcttgctctgtcgcccaggctagagtgcagtggcgcgatcttggctccctgcaacctccacctacccgattcaagcagttctttgcctcagcctctggagtagctgggtttacaggtgcccaccaccacgcatttttagtagagacagggtttcaccattttggccaggctggtcttgaactcctgaccttgcgatccacccaccttggcctcccaaagtgttggaattacagttgtgagccattgcgcccggcctgtttggttgttttttaaaacacttgaatgtggacagtttcagggacatgcaaaagtaaacagaatggtataattaatttctgtaggcccattaaggcccccagcaccaatgactggctaatcttgcctcattcatacacatattctttcccactttccttccaattctgaaacaaattccagatatcatattatttcatcaagaaataatccagtatagatctttcataaataatctttatcttctttaaacattgccatgttagcattcgttgtcacaccttaaaaagtcatcagcagttacctttttgttgttgttgttgtttttgagataggatctcgctatgtcacccaggctagagtgcagtggcacgatctcggctaaccacagccttgacctcccgggctcaagtgatctcccctttcagccccctgagtagctgggactacaggaacataccaccatacctggctaatttatgtgtttctataggagtggtttcaccatgttgcctgggctggtcttgaactcttgggctcaagcagtccacccgccttggcctcccaaagtgctgggattacaggtgtcagccactgcacctagccacctttaatagtttttattttaatattctcaaattatgtaattcctgaacatcatcagttcatatttctaatggtttaatcatttcccaaggggttatattttatttttatttatttatttttttaaatcaggatctaccaagacttaaacacatggtgactgttgtcttttaggtcttgtacacgtttcagttggttatataacaagtagtggaattatcgagtcagagtatactttgttttaatttttatttttttgagacggagtctcactctgatgcccaggctgaagtacagtggtgtgatcttggctcattgcaccctcctcccaggttcaagcaattctcctgcctcagcctcccgagtagctgggattacgggtgcccgccagcatgcccagctaagttttgtatttttagtagagacagggtttcgccatgttggccaggctggtcttgaactccttacctcagttgatccacctgcctcagcctcccaaagtgcgggtatttttacaggcgtgagccaccacgcccaggtgagtcacagagtatacttaatttttagttctaatactgaggttgggaaactttcctctgcaaattaaatattttaggcttttcaggcaaagtgttctcaattttgtcaccattcttaactcacccactgtatgaaacaagtgatgagccagatttggcccaggggccatggtttgctgacctctattctacgcggtctgtatattgattgttaaccaagggtttttaaaatttttttgacttgaccaagcacagtggctcacacctgaaatcctcgcacttttggaggccgacctgggcaacatgacaaaaccccatctctactaaaattacaaaaattagctgggcgtggtggcgtgaacctttagttccaactactccacaggctgaagtaagagaatgacatgagcccaggaagttgaggttgcagtgagccgaaagtgtgctactgcactccagcctgggtgacagagttagactctgtctcaaaaaaaaaaaatatatatatatatatatatatgtgtgtgtatgtatatatgtaagtatacatatatatgtattggcttaaaacttttatttatttatttttagagaagggatttcagtctgtcacctaggctggaatgcaatggtgcaaacacagctcactgcagccttgacctcctgggttcaagtgatcctccagcctcaccctcctgagcagctgagaccacagatgtgcatcaccatgcccagaaaatttttttatctttgtagagatgggatctcaccatattgccccagctggtctcaaactccagagcttgtgcgatcctcctgccttggcctcccaaagtgccaggattataggcatgagccaccgtgctaaaaaattttaattttttacaaaaattagctgggcatggtggtgcacacctgtagtcccagctattcaggaaaccgaggcaggagaatgcttgaacctgggaggtgggggttgcagtgagctgagatcacgtcactgcactccagcttgggtgacagagtgagattccatctcaaaaaaaaaagaaaagaaaaaaattaattttgatgtagtttcaaactcacagaaaagcggagagttctttatatccttcaactagattccctaaatgttaaccttttaccacatttgctttatccttctctctttttatgggagtggggcacagtaccctttgagagtaagttgcaggaattatggcccttttcctctaaaaactatatatttcctaaaatcagtaacattgtttgaaataactggagttagaaaattaacattgatgctgtattacctcatgtgtagatcttattgggttctgcttgtcccagcagtgtcctttatagttaacaagaaaaaaagaaggaaagaaaaacaaaaaagacctacattgtgtgcttcatgcagtggtatgtctccagccttctttaatcttaaagagctctttagtctctttatgcctcataatactgacatatttgaggaggtacaggccaatagtagtgtctcttatttcaagtttgtctgatgttttacatgtgactaatggctctcgtgtcactttatttaaattgcagttggtttttgttggggattgattttttttttcctaccttagagctatttatttttaaatccttgatatttttgtgttgaaacatttccgtaaagttggagacaatcttgttcttatttaatgagctgaatttatatgggtctgttacaatttcaagtatgtgttgcttcagtaggatctttttggtattttgggcaaaaagataaccatattccagaacagttatctttttgatctaactcttgatggacttacaaaatagataatcataatactgaaacctccatcatatgttcctacttagacattactttaaaaagttaccagaggccaggcatggtgactcacgcctgtaatcccagcactttgggaggctgaggtgggaggatcacctgcggtcaggagtttgagaccagcctaaccaacatggaataaccccatctctactaaaaatacaaaaattagccacgtgtggtgacacgcacctataatcccagctactcgggaggctgaggcacaagaatcacttgaacccaggaggcaggggctgcagtgagccaagattgtaccacagcactccagcctagtgacacagtgagactccatctaaaaaaaaaaaaaaaaaagtcaccaggtgtcaaaagacattatttttgagactactaaggtgatgattaaaacattttttaaagtatttaaaaatttttttacttggaatttcttgctattttctgtttgtaagtctggtaagtggtttcttcggtttaccctgaagatttattttattcctctttaggagtagttcctttttcttaggtgtctgttattgtggatttctaaaacaatactttacctcaatttatttcaggatgttcaagatccttcagtatttgtaactttccctttggaagaagatgaaactgtatctttagttgcttggacaaccactccctggactctacctagtaaccttgctgtgtgtgttaatccagaaatgcaatatgtgaaaattaaaggtaagtgggaggctggttacttatgattaatatggataagataattttatattttggaaaatatgaaagcttacctttctttttgcatgaagaatagaattatttgaaaacaatctgacttaattagaaaaataactttaaacatttgttttcatttctaattgaaaactaacaaaacaattaaaatagtacagagatataaaaagtagaacataaaattttcttataatttccagtttatagtacatttttccacaccatgcccctgtgacagatgaagaatctaagattcagcgatgtggcatcacgtcgttactagcaattgataccagaacttgagaactttttgcctttcaaatgtcccctggtagagagttaccagtctcaacgagggcctttccgagatttaaaaagaagattggtactttgtgaacaaatataccttcaggtttggtagttttgtggcggtaaaagaaaaagagaaaaactcattgccatgaaaaaagctatggcacagctgctgtggaaggcagtgacatttcttcaaaaagctgaatgagatgacactatggcccagcaatttcacttctgagtgttttccccaaagaattgaaagcagtcttgaacagttacttgtacacccgtgttcataggagcattattcacagtagtcaaaagatagaagcaacccaagtgtctatcattggataaatgaataaaccaaatagggtatttacgtacagtggaatattattcagcctaaaaaagaaaggaaattctgatacaggctatgccttgaatgaacctggaggacattatgctaattaaaatgagccagtcaccaaaagacagatactacatgattctatttatatgaggtatcgagaagtgaacttcagagagcaaagactagtagaatggtggttgacagaggctgggagggaagggggagttattgtttaatgagtacagagtttcagtataggaaaatgaaaaggtttagggtattgataatggtaatgattacacaacattgtagatgtatttaattctgtgtaagaatggttaccatgatttttaaaaatagttgtattaaaacagtcaacttgattgaacaatagcttgtgttggcaagggaaaaatattgagaaaggaatggggaaagattgggtgccagaaaaaaggtacggagggagttttttatttgttctttcctgggagcaaataggactaagagttgacctactggaaagctgttggccacaaagaggcctggctcaggtgtctgcagctgcttctctggagcaaggacagtcccatctgcacaatttccctatgtcactggtgggtcactagccattctgtggtgagcttgacaatctcagcagccacctgactgagatctcaaaacacatcacccatctacctgtgtataactcttgtgcttggcagactttgtatctgagctttatcagaaactgtggtccccacttacaatgaagttcctgtgaggtcagagctagggagtggcagccttattcatagcagtttttcaataaattggaaaggcttttacaatgacccatagatactcatttttcttatagtgaactaaatatatgacataggctctagtaaatctcagatgtgtaatatcatagcttatgatgagagtttaaattggcctagattttcagtatcaaagttttaactgttcatacatttgctccagcttttcttttcctaggatgccccaggtatcctccagaaacacttacaataagggtacacagatgcatcaaggacattcatcatgccagtgttcatagtagtgaaaatttgaaagcaatttaagtgtctgtcaacttgttagaaataattcgtacctctataaaatagcgtcccatagagctctttaaaaggatgagaaaagtctgtatgtgctaatacatggaagtatgttgacagtatattaagtgaaaagctacaaaatcagatagaatattacctcaattagaaaaataaaaagaacttacacatttacctatatgtttgtttgtatatacatagaaaaatatccggatccatagacacccaaatgagaatgtctgagagggggtgatatgtggcacttaatttgtgagctactttgtcaatgttatttttaaacattgacatgtttaccttatgaaggaaaaaataaagatttacttaaaatggatatctgagcgataaataataactaccaactgcctaagtgcatttgatgtttttgtcattttcatgtttgggaagcagtataccatagtgttctttgcagtatttctctgtgagtactgggtacagtagaggcacatggtacaggagctcctcaggacaaaagtatgcttgatgcatgtctttggaatcagccaagttcagaatataacccaagtccatgtttttcctttttctcgtagatgttgccagaggacgattactcattttaatggaagccagattgtcagccctctataaattggagagtgactatgagatccttgaaaggtgaatattcaaatagttgctctgtgtttgtgtgcatgtgtctgtatgtgtgtctttagttttaaaaagaaataaactttgttatccaaaagcttgcattattcaaatttagttttaagtactaatactatactaagtactttgcagtcacacattacagcatgaatggctagggctaagaagccagtaaaccagaggggagtggtagcttgatgtggctgcagcctcatatttgattttaatctaattgtgagtttgcctttctccttttctagatttcctggtgcctatcttaaaggcaagaagtacaggcccctgtttgactatttcctgaaggtaagcttagggaccgctactgtgggcgctctccacaatctgattatttgatagctggggtgttgtgagaagtggaattgacattacttttatgagtgtacctgaatccagaaagtctgctttagtaccaacaaaattaaattgtttgtgtagctttcttgtcttagaggatttttttttttttttttaaaaacagggtttcctctgtcccccaggctggagtgcagtggcacaatcacagctcactgcaacctcgacctcttgggctcaagtgattcccctgccccatcccgagtagctgggactactggcacacagcaccacaccgggctaagtttttagttttttgtagagacagaatctcgctatgctgcccaggctggtcttgaactcctggaattgcaagcatgagccactgcacctggctgggattttttgttgttgttgtttttgagatggagtgcaaatatcgtgcaatagcgcgatcttggctgactgcaacctctgccccccaggttcaagcaattctcctgcctcagcctcccgagcagctgggattacaggcatgctgtaatttttgtactttttagtagagatggggtttcaccatcttggccaggctggttttgaactcctgaccttgtgagccaccgtgcctggccaagctgggattttttatttgaatatttttctcaaattgtatgaggaatcattttacatttgattggatttttaggtgtatatttttattgcatgtagtctacatatcacccagggtatttattgaggtttttgtttgtttgtttgttttgacaaagttaagatagtaatcacagtaaaacatcatgtggaaaggtaaacacaattttatttcaaggaggttaatgaggcaggtgttttaaatctaggcaccacgacagagctcatacatttagcaccttagtttcttcagagtcataaagttgttttatgtggttttattttctgacagtggagaatccacagctacagttgcaaaccctgctgtccccactcccacactctctcaccgaaagaatagtgtcaaagaggaatttctccgtccttatttaaaggtcttgaaatgagataatgagcagacctggccttatgtggaaataataatcaactggacatatcacttacgtcccatcccagaaaaaaatgttcgctgaaccctcagttgtttctgttccgtgtggggagagtctggttgattaaggagacctctgtggtttgggccctatccatggtgtgtctgttacctgccttttcacttttgtgcctcttgagtgttttcccacatttctcgttgcctacttgatagccttcttcctcctcccacgttgctgcccagtggatttccatatgttctgccctcatcccattcctccctacaggcgttagttatttaccagcaattaggacgtgccctccccagtcggtatgtggcagagctgcttcctgaccacatcctcccacattactttagacatatcctttattcagtcaaactggctcttccctttcctgcttccctgcctttctttaattaagttttcctactgtcttaaaagtctttatttttttcttatgttgatatctgctgagttaactcacccttcaggtctgaactcagatgtcctctgaaagttttctgaaatgcatctttggtttctcccttggaaaaatgtcattacttcattccattctcctatcatatagcttaacatactttgttttatgttgtattttttttattatctgaaatctcttccactggatcagtgactctcacctttctgaatcacaaaacctattgagaacccaaaaactcaaccccctgaaagaatgcacatggatacactagacaggaactttaggttaagtagaggtctgtctggaatatgcacttggtaggtattaagttgaataacacctactcattaaataagcttcttaaactacctgaaaccttcggtgactttaggcaagtactataaatcgtttgacccaggacggaatcatctgatgttcactgaaatatacctgttgtgaaatatcgagggaagctgagtcagcggacactgcctatggagcagcactgctgctcctggtggttggtatctactgacctgggtggaagcagcccagccatggcctgggtaggcccaaagtagaccctgagagacaagatgcagtgactttgtctatactgcttctaagtatagaacatgtaactaagtatacatgtaattctaaggacccatgtattctgtctttctgtttaaactatcgaagttttagcacctatcatactataacttctaaaatgtttcaaggtgatttaggttacaacaattaaaattttatggttatttttcaagtttagttttaagttccaaagaaaccgagtgctgtgatgtaattgaaaataacattgtatttgcaaccagaagacctgttccatgtcctggcttcatcattgctggttgtgtgatttggataagactaagtttaatctttgttctgagcttgctcatctgtgaaatgcaaatacagccagaatatttttaagacatgggactactaatagcttgttcacagaattataggagttaaatgtgaaaatcacttgtgaaagtactttttaccaatgcaaaaaggaaggacatcaaagggccagtttggcagaaacaagggtttgtggaaagaaatgtaaaaagatgaaagtagagtaggtctgttagcattatatgtattaacatgatgatattgctgttgcaaagaaaatgaaattgaacacatttcccctgagtattaaggtggtggagtacctgtaagtagaacttactactcgtggctcccacctgttcctttcaagatttgcctttatgactgaataacttgagctgagttgaaaggagaaagagaagcaaaacatatgcagtgattgaaaatgtaccaggaagtgaacaatttagggagcatgctttctgagactgtatcctaaactgcatagggacaaaaagttgggggagggagaactaatgaaaaacacgtttgtaaccaaggaaattagaaatttttatctgccattctccagataattatttcgtttataagtggtaactttttatttatgggaaaaatgtattgaattagcatgtttcttcccagcctgcattattctttcttttctatttctgaaaataattttaccggttaaaagcattttcaggttcttaggaaaaactgttacaaagttaacgttgtaacacagtaatgtttcatccctgaagcctgctgtcctttctttccagtgtaaagagaatggcgctttcactgtgcttgttgacaactatgtgaaggaagaagaaggcacaggggttgtccaccaagctccttacttcggtgctgtgagtagcataagtctggcaaatgtatttgagtatgtcggtagccacttttcatagatgcggagtcctgtgtctcatcatgttgggttaccaggttggcctcttttctggctcactgcctgcaagatggcttgtaaaatttgcatctgcaattccctttcatcctaagctgatttctggaaagagtgggccaaatccagtaaactctttttggtgtgcagttccgtgagttttgacaggcatctagagacgtgcaggtgcctcagccaccaagatacagaccattcccatcacctctgctgtgttcttaattaaatgttcagaagggggaatctgacctctcccctcaaaacagtactctacagttaattttatattttgactagaataatttttctaaaaacacattcctttttatgtaatttgtgtatgaataaaaacagaataacataaaggcacatgctttacagtaaaccacctctcaccttaaatcatggcactgccactaacgggcagttcctgggtaagttgcctggcctatctggacttcttttgcctcctctgtagcatggtgtagcatggtgtagcacctacatacacattcctctaggcttgatcgttttgtcagtgagagggattggaaatgtgactttgttctaaaaggcagtggcagtagtctgccctcatctgccattttgctttcatgcttaatctctgggattttttacttttatagatgtagagggtacgggtgcaatttttttacattgatatgttgtatagtagtaaaatctgggcttttagtgtaaccatcacttgaatttttattatggaaatcttgaaacatacacagaagaaaatatgataatagattctttttttcacatcatccagctgcattaactctcaatgttttggcaatctctcgttttcttcctctgtacagtagcacacttttttattttggctggaggatttaaaagcaaatcctcatcctcatgtctttcgtgtctaagtaattctagctgcatctctgactgataaggacttttattttcagtataaatatccaataaagtcagcaattccttaataatcacctaatacctggtccattttgatggaaggaagcattcttgataatactacttaagagttttaggaactagtcaaatattgttcataatcattttagggtcaattaactggtatggttaccccactcttagtagataataaaaaggtaacttcttggttttgaattgtagtgtaggggtttttttttttttttttgagatgggagtctcgctctgtcacccaggctggagtgcagtggcaggatctcggctcactgcaatctccgtctcctgggttcaagcgattctcctgcctcagcctcctgaggttttcttttttaaatgtgggtgtttgtcattaactctagagttatatctcatatatctattctcaatgctgtgcatgttaatgttatagaagattcattctttaaactatagcttttaacaccatttggtaaatttttttttttttttttttttttgttttgttttgtttgagacagagtctccctctgttgcccaggctgtagtgcaatggtgcaatcttggctcacggcaacctctgcctcccaggttcaagcgattctcctgcctcagcctgccaagtagctgggattataggcacctgccaccatgcctggcttattttttgtaaatttagtagagacagggtttcaccatgttggccaggctggtctcaaacttctgacctcaggtgatctgaccgccttggcctcccaaagtgctggggttacaggcgtgagccactgcacccggccttggtaaacattttctgagaggccttccgttgcacttgtcttcaccaggcaagggtagtgtttgatcttcgcagagtctgtgcacttgtgcgtcatcctgttgaacatcactggttctggatgcattcaggaatgctgctcttagcttaatgcactgggtaaagttacttgctccacactcagtggttcaaattgctgcacttaggggcttttcctgtctacccacatgacaccacaccagtcagcctcagcacagggagaggtgaacacagatccaggtggaagcatgtcagctttccagcttgtcttggagtcaacccagagtgtggtttcaccaacataaggcaatctctttaattttatatttaggcatcataacacagtgatgaagactatagactctggagccaggctgtttggttttgaatcctagcattgctgcttcatagctgagttacttcttggtacctcgactttcctatctgtaaaataggaaatttttggtttttcagatgtgtgtgctgctgttataaatcaaatttgatttagttttaaaacattcctgtgtggctgctctgcttatggagtagccattctttattgctttactttcttaattcctttcacttaaaaaattgatgtatgtcatctatcttctcatttagtggatactctgctacatatggaggtctgggaaataatatttgagaagactagactgggtgacctaacccctgtccaactgtgagggtctgattctccgaatggtcttgagttaccttcagtttacaggacaaagttgatgaaatgtatatgttacaatatagaacaattatcttgggaatctattacctcatgctcacacccatacatagactgttttattcttccctctcttttgccttttctcaggaggactatcgggtctgtatggactttaacattattcggaaagactcactccctgtttgccctgtggatgcttcaggctgcttcacaacggaggtgacagatttcgcaggacagtatgtgaaggtctgtaatccatatagcatagaagggtgactgttacttctgattagtctctaccatcatttataattgtattgtaattcttctaggaagttgtttttatttggttttgtcatcgcatgaaatccgtaaagacagatgttatcagttacgttcagagggtctcatatctttagaggatgcatgctgaaatttcatggggaaagatcagaaaaactccagttcatgcctcatgaagcacctttgtgaccttggggttgtcatttcagatcgaaaaactttatgaccttaaatgttgtggaatgtacttgaaaattacttaaagttagtgactaaaaataataaataatatttgttatttgtgccttttattcataacaaggtatcagattctagtaatatattgttcctaagtattatagtatgttttaatggctaaattttaattttttttaataggatgctgacaaaagtatcatcaggactttgaaggaacaaggccgacttctggttgccaccaccttcactcacagctaccctttttgctggaggtcagaagaaacaaagactgtgttgtagctagagcttccagtctgtgcttacacttactatatgtgcccattccatcttatttgtggtgttcatctcacttgtatcctttagagttggtttgggaagccaccttcttacttcatttttaggagagttgggttttttgtttgtttttttgttgttgttttgagatagggtctcactctgacgcccaggctggaatgcagtggtgcaatcacagctcactgcaccctccacctccccggcttaagcaatcctcccacctcagcttctggagtagctggaactatgtaggtggtgccatcacacccggctgatttttgcatttcttatagaaatgaggtttcgccatgttgtccaggctggtctcaaactactgggctcaaataatcctcccaccttgtcctcccaaagtgctgagattacaggcatgagccacagcgcctggtctaggagagttttatgaatggctaaaaatgttgctttcctaaggaactgtgagagaaaaatagacctgtacaaatctgttttgtattgtggccacattttttttaggatgagaagcatctctaaaattttgtaatagagtttattgaaaaatttaatatgattttaacctttaatataagaccatgctgtaaaagtatgggtgaaaatgaaatgttcagttgcatcgtgtttggtttccacattgcctcttctgtgttgaagttgaagttgacattgtttcttagataattgtcactagcagaactatttttttctactcttgttcttgtattagtttttgcctttcttactattgtggaaagatatgaccaattttgaagtcttagatgtttttatctataataaaaatgaatattagcagaaggccaagtaagtgatgatgctgtcaataagacatgaaaagtcagtcttaccgtagtgcctactagtctcagcctgagcagctatgtgtgtgtttctgcttccccagatcagacactcctctaatttacaaagcagtgcccagctggtttgtgcgagtggagaacatggtggaccagctcctaaggaacaatgacctgtgctactggtgagcagtaagatgtgtttcttcatagtgtcttttgtcatgtggttagtaagtatggtttacacttcccccaagttataattttaataacccatcttttattgggtattgtaatagctatcttttcttctgtgtgtttaggagcacaaaataattcaaataatgttacagaacagaagtaacatccttcttgtgataaagtatgtaagggagtatttttctttttaaactcattggaaatgataaaccaccatttattcgatttagggaatgaaatgaccttggaaaaatatggctgtactgccagagtttgctagccttcaataatagtcattttcagagtaaacattattttcagatatacctgcaaaagccatttgtacttactcttgttggtcctgcagtggatgatgtaccctgtgcttggctgtatggataagctccaagcacagaagcctttgctttccatagctgatatgtgtcctgcaggtgatagcccaagaagtatcatttcagcctctgggtacaaaatgaaacaaggcttgaacctgtgtatttcagatgaatgtttttcactacaagtttgaaaagtaatcaccactcttaacttctcacaaggacccaactagactctagaaaactgtatctgagtttaggagaatggggagaatctcagggcagcaaaggaaatagttataaactgtagctttctaatatttcttagcagagtggtcctgatttctcaaaagacagcttttcatttttagagctagtaagctaattagttcccctaatgtgtaagatactagatatagaatattagtaagatagcctcgagggggtgcaggcatataaactgatctttgaagtacagggcagtaactgcagtgcccaagagaagaaggggaggtctggtagcctaccctgactcagccttgtgcttgaaaaggatttctgcaaagctgaacctcaaggaataaagagtactgggagtgggagggatgcaagaggatggatgcagaagggagggaagctgcgtgtcagagggcaggcaggctgcgtgtcagagggcaggcatgggcaaagccagttaagtgagaaggattctagggaacttgcctcattgccagagcctgaaattcaagaccaaggatgaccagagaggtgactatagagagggctgctagagcagctaccaatcccctggcctgttggcctttgcttaatgagttcagaaaaactgctatggtgaggataatgtgaagactagagttgtatgggatgaggctggctaaagctaaggtgactggttagaggtatgtggcagctgtactccagttgaagaggaggacatgggaggcctgtgtgctgtggggtaatctattggatgtaggtcattgatggcagcacaaactgttgtgtgtgctatgctgtccatttagaagacattctctttgcagtgagcgccacgtttccagagtgtttggtccacaaagcgttatacaaaggctcctgtgggtattatttacatgttgaatttttccatatttttatgtgattggttatgtgatctgtttattgcagggtcccagagttggtacgagaaaaacgatttggaaattggctgaaagatgcacgtgactggacaatttccagaaacagatactggggcacccccatcccactgtgggtcagcgatgactttgaggaggtgaggcatggcagtatttccttgtgttgatttttgctaaagcattttgttcatgaaatctgaatgtggtttaaaagaatagggtgtttttttctttgcccctttcttatttcatcttttttcctctttattcctttctagaatcatgacataagataatctgtttctggggtttttaactttttttccttgaattaaatacaatttataaaactttcctctgtaaaaataaaaggatacagttttctcagggaaatacacactttaaatgttttttttgtgtgtttccccgatgtcttttcttccccctacattaaggtatactattagcttatggttaaactgactttatagatgatgaaaaaagaaaacttgaaaagaaatttaccaaagcattacagacctttaacttctaaaatcaaatgaataagaggatgtgtgtagatatatagatgtatgtggatatactatgtcctcacttaatgtcatacagaggttcttgataactgactttaggccgggtgtgatggctcccacatgtaatcgcagcacttagggaggccaaggcaggaggatcgcttgagaccagatatttgagaccagcctaggcaacataatgaggttccatctctacaaaaatgtttgttaaattagacaggcatggtggtgcacgccacttagttccagctactgggacctctcaatgacatcaggcgaggacttactatacagatagatctgtgtgtttggccttctgtccaaagctgacagcattgttgcagtgatgagcggcagcaccctggggaccttggtgaatctcccatagggacctgaaaggcaacagtgaagtagctgaatcagaagacttttcaggactgaacaggaagggcagagaaagaggccaccagtgttcactaggatcagaagctccctgggtgagaacgcacagcagttcctactggtgtggcccttgtcagatgatccctccattctgagtgccccagctagccccatctctcagctctttacctggatataatcctagcatcctgtggctttgtctgattgctttaatcgggtccaagcataatatagtcatgcaccacataatgtcattcagtcaatgacagaccgcatatacgacagtggtcccacaagattatgataccatatggttactgtgccttttctgtgttttgtaatgtttagaaactcaaatacttcctgttttagtctgtttagtgtagctacaaaggaatacctgaggctggataatttataaagaaaagtagtttatttggcttatgattctgcatgactggaaagttgaagactagacatctgcatgtggggaggacctcaggctacatccacttatgatggaaggctggacaggagccagagtatgcagaaatcacatggcaagagaagaaacgggcggtggggtgggggcaggctcttttcaacagtcagctctcacaggagctaatagagagagaactaactcactgcagaaggagagcattggtctcttcacgagggatccaccctgtgacccagatgcctcccatcgggctccatctgtcaatactgccacactggggattaaatttcaacttgagatttgctggggacaaaccatatgaaaactagagcatttaccattgtgttacagttgcctgcagaattcagtacagccacatgctgtacaggtttgtagcttagaagtaataggctccaccatatagcctagctgtgttttaggccatcccatctaggtctgtgatgtttgcctaaggaaatcaccctaacaatgcatttctcagaatgtattcccaccattaagcactgtatgactataatttagctctagctttttcttgggaagattctagattaatgagccagattcaggtgccaggaggaaactaaaatgccttagagaaataatctaagatgtttcacttatgccagttactttgacaatttgcacataataaacccttaatatccattgagagtatggctatgaatgtttaagattctctctaggtagggactccctctgatactggggtggaaacagaggagcagtggcaaccctggcctcttcagagactaagagtaggctgtgtctttcatgagagagaagccacattagcaaatactatccttcggcccagattggtgtgttaatgtgcctttaaatcatcagtctcaggctgggtggctcacgcctgtaatcgcagcactttgggaggctgagggtggctgatagctcgagtccaagagtttgagaccagcctgggcagcatggcgaaaccctgtctttactaaaaatacaaaaaattagctgggtgaggtggtgcctgcctgtagccccaggtacttgggaggcttaggtgagaggatcacctgagcccaggaagctgaggctgcagtgagctgtgattgtgccactgcactccagcctgggcaatggtagtgagaccctatctcaaaaaaaaaggaaaaagaaaatcatcagtctctcaaagtaaacatgcatgctatataaattaactcagtatgctctgtttggctctaaggagctcctgctattgaactttgtttttgacaggtggtatgcattgggtcagtggcggaacttgaagaactgtcaggagcaaagatctcagatctccacagagagaggtcagtttctaaatgttcgattcacttcagttttacgattctcctattaagacctggtctctagcagattacagagccacacatggaagtgactagcttgctgaattactttgctgatgactcatgtcatattgcagtattgtggcctctgtccttgtgaaatgtgaggtgaatggtgcataacctttcagatggaggattcatggtgctctctgaaagcctttgagaattgctgatatttctgtttgcaaatgtgtataatatcttgtcagggttttgtgtttcctattagcaattaaactgcaagttctgttatgcttacagttaatagaaatgactacttttctgtttgttagtgttgaccacctgaccattccttcacgctgtgggaagggatccttgcaccgcatctctgaagtgtttgactgttggtttgagagtggcagcatgccctatgctcaggttcattacccgtttgaaaacaagagggagtttgaggatgcttttcctgcagatttcattgccgagggcatcgaccaaaccagaggatggtatgcctccttgttctttcatcacgtgttttattgattttattttatttagggagtattttactaagtcactgccatttatctactgggtgatggagagattgtggcaaataagacaggctacattcctgccctctcccctccaccaccaagcacggacattaaagtgccttttgagtaggactctcccactacaatagggctgtagttttacaatttcaatgatctcactggcattttggaatatatgtgttacactggatgttaaaatgataaaaaaagttatgtgttcttagcttacgtcagatcatttactcaaatgtttgagtatttgcataaaagacagtagtttgggtgctagaaatttgagggatagttggtaatgtgctcagatattgaggctagccttataaatcaacattctaaaaaaatccagatttttaaaaaatatacatatgagagaggatttgggcattgatttttatctggtgccttatgtaaaacagttccttaattggaagaaggtgaattactttctttccatggattggctttgctggcccaggctttatttacttttttttttttttttgagacagaatcttgcactctgctgcccaggctggagtgcaggggtgtgatctcggctcactgcacccttcgcctcctgggttcaagcaattcttctgcctcaccctcctaagtagctgggtctacaggcatgcaccaccatgcccagctaatttttgtagttttagtagagactgggtttcaccatgttggccaggctggtctcgaactcctgacctcaagtgacccacccgtctcagcctcccaaagtgctgggattacaggcgtgagccattgcgcccagcccaggttttaattatacattcacagtaatgtttctgcaggggtgtgttaaaggaattgttggtgtcattttctctctttgacagctttgggtaatcattgaattcaagtcttcatgttctggaatgtgctgtcttcagattccagtcctttttgtctataggaacagctacccagcacaaattctgtttttagaaaggggtagatgccttaccaatgagcttgttcctttgaggagtagcaaagtctgttagctggtaacagtcctcatgtggatcccgtgtccttggtgcctgcctccttctccattcctgaggcctgggctacctctcctgggcaccagggctcctcccaactctcctttagaagtgggagggatatctggatcagtgtttatgttaactatggggtctggtctcctcagctcatgtcccttgatgttctcagagtgcaggactaggtaagagaggcaggaaagcatcacccccaggacagtggtcagggatatgagttcatttgggaaacaagctaggtagcacataaatgaggtacataacattttacagaataaaagcattttctagtctgccttatcacttttgggtgagagtgcattttgcatcttttgtcatcaaattgtcttttccatatgatcttgtgccaaattcaaaacccatccttcatcttcagctaggtgcttctgggtggtcctgagaggccacccagtgctgccatgtggctctccacacagacttcctgggagctctggtaacagagaaatggtcagtaaatcattccagacgtttatttcaatgcttctttcaaatcttagacagtaatttgattggtctccagtaaccaggattaagaatcattgctttaagtgattctcaagaagtgtgacttatcaaaaatagaaattcaatgaataaatacagtttctttcttatgcttggacttcatttctatttttattgaactgtttggggttttttttcaggttttataccctgctggtgctggccacggccctctttggacaaccgcctttcaagaacgtaattgtgaatgggcttgtcctggcaaggtaggtcaactttgttgtagtgacgggtggaactttgtctccactgtttcttaagaaggagtgcgtgagagcggtcaactttgttgtagtgacaggtggagctttgtctccactgtttctcaagaaggagtgtgtgacagctaagcctgatggaggaggaggaaggggaggactttcagattgtgctactgctagtaacataatgctactagtgatattactagtaataaaatagcatttactaaacttagcactttatgaaatacttttgcttatagatcttatttaatctgtacatcagtcctttcatgtagattttgttgtcctttttttaacacacgaggaagctgtgggttctagagaccacaggtgcccaggatcaaagctagtgacagccacactgggcttgaccgaggtactctgccaccagatcccattcttcccctcatctgaaacttcctcccaatgggcattatttcccacattttgctattataaggaagtctcatttttcctttactttattacctctagtcattaagaataaaaataaacataaatgaaaattttaaaatgaaatattttaaaatagaatttgtgctgagtacccacacagaaatcctactttatatgctgtgtgaggaggaagaggatgtcacctaacattttgtgcatccttattttttgccaggccccactgtgtgcattttcacattttaactcatttaatccccagaaccatttgagatgggtcctataatccctttgtgacctttgaggaatctgagggacaggaaaaagtgacttgccaaaggacacacagcaaatgagtggtaaatgcaaattttgaacccaggcagtctgcctctgtagtatgtgtactactttttttttttttttaattgaaaattttattgagggctgggtgctatggctcatgcttgtaatcccagccatttgggaggccatggtgggcggatctcctgaggtcaggagttggagaccagcctggccaacttgataaaacccccgtctctactaaaaatacaaaattagtgggtgcagtggcacacacctgtaaccccagctacctgggaggctgaggcacaagaatcgcttgaacctgggaggcagaggttggagtgagccaagatcatgccactgcactccagcctgggtaatagagtgaggctccatctcaaaaaaaaaaagggggaaattgtattgagatcattgtagatttgcatgcaattgtgaaaaataatagagatcccttaaattctttgcccagtttcccccagtggtcacattttgcaaaactacagtatatatcacaaccaggatattgatatagcccactaatcgtattcagatttctctagttttacatatacttatttgcttatacgcatttacctgtatacggctatcgtgtgtaggatcctgtatccagcagcacagtcaggttactgaatgaattcaacatcaaaggctcccttcctgcattgccttcccctcctgccttcccactgtcatccccaatccctggcaaccactggttttttctccatctctgtaattttgtcgtttccagaatgttatataaatagaattatacagtaactaacttgggggaattggctttttttttcttttttttgagacagagtctcactctatcacccaggctggagtgtagtggcgtgatctcggctcactgcagcctccacctcctgggctcaagcgattctcccatctcagcctcccgagtagctgggaccacaggcatgaaccaccacacccagctaatattttgtatttttggtagagacagggtttcaccatgttgacaggctggtctcgagctcctgagctcaggcgatccacctgcctcggcctcccaaagtgctagtattacaggcatgagccaccgcacccagctggctttttttaaat

SEQ ID NO: 460 - DNA, 32742 bp, Homo sapiens
  source 1..32742: mol_type = other DNA
agggttggcggcggagccctgggggggcgggcccctgggggcggggtctcggttggcgcgagtgtcctgtcgccgccgcctcgggcgggtgggctgactggcggcaggctcgccgcggcgcggagtcccggctgcgggatagaccgagggccatggccgcctctcccggacccgccggcgttggcggcgccggagcagtctacggctccggctcttcgggcttcgccctcgactcgggactggagatcaaaactcgctcggtggagcagacgctactcccgctggtttctcaggtaaagtggcgcctggcgcggcccctcttctccttcccgccgcggcccgcgatggcggccgccgctcgcacgaccggacgggaggcagccgctgccccactttccgcgccggcactgcggcgttcttgtcggaccgcctgtgtggggctccgggacgggcctcggcccgggcggcgagagactggataatccaaactccggcggcagggttgagtggactcggcagcaggggaggctgcggggcgggggtgccggcctgggcctttgcccccagtacctgcctcgggtctgcggctcccgggtgcccccggccgggcgatgccccctccgcggggcgagtggttgagcccagctcccgaggcagagaggacccccgcggggcccctcgctggtacttagggccctccacgataaccgactttgtcaccagttcgcagcctggtcccgagcccggctcctccgcctggggtattcctcccggcctccccgcccagcgtgcgctccctgatcctttgtccctccccgccgtaggtcagttcgctggcctcccattcatcccggccaccctaccccttcccctgaacctgctgctgctcacttctgcccgcttctgtccggcctcgtggaagagtgacgtggagactgtatgacagttaatccagatgcacaccgttttgccaagtcccgtttgggatgtgtgcgttactgtatttgccaatcagctaaccgacgccctgagttttaggaaagtttttgtttctctgagctgggttatatgcagcttcagggctagaattcctcacttaggtctgtggtaagatgccaagcactgtggggagtgaattctgtgccttcgggagcgcgttggcgatgtgtgactcacatctaggttgtaaccacttcgtgactcatactaggattaccaagattttagaggtagaagaaatcttaaagattatctgactaaaaattctttctttagcatccttgacacctggccaccagtaccctgcttaaacatgttcagtgaaggggagcctgtagctgttgcatagaattctaaatgctattatctcttctcctgcccagccctgcgcatatttgaaaacagcagttacacatgtccctggattcctgttatgctggttaaataaacatccctattttcttcaccttcgcatggctaacggagcagtgatgaatatatctgacactctccttcccttttcctgtgtctcattgaggctctgaccagtgggaaggggcactgggatccctcagtaatgtcagaccctccgctcctcgcctatctccactagcacaacacaaccaaaacgagaaacactggagcagttttaagaggcagagagataagagagtgatggagttcaagttgatagtattttatccattttttaaataacacctatgtaatgcttactatgtggtaggccaggttctaagcactttgtaaatattaactcattaattctcataacaatcatgtgaagttggtatatattctcgtggtatgggagaggaaactgaggaatactgaggttaaataatttgttgttagggctttcaataagtgccaaactgggatttgaatccaggtaccctggctccagaaggttctctttgctacactatgctgtgtcctctctagagattagaagcagtaatgagatctagagaaaaagatggtacatagtggaaaaacaagctagaaagtcataatctggagaaatggcaacttttcacagtatccactgctaaaaatgtatcagtcttacagctctgcattgtgtaactctggggtaaaagaagccagagaagggtaggagagcagaggaagaaaagtataaatcactgctgagagttagaggtcaatgccaaaggggaagaatgcctgcctttttttttttttctttttccagttaaagccttgttcagggtcacagctgaggttttgcatcccacacattgtgtatctacagctacatctctaccacaacaccataactgatattcctcataattgactgtccttaacaagaaaaagttaaaatcaagaagtgtattaagcatggccagaatactcggttaacaaagcagggaagtacaatttagaatgattttaaagtttcagtgttaggagattaaaacagcagttctccagaaaactcatatgtccacaagtctcattttctgagaatgctgtattattacccaactcatgtttcaccatctcatccacaaggatattttaagcattttaagcaaggatttattgtgtgcttatttgttgctgttttttgaggggcttatattctagttggtagataggtcatgtatagaacagcacatgcaaagtgtcaaatgaacatcatcaatggtacatactctaaaagctcagagaaggcatggatgagtcagcagtgatgtcatggaggaggcagggttttgaggtaaacaagtaggactggcactatacggtttaaagtagacagtttctattctggtatcatctagcttcttctgactctccaagtgaaaagtcctgggttactggccttattctaagaatgcaagattttatcaatattagaaaaatgtgtatagttttttttgcattcacagattataaaagatgtattttcctaacaatgatgcagaaaaagcattcaactaaattcagcttctaataatgataagaagcacttagggaactagtgttaggaaaaagtgtccttaacctgatagagtatctacagaaaacttttacttaacatcatagcaacagtcaaatttaaaataaacatttcctttaaagccagaaaccagagtggggtgcctgctatgcttctactcagcactgcactggaaattctagccagtgtaatatgacaaggagaagaaataaaaggaataaatataggaaaggaaaaaccaaaagtctcagtgtgatataataacctatgcagaaaactcaaaacagtctacaagtaaattataaaaattaggagtgttggcaagttcactgagtgtaggatactaaaatcaattgcatttttctacattgataacaaacaaggcacaggcgcactggctggtgcctgtaatcccagctactctagtctcagctattcaggaggctaaaaaatgggaggatggcttgagcccagcagctgagggctgcagttagctgtgatcacgccactgtgctccagcctggccaacaaggaccctgtctttaaaaaataataaaaaaaaatagaaaaagtaattattaaaaaaatccagttatattaacagtaacagcaaaatatgagcttcctaagaatatgttgcttttgctatgtatataaagagaaagagctctatctctatgtatacacagcaaaagtggtcaaacttcatggagaaaatttaaaaattttatcaaaagccaacatggatctaaataaatgggagaaaagtactgtgttcaagcctaggttgacatattatagacatatcagttatccctattggtcaatttaatgcaatttccatgaaaatttcagcaagatttttcagtagaacttgataaaagtaattctgaagtttatatgaaagcacaaagggccaagattaggcagaagagaaacaaggtggatggacttgctctgccagatttcaagactcattataaaactatagtaattaagacaatgtgggtatcagaacagggttgaaaaacatagacctgtgatacagaatagaaaaccctagaacagatccacacatatatggaaactcggtaaatgacaattggcattgctggtcagtggggaaaggaagaacttaaaaaaaattaagctgggacaattggatatctaaatagaaattatgaaattggatctctgtctcataccagtaaaaagtcaacttcagatggattaaagacaatatgaaagtaaaagctcacaacacttttagaaaaaaaaaaatagggcagtatcttcattaccttatgctgggaaaggatttgttagtataccacaagtataaaccttaagaaaaaaatggataaattcgacttctttaaaatgaagaacctaggccaggcgcagtggctcacacctgtagtcccagctctttgggaggctgaggtaggtagatcatttgagtccaggattttgagaccagcctgggcaacatggtgaaaccccgtctctacaaaaaatacaaaaaattagtcgggtgtgatggcatgcacctgtggtcccaggtactctagaggctgaggtgggaggattgcttgagctggggaggttaagcctgctgtgagctgtgatcacaacacttcactcagcctgggtgacagagtgacagaatgagaccctgtctcaaaaaaaaaaaaaaaaaaaaaaaaaaaaagaacctctgttcatcaaaaggaaaacgtaagtcattaagtgggagaatatgattccaacacaaataaccaacaaatgatttgtagtacctagaataaataaaatactccaatgaataaaaaataaaaagattagccattaaaaattggtcaaaaaataatttcacagaagaggaaacagctaaaagatataggaaaagatattcaacttcattagaactcaatgaactacaagctaaaaaatccacagtgagaataagtgttggtgaggaacgtggagatggtagcaatatccgtgttacaaccattttgaaaatggtttgttgtaatctattataattgaaggtgggcattacctgtggcccagcaattccactcctaagtcagtacccctagagaaactcctacacacctattagaaaagtggattggggctgggcgtggtggctcacgcctgtaatcccagcactttgggaggctgaggtgggtggatcacctgaggtcgggagtttgagacctgcctgaccaaccccgtctctactaaaaatacaaaagttagctggcgtggtggtgcatgcctgtaattccagctacttgggaggctggggcagaagaattgcttgaacctgggagtcagaggttgcagtgagccgagattgtgccactgcactccagcctggtaacagagtgagactctgtctcaaaaaaaaaaaaaaaaaaaaaaaagaaagatggattggaatgtggatagcatttttacttctgatggcccaaaactggaaacttcccaaatgtcttttaacagtagtatgtttacataaattgtgctatgttcatataatgatatactctgtcactgaaatgaataaaccacagctataattatcaatggggatgaatctcaaaaacataatgttgagtgaaaaaaaataaaggttcaataccagataaaactaaaccagatatcatttagggtatactgtatgtacaatagttataataaaggagtggtgaacacaaaattgggacaatggtttcttttgggacaagagagtgatatggacaaggagtagccagatagtacatgggctgtcagagatactgacattgttctcttaagcttggtggtggctgcacaggtctttctttcatttctttaaactccacacatatatgttatatatactcatatgttttatattttataattcagacattttcttgaaaagccctgggctaagaaccaagcatattttatgtagagtacctccccacctcctttaataatcactttattcttcctgtcagaactcccactccaagtcttataatgcttttatccaaggaagggaagaaggatatctgccacagaactccaccctggtgtggaatattattctactgcccactagtcttttcctgtctatgatagatttcctttattcactatttgtacagaccccttaaatttctaaggtagcctacctcattttcccattactctctgcattgttctggaagcttttcaggattcttgttgcagttatgttgtcgatgaagagagtagataaggcgccctctctgctctttgctgatttgtgtatgtgaatacatgcgtgtttttttttcttttttttcttttttgtgatggagtctcgctctgtcacccaggctggagtgcaatggcgggatctcggctcactgcaacctccacctcctgggttcaagcaattcccccacctctgcctcccaagtagttgggattacaggcacccaggcaccttacatcaagcccggctaattttttgtttgtttgtttttttgtagagatggagtttcaccatgttggccaggctggtcttgaactcctgacctcaggtgatccaccagccttggcctcccaaagtgctgggattacaggtgtgatctgccacgcctggctgatgggtacaattattatttccattttcacaggtgagaacacagagtcacagaaaggtcagatagcttgccacatggtcacatggcagagccagaattcaaaaccaggcagaatgatgtccatgcccttaactgctgggatattctttggtgttttgcacttcttgacaccctttgttagaagctatcaagtaaaccctaattcttattcttttattccacagcagagttctttagtacaccagatcttctttcttccccaagggatgccttttctgccctcttctctggttcatttaggtgttctctagactctggtgtcagggcaactccaagttatgactctcaatttaatatcattcctatttttgcagaactatagttaagattgtatttggcatattatgatttacaaagcactcttgctagttgtcttttccttgatccttaacataatcctggaaggtaagagagacggtgtagtgattaagagtgtaggtagctcccctggctttgtgacctcgggcaaatacttaacttcttcaaatttcagattttgtatctgtaaaattagggtaataatagtatgtacctattagatgctggagaagcaagcattaaaagaattgatacatgtaaaacacataggctagtgcctggtactgttgtgcttaacaaatgttagctagtcttattttttatatgataaggaaagtgaagtttaatctcaattttgtaaaactgtgtatttaagtatctatatgtacaaaacaagactggaaagaattatgccagaattctcagaggttagtaggattatgggtaatttttatttcttgaggctctcctatattttccatttctgtttataaacaataaacatgtataacttttgaacctaccttttaaaacatttgaaactaattttagaatataagtagaccttaaataaagaatgttacatattgacttagttcctctaaataaaattttaaaggcatactatatttggattgaacatttcctagactgctttccagtgaaaggaaggcagccacacctaattatgcactggggaaggcgcttctagtgaaagcaaaatgtgtcttttggaacggaacaatagttcatattttggcttaattgcaggatcttttctttgtaattgaaattttaaaactttatgtaaatgaaatatttaataaacagaatcaccttaatctgttcggattgctataaaaaatagactgggtgccttaaacaacagaaatttatgcctcacagttatgtaggctgggtagtctaggatcagggttcaggcagattcagtatccagtgagggtccacattctggttcatggacagctgtcttctcactgttctctcagggtggaaatgagtgagagagctttctgaggcctcttttaaaaggcattaatcccattcatgagagctcctcccccatgaactaatcgtctcccaaaggccccacctcctaataccatcacattgggggttaggattttaacataaggatttgtggagggggagtgggagggggaatgggacacaaacattcaatctatagcaagaacttaaactcctttccactgcagtctcttccaagatggtagcttggaatagtcaatgctgagcaagttctcttttttttttcatgtgatagtaacaattccctagagtctgtcaggtgtggaaaaggattaagctggtgccagtaggatttgttctgtgcttcccagcagcatggcccacagtcattctccaaattaaaattatcgtgactctttcacatgattatgtaatgagcttttaggtaacatttcaattaaaaaaaataggaaagattgtaaacctccagtaaaagaaggactattaggtgggatttggtgtcagtttaaacctgggttcaaattctaaactaggctacttattagttgtatgagccaagtatgcaattttactcagcctcagttttttaatctttaataatacctgaggattaagtaagatagctaattatagtatgtctttgaacacttacaataaactgtttatggtactatgttaaacataatgctttcattattttattaactcttcttatttatttatttatttatttatttttttcaagacagagtctcgctctgtcacccgggctggagtgcaatgccatgatttcagctcactgcaacctctgcctcccaggttcaagcaattctcctgcctcagcctcctgagtagctgggattataggtgcacaccaccatgcccggctaatttttgtacttctagtagagatgggatttcaccatgttggccaagctggtctcaaattcctgacctcgtgatccgcccaccttggcctcccaaagtgctgggattacaagtgtgagccactgcgcccagccaactcttcttactaacattataagtcagagaaggcaatatggctaagtggctaagaggctagtctctgcagtcagaatatctggatttaaatcctaactctcccatacttcttgatgtccaacttcctcatttgtaaaatagggatgattattacccccattttccaatttggggaaatgaggatgattaatattaacctatttcactggattgttgtacgacattatagggtaatgtttaggagtacggtctctagaattgaaatgtctgactctgaatcctaactctagcacttattagctgtgtgaccttaaataagcacctttgagcatcagtttccttaggctcatgatgtgagccttcccacttggccggtgaagtgtcttcatgacatgggaattgtctttccctagggtgaaccgagagaaagaaagatgaaaaccacagtgactttatgacttgccctcaaaagtagcatactgtcactactgttttattctattagttagaaataagtagctaagttcagcctgtactcaaggagaggggaatgagacttcacctatttaagggaggaatagcaaataatttgtggacatattttagaactacctacagtctaacctctgcacacaaattgtttaccttattctcacctgcaagtaacctcttcccatccatatcctctccaaagtcacaacatcagctggaaatccatgatgttggcatctattacaaatatgatccaggagagacttcttgtatgtagtagttccttaagtgtaacgtctttcagctttaggatgactactatagactcttctgttcaaaaaatgagaaaatagaaagtatagaataactgctatacagtcctgttcaaaaatggaaaaaaaataggagccactggtttatggtattctgaactcctcctgggcaaatgttgccagttccttgattaagactcaagtcctgggaatagttcatggctcttgattctgccctctaagtcattattttacatgaattgtagctcatgtttgcagctgcgtagatttctcagcctgttccctgcttatggaagtttggagcaggggctggtatgaaagcttcttttcatacaaagatgtattcccttttagtccaagctgatagtgtttctgccaatacgattatcttaaaaattttgttggtctcctgtgagtcatattgaattcattctactagacaaaagcccacacccacaagtctctttgatatatgctcttctttaacttgggcttctcctgggactgctgaggaataatatctttaggcttcttgggagatctgttgtttacctgaatggttgtctgaagcaacaccttggacctttctgagatcttaagattttatagtcgtacccttagcttcatctttagatgctttcttgacacagccctagattttatttttgcctggaagccattgttaattttagtatgatgtgccatctggagaagatttttttttttgagatggagttttgctcttgttgcccaggctggagtgcaatggcacgatcttggcttactgcaatctctacctcccagattcaagcgattctcttgcctcagcctctcgagaagctgggattacagccatgcaccaccatacctggctaacttttttcttttttttttttttagtggagatggggtttctccatgttggtcaggctggtctcgaactcccaacctcaggtgatctgcctgcctcggcctcccaaagtgctgatgattataggcgtaagccaccatgcacggcatggagaaggaatttttaaaaccagcaagttctggcttgtttttatttatccgtgtttcttttaatttttctcttctcttacattttactgtaagcagcaaaaagaaaccaggtagcaccttcaaaatctgctttgacgtctccttagttagatctcccagttcatcggtatatattctccctttcatgttaatgagggtgactttctgtcaccacataacaaggaaccccttttctccagtttccggtaagatttttctcacttttccttaagcttttacccgtcgcttctgctatggcctgattgttggcattcccccaaaatttatatgttggaacttaatcctcataatgatggtattaagagttggggcctttgggaggtgattaggtcacaagggagccttcatgaatgggatcagtgttcttataaaagaggcttcagggagccttgtgaggacacagaagacaccacttgtgaggaatgggtccttagtagacaccaaatctgttggtgccttgatcctggacttcccagcctccagaactgtaagcaggacatttctgttatttataaattactcagtttaaggtattttgttataggagccctaactaagacagcttcctcaaaggtcatcatgcttttgcaaagtttctttgacgtttctagtttttattcgctcgaagttctttcaattttcactgcccgattttacagccactctcacattttaagttttgttacagcctcaccccagatccaggcaccaaaatctgtattagttatctattgatgcagaacaatttaactgaaatttagtgcattaaaacaacaaacattatcttatggtttctgtgggttaattctagagtggcttacctggtggttcaggagtgaggtctctcataaaatcaaaataaagatgattgaccaagcctgcagtaatccaaaggcttgactggggctggagaatctgctctcaagttcactcactcagctgttgacatgaagcctcagttcttcactatcttttggccagaaccttcagttaccttgtgggactctccatagggttgcttgagtgccttccattatgtggcagttggcttgctcccactgtgattgatcctgcagagagtgagtgagtgagtaagatgaaagtcactatgtgttctatgacctactcttagaagcactccattattttcactttattccatttattagaagtgagtcaccaagtccagtccacactcatgtggagagaaatgaggctctccctcttgaggggagaatttgtggacatgttttaaaaccactacagagattatatcactttcctgcttaaaaaaccttcagtgatttcaaaccactgcggagattatatcactttcctgtttaaaaaacccttcaatggcttcaaattactacagagtttatagtattttctagtttaaagacccttaagtatcttcctgtaatacatagaataaaatataagttctttttttttttttttttttttggagatggagtctcatactgtcacccgggctggagtgcagtggtgcaatctcggctcactgcaacacccacctcctgggttcaagcaattctcctgcctcagcctcccaagtagctgggattacaggcatgtgccaccacacccggctaattttttttttttttttgtatttttagtacagatggggtttcactatgttggccaggctggtcttgaactcctgaccttgtgatccgcctgcctctgcctcccaaagtgctgggattacaggcatgagccaccgcacccagccaatataaattcttcattccaattccagaaccctatattccacgctggtccctgcccatcccatctcttggatattggttttaacttgcccccgacccactatcctttagccacttccgacttcacctcattccttgaacaggagaggctcattcctaagggctttttttttttttttcctccactgtttcttctcctagaatgctctttatcctttgatgtttgctggtctgactgctttgctatcatttagatctcagcttaaatatcgctttgtcttagaaggaagaccagtcaatttcaggtagctacacagatactttatatcacactatcctaacattttgtacataacagttatattaaagtttattttttgtttacctatttatgtgattattagttctcccccactccttcactagaatgtaagccccatgggaacgtgggcttttctttcttgttgattgttatttcaggtttgcctagaattttatttgggatatgatagtgtgcaacaaatatattttgtgtaactgaattattgctattctaccatactgtaaacctaatggtggtgggattgtcttagtctcattcactgatacatccttaggaactggcatatagtagatattcaaaatttgatgaaaagcaatattgtagttgaggaaatttagatattaaatttccctagaccacttagcaagtaatcgccgagccaagacttaaacctaggtctattaattctaaaatattaatacctaaacatacatataaagtgcttggcacatagtagttgtacaaagagtagaagtgattctcttccccttcttgtaattctcttccccttcttttaatactagtacatgtacattgagcaatagttgggaatctatgtttttcatacaacatttctttaataaatattcttagatgtcagcatagttcatgtactagttccctaagatattttgaagaattatgtttgtttcagtgagctgaagttgtcaccttttgtattttatttcagggcctgggatcaagtgttaaaactctcggtatttcgtttattttgagtcggatgcaacaaaacttagcaaaatgtgaaatatagattacaatgctcattctaaagtatctagttaatttggtaaacatgtatggcacaagtactattttgtacagcctgtgctccatggtaggcaacggagtggaatggagaggaagaagagctgtttctactctcatagcatctgaagtcgtagtagaggaaactagacctgaagtactttggctttctgaatgtaatgatctatccgcttctacttttctccttaagatttgttgaaagatctggagggcctctggaactgtatgccccagataaactgcatgccccagataactgccctcaggtgaacttggagttgtaattaatggaaacattgtcttaaggaatgatgcaggatactttgctggttgtctctgttgaagcatctctaactattgatttagtctattgagctatacagtatgccaggcttcattttctttgactttgtgatacagcttaaaaaagaaaaggtattgagataaaagttgcttttatcttttatttttagatcaccacgcttattaatcataaagataataccaaaaagtctgataaaactctgcaagcaattcagcgtgtaggacaagctgtcaacttggcagttggaagatttgttaaagtaggagaagctatagccaatgaaaactgggatttgaaagaagaaataaatattgcttgtattgaagctaaacaagcaggtaggtggatattgattttgaagactattcataccacttttattgctttggttatgatgaaaaattattgatttatttggaataaagatatacagctctttgattatgtctgcctcagacattaaaggcctggattagcttccgcgaatactgcacttggcttggatcaagtcctaaatctgaaacataggactccttcactggtcagagttagtgatcggccatcctcatcagccattgagatgtgagagagatagagaagtgggagctgtggcctctattctctaagaacatattagtctactttccatgacataggaaatggaaataagcattagtatccattagtattctacagcaaacaaatcatagtgacttcaaacttcatgatggttcacagttctctatagatggtagcacagaagcctttgagaacctagagtgttttgaggactgcagctttgttgaagtatcatttatccattaattttttcaataaatattcactgaatgctggtgatataccaggcattcttttaggccatagggagataggcatggacaaatcagtccaaaatctgccatcttgggccttgcattctgctgagggagacagatcataaatgaatatatatgtaatgtcaggtggtgatcgttaccatgtaaaaaaaaaaaaaagcaaggtaagagttaggagaacaatgaaggtgctgttttagagagggcagggttttttaactttggtgctactgacatcttgggttggatacttctctgttgtgggaggttgacctgtacattgtaggatgtttatcagcatcactagcttctacctactagatgctggaaggtcccctctccttccatgggacaaccagaaatagctctagacattgccaaatgtcccgtgaggggtaaaaatggcccccagttgagaactcctgggatagggaattaggaagacctgctaaggaaggaacattacagcagagactgcaatggaatgaaggcctgagctatgtggatacttgggggaattttggactatgttctaagtggaatgagggattagtgggagattttgtgctgggcagtgacatgttctcatttgtatttttaaaagggtaactggtggctcctgtatagaaaatacattttagggggtgtgaggatgaattcagagaaaccagttaggaggttgtcacagtggtccaggtgatagatgatggtgacttagactagaccatagcatttgaggtggtgaaaggtggctttgtttcaatatattgccagggtggagctgataggattggctgatggtttggatgtgatagaagagccagggataactccaagatttgggatatgaacagctaggcaaatggtggtgccatctactgagatgaggaactctgagggaggagcaggtcatcagcaggaggagagtgattgcgataaaaccaagtaaatgtagaggggtggacaagatcatacacggtcctgtatgttatgtggatgatttcaactattattccatactaggagtcattgagaaattttgagccagatgaaagacatattgttttgtgttattttgttttgttttgttttttcaaaacaagaacatttcacagatcttttatgttagatagaagtctttctgatggtgtggaggaagtgaacgaatgaggacagcctgagagaaggttgagactgaaggcagggagattaatagggaagcttttgtggtaaaaccagctaggccaagtcagtgtaatagggctgtaaagagcaggaagagtgcacaaaatactcattaaggtggttgaataggtaaaagtagattgttaactaaaggaaagggaagaccctgggttgacttttggatttctagccattcactgggacagagaataggttttatgtgggaagcagggggggatatccttattctattcataatttatatttttcctactttagaaaaggatgtgaaagcacttacaataaaagacatgttcaataaacttattaaaataggatgtgaaaataaataaaccagaaactttggcaaacattattattttaattaagcatgaaatttatctttgtacttcctggaaggcaagacaaaatgtgggaaacaaagggttatataatctcattgtttgttgaaaggaagcaaaccagcttgtaagaggagagactttttttcctgacactaaattattgtgtgggtgcttatgaaacagacattacataatggacaattcaacagaaaatgtagagatggtcttcatattactgtttcattttgcaagaaagctttgtggttaaaaaaaaaaagaaataaaaaaatgactgtttcttctaacaaccgttgattaaagcaggagtacagtatttttaaacaaaaggacaacctgagtcctgtgctccttgttggctttgtagcatgtcattgtgcccagtgtaaggtgagagaggaggacgtggtacactgacatgagtaccatacgcccaggcagctccataaacggagtattttggaagctgtcaggtttcatgggctccacatgtcatcttcctcctagtgtcactcaggtaagagtatgagaatgatgccttctggagttgtaaaatatagaagcctttttttctcttaacacatacaaatttaagacttcattaaatcactcctgtaatgtttctagcccactcaacccctacgaatcattttctttgtttgtcaacagtgttcatttgagggaactaatataaagtagtagataaaaaactggagctggctgggtgcagttgctcacacctgtaatcccaacacttggaggccaaggcgggtggatcgcttgagctgtgtttgagaccaacctgggcaacataatgagtccctgtctctacaaaacataagaaaaaaaaatagccaggtgtggtggtgcgtgcctccagtcccagctacttgggaggctgagatgggaggattttttgagcccaaggaggttgaggttgcagtgagcagtgatggtgccactgcactccagcctgggagatgacagagagagaccctgtctcaaaaaaaaaaacactaaagtcttagggtcagattgcctagactttaatcctagtgcttctacttgcaagcagggtatattgggcaatctattaaacatttctaaacctcagtgttctcatctataaaatgagactgttagggtttatagaggtgttttgatataatgcatctatcatttcacacatagtaagtgctcaataaatattagttgttattattataattaatttttattcttacttccctgtgttgaactcttacattgtattgttgctttttacttggctaccaggcaaggtttatatttatgttttatatggaagttcaacaaatatttgtgtttgattgaccttgggttttcctattaaggcacagcactagtaatgacatataataaattaaaaatgatacctgtgaagctgtaagacagctttgttacttttttagggaactgatttctgaacagtttacactttgaacaactttataatgttaagaaagcatttgcccatgttggtggagccaaccaaatgttactgtcccacgtacttatgagttaaatgcctggggtctagtcagaaaaaggaaaggttgaataatgccatatgtgcaggcttatatgtcgtatcctttgtggttgagaggtgtagaaaaaaattaacattttccagaggatcagaggaaacatttttatccttttagctattaatgataggatgcaaactgatacttttcctcctgccctttctgtatgccttaaggttaattctaagcacttttgttctctgttctttgctatgaaaactctgtattagctacctatttctgtgtaacaaattaacccaaacttagcaacttaaaaccacaaacatttactatgtcagtttttgagagggcaccaatcagggagtggcttcactgggtggctcagggtcagtgtgtctcatgaggtagcggtcagtgtgttgaccaggcctctgttacctggaagcttgagtgcactgcaggtctgcttccagcctccctctcatggttgttggcaggcttcacttccttgctggctgttggctggaggcctcacttcctctccacgtagttatctgtgtagtaagggctgcttatgacatggcaactggcttctctcagagagagagagcaacccagacagctgcctcagttattttagaacctaagcttgggagtgacataccaccacttccaccataccaaccctggtatgatgtgggaggggacagacagcacaaggttgtcaataacagtaggtggggatcatggggagcgatcttgaaggctggctaccacagaattcctctatctgtagagcttcagctattgtcattatacacaagacatccaagtctgcattaccagtccatgtcttgcgacttatctttggtgtattcctgtgttatttcaaactcctgttgtctgacagtaaaattatcatctctcttccaatgcccttcgattttctttaagcaacttaggtttacaactttgaggccatttttttactcgttctttccttcttatcattggtcaggtactaattttgtgttttcttaatgtttcccaaatcatcttcttaatgttcctatggctactatactagtaaggtccctactatttcacacccacaattgatacaatagcctggctctaagtctttcctttccattctattttatgtactcctactagactgatctttcttttttttttttgagaccaagtctcactctgtcacccaggctgaagtgcagtggcgccatctcagctgactgcaacctccgcttcccaggtccaagcgattctctgcctcagcctcctgagtagctgggattacaggcccctgccaccacacctggctaatttttgtatttttttagtagagaccgagtttcgccatgttggccaggcttgtcttgaactcctgacctcaggtgatccacccgcctcggcctcctaaagtgctaggattacaggtgtgagccactgtgcctgccagactgatctttccaaaccttgacttatacttcaccctgtggcctctccattaagattccagtactttttactcaagatccttagcctatgagctgacacattattgtgtgtatgtaatagaattgacaggagggcttttgtaagaaaatcaatccattaggcacacaggtatatttaggactttaaaaaatgatcttgaacactataagttggttaaaggtttattattttaaaaatctttttaacagtatggaggtttgaagaatattgtagccttgtattataatacaagaatacttggattgttttattagtagataattaccattacagaaatcaaaagttttgatagcaacagtgaagaagataatttttctagagggttgggagttcaattaatagaatggtttatgctgggcatcataagaagtttatataaattcaaactgtagcctaaatgagggccagcctgtggtttgaattctcaggagggaggcttttgttttgtttactttccccacccaaagtccaggctgactgacagacaaacttccttattgtttctttttgcctattgacagttctttccgggcccccattatattgaagatgtcatcccttggggcctaaagccctgtcttttttctctctctgaggatccgtgaaaacccaagggtgaaaacccaaggccgttcagcttgtggagattggcagtgacccctgacttctccccggcctcgccccagcccaagccttggcacctgcttactgctcgggttttagggtattctttggtttttgactcatgggatttctcttactgtcttgtagggcaggaggcttttagattgtgtagtttgcattaccactggaaacaaaaattatgatgtttttcaaactgggtgagggcaaaatttgtcacagttcttaagagtgtgctattattttctggttagaaagcttcgtatgataatccctacaatcgtcaaggtgaaaccgtttcttgttcctgaagtaagactccaaagctgagtttctcctcattgtgccttaccttcaaggttagagagaagtctagattttaatttgtatgcctgtttaactttctcccctcgtctttcttgttaggagaaacaattgcagcacttacagacataaccaacttgaaccatctggaatctgatgggcagatcacaatttttacagacaaaacaggagtgataaaggctgcaagattacttctttcttcagtgacaaaagtgttgttgctggcagaccgagtagtcattaaacagataataacatcaagaaataaggtacttacctttctgatgttgctgtatttttgtctttctgtgttgttcaaagtgctttttatgactcttagtggtggattgcttggcttgtgtgtcgatgaagaatgcagctagctgtgggaattaatgtgcaatgcaggatacattgacacactgatcatctgtacgttgaatgcacttgtggccctgggttcctcccggggctatgcatgtctgagcgttgcttaaaaaaaaaaaaaaagaaaagttctttttaggttaattgtaagtaatttggcaatgcttgtctattataattgtttataactctgtctgtagtttaaaagtagtgtttcttctatatgtgcaattcttaaatgatgggtatgctgtgcctaaacttttgaatgcaagtaatgtctcctcttagagaatcattatccacttgttaaggcttattggtaaaagctttaaatgtgtacaacatttggaaagaaaaggtgagcactatgataatgtatgtagcagaaacctagttgataaaaatactgaattcttctgtactttttttccctcccaaatcagagactaacaatatataacttaagacacagttaaatcagtggaaatgataattatccacaactacaaaatttctgtactcagagtccctaaatgttactgaataatctcaaaacttacagaacagatttaaactcttccagtccagaagttaatctctcagatgatggtcatgctccatgatcatctgggaatccagggtatgtacgatcacttcttgctttggataattccctaggcaaagaggagagcagttggccagggaaggagttgtcctagaggatttgaggataaaaccacttgataagtgttgaatgaatcagaaattggagaggtggatctggcagcgctggagaaatacaaacaaccttcccctctttgaaagatggaggttctcacagtggtggcaacgtgccttatcagtgttagtcgcctgaacttcctgagctgccagggcagattaacatgccaaatattcatcatattctcaggaaaaataagtaaacagaggatatctgtgtttttttttaacttatcttgttgcgactaaaacaatctaataatgttattttaaagaaaagtatttgaaaatatgtttcacatctatttactttgtttcttacatcaagaaaacacataacattttagtcactggctctaccagattcacacactctttattcacccctgatggcccattcctgactgagccagactaattttcccacccttaaagtcccacacttccctttcgactctatactctgaagatgatgaggttccttctgctttcctgagaatgttagggttcctatcatcctggttcactgaaccttaaagcttgtgtgtgctgactttcatcctcaccccttcccagttctctgaagatttgattactgtggtcctgcccattcccaccttttagacttggctacataaatgatcccttcctttgtatatgtagtcatttcttttattctttttccttttccttttcaagtaactcaaaatctcatcatataaacaaatcattcccctaataattctgtgccttgaatctacttctacttctctgagcatccccttgtgtgtcttctatctggctcctcctcctcagctttcacctagaattcagaattttccttttcttctctctactcagccttgacaatctcagtctcttgagtagctctcaccaaataatgaattattatctgttttgcaggttctcgcaactatggaaagactagagaaagtgaatagctttcaagagtttgtccaaatattcagtcaatttggaaatgaaatggtggagtttgcacatctgagtggagatagacaaaatgtatgtattcatcacattttacaatcttcagataaatacatactttttagtttggatggaggtatgatcgttaggattgtttggactggtttctttgcttattaagtctatagccttggtcttgaaagcctttcatagataagccaggataaagtaagtagatctatatgtctttttttgtacatttataacagttaattttgttcccacctcacacactgggaaaggtcatacttgctatcagggctcaactcaagtacttcttccttttatttggttactttctcttttatgaagctttccatttgattcctctactagggctcaggcacataaaattgagtcatcatatgtattcttatagtatcttgttagatatttgttattcttaccgtattagattaatagtaataacccaagccattatttatttgcactgcctatgtgttaggtacttaatatacatgatctcatttaattttcaaaacatccctatgaggtaggtattgttaactactgttttacatatagggaaactgaacctgagacaaggataaactttcccaaggtcactgtgctagcagatcgaactcagttatatctgattctaaagtctgtagttctcaaactacaacatgatatttgttttttattttattttattttattttttctgagatggagtctctctctgtcacccaggctggagtgcagtgtcgtgatcacggctcactgcaacctccacctcctgggttcaagtgattctcatgcctcagcctcccgagtagctgggactacaggcatgcaccaccacgcccagctaactttttgtatttttagtagagacagggtttcaccatgttggccaggctggtctcgaactcctaatctcaggtgatccgcccgcctcagcctcccaaagtgctgggattacaggcgtgaatcaccgtgcccagccaatattagttccttatgggtctgttccccaattcagacagtaagctcctcagttttgggagatggaagatcatattatgtctaggattgacttttccttgttggggtatttgtgtaggagtctgtcttgttggcaggttaaatatatataataattgaccatttcttgggatggttctgggtgtagtcccataggctagtctctcagtttttgatatgaactttcccaattgcagctggagttgaaaaatgggtattggtctggcaagtggcaggctaaataatggcattggtttgtaataccaatggtgtttctataggcaggtactttattgtttcattttctgtctgccattattgttctttataaaacaaattttctttcttttccttctctttctcttaatcttccttcttctcctcattctccccaatgataattattagcctgagtatttttataataatagtagcttataatctagcattttcttgatcacttgagcaagcgtggcatgagtcataggttctaaagctaccatccttcagttacacttcctacaggatcctcttcagcttctggacataactgaaaaactttcaccatcattttgatttgtagttagaaatttggcatggagaacattttatttttctcaattcttgtaatattgtgatccaacatttaaaaacttctggctgaagtggtatctatttttagcaatttagctcattaaatgtgggacccctgaaacttactggcagcctttttatcatctgtgtttgataagtgctactcctgggtcacttttttggaatatgcatccagggttcaaatgctttctcctttagaatagtcaaaatatcctgcaaagagctataggtcaggtgcattctcagttttctcagcaaatattcatcagctgcttactgttaaccaaatactacactaggtgttgaggattcaacagtaaataaaagtgacaaaaacctctgcactcatggagcttatgttttagtaggggtgggaggagatagacaataaaacagaaacatgcatggtgtgttcaaagaacacgaaggccaatggatggatcaaagtgagcaaacgggaagggtaataagatgaaatcagagaggtagtgggcaggccaaactgtgtaaggactttggctttaagtaaaatggggagccattggaggttttgagtaggagaatgacgttttctgacttacattttaacagtatcactctagctgccatgttgagaatagtttgcatggagacaagggcagaggcagggagaccactcaagaggctattacagtaatctattgagagatgatggtgacctggaccaaggtggtagaaagtggcagtggtgaggctgggcatggtggctcatgcctgtaatcccagcactttgggaggctgaggtgggtggatcacctgaggtcaggagtttgagaccagcctggccaacatgatgaaaccccatctcttctaaaaatacagaaattagctgagtgtggtggcatgtgcctgtaatcccagctactcaggaggctgaggcacaagaattacttgaacctgggaagcagaggctgcagtgagctgagatcacgccactgcgctccagcctgggcaagggagggagactgtctcaaaaggaaaagaaagtggcagtggtgactcctattcaacatagtgttggaagttctggccagggcaattaggcaggagaaggaaataaagggtgttcaattaggaaaagaggaagtcaaattgtccctgtttgcagatgacatgattgtatatctagaaaaccccactgtctcagcccaaaatctccttaagctgataagcaacttcagcaaagcctcaggatacaaaatcaatgtgcaaaaatcacaagcattcttatacaccaataacagacaaacagagagccaaatcatgagtgaactcccattcacaattgcttcaaagagaataaaatacttaggaatccaactacaagggacgtgaaggacctcttcaaggagaactacaaaccactgctcaatgaaataaaagaggatacaaacaaatggaagaacattccatgctcatgggtaggaagaatcaatatcttgaaaatggccatactgcccaaggtaatttatagattcaatgccatccccatcaagctaccaatgactttcttcacagaattggaaaaaactactttaaagttcatatggaaccaaaaaagagcccgcattgccaagtcaatcctaagccaaaagaacaaagctggaggcatcacaatacctgacttcaaactatactacaaggctacagtaaccaaaacagtatggtactggtgccaaaacagagatatagatcaatggaacagaacagagccctcagaaataatgctgcatatctacaactatctgatctttgacaaacctgagaaaaacaagcaatggggaaaggattccctatttaataaatggtgctgggaaaactggctagccatatgtagaaagctgaaactggatcccttccttacaccttatacaaaaattaattcaagacggattaaagacttaaacgttagacctaaaaccataaaaaccctagaagaaaacctaggcattaccgttcaggacataggcatgggcaaggacttcatgtctaaaacaccaaaagcaatggcaacaaaagccaacattgacaaatgggatctaattaaactaaagagcttctgcacagcaaaagaaactaccatcacagtgaacaggcaacctacaaattgggagaaaattttcgcaacctactcatctgacaaagggctaatatacagaatctacaatgaactcaaacaaatttacaagaaaaaaacaaacaaccccatcaaaaagtgggcaaaggatatgaacagacacttctcaaaagaagacatttatgcagccaaaagacacatgaaaaaatgcttatcatcactggccatcagagaaatgcaaatcaaaaccacaatgagataccatctcacaccagttagaatggcaatcattaaaaagtcaggaaacaacaggtgctggagaggatgtggagaaataggagcacttttacactgttggtgggactgtaaactagttcaaccattgtggaagtcagtgtggcgattcctcagggatctagaactagaaataccatttgacccagccatcccattactgggtatatacccaaacgactataaatcatgctgctgtaaagacacatgcacacgtatgtttattgtggcactattcacaatagcaaagacttggaaccaacccaaatgtccaacaatgatagactggattaagaaaatgtggcacatatacaccatggaatactatgcagccataaaaaatgatgagttcatgtcctttgtagggacatggatgaaattggaaatcatcattctcagtaaactatcgcaaggacaaaaaaccaaacactgcatgttctcactcatagatgggaattgaacaatgagaacacatggacacaggaaggggaatatcacactctggggactgttgtggggtgcggggaggggggagggatagcattaggagatatacctaatgctaaatgacgagttaatgggtgcagcacaccagcatggcacatgtatacatatgtaactaacatgcacattgtgcacatgtaccctaaaacttaaagtataataataattaaaaaaaaaaagaaagtggcagtagtgacagccttacccaagtctgggaaaatacttctggaggtattgggatgcttcgcttagtgcttcatggaccatctgggttttatggacgcctctgttttgtcctgtggaccagccctttccaggttgagatgccatctttttctgtcgcttgttatcaccatacagcctatggtgtcatatgtggcttgtaagtgtcaggtatggcatacacacttgatgcattgtcagctagacccacaggtggttttgaaaggagtcctgtccaaaatgttaaagacaagaggaatgggtggaaattttataagcaacctcagcctttatctgataggtacccatgatggatgatactcacatataggacacagttctttgggatgtgatctgcattagctttggggttatatgcactttgtcgtacactatttgtaattccatctctatcttttattaaatctatattgggatgcaagtgagtgagagtgatattattgtgtaggactaacttctgaatccattctaatttattcaagcaaatttactttcaaaggcaaatcattctcaaactttaggttttacttatttgtaagaaggggcctttaacctaacttacaaataaaaaaggctaacgtgacagggaaaaattttatgtaattcaaatttcaatgtccatacataaagttttcttggaacacagctgttcttatttatttgtgtattgtctctgtttgctttcacactacaatgacagaattgagtagctgtgatggagaccatatagctcagaaggcctcaaatgtttatctgggctttaattgaaagtattgcccacctctgatttagatataataaccaaattattaacagagtattttgttgtagatttgatcagcaaactttggctacctcatgtgaatagcacacattctattgagggctctgtgaggagaagtcaccccccaccaaaacaaattcaatacacagtgctttcttaggtgttccttttcaatcttgttggggaaaattatctacccaagaaacatcttaagaatatttcagagcagcatattgattaagattaagacaaacgaaccccaatttgagatgcatagcagttagatgggattaattagacgaggctccttaaagaatcgacttttaagtgtctgttttgaaggaaataatagtcaatagatgctcagtagacaatttacttttaattaggtaagacataggctgggtgtttctggttaggacgcagtgtgtgcatttgacgtgagaatgtcaggtatgacagaacaccagaatgtcagccatgtgcagcctctacctgtgtctcagtttctggctctctagcccttactaagagtagctttttctttctactcatattgtgttgatgtgtttatattgaagcagtgacagtttgtaaaactttatcctggtttttttttttttttcacttaacaatgttagtgaattcttgagtattagtgttgaataaatacttttttaagaaattgggttgttcacatggtcttagactcctccgtgattttatttcatatttaggatttgaaagatgaaaagaaaaaggcaaaaatggcagcagctagggcagttcttgaaaagtgtacaatgatgcttctcacagcttcaaaggtaagacaattttggttttactgtgtaataaattaataattagaacacccgactaaatgcatttaacttacataatttacattttaaaaaagatcaaagtgattacttagaacataggcctgaatagttaaatctcagttattatttataagaatgctaactttcttccccaactccaaataataactaatttatgagtcagctttgattgaacagctcagcagaacatggtgtattaggtgctatgaattaaggcctgtcacacatggtagctgcctgcagggtttttccagtctcattgaggagccagcacatatgctctagaaaaagctagacaagttaagatctgttaaatacagtggagtaagaagtcagcacttagtttattctgtaaattcaccctttaattcctgtttccacttttaacaaaattatcaatcaagagtatttccaaacagcagttggccagcaaattggtgcaattctagaatgaatgagtaaaatgtctctttagcagtttgtttggaataaccttttcttctgagagtatttaccccatgctagaatcagtgaagccacaaaaacagacttcgtggaacccactcagaagactctattttgtctaggcccttgagtttttcatttacatcattttttaaaagtcaagatgcatccatgatcatatatcatctcatttttcttcattctttttcatttctggcatgtgtaaggcaacatttaaaatagttttaatcatgatgaaaagagattttttcctaaaaaatttttaagtaaacttactgttgaagtataaaggtatagttttgcactctgcattttttatttaaccttgctatcgctttttactcatcctgcttccactttagtgaggagaagcagctgagtgagccagggacccaggagattttggtaaagaaccatttttcttagcatgacatgttctctgtaagatttttgtgcattatgacataaatcaaatattaaaataaaaattttcaattgttttgaagacatgtctgaggcatcctaactgcgaatcagcccataaaaacaaagaaggagtatttgaccgtatgaaagtggcattggataaggtcattgaaattgtgactgactgtaaaccgaatggagagactgacatttcatctatcagtatttttactggaattaaggaattcaaggtaagaataaagagagtatatttttatttttctcttcttattttattttattttattttaattttttgagatggagtctcgctctgttgcccaggctggagtgcagtggtgtgatctcggctcactgcaacctccacctcctgggttcaagcgattcttgtgcttcatcctcccaagtagctggtactacaggcatgtgctaccatgcctggctaatttttatatttttggtagagacggggtttcaccatgttggccaggctggtctcaaactcctgacttcaggtgatctacccgcctgggcctcccaaagtgctgggatcacaggcatgagccactgcactcagtcttttctttccattttaaaggagcatcattatgtatagtatccatatttttgtgtaatgttttagaacagtgcttcacaaaagcaaatgtatctatttaaagcaatgccactctgtacaaacttgttgctcagtaatatttacattaaaggtgtatttacaaagaacactggtctttggttatagtagctactctggctctgtttagctgtatggtttagctgtagcctcctgttcaaaagaatgttcccttcctgttttttgagcagtgccatatctttttgagcagtaccatccataggatgatggtgagcagcaaatcatttctgctagaattcctgcttttctctgtgttagagggttggtactttgagactatagtaatagtattagtaataattaaaatttaaaaatcaacagtaatacacactaacagttattgagtccttattctgtgccagcccttttctgagtgctttaaatatatgaacttatataatcctcaaagaactattgctattatttccattacactgttgaggagcttgagaaacagaaaggatattaacttgctggctactaagtaccagagttgggatttgaaactaggcagtgtgactccaggaagtctgacttctcatcagaagtcatagacatggtgaagatgctttctgggtaagagcagtgtctgagttgggagggccctaagaagtcatctagtacaatgccctcctttaacagatcagaaaactaaggccctgagaagttatccaaatgctaaaggttcccacctctctaacagacagggctatgatgagaatggcattctttccattttactgcactttgatttattttatttatttatttttgagatggagtctcactcttgtttctcgggctggagtgtggtggcacgatcttggctcactgcaacctccacctcctgggttcaagcaattgtcctgcctcagcctcctgagtagcttggattacaggcacccaccaccacagccggctaatttttgtacttttaatagagatggggttttgccatgttggccaggctggtctcgaactccggacctcaggtgatccgcccaccttggcctcccaaagtgctgggattacaggcgtgaaccaccacgcctggccctggactttgatttctaattgtgtgaaggtctaagtaggaacatggggtgaaaagacagtaatggaaagaatatctctttttgctcttaataaatattttatttaatccctacctgccctttaggtggatataattatatactgttttttttttttttgttttttgtcttttttttttgaggaggagagctagtaagtggtagaacccttctttaggcccaggattctctaatcccaaagtccatgacctttcactttacacctctgggtttgtttatatgatgccagtcctaccactgagtcttcctgaggggaaagaaactgtacagaccaaaccttctcttagaaattttattgctgaaagagatcttagagattatttttctaatcttccctttttataaatgctgaaggaggagatgtgttgtcaaaggataattagggaaacaagtaagtcaagtgagagacatctttcaccacctgctgctgcatttctagtgcaggtgaaggaggggcagtgctctgcctgtggctgctgccgacagctctggctgctgccctctcgccatcaggcatgctggaggcagagctgttataaataggctcagtctcactgtccatgattatctctttggcatcttgctttttttctgatggagagtataatctatggagggaaactgggtactttgctgtatttggtaccatgaatatatggacaaatgttatgaaaccatatcagtaaatagcctctttaaaaaaaccccacaaaactccactaagttgctgt

SEQ ID NO: 461 - DNA, 32742 bp, Homo sapiens
  source 1..32742: mol_type = other DNA
aacttgccccaaaccacccaactggcgagaagcagggacaggcctcatacttgggtctttctggcttcagcacgctttccttccacacacgtgtactggcacccactaaatgctgagctctgctcaacgctcggaagaagcaggccctgccttatcatgcgcacactctaggggaaaacaagtaacagcgagtaaacaaaggaacagacgacatcagggtaaagtgatggagagactgcggtgaggccaccagcctccataaggagacaggccttggtgaagtcgctgtgcctcggttctcagtggtgaggtggcccatacttactcggtgggtggggctggggctgcctccttagctttccgcttcttatgctcgatgtcccctcgttctggaacaatatcaccatttgtcctttccttggttcctttcttattgtgctctgttccactggccttggtgcgaggtactggcgccctcctgtccatcttggaacctgaaggaacagagcccctgctggcctcctggtcttttcctgccggcatctcctctcccttcacttgaggcgaggtctcttttttgttttgctggataattttgggcttctttttggaacccatctgagagatgacaagaggcttttctggggcctgagatttttgtttcagcagccactgggacccaaaataaaatacatgctgcatttgaatttggaaattacacacagcagattgaaaaaacttacgtgtgtatgtatatacacacatatacaccaaacacatctatacaattcccatccgcatcactgaaattcattttcaaacggtttggaaaaagctctttttcattctcatgggtcacttgtggtgaaatgctgtttctttgcttatcttattataatgcattttgcacctgctccttcatgcatacaaaatgtcaaactcattctacaccttgggtacctgttgagtggctggacaccacagaccacttcccttttcagcttatctagaaagaattttggagttaacttccctcacagcttgggccaacatcctgctacacagaaatcgctttttttttttttacaagattccctggtttgctactgctgtgaagatctcaggaaggtggggggtgtcataaatgaaaagaaaagcttctgtcaaactggagtggctgaagaactgctagcagccacacaccttggctgtcacccaagcagaggctcctgtagtcttagagcccagcttcctccctgtgttcaaatccccagtgggagtgggcgccaccacagtgcgatgatgaggcgggtgctacttacctgttctgtgataggtaaagaactgaagggctgactttcttggatgaattagaaaacactccaaagtttccctatagcacacatcccttccattcacttattttgcttttctttcttgggagaaggaagaagagttggtgttcaagaaatcccacagaaccctggggctgcccacgggaatttgactggtcctgtgtgttaagacaggaatgtctgcactgagatactgtgcagagtattaggaggttcaagaagcgctcggggaggctgaggtgggaggattgcttgaggtcaggagttgaagaccagcctgggcaacaaagtgaaaccccatctgtattagttcattgtgcactgctataaaggaatacctgtgtttggtaatttataaagaaaaaacgtttatgtagctcatggttttgcaggttgtacaagaagcatggtgccagcatctgcttctggtgaggccgaaggaagcttcccatcatggtgtaaggtgaagggggagcaggtgtgttgcgtggtgagagagcaagcaaaaaaggtgctaggctctttttaaacaaccagctctcaaatgaaccagcagagtgagaacttactcgttactgaggggagggcaccaagtcattcatgagggatctacccccatgacccaatacctcctatgggccccatctccaccactggggatcacatttcttttttaaaaaaactactttttacttttatttagagatggaatctcaccatgttgcccaggctggacttgaactcctgagctcaagtgatcctcctgcctgggcctcccaaagtgctgggattacacgtgtgggctactcgggaggctgaggcaggagaatcactggagcccaggcagcagtgagctatgatcctaacaggaggtagctccaagggagctccaagggatgtggtaagaatgtatgagtgacgcacgtggaagagtgtctgggagagagcaggcaacctctacagaagtgcaggtcactagggagacagcaggtacaacacagccttaaaagcatggactccagagtcagccacctggttcccagccgcaatcttagatgatctatttaaacttttccagcctatttcctcatctgtacaatagagatgatgaaagtgtccacctcacagtcttattgtggggattgcaacacacatggcatagagcacatggcagagtgcacatttttaggagctcaattagtatttacttcaagaccgtaagtgtcgctagaaccccatcacatgtctgctatctgcttttcacttctacacaggaatcttctttctccctgtcttgctacacagaccagtgtgttctttcgttgttgttgtttgagatggagtctcgctctgtcgcccaggctggagtgcagtggcgcgatttcggcttactactgcctctgcctcccgggttcaagcgattcttctgcctcaggctccccgagtagctgcgactaccggcgcgcgccatcacgcccggctaatattttttgtacttttttagtagacacggggtttcaccatgttggccgggctggtcttgaactcttgacctcaggggatctgcccgcctcggcctcccaaagtgctgggatcacaggcgtgaggccccgcgcccggcctggtttcgggattttaagctaaatttctctttgtaaaatccattctagttagttcattatgcaaaaggtacaagggtttatctttgcttttttgtacttgaaataattctttcatcaatttctttcaagcaaacaagttcgagacctccctcaacaggccacctttcttgtgaaaagctgtttacaagatttcgattcaaatctgcctttacaggtcttttggggctacccaagtctttccctccgtcgcgttctgcgggaatgagctgcgcagcgctccgcccgggccccctcaagcctcacctcttgcagcgccttccagttttgagaaaagtcttctggtgcctttggaggtcgcaccacagcaccggggccgcttgctggcttcttgcttacttcccgcgccttgcttttccaaaacctttttttcttcttgtttttcttccgagtgagcgtcttgacaggacccggcttagccacggggctgctcggggcgcgcttggaggcggggaccttcgccttccccatcctgctgccgtccagcgcctgggccggcggccacccgagaccccggcctccccgggcccggcgccctggcagcacaagcgcctgcccaggccaggccgaaacacacccaccgcagggaccccgtccaggaaaagactccggaagagaccccgcacgcgttgcgcatacctcagcacgcacgctccagtccccggaagcgctcgtctctccacaaccggctggaaaccggatccctgcctctggttccgcgcagcctgggcggttcacccgcacgggacttgggccgccgccttagccagcggcatccggggtcatcgacctcgagtttgactggggcaagccgaggacctccccaagatccgggatggggatgagagatgcgaacgccggaagggaactggggggccgctgtgtgtgtagcacccggtagggcagctgagctgggggcactgggcggtggggctagtgagagccgggctaggtcgctcgcctgcgtcctggactctcgagcctttcccgccttgggctgctccttgctcagcctcacagcggctcatcttccacgtacagtggggaaactgaggcccaggcaccgggaggagttcctgccagttcactctgtagcaggacgagccgcagacaagaacccctcagacaccgaattgtagaaggaaagggctttatttagtggggagcatcggcagactcacgtctccaaaaaccgagctctctgagtgagcaattcctgtcccttttaagggcttacaaccctaagggggtctgtgtgagagggtcgtgatcgattgagcaagcagggggtacgtgactgggggctgcatgcaccggtaatcagaacgcaacagaacaggacagggattttcacaatgcttttccatacaatgtctgaaatctatagataacataaccggttaggtcaaggattgatctttaaccaggcccagggcgcggcgccgggctgtctgcctgtggattttatttctgccttttagtttttacttctttatttggaagcagaaattgggcataagacaatatgaggggtggtctcctcccttacttctgcctcctgggttcaagcgattctcctgcctcagcctcctgagtagctgggattataggtgcacgccaccactctctgccaatttttgtatttttagtagacctggggtttcgccacgttggccaggctgtcttgaactcctgacctccagtgatccatccgcctcggcctcccaaagcgctgggattacaggtgtgagccaccgtgcccggccgggagtgggtagatttgatgtgcgtgtgtaacaggcagaggttgatggagtaacagggaagtgaggctcctaggattttggtctgagcaattgggtgtggccatttatcatctcaataaatgtctgcggggagcagggtgaagtatgggggtggagccatgagctccttttcacacttgctgagtttgaatgggccgtcagtcaccaaggagagacgtctaatcagcagcaggatataagattcctaagcttagggaagggtcagtgctggagatgtaatttggaaatcgtcagcacataattagtgttgaaacatgaacctgggttagttcatccaaagagagagtaccaatatagggagtgaagggttaagaccagatagcaggtgctgggggctctccaggggcgaagcagcagaggaggctgagggggagcagtcagtgcagtgggaggagaagcggatgtgagtggcatcagagaatccagggggagaataaaccacatcagatgctgctgagaggctgagaaggacgaggacagagagatgggaaccagatatggcactgagattgtcagcaagtccaccgaaaagggttttctttttttttgtttgttttgagacggagtcttgctctgctgcccaggctggagtgcagtggcgtgatatcggctcaccacaatctccacctcccgggttcaagcgattctcctgcctcagcctcctgggtagctggaactacaggtgcacgccaccatgcccagctaattttttttttttttttgagacgaagttatgctcttgtcgcccaagctggagtgcaatggcgcaatctcggctcaccgcaacctccacctcccgggttcaagtgattcttctgcctcagcctcccgagtagctgggattacaggcatgtgccaccacgcccggctaattttgtacttttagtagagatggggtttctccatgttggccaggctggtatggatctccagacatcaggtgatcctctcgcctcagcctcccaaagtgttgggattacaggcgtgagccaccgcacctagcctaatttttgtatttttgaaaagagacggggtttcactatgctggccaggctgatctcgaactcctgacctcatgatccgcgtgcctcgtgatccacctgcctcggcctcccaaagtgctgggattaaaggcgtgagccaccacacctggcccaggttttctttttaaaaaaggaaaaaaactttgttccagcagtttgtaaaccagggcaatgcagccttctgtacaaaggtgcattccagggaacaaagagaacaaagaaagaggtcgtcttttgtagagaacttcctgcccaggttcccactttggtccacttatgcaaatgaggaaggcacacttgcttagttctgattggttaatacttgctgagttcagattggtcgatgcaggtcacagtcgatgggttgattctggcggcataaacaggaacagatagctgtgaaaccatcccagagttaagtgagagtgggggctttccaggaacgcagaatgtgtgtgtgaccctagtcagcaaatggctgctaggtcctactttgaatttaggcccagttagtaacttgggatccatcaagaaggattggctctttcagggttcacaaagttattggtgaccttttaaagatcaatttcaatggtatgtgggaattgaaggcaaggaagtggagatagccactgaaaataatgtttctaagttcttaaagacagccagaaacagggctatggcaggaggacagtgtgggtcaagggaaggttgttgattgtaatcaagagacaccagagtgtctgggcttggtggctcatgcctgtgatcccagcactttgggaggccgaggcagtcagctcacctgaggtcaggagtttgagaccagcttggccaacatggcgaaaccccacctctactaaaaatacaaaaactagccaggcgtgatggcgggtgcctgtaatcccagccacaagggaggctgaggcaggagaatcacttgaacctgggtggcggaggttgcagtgagccgagatcgtgccactgcactccagcctgggtgacacagcaagactctgtctcaaaaaacaaacaaaaaccaaaaagagacaggagagtcattcatgctgatggagtgagccaggtaccaggatctcgatatctaagcatgcccccttctccaacagcctccttaccttcctgcatgaaagcacacccttccctccagtcccccattcctttattctgctgtatttttctccataacacttaccacctttgaacatactacatatacaacatgtgtctgtctagcaactttgctgtctggctctcttccctagaatttaagctgtgagaggccgaggctgctgtctgcctggcttggggctgctttcctggtgtctagcacagagcctggcctgtttcaggggctcagtgaaacatttgttggctgaaggaatgaatgaatggctctagcagaggggcagaaactaacgatgcaggaggagagagctgggaagggatccagagccagggcctggcaggaagtgtaggtgtgtcctccctgatcgcagaggaggagagaggctgcactttgaggggtggaaagacaaggtgaatccccctgctggtcatcagcttgtgcggctctgtgggtgtaaaagagtggtttggagcatgtgaagtgagtcttccaggagatgaaggggattgccaggccgtttgtgatgatgctgagatctggtgccgtgcagcctgcttctgcgactctcctcatcaggcgcaggcacagagtaggtggagagttgagccagaaccacgatgtctttggcacagcctctcatctgtcagatgggagcggggaccccggagagggagtcagccgaggtcctggcattccttgtgaacccccgtctgtgggtttctggtccagtgtcccttctccagattagatggcttaggcctcctctaagggggtgggcgtgcacatccggagagctgtctggtgtgcaggactgggctgcaggttaccctgaactgcaaccatcttagagcaaggcccagcttgcagcaggaggagctgcaggccgcccaccctagccacggcccctgccctggcaggaagcttccaagagtaaacactgcctaatcgtcccgcccagtagtgagcaggcctgtcccattccatactgaccagattcccagtcaccaaggccccctctcactccgctccactcctcgggctggctctcctgaggatgcaccagcgtcacccccgggcaagatgccctcccctctgtgtggccggaatccttgcctgtggctttctcctgggctgctggggaccctcccatttccagcaggtgggctcatttgcaggagcgggggtattctgggagcctctgggtggggtattctgagctacctggggcgaggggagtgccaaatagctgactacatcagctttggggtttgcgctgggcaggggagtctgtacttggggctttgggggatgaagtgtgctcactgaagagggagttggtgtctcagtacgacctgctcattcggtgaagctgaacagacagatactagtttgtcccaaactgtgtaggttgctcttctctgcctctcccttcctctccctgtctctgatttccccctctccttcttggttggcctcacccacctcctgcctcctgtctccctcttcatccatctctttttgttcttttttctttctctctctctctttttttttttttttttttttttaagacatggggtcttgttatgttgccccagctggtctcaaactcctggactcaagtgatcctcccacctcggtctccccaagtgttaggattacaggccagagccactatgcccggccccatccatctctttttgtcttgcagagttgtcttcaggctttggagccacaggccgtgtcttcttacttgagccctggtgctcccttaaaaggtacttgtcctggtgtcttctctcccggggggagtttctcaggactttcaaggggtatctcaccactgagtcagtggtctgggatttttggtggatctggaaggagaaggtcagagaagctgctgtcaaccctgttaattaactctgttacttcctgccaagttgatataagctggtctgggtgttccagccaggccagggttctcaccctagcttctgttaaatatcacaagggaacggtcaccgattggctggcccctcctgccccatggcctctgctgagctggctgattttcaggagctcttgtggtttctgaccgtggatgtaaatatttattccttctgtgggaaacaagataggtactggctcaggctacctcctaaggccatggatttccttatgataaaggcctgtccccattgcccacaggcccatgtctgtgaccttctccggtgcgagcccccttcccagtagggccattggcaacttgactaatggctgatgggggccagaggcaggtgggctagtggtcaggggcaacaggagggcaaggcccactttgtgacctggttctttgtggtctaggccagaggcacactgaccagtgcctggggccacgctgggggctggatgcagccgacgctgtctgggtatcccatagcctgggtccttccagcgctgccgctcctgaaaggctgggagatcattgcccagggtccctgaccctctaagggctcccttgggagaggacagtgagggctggcctgggcccctgcttcccaagagaccactgggctccactcgtgttcagtttcctgtcggggtccatgatgttacttgtgaaacacctgtgcccagagcagggtccaggaggcagggcaggggctttcccctttgggcagagccaccagggcagtgggaatcttgtcttgatggggtgacccaaagcacacaatagcccaacagctcctcctgggccctgccctttgcgtgcctagtcactaatggggtctggctcttggggtgggggtgacacgcaatgtcttgacttcggaaggccatccttccaagacctgccagcccctttcctgttagctttccactgcttgctctctagaaccatcgccctctgctctccctctccccctccaggccgccctccttcccctggcttccagaggcagaggcagaggcagaggcgggctgcaggcggcatcctacacctggagctgctggtggccgtgggccccgatgtcttccaggctcaccaggaggacacagagcgctatgtgctcaccaacctcaacatcgtgagtgccccacgctggactgtgcaggtccccacggccagggctggtgaccaatgtctgtgggctggtgtatctggtagtctgaatacagtgggttaaactcaggtagaatggctcggggttcttcctcttctccctccctcccctgggtggaggtgggtgaggtcccacaccctctctaggctccatggcacatgcacaccctgcagcctctcactactcaagtcccttcacctggggccaccctcaagcctggcctcttccccagtatccatttgacccccacaaagctcagctaaagcaaccctggcaaatgggatacgggctgctcacactgccctctgcaccccgaccctgccctctctccattctcttgtcccccgctcagagtggcgaggacaggtcacccgtctgaagtctaaacagagactgctggcaaaggagatgcccaccttcatttcttgctagcacctgaatccctgcagccccccttcacttgaaagctggggaagggcgggcagggaagcactcccccactagccgccgtctcagaaagacaaacaaggccaggcgcggtggctcatgcctataatcccagcactttgggaggccaaggcgggtggatcacccgaagtcaggagttcaagaccagcctggccaacatggtgaaaccccgtagctactaaaaatacaaaacttagctgggcatggtggcaggcgcctgtaatctgagaggagcctgcgatctgagaggagcagcgtttgaccggaatatccgactcgtgaccatctgtgtgctctcatccccttgctttggagtttgttttccttgcgttagttggccttcctgagccatgagctgaggagcaacagaggcacggctgactgtgcagcacattttaggagccccccgccccgcccggttcccacacatgctggtggagtagcctctccagctcttcacactccgggggcccctgggagtcagcagctgcctggggctggcaatgcccacccgacgggttacctctctcatctgcccttgcacagggggcagaactgcttcgggacccgtccctgggggctcagtttcgggtgcacctggtgaagatggtcattctgacagagcctgaggtaggcatggagctggaactcagcacaccatacagagcgggaagcccaagtcatcgcatctccatcctctttaacctcttgtcccggatgccccaagcagcatggatcacagaatgcattcagccagacagaccagctgccctcccagctctacccagcactcagcacaggctgcctgactacttctctgagcctcagttgtctcatccctaacacgggctagtcatagggttgttaggaggactaactgggaaacaaaccgaccgcagtcagcaccgtgcctggttggggtgtcctaaatgcaggctttgctgtgggtccgcagggtgccccaaatatcacagccaacctcacctcgtccctgctgagcgtctgtgggtggagccagaccatcaaccctgaggacgacacggatcctggccatgctgacctggtcctctatatcactaggtagccgagctttctgatgggtgctggccagccagcctgggaaggctgctccctcagcctcctgccctctgcaaaggtgaccccagggcaggcacgtgccttggcaccacccaagtgactgttttctctcaccgaggtttgacctggagttgcctgatggtaaccggcaggtgcggggcgtcacccagctgggcggtgcctgctccccaacctggagctgcctcattaccgaggacactggcttcgacctgggagtcaccattgcccatgagattgggcacaggtatgtagccccaccagctgtccccaggatctggcaaggagctgacctgggtacccagggtggaggtggtcttagcaagcagtgggtccttgtagagtttctccagaggagcctgtacccctcaccccgacagactcaggtgtgaggacaggggaacctgatactgtttgattaaaagaactttttttccaaaagacgagcaagacacctttagcaggtagaaaataacttctgtagaaaattcaggtaaagaaagagcaggctgtaaaaattatctcaaatcccaccatttagagataatgtctcttcacattttgtatttaatttcagtcttttctttacatacacacacatatttcttatttgcaaaattgggatttagtttggatccctgaaaaaaaggaaaattgtgattatgctgtgcattgctttgttacctgctatttctttttcttttcttttcttttttttttttgagatgaagtttcgctcttgttgcccaggctggagggcaatgacgtgatctcagctcattgcaacctccacctcctgggtgcaagtgattctcccacctcagcctcccaagtagctgggattacaggcatgtgccaccacgcccagctaattttgtatttttagtagagacagggtttctccatgttggtcaggctggtctcgaactcccaacctcaggtgatccacctgcctcggtctcccacagtgctgggattacaggcgtgagccactgcatccagcctttcttttttcttcctagggtaagtgcaggatttacctgttctttatgtaataatatatcccaaacattatcccaggtatcttagaggtgtgcaccgtaatttatttaatcagtcccctcttcttggatgtctaggttgtctgaacacgtcttcctgttgtgaatgttatgcattcttgtgggcaaaccttcactcttacctataaccatttacctagagtgatgggtttcttttcatttctttagttttttaagtatgaaaataatacccaattgttgtaaaaattcaaacagtgcagagatttctaaagtaaaaagtgaatttccacattccttgcccaccaacccccacccgacccctttcaacccctctgagcctgggagggttgaggcagggttcctgggtgtgggacaaggcagggctccttctccctcagagggagcatagttcccttctgctcctgtgatgcagaagacgtgagcccccaaactggggcttagcctgggagggttcttggcttcaccgaggaaagaattcaagagggagcaggtggtgttagacagcaactttgattgatgtggcagtgggcagagtgtacagccctgtgactgtatacagcacagcatagccccttttgaagccaggctaccccatagacactgtgcccaaaagagcagctcaaaggcagggctgcagtcctagttaatacccacttctaattatatgcaaattaaggggccagattatgcagaaatttctagaaaaagggcagtaacttctaggttttcgtcatggaaaaggggcagtaacttctgggttttgccatggcaatggcaaactggtatggcacactggtgggcgtgtcttatggaaaggggcttcccacccctccctgttttagctagtcctctggtccagtgtccaagcggggcctccagagtggagtccacctcctacctcaccggtgcctggcctctcccaccccattaggagtcctccatcagttccgctttgggtaaagcaagctctgttgtgacagtttggaaacggttcaccttcctggcctaggaatgcaaacaatggccaagggcaagcacgttttaactgaactttaaaatcgtgctttcctcacagtaggtgaatttcacgctcaacacatccatgtaaacagtccccagagcagcccttcaaggccccggccagtccccacctccccacagactcctaacaccatgatttaatgtggcttgcacatttttaaaggcttttgatatttattagcaaaagatgcgagagccaccctgctgggctagcgctcccttctgggggaaactgaggcagggcgcacgcgaccctctccactgcgcccagttagcagatggcggcgtcaggggtcgacccgggtcggaaaactcgctggcgctgcggcactagggcgccgggccgctgactcgccgacccccgtcccgcccccacccccgcccccgcccctgccggccgccttagcgcaactccccgccccccgaccagcttcggcctggagcacgacggcgcgcccggcagcggctgcggccccagcggacacgtgatggcttcggacggcgccgcgccccgcgccggcctcgcctggtccccctgcagccgccggcagctgctgagcctgctcaggtagcggccgccccgtgggaggggcgcgcgagcctccagccagcccgctgggccgccagcgccacctctctctacgtccgtccccactccgcattcagccctccttcctgtcccacccctccgtccaacccacccctccgtccaaccccgcgcccaccgctccgtccgtggaggggcgggcgcgcgagcctccagccagcccgctgggccgcccgcgccacccctccctacgtccgtccccacctctccctacgtccgtccccactccgcattcagccctccttcctgtcctacctctccatcctgacccactcctccgtccaaccccgcgcccacagctccgtcccatcccgctgcgcccactcctgcgcccacccctccgtcccaacccctgcacccacccccccgtcccacccacctgccccaccccctgcacctccccccgtgctgtcccactctgcggccacccttctgtccaacccctgcgcccaccgctccgttccaccccctccctgcgcccacccctgcgtcctccctcgcccccttgcgcccacactttcgttccagccaatctgggcacgcacccctccgtccatccccatcccgccccttgactccacatacactccctggttctctcccacttgcctacacccacccctgcatcctaccctcctccatccacccctccatctcagccccctgcacccaccccgttcctgggcccaccctgttcctgcacccaccccctcacttcacccccttacccttcgtctgcctccacccgcccctacccctccgtccactctccacgctccatcagtcccacacccctatctcccccacccgcgtacatgtatccctgcgtccccttcccgccgaccgcaccgctcccgggcctaacctgcatctgctccatcccactcagacccgtccctccgtcgccgctccctctgctggccacccacctctgcgccggcaggagccttagtcttggtcccagccaagagccggctcctggtggggggcgcgggccgagaactcctgttcccactcacaaaaggccacgcttccaaacgcttccatcctcgtgcccactcctccgtcccgcctcctcccggtgtacaccccgggactgagccgggcctgagccgggccttgtcgcagcgcaggacgggcgcgctgcgtgtgggacccgccgcggcctcaacccgggtccgcggggcacccgccggatgcgcagcctggcctctactacagcgccaacgagcagtgccgcgtggccttcggccccaaggctgtcgcctgcaccttcgccagggagcacctggtgagtctgccggcggtggcctgggattggctgtgaggtccctccgcatcacccagctcacgtcccccaaaacgtgcatggtgagaacctgctgggtgccgtgctaggctgaggtactaagccagggcggcttagtttaatgctgtctgtgccctctagaaattatttaaaatgtttgaacaaaagctccaacatttttgtttgactgggccccacaaattatgtagctagtcctgggagggcccctgtgcccaaggactcctggctgagtgaggacaccaatcttaaacagttaccaaggacttccccatctattgtggctggagtcagactggagggcttcctggaggaagtggcctctaaactgaacccacagcagaagtggggctggtagggggaggggagatgaaggagagcaggcaccccaaaagacagacttcctcgcaggattgcataggacattcatgggctccaggcacttttgccttgatgggccccttcctccacaaaaaaattgagaattatgttttaatattcttatacaatgtataaagttttatgtgttactataaatacaagtctttttttttcctttttttttttttttttgagacagagtctccctctctgctcactgcaggctccgcctgccagattcacaccattctcctgcctcagcctcccgagtagctgggactacaggcgcccgccaccacgcctggctaattttttgtatttttagtagagacggggtttcactgtgttagccaggatggtctcgatctcctgacctcgtgatccgcccgccctggcctcacaaagtgctgggattacaggcatgagccacagcgccccgccaagtctttttttttaaattattttgagacagggcctcgttctgttgcccagggtggagtgcagtagcacaatcatagctcactgttgcctcaacttcttgggcacaaacgatcctcccacctcggccttggagtagctgggactacaggcacatgccacaatgcccagctaatttttaaattttttgtagagatggggtctccctttgttacccaggcttgtctaggactcctggcttcaagccatcctcccacctcggcgtcccaaagcactgggattacagacatgagccaccacccacgcctgatcagcaaatctattaatattatatattacaacattaattttgacctggaagttcattttttcattttttttttttttttgagacagagtctcactctgtcacccaggctggagtgcagtggcacagtcttggcttactgcaacctccgcctcccaggttcaagtgattcccgggcctacgcctcccgagtagctgggactacaggcatgtgccaccatgcccagctaagttttgtattttttagtagagacagggtttcatcatgttggccgggctggtctcgaattctgacctcaggtgatccgcccgccttggcctcccaaagtgctgggattacaggataagccaccacacccagcctagttcatttttttcttctgattttattttatttatttatttattttgagacggagtctcgctctgtcacccaggctggaatgcagtggctcaatcttggctcactgcaagctctgccttcagggttcaagccattctcctgcatcagcctcccgaatagctgggactacaggtgcctgccaccacacccggctaattttttgtatttttagtagagatggggtttcactgtgttagccaggatggtctcgctctcctgacctcatgatttgcccgcctcggccttccaaattgctgggattacaggcgtgagccacagtgcccggcctttttccttctgattttaaaagaaattaggccaggtgtggtggctcacgcctgtaatcccagcactttgggaagccaaggcaggcggatcacctgaggtcgggagtttgagaccagcctgaccaacatggagaaatgccatctgtgctaaaaatacaaaaaattagccgggcgtggtggcgcatgcctgtaatcccagctactcggaaggctgaggtaggagaattgcttgaacccaggaggcagaggttgaggtgagccaagatcgcgccattgccctccagcctgggcaacaagagcgaaactgtctcaaaaaaaaacaagaaagaaaaagaaattaaaacatttgcctcttgagcttcaagtcagtgacaagttaagaaggaaaaaaagaaaaaagacacaaaaaacacatttccatgggcccccaaaagtgtgacaggacctggtcatggtcccggttccccatcgatgggtcagtcatgccttgtcctctgagggcaccagtgcccacggtgcagagtgttggctgtgtcagtgtgtcctgcagtctgggagggacagttaaggttggacactggcctggaaggccctggtggcccctgagctcgccacccacctgtccaccctcctaggatatgtgccaggccctctcctgccacacagacccgctggaccaaagcagctgcagccgcctcctcgttcctctcctggatgggacagaatgtggcgtggagaaggtcagagccaagagtgaatgagtgggctcctgtgagcacgtgcacgtgggtgcctccagccaggccgccctattcctaggtcaggaggcaggaccagtatggggcagagagtcttggagttggccttggggactgtcctttgggttggtggtctgacctctttcctttagcatttgctcccatgcagaatgggaatgtgggctgcctgttgtatggggggtgcccatgggtgtggggttcctttgggtggggtccctgtgtgaaggtccttgtggatatggggtgtctcggggggatccctgtgtaaggggtccctgtgagtgtagagtccctgtgggtggggtccttatgtgtgtgttggaggatccctgtgtgttgaggggtccctggggggttctgtgtgtatgttggggggtctctgggtgttggaggatccctgtgggtctgggggatccatgtggctggggtacctgtgtgttggggggtctctgtgtgtgttggagatccctgtgtgttgggggatccctatgggtgagttccttgtgtgtgtttgggggtcgctgtgggtggggtccctgtgtgtgttggggatccctgaggatgttgggggactctctgtgtgtgttgggagtcctgtggtggggtcactgtgggatgggagatgaagccatccttgccttgcagtggtgctccaagggtcgctgccgctccctggtggagctgacccccatagcagcagtgcatgggcgctggtctagctggggtccccgaagtccttgctcccgctcctgcggaggaggtgtggtcaccaggaggcggcagtgcaacaaccccaggtaccgcagggagggtgcttttctgtcagggagtgtggccataccatagtccctagttgaaggcagtggtcaccctgctgtctcaccctcctgtctgctgggcattttcagacctgcctttggggggcgtgcatgtgttggtgctgacctccaggccgagatgtgcaacactcaggtaggcctgcttcctggggtaggagggggcagctggtggcaccgggccctgggggagccaaagtgaccatctgtggttcacaccaggacacatttgagaaggacattggggccaggtgaggtggcttatgcctgtaatcccagcactttgggaggccaaggcaggtggatcacctgaggtcaggggttcaagaccagcctggccaacatggtgaaatctcgtctctacagaaaatacaaaaattagccgggcgtggtggtgggcgcctgtagtcccagctactcgggaagctgaggcaggagaatcacttgaacccaggaggtagagcttgcagtgagccgagattgggccattgcactccagcctgggcgacagagtgagactctgtctcaaaaaaaaaataaaaattaaaaaagagagagaaggacattgggaccccagttcataaaccaggccagtcctgctgatgcccacagagcccctgaagcgtcccgcctccctccctgagtgccactttgccctccagagcgcatctctgcagggagaacctccccactaggaatacagtgcgctgctgcatgcctgcaaaggaattttttaaatattatttttatttttttagacagagtctctccctgtcacccagactggagtgcagtggtgctatctcagctcactgcaacctctgcctcccaggttcaagcgattctcctgcctcagtctcctgagtagctgggactacaggtgcccgccaccacgcccggctaattttttgtatttttagtagaggaggggtttcaccgtgttagccaggatggccttgatctcctgacctcgtgatccgcctgcctcggcctcccaaagtgctgggattacaggtgtcactgcgcctggccgaaggagtcttttatttataaattgaggtgacattcatgtagcatgaaatcaagcattttaaagtggcaactcagtggcctttagtacactcacaaggttgggcaagtactgcctctgtctagtttcagaacgtttccagtactctggagtactctggagtgaaccccatatggtaggctgtcactccccatttctcctccgccactcagcggccattggtttcccttctgtctctgtggattgacctgttctagacatgccacgtacctgaggccagacaacaggtgtgcttcctgcctgccttcctcccccagcggcacgtccccaaggctcacctgtgttgtagcctgtgtcagcgcctcattcctctttctggctgaatcatattccactgcagggatagaccacattttcatccagtcgtctgctgatggacatctgaggtgttttcaccttttggctcctgtgaacagagccgctgccaatgtgcttgtacatgtttgaatccctgttttcaattcttttggcagtatgctgaagagcggagttactggatcgtatgggaattgtatgtttgacttttttttttcttttttttttttttgagacagagtcttgctctgtcgccaggctggagtgcagtggtgcaatctcagctccctgcaaccttcgcctcctgggttcaagcgattcccctgcctcaccttccggagtagctgggattacaggcacgcgccaccatgcctggctaattttttgtatttttagtagagatggagtttccaccacgtcagccaggatggtctggatctcctgacctcaggtgatctgcccgccttggcctcccaaactgttgggattacaggcatgagccaccgctcccggcctatgtttgactttttttttttcttatttttttctttctttctttatttttttttttttagagatggagtctcgctctgtcgcccaagctggagtgcggtggcgcgatctcggctcactctaagctccgcctcccaggttcaccccattctcctgcctcagcttcccgaatagctgggactacagacgcccgccaccacgcccggctaatttttttttgtatttttagtagaggcggggtttcaccatgttagccgggatggtcttgatctcctgacctcgtgatctgcctgcctcggcctcccaaagggctgagatcacaggcgtgagccaccgcgcccagcatgtttggcttttaaagaaactgccaaaccgttttccacagtgcctgaactgtttcacattcccaccagcattgcgccagggttccagtttccccacatccgctgcagcacttgctgttttctgttgttgttttttcttttctcttcttttttttttttttttttttaatagagatggggttttgtcatgttggccaggctggtcttgaactccgaccccaggtgatccgcccaccttagcctcccaaagtgctgggattacacgtgtgagccatggcgcccggcctgttttctgttttttgattttggccatctcggtggtatgaaatggtagaaagattctttttacattgagttaaattctatctcctgcttcgatggccctgggtgtgggtttgtccctggctgtattacagttctgcatgtggtgagaccctccctttcctccttctccaaatggaccaccaagacctccccagaccgtgaggggagggtctttggctggagcacagggtggtgggatttcgtggaggcagtgtggtcagtgtggctgtccagggagtcaactccggttatcttctgtcagcccataaaagtccaagacgcctgcctgagtgcagaggcttcggtggtgaggtctttgctccatgctttggttacctgcctctaggtgcactacctaaagaatacacatccccgtccctgttttattgagttcaggccttggaagcagaggctctgagcgtaatgctctttcctggctttcttcttcgttgctgccctgtgttctttacggattccccggggttttcccatcaatagagagaggcaggcacttttgtcaccccagtttacagagcagggaaccgaggcacggcctggagctgaggccacacccacatcttgatcctgtactgtagggtgccatgtagtctcccagtgacaacacccgccccccgccccaccgccatccccctcctctgcctcctcctggccaggcctgcgagaagacccagctggagttcatgtcgcaacagtgcgccaggaccgacggccagccgctgcgctcctcccctggcggcgcctccttctaccactggggtgctgctgtaccacacagccaaggtggggcctgcggagtgtggggttgggggaggagccagccctggagaccctcggacagggcagagtcataggggggttggcctactatccctccagcactgggcaaagtggttcaggctctggcatcccacagaccatggatgacatagtggccaggcctcgctggtagatcaggcactgacatcccatctctgagtctcaatttcccatctgtgaaatggagataatagcagtaggtccctccctgggcgctacaaggattcagggagataatcggaaaatgccaagtgtgttccttggttcatgatactttttttgtgagacagagtcttgctctgtcgcccaggctggagtgcaggggcgtaatctcagctcactgtaacctccgcctctgggattcaagggattcttgcccctcagcctctcgaatagctgggactacaggcttgcactaccatgccggctaatttttttgtatttttagtagagatggggtttcgccatgttggctaggctggtttcaaactcctgacgtcaggtgatccgcctgcctcggcttcccaaagttctgggattacaggcatgaaccattgcgcccagccttggttcctaattcaataccattaattattagattagattaggatcgtgattaggattattgccttaggaggtgggatgtggggaagatagaaacccttgccccagatgcaaaggatgaagctgggtgggggctgggggacttgcccctcctgctcggttcaggacaccctttttcactctgccctcccaggggatgctctgtgcagacacatgtgccgggccattggcgagagcttcatcatgaagcgtggagacagcttcctcgatgggacccggtgtatgccaagtggcccccgggaggacgggaccctgagcctgtgtgtgtcgggcagctgcagggtaggcgtgtgtggacattggcgatggccctggggcctacctgtcctatcggaaggctcctgggggcaggttggtgggtgctggccctgatggagctgcagtgccctctgcaggggagtggtgctggggaaaaggatctggacttggagtcagcctgggttaagggctgcagtgtgaccttgggcaagtcactgagccctctaagcttgcttcctgtgtagatggtggggtgctatagaagtgttgctggttttgtggatcccagaatctcagagctggcagggctgcagagtcattgaggccagcaccctccagtgacacgggccctctgtccttccctttgcatagacatttggctgtgatggtaggatggactcccagcaggtatgggacaggtgccaggtgtgtggtggggacaacagcacgtgcagcccacggaagggctctttcacagctggcagagcgagaggtaggcggcctccctcggggcagaggctgggcttcccccagcctccaagatggccacagcccagagcgttggtgcaggggctgctcaggtcacagggcctgcacactcactcagccctggatgcctcctgtggtgtcagcgtctccctcttccacttcgccacccttctgtggcaggctcaggttttggccttgatgctgctgggactgtggtgcctcagtaatggtcactcactgtagccgtgctgcaaaaaaaacacagacattggccgggcgctgtgctcacgcctgtactcccggcactttgggaggctgaggcgggtggatcacctgtagtcgggagatcacctacagcctggccagtatggtgaaaccccatctctactaaaaatacaaaaattagctgggcatgatggcgggcgcctgtagtcctagctactcaggaggctgaggcaggagaattgcttgaacccaggaggcagaggttgcagtgagccgagatccctctgcactccagcccgggcaacagagtgagacactgtctcaaaaaaaaaaaaaaaaaaagtatggacgttgtgcattctgtggcagctaccctcttctctcctgctcaagaaatcccactgagagggacacaagtgaatgagagggatggtagttacatttggaaaatctttgactttggtgtatatatgaggtcaaaaaccatttgcaaatgccagtgcttctatggagagcagagacttgagccctgcctccctctggcttgccccactgtgctggagaaccttggacccggtcccttctcccagccagggcagagccttggcaggtggtcctccagcctgcttttaattgcccccatgacaggggactcactgctgctggagccagccccatggcattgttcaatttttcccgaccagctaagatcagctccctttgtctgtggtgtggtggctgtgaggtccacgcatctctccttcttttcttctttctagaatatgtcacatttctgacagttacccccaacctgaccagtgtctacattgccaaccacaggcctctcttcacacacttgggtgagttgactggaggactcccacccagttagctagactgcaaaggtgcagagcactgttgccaagatgccctcacttctgacatcacccgcaagttcagggggttccccaaaccaccctcaggcttgatagttgactaggaagactcccagagctcactgagagctgtggcacatggctgcggctccttccagaagaacacaggttagaattgtccaagggaagagatgtaggcagagtctgggagggtccaaccaggaggcctgatgtctcagggatgtgacacccttctagcattggagcgtggccatacgcatggagtattgcccacacagaaagcccactgagtgggagttgagagtttttcctggggtttgagtgcaaagacatgattgactaattggccaggtggatactctcagtctcttggtgacccagcccctatcctaaatcacatagttggtctttctggtacagccagcccctgccctaaaggaggacacttctgcctggtgtgacccgtgtttcctcttggaagccaacagcaaaagctggacttctctttgggcaaggcccgcttctttgctattgagggccacagtgggtctttctggagtgtgtctgcacctaacctttgaagccttggttgccggcacttgccatggggtccctgagccctgagcctgttgagttctgtgcgtgagtgcacttggtcatagcactcaccaggttgtggaaagaggcctagagcctccgctgtggggaagcctctagctcagatgcctgtggctccttagaggagggctggggaccccgggaaggagagtcactgacatgtgcctgtgaggaggatgggtgctcagctccacacggctaacagggctggttccccgacagcggtgaggatcggagggcgctatgtcgtggctgggaagatgagcatctcccctaacaccacctacccctccctcctggaggatggtcgtgtcgagtacagagtggccctcaccgaggaccggctgccccgcctggaggagatccgcatctggggacccctccaggaagatgctgacatccaggtcagcaggagagcctgggggaggccagtgggggcttcttcttgggggctatggctgcttgctcgtttgtctatccatccattccctgattcgttcatttattcattcagcggtcacttacaggggacccactatgtgttgggccctgtgctaggcaaaatgtagctagctcctccaggggcttagggtcccacaaatatccaaatgtgtctgtgcccagagcccgtgggagaaggccctgcagttctgggatcaggtaaggttggagggcccaatgcaggggtccagggctccctgggaaagagtgatggagctgaggtgtcagatgagcagatgttgctgggccaagcagggaaggaagcgtatggctgagggaacagtgtcagtgtgggagggatgaaggaaggtcctactgtgtgggtttgtggggagatgaaggcatggacgcaggtgcagtggcatctggggagtaggccttggtgctgaggaagctgagaacagatgctggctctcactgcttctttggtgcagtgtgtgtgggaaccggaaggccttgttcaggcgtgtcctcagtgacgtgtgctcgcccatgtatgtccccattggtgcttcgctgaggaaggcacgtggagggtggagagacataagcgcaggctgaaacagacctgagaaccttgggagaggggcccagtctcagcggccggagcagcgtcctctgcccctacagcagccagagacaggagggcctcccacagatcaggccaggccgggccaaagcaagcccctgtgagcggcttatcccttctcttcccctgatatggttcccttcctcccctccccttgcctgggacattgtatccagatgctagctgccgagtggctctcccatcatcctctgcagtgtgtaaaaaagcagattcccgggtcctctgcatattccctgaatcaggacttccctgtgttgggcctgagaaaccgcaccgtaaccaacacaggcttgcggcactggccagatgtgggcatcgagggggcaggtgcggaatgtcacctcgccctgggctctggccttcaggctggcctctttcttgggctggtcttgggcacaggacccagttaccctcctgaagagccttaggcccaggaacctgctgaagttcttcctagtgctctccgggccagtcccaagccagtagctggccacaggtccccagggatccagtttcttcctgccgaccctaccacaggtccccagggatccagtttcttcctgccgaccctacgggcctcagctctggctccagaagcactttctgtgctggccctgccctagcccttcttgggctccttagcccagcctaaggtgggcctgcctcctccactgcactttatcctctacccagccagcttagggaaccttctctgtgctgcccaaataccctatcatgtaacccaccaatgacttggtaattacctccccgagccctctatcccaacccactgagagctccttgcagctcagccagtgtcctgtgcactgtgctatccccagagcctggtacaggtcagtgttggtgattgcttcccgttatttttgtctttgttgtttttttagagagggtctcactgttggccaggctggagtgctatgttgcccaggctgctctgaaactcctgggctcaagtgatctgcctgcctcaggctcccaaagttttgggtttacaggcatgagctaccgtgcctggccagtgattgcttgctgaacgaaagattatagggatgcaagaagaagttggaaggcttcccaggggaggtggccatgacagtgaccctcagggaacccactggacaaggcctgaagctctttgtctgcaggtttacaggcggtatggcgaggagtatggcaacctcacccgcccagacatcaccttcacctacttccagcctaagccacggcaggcctgggtgtgggccgctgtgcgtgggccctgctcggtgagctgtggggcaggtgagacctggggaaggctcatccacagcacggcttgcccctgcagggaggcggcctagccctccctcttccctcccagggctgcgctgggtaaactacagctgcctggaccaggccaggaaggagttggtggagactgtccagtgccaagggagccagcagccaccagcgtggccagaggcctgcgtgctcgaaccctgccctccctagtgagtgtggtgctgtctgcgcagctccaagggggagagagggttccgctggggctgctgggctctgtccctggcctatggggcccatgtggcagggccgggctgagctgctcctgtgcaggctctcattacccctgcccacagccctgcaaggggggctctgtgagtgcccccattctgcaggtgaggacactgaggcttggggcagacatggtgacaatgtcagcccagtgggacccacacctgctgccaccttgtctgggccaccgaggcctctcttgagctcaggtactcatggtgagatggaggtgattgcctacctggagggttgtagggagacttgcggagctcctggtgcaaagcccctggctgtcaccacacctgacggggcacactgttagggacgaggccattcctgctgggtgcaggacagggcagctgctcaccagcctgtgattcggttgtcctcaggctcagccgtctggcagcctgggaacacctggagaggctaggctggccgtagtgcccattgcttgtcccagaccgggggagtacatcagcacctgccaccccatcaccccaggccagcctgggacctggccagggtcccgacgctctgtctccttcctcagctgggcggtgggagacttcggcccatgcagcgcctcctgtgggggcggcctgcgggagcggccagtgcgctgcgtggaggcccagggcagcctcctgaagacattgcccccagcccggtgcagagcaggggcccagcagccagctgtggcgctggaaacctgcaacccccagccctgccctgccaggtgagcccagggctaggtggggctgggagagggccttcctggcagagctcgtccctgcgctgagcccccatccttctgagaatcccctcctcctgaggcctccggcggggcctcaccatccagggtgatgggcagtgtcacctggcggttgtaagtgctgctgtcagagttccttactacccaggagagcctgggcccattgtttccctctctgagcttccgagcccctgctctgaaatggggatgccgacctgcctggggagggggggcttcgaggatgaggtcaaactgaacggagtgggagatgtcactttctcatcaccaccatctcccccgtgcccacgtggctgcatctcatcccctcagtgtccaagttgacagtggcttatcatcctgccctgccactaacgagctgagtgacagggcaagtcccctcctctgtgggcttcagttttgcgacctgtccggtgggaggggattggtctggattgttggtggcccactcatagctctggactcctttccccgcctcgtcatccgtggcagacaaaacagtcaccactcttccccgctgaggccagatagggcctcagaatccttctcacacagctctccaggcagccactttagcgcagggctgactcacagctgaaacccattggccacccttgaacctggtgatccaattccatgtggcacctgtttctctgcacctgctatggtgcatggagtcagtgattacctggctggaggtcggcctctgcctctggagagtaggagggatgggttctcttttttttttttattaaaagacagagtcttgttctctcacccaggctggtatgcagtggcatgatcttggctcactgcaacctcctgcctcagcaagtgtgcgccaccaagcccaactaatttttgtattttttgtagaaacagggttttgccatgttgcccaggctggtctccaactcccgggctcaagcagtctgctcacctcagcctcctaaagtgctgagctaccgtgcctggccagggataggttctgtctctgcaccctgggtgcaggtggggtgcctgactgttgagcagcgagtgcttgttgaatgggaacctgctggctgatgaatggggaacccggtgcttcagggagagaccctgagcttcacttctctgtggggctcctctttgggctcctggatgttggggagcaggtccccttcctccctgcccctagcagctgggctataccttcccctgggtggcagaggcagggcctgatgactgtctcatgccatcctcaggtgggaggtgtcagagcccagctcatgcacatcagctggtggagcaggcctggccttggagaacgagacctgtgtgccaggggcagatggcctggaggctccagtgactgaggggcctggctccgtagatgagaagctgcctgcccctgagccctgtgtcgggatgtcatgtcctccaggctggggccatgtgagtgccctgggcatgagggtggctggggctgttgagtcctttacctggctgggagaacgaggagcacccattgccaccgtcctccaggccagagcaagaacaccatccttctgtgggaatgctgtctgagggccacccctgctcagaaaagaagcttagaaagagggctcagggcccctgggaaggctcccattccccttgcaagccgggctgagggaagcatctgaggagagtgtaatgcagctgctgtgcagagaaatgctgccaggctcccgcctggcgtccaggggctggaggctgactggccttgctctctggcctgggtgctggcaaccctcgcccctcatggctggggggattgcagggccaggcatgctcccatgtcccactcttggtccccagctctcggccaggcccacagtgagcactcatgctgctgaggagcctgcaaaggtggggtgtgcagcaaggatacccgctgcgagaccggggagccgatctcgccaagggaggaggggagggagcccctggtgcacacacgccacttcctggtctctctgctgctgcctgagaagatcgagacggggatcgctgggtcctcagaggaggcccagacccaccagcttgttgctattccccacagctggatgccacctctgcaggggagaaggctccctccccatggggcagcatcaggacgggggctcaagctgcacacgtgtggacccctgcggcagggtcgtgctccgtctcctgcgggcgaggtgagggcccccgggatgctcctggggaccagcactcatggtaactctcctgtccacttgcatcttgcctcgttctgaaaagcatttgaggtggattgcagaaaatccagactatatgggaacacgtggtaatacacaaggagactaagcatagtagctgacagccacttcaaatgtgggtgttgattggctgaaaggtaggaaaagacaataacgcccggcagtgtggcacgagagccattccttatggtcctagcagagcggccggggggtccccaattgatgacccgagcagagaaaccttagctttaagatacacagcgttcttctattttcccaatcttgttttattgcagtataacacagatattataaaatttaccatccaaactgtttctccctgtgcaggtcagtggcataaaagcacagtcacattgttgtgcggccatcaccaccaacctctccagaacttttccagtttcgcaaactggagctctgtccctgtgaaacacgaactcccatttccccctccgcagcccctggcaacctccattctcctttctgtctccagattccacaattctagggaccttgtagaagtggaatcatatagcatttgcctttttgttactagttttcactcagcatgatgtcctcacagttcatccatgttgtagcatgtgtgagtgtttccttcttaaggctgaaaaagattccattgtgagtgtatcctttacaggtttatccatttattcatcagtggacacttggcttccttccacactttggctattgtgaataatgcttctgtgaacatgggtgtgcaaatatctgtttgagttcctgctttcagttcttttgggtgtatatctagaagtgtggtagctgggtaagatgagaattctatgtttaatttttgtggaactgctggactgttttccccagtggctgcaccattttacatttccactaatggtgcataagagttccaatgtcctcccatccttgccaacactttttatttctatggttttttttgtttttgtttttgtttttgagacagagtctcattctgttgccgaggctggagtgcagtggcatgatcttggctcattgtaaccttcgcctccggggctcaagtgattctcgtgcttcagcctcccgagtagctaggactacaggcgtctgccaccatgcctggctaattttttgtttagtagagatggggtttcaccatgttggccaggctggtcccaaactc

SEQ ID NO: 462 - DNA, 12302 bp, Homo sapiens
  source 1..12302: mol_type = other DNA
acgttgtcccagtcccggtgatcggaagttctccgtgggcactgggcggctgaaggctccggaactgcgcctgcgcttttcggtgagtcatgcttcaggtttgccagggcctgtgtcccgcaaaaaggcgagcccttattcccagcggaagcccaccccggctcgcggcagctttccggtgcgccctgggcggcgtagatccgaaggtgctcgcacccccgccccttcctctccgactgtcgaggtcgccagagtgggctgaaccctcgggactgtcgctgtttgtgtgctgggtgccgggccgtcatcccaagatgattagcggcaggctttgcatgttgctcgaccccacccaccggaactcgaacccgggctagaccgggcagttgggctggtcccttcctctcgctgcacctttactaggggtcaccattaagggaaatggtcctagtgcagtgctgagtggctgttcagtaaccgctacaccgctgccaacatttggcatcgtttctctccatagagggcggggctccctgtgaagctggggagctgttaagtgggttagggctagaaagttacagtttctctttaggctttaaagagatctaaagatctgaacagatctaggttatttttgacttgttacaaacttctggaaacattgtttccagacctttcctctcgttcttctcagggtttaggccatttttgtgcagatgtgtgcaccttgcttactataatattagctaatctttataagtttttatatggatccaataccatatttcgtgcctacttttcctggcactgtatacactttttggtataggtatgcacctaagcaagcattatccatattagcatcagttctagaaccgtggcgtcccaataatgatagccattagttacataaggcttgatcacttgaaatgtggctagtccgaattgagatgtgctgtaagtgtaagacacagtgaattttcgagaattagcatgaaaaagaatgtaaaatatctcaatttgtttatattaatcacatgttgaaatgactattctggatacactgggttaaataaaatgtataattaatttcaccaatttttattttttaacatgactactggaaaattttaaatcatatttgtggtttacatgttatatatatgttgcacagccctgctctagaaaagggtcaacaaactatggcctgcagccaaatccagcctgcctgtttttgtaaacaagtgttaccagagcaagatcatgcctatccatttatgttattttctgtatctgctgttgctgctacaatagcagcagagttgagtagtccatagagattgtatggcctacaaagcctagaatatataccttctgatctttaacagaaaaagtgtgctgaccccctgctgtagaacaatgcctggtttggtagatatttttaagccttttaattgtagattcacatcctattattcacacttactgtgtgacagccatagttcaaagcactttatcaagactttcatttaattctcattaatcctaggatgttggatttctcccattttgtagatgaggaaattgaggcacagaatggtcaagaaacttatccaacttgctcagcacccctcacttctgggaactggacctgcttgaccttccttatgcaaatgttttgacccctcaaacccacttcattagcccacagtgggcaccatggtttttttgtttgtttgtttgtttgttttgttttttttaacaagatttatttgaactagaatttttgaatgatttttttgaactagaatcgagatgggcttggtctcctacgaaagaagccaaggggcactgggcttaggtgcaatgagtacaagcaagctggtgtgtagtgaaaagaaatgaagctcccaagcagagaagagagagagcatcctggatgctcattactcatttaacaacaacaaaaatgtgttaagtaatagtaagcactgactgggtgtttgctaggtgtgtataggtgaataaaacatgtggatcttctcttatggtcttgtggggaaggcagtaaaaacgttttttaaatgtgattaacaccatgaaaaaaacttgcaaattatttactgtttttagcaggtttcctcacctgtaagatgaaaataagccattatctgtattgcaggagtattgtgaggattgagatgactggagtgtgtgtggcctggagagttgctcaataaatatatgttgccttccactgtgaagaggtaagtgagagggtgaatatcaggaattgtgtacattatgacacttaaaatattacagttgtcatttgtaatttgtagagaaggttgtcagctgcattgtacacagtaggtgttttaaatcttttctgactgaatgggactcatctagaaaagccagtcatagagttgtctgcattcggtccaggagcagaaccagagctgtctttggggctgatggcagcctaactggcaggtcctgctggggtgtggaagagggttgtatgcctgtgtgtggtttaaatcagagtcaccctggagagctgagccaatatgcaggccctaccctcagagatcctaattcatcctatctggagtgaggccctgccattgtttgtttttgttttttgttgtttaatttccccagaggattctaatgtgcagccaggcttgagaaccactaatggtgagagatcagccaggctcgggatgctgcttgagcaaaggcacagagccgtgcccatcagtggttgcgagtagtcaagagggaggcctgctagggctctttttgccactggccaaggagctttggctccatcatgaaagcaaggggaaacctctcaagggctttcagcaggaaaatgagggagtatctttctgagatctgtactagaggatgatccctctaacaaagtgccagactcacagttgggccttgtgagtgccagaagtacagtgaaggcagtaaagaagcaaattgtagctgtccagatgatggcgagcccagatagggtttggtgccatcctgcgtgtgtttcccctagcagccagtgtctgtccatgttgaaattccacatgtgttgtaactggccagtttcttgtcagtattactcccactaggctatcagctccttcaaggcagagactgtctctttaggctcagcatctagcacatactcaatccctaatatatatttattgaatgaactatgtagaactaagctggacatatgccttaccttgtctttttatggcaattgtcagaattttgtatttcaatggcttccacattataccctcctagggcaataaatcctttatatccacatgatggtcccacagaggactagaaagtttgactggatttaaatcctgttaaaaatgtggaagggaatggaaaacaatacagtgggtcctcaaaaaattaaaaatagaattaccatatgatccagcaattccatttttgagtatatactctgaagaattgaaagcagggtctcaaagagagattggtataccagtgctcacagcagtgttattcacaatggccaaaagccagaagcaactcaagtatccgttgacatttgaatggataaacaaaatgtgttatgtatagacaatggaatattattcattcttaaaaaggaagaaagttctgacacatgctacaacatggatgaaccttgaggacattatgctaagtgaaataagccagtcacaaaaagagaaatactgtatgattccactcacatgaagtacctagagtagtctcatccatagagacagaaagtcgagtggtgattgccaggggctggagggagggaagaatgaggagttgtttaatgggtgcagagttttcagtttgggaggatgaaaagagtgctggacataagcatcttgatggcagggactgtgtcttttcaaaaatccatgggctctgttttatagcacttgatattaaataatcaccaccgaacatacacaggctaagaacactgaagtgtttagagagagaattcacacaatcttcccagacaccatatgacaagtgacataaaacatatttaccttttagtaattctacttctgtgaattcactttaaggaaacgagagatgtggagaccgcatatgtacgcattttcttcaaacttaggagaaactggaaggccccaaataggagaatgattaaaaactatcgcaaactcctaggatgatccaataacataaccatttaaaaatcgtgtttttagagaatatttaatgatgtggaaaaatagtcctaaagctaagtgaaaaaaaatcaagatgcaaaactatatgaaagattaaacagttatataatccagcagattcaagataaatgaaaacatatgtccatgcaaaaacttgtacacaggccgggtgtggtggcacatgcctgtaatcccagcactttgggaggccaaggcaggtggatcacctgaggtcaggagttcgagaccaggctggccaacatgatgaaaccctgtctctactaaaaatacaaaaagtagccgggcgtggtggcacatgcctgtaatcctagctactcaggagtctgaggcacgagaatcacttgaacccaggaggtgtagattgcagtgagccaagattgcaccactgcactccagcatgggtgacagagcgagactccatctcaaaaaaaaaaaaaaaaaaaacacacacacacttgtacacaaatgttcatagcagtattattcataatagccaaaaatgggaaataatcaaaatgtccatcaactgatgaatggataaataaaatgtggtttatccacacaacataatattattctgccatgaaaaggaatgaagtactgaaaatgctacaacatggatgaaccttgaaaacgttatgctgaatagaagaagccagatacaaaagaccacatactgtatgattttattcacatgaaatgtccagacagcaaatctatacagacagaaaaaagattagttgttgacttggtggggtgggacagaagggcagtggagtgaagaaagaggagtggctgctaaagtgcagggattttcttggggggtggtggcacagataaatcttctaaagttgatttatttgtggtgatgggttacacaactgtgaatatactaaaagccactgaattatacactttaggggaattgtatggtatgtgaattacatctgaataaaggtgttatttaaaaatagaatctggtccaaattttacttaagaattacatatggaaagactgaagagatacgcaaaattttaaagaggggcattttctgaatggtgagattttaggtaattttcatttgttcttttactcttttctgtattttctgtgatgagcatgcattgttttcataatcagaaaagttattggtctaatataatttcatgataaactgtatacatttaagatactgaaaaatggtatggtgagaaatgaatcaatcaccttctacccaccttccctctgaaatgtgaatatcgtctcttaagagtggctatatcacctgtggctttgcattcagataagtattcataattgcctcagaaatcgattactgcatctcaaacaggtgcatctcccctcaaactttatccccaaatatgaagagttaagtacccttacataaccaagagtctgagtcctacatttttaaccaccagagggagctggaatgtagaaaacctggggcagtcagttttgttttgttttaaagttagtttcacaaagggccatcaattcaggatcttatgtaattttcctaattattgtgaaccagcacttaaaagataattcttttttgcctttttaaaattccacttttaaagactgcatacagtaaaagaggtcttcctaagaatcaaactcttaataaacaacaggcaagacagcacagaaaaataaaaaatattcacaccctctattagcgaacatttctctcagaattgtctgcttcagatcttgaagtcacgcagttgtgtcacagtgataaagtttcaagttattcaatatacttgagccctccccgactcgttgaaaagtttcctaacaaagaagaaacattcaatgtgcctgcattctatatgcattactattgaaatcaggatggaggtttgctaggcattgagaaagatggtgaataagagatgggcctacagcgcccaaaaggaagttaagcaatatttgactcaggtcagaatttctcaactgaaggtctgagtttcaaggtaattcttaaagggaattgtaattatagcttcggggtttcagtggggtgaaagcagcaatttgtcttaccagcaaaatgagtaaatctatagaagttaatgtatttatgtataaacaaccaaaaagcactttgctcttcattttatatgttcttttattgaccttttcttcatatttctttaaaaaattttaattgtgataaaatatacaaaacataaaatttactgtgttaagcccttttttttttttttttttgacagagtctcgctctgtcgccaggttggagtgcagtggcatgatctcggctcaccgcaaactctgcctcccgggttcaagcaattctcctgcctcggccttccgagtagctgggactacaggtatgcgccactacatccagctaactttttgtatttttggtggagacaaggtttcaccatgttggccaggatagactcgatctcttgacctcatgatccacccaccttggcctcccaaagtgctgggattgcaggtgtgagccaccacgcccagcctgtcttaagcctttttaagtatacagttcagtagtgttatgtacattctcgttccagaggggaggtgggtagaaggtgattgattcattgctcataccatttttcagtaggtatatcttaagtgcatatagtttatcatgaaattgcgttagaccaataacttttctgattatgaaagcaatacatgctcatcacagaaaatacagaagaggaaaataacaaatgaaaattacctaaaatcttaccattcagaaaatgcccctctttaaaattttgtgtatctcttttcagtcttttcacatgtaattcttaaataaaatttggatcaaattctatttttaaataacacctttattcagatgtaattcacgcaccatacagttcacctaaagtgtacaattcagtgttttttagtatactcagttgtataacccatcaccacaaataaatcttgagaagatttatgtgtgccaccacctcccaagaaaatccctgaactttatcagctgctcctcctccttcaccccactgcccttctgccctaccctacctagtcaacaactgatctattttctgtctctatagatttgcctgttttggacatttcatgtaaataaaatcatacaatatgtggacttttctgtctggctgcttctgctcagcataatgttttcaaggttcatccatgttgtaactgtatcaatacttcattccttttcatggcagaataatattctgttgtgtggataaatcacattttatttatccattcatcagttgatggacatttcgattatttcccatttttggctattgtgaataatactgctatgaacatttgtatacaagtttttgtgtggacatatgttttcatttctcttggatctgctgggtcatatgataactggtttattcatttatttattattatttttttttagacagagtcttgctgtgttgcccaggctggagtgcagtggcacgatcttggctcactgcaaactccgccttccaggttcatgccattctcctgcttcagcctcccaagtagctaggactacaggtgcccgccaccacacccggctaattttttgtatttttagtagagatggggtttcaccatgttagccaggatggtctcgatctcctgacctcgtgatctgcctgcctcggcctcccaaagtgctgggattacagggtgagtcaccatgcccggcccatatgttaactgtttagtcttttatatagttttacatcttgattgtttttcacctaactttatgaccatttttccatgtcgttaaatattatctaaatacatgatttttaaatggttatattactgtatcctaggagtgtgccatatttttaaccattctccatttaaccatttgagggccttctaatttctccttagaagaaaattcttacatatgcagtctccacatctctcatttccttaaagtaaatttatggaagtagaattactaaaaggtcattatgttttatgtcacttgtcatatggtgtctgggaagactgcgtgaattctctctctaaacacttcagtgttcttagcctgtgtatgttcggtggtgattatttaatatcaagtgctataaaacagagcccatggatttttgaaaagacacagtccctgccatcaagatgcttatgttcacatttagaccagacagataaatatagatccaagggtattatatagacaagattatgtacattatgtggagggaaaaaatagactgcatagataaaagtaaacatttgcctgcctaggatgaaattcacacagacataatcattgagcaactctttacacttaaaaattttttaaaaattaacaaaaccaaaatgtaagaaccagttagtctaaagtcataaatcatctggatcattgagtctgaacctttcccttgttcagaagactcctaaggcagcacagtgtagcctgttggcttttgggacccgcagacgtatctctagctgcttttcaacctgtgctgtctcacattttccttagattgcttgagacattagcaaaccctttctgtcttgtttctcttttattttcagaagagtaccactttaaagattatgaaatgagcaagtagttcagttatatagctgactctggggaaaaattgtctagcactgttcagcattgccatattgatgctgacaccggcatgatttcacctccaacatgaccaccggattccgcccaaatggattgactaatctagaaagatcattgatttgtaaaattggaggtggaaaagctatagcagatcctccggcaagcctcttaagcagatgttatgtagaggctctgcaatgctgtttgtttgtttttcactcgtaggaattaaactcttgagagtaaaccataccgtcaccttaaagattccattttctagcgtgtcgcatacatttgtattacatgactctttcggaaaacattgcctaggtaactgacagaaagtgctattttagtatccagaagctgcgactagcaacggcaaacttaagaaaactgaaacctcttttttctttgcagctgtaaagatgtctgacaagaaccagatagctgccagagcttctcttattgagcaactgatgtccaaaaggaattttgaggatcttggcaaccaccttactgagctagaaacaatttatgtgactaaggagcatctccaggagacagatgtggtcagagctgtgtacagagtcctcaaaaactgcccctctgtggctttgaaaaagaaagccaagtgtttgctatcaaagtggaaagctgtttataagcagactcactccaaagcgaggaacagccctaaattatttcctgtgaggggtaataaagaagaaaattcaggaccttctcatgacccaagtcagaatgagacactgggcatctgcagctcgaattctctgtcttcccaagacgttgcaaaactcagtgaaatgattgtgcctgaaaatagagccattcaattgaaacctaaggaagagcattttggggatggtgaccctgaatccactggcaagagatcgagtgagttgctggatcccacaacacccatgagaactaaatgcatagagcttctttacgcagctttaactagttcttccacagatcaacccaaagctgatttgtggcaaaactttgcaagagaaattgaagagcatgtttttaccctttattcaaagaacatcaaaaaatataaaacttgcatcagaagcaaagttgccaatttgaagaaccccagaaattctcatttacaacaaaacttgctctctgggaccacgtctccacgagaatttgctgaaatgactgtcatggagatggcaaataaggaactgaagcagttgagagcctcctacacggaatcttgtatccaggaacattaccttccccaagtaattgatggcacacagacaaataaaataaaatgcagacgctgtgagaaatacaattgcaaagtcactgtaattgacagaggaacacttttccttcccagctgggtgcggaattcaaacccagatgaacaaatgatgacttacgtaatttgtaacgaatgtggggagcagtggtaccatagcaagtgggtgtgctggtaactgtaaatcagtgttctcttaacagataaccggagtgataccttttatttgtacaacccttttgtgcttttaaaaatcttatacacactactctctaaaacagaaaaaggaggaaagaaagtcgttagctgaagctgccaccaccatccctaaaagttacagtttggggagagggagtggatgactatttatattgtgccttgtggccatttagtaccttactgtagacagagtgtgggtgagaacagcccagcataaactgggagactgtgggaaatgcattcccaggcctcacaccattgaatccgaatctgcattttgacaggatccccaggtaatcttccaggataggatagtttgagaagtgctactttagcaataggcctgtggctctcagcagtggctgcatattaaaatcatctgggaagctttgaaaacccactggtgctgagaccccaccctagaacaattcagttggaacctatgagatgggacccaggcatcaacatttcttttttcattcctcaagttattttaagatgcagtcagagttgagaactactcagaaataggctctcatttgatcctttttacagctctaagacaagaatgttattccaggcacttcacgaatgaggaaacaggtccacagaggtgtggtgacatgtccaagtgacacaaccataaatagtaccaattctgacagatcccagattttctccctcctgactcactgagactggctcaatatcgacttctgagaaatgtattcctggaggtcggggacaaaatgaagaatgtgtttaaactccaacattgggtgactagatcttcattcttttcccctctcttttctcatttataggtctcccttcaaccacaaaagtcaccctggaactcatcccgcagttagaattttgtttggagccctcttgcttagttgaaggagtttcgtagttgttttttgtttttgtttttgtttttgttttttccccctgtgaacaggtttttcgggggtatgtaaactctaggatgtttagtttctgatgtcaggagtcttcatgttctcaaggacaagtgtccttgagatggacattaatggtcattagtctgtcagaggaagcccatcactttagcctttgaatgtagtaacagacgtttatctaataaatgaattgaagataaaattacctctttgaggcctttgcaaacagtgtttaaccagtttatataattgtttgactacaacacgccttctatgtgattatggctgattttttttccttaaaaaactcatggaatgttcaccgttttatagttttaaaaagtttactttggcggtctctacaaacctaccatttcactttctcaccagttcttttctcctaactctcttcctttgttggagctctgaaggcctaactgtgtgtacactttacctgcctgacagaattctccaaaacatgcataaaagtaaaatatgttcgtattttcaaataatttggaagagtcggctcaatgccatcaagtgtaaaatctattttgatatacttgctctccgtgtcttcccagggctgctttttgtgatgcaacatgtttagtccttaacttgcaaggtcatctaaaacttgaagtttcacaaagtgtggtttcatatgacttggaataatctgaaaaactattcagtggttacgaaagagcacagcacataaaaaccaaatttgattagttcaagtcggtgtttatgttttgctttgggggtttgtgtgtatgtgtgtagtttttatttatattggaatttggcaaactaaatgttcagacaaataaaagtaattaaaatggaa

SEQ ID NO: 463 - DNA, 29208 bp, Homo sapiens
  source 1..29208: mol_type = other DNA
ctcagcgaagaaacctccaatcggctgccttggactcagcggttacccgcgctgcctccggtgccgctggcgaccgctgagccgcttcccgcgcgtcgcctagcccgcccctcagctcgccgcagccccggctcctccctcgtccggcccccggggcggggtctgtcagcttgccctcccctctccgcctaagcctgccctatgccagccgggtgtcctccccacagcaccacggcttctcttcctcagcacggcgacaggggcttccccttcgccgccgccgccgccgccggccaagctccgccgcgcccgcggcccgcggccgccgtaagtccctgggggcgaaagggggcgccggggatgggggagagggggagggaggactgggcgcgccccccgccaccccgcgcgcgccccgacgaccccaccccgagcctgcccggcccgccactgggtcgccgcgcccgcaactcacttctctccgtgtccgcgccctccgcaccactccgcgccgcgcccggggatgtgggggccagtcccgggctccgcgacagcctcgcggcacctgtggttcgggaatcgcctcaagttttgcggggcgctttcgggaggggccgggggcggtggcggccgaggactcttggcgccccctgcgcggcggcggatgccattgtctgctccgctccttgcctgtcacctctcccgggcttggtcagtgatggagtgtggccacgggagtgggggggaggcaccggcgacggccggacccgaggaacgctggccccgagcccgcgccgcggctgagcccattgtttttaatgccagtctcgaggaattgtggtgccctgtgatttgcggcaaaatcaaagcgttggtttttaacacgagggaaggaatactcgtgctttgcaaccgggtttcgtcccatgttaggacataatttattttaaggagaatacattgttttttcgtcctgcaaagtggtagggcggatacaggaccctgctccagacagccttgagcccatactcttcgcaggcaaaccctcaccctttctggtcaccaagatctaggaatacgaggtccattcttttccaagttctggtaacgggtttgcagtaaatgcccagttgatgcttcacttcctgcccccttcgaatgccgctatcttcaggacttgcacgggaggcactttggtatcacctaataatgtccttatattttgttcccctgacgcattttaagtgaggtaataagaccattttaactttactaaagttgaattgccacgtcatacatttctagatatcttgttgatacctttttgggtggttacaaaaagcgacgataatttcttaccgaaatttagggcccatttttattctacattggttctgtaaatttcccctccccgtgttcaaattcaagatggtgtggtgaatcttgagaatcatgcttgaatcttatttgcagtaacgctgttaaaggaacttaacagtgattaaaagaaaaaaggatacctatgtgaattctgcctttaaattacctttgtagaaacaatacttctgtttgcagttgagatgaccaattggattacaaaaagcttggcgttaaaaatgaaacatgcagactaatcaacacatttgcagatcacaaataaatacatacaaattagtttaagtataaaacacactagaattcagcatccattccatctgtagatactattttttattttaaatgaagtatttcatgtaatgtttcaatgctgaatcttatttaataagtgtaaatcttattgtggccttttaaacgtttgttttctttttcataatacattaactcagttctagattttgtacatatttaagttggaatgctttaaaagtcagatgaaaacatacttttttattaatgaaaatttgtatttatgggatttttcagttaatattttggatcattctgttttgcttaaaatatgccatcataaactgaggagaacattccaagacataagctactgtctgcaagtaattcaccctggaactagaacggcctcaggatgaaaaatagcaggtcttctgtttctttcaaaagtacccaaaccagatgatgtctaccattctcttttgatgcatatagagagtgcgcaatgtatagcacaggtagaaaatagtttcttaaattgaaagagtgatctttatttttcttcaaaaatttcacttcagcttattacccatttttcttttttctcctgcacactccccttcaaacttaatgtggaacaaggtgggattggaaggtttgcatctagaggaagatctgtccaaaagaatttcttgctattttaattggcatagaaatattgatggctactaatcatttgtcatgtaaatgccccatcccccaaaacttctctgtgaaacacataatcttaactttattgattcaaagtattacatgtaatcttgattttatttatcttaacagatgcagtttatgttgctttttagtcgtcagggaaagcttcgactgcaaaaatggtatgtcccactatcagacaaagagaagaaaaagatcacaagagaacttgttcagaccgttttagcacggaaacctaaaatgtgcagcttccttgagtggcgagatctgaagattgtttacaaaaggtataatttttgtttgtcagaaaggtgaaatagaatcaaatgttaggtcatttaggaaattgcagacttcagtgatgacatttataaataacgattaataaagatttagatgaaataggtttaaggtaaagctttgtgtttttaaaataactagtgttttgattgataattactgaggctgaaatgataaaggcagggaaatcctttgaaaactagttatataattaaaggcataaatgattattcatgcttaatcatctttatagaagagtttaatgaattcatttcattgcaggggaaagtagggtcagtattttaaattgtgtgagtaattctctgaattgagacaagtacagatagagtctaattctttttccccgaaaatctataaagtaatgactaatatttgacatgccttttatctgatttttagaatcttactcacgtgtaaataccttgactatgtagactatttcaatcacatagatgttttaaaaactttgtgtatacatgagatgtgtttgtaagtagtgtttattaacttttaagtacccttgttgctatggtgggggtgcaattaaatatgacagataatttttccaaggacagattttttaaaaatttgatgttacaaaatgactcatagattggcttttaacactaaaatttttttaatgctatacgtctttattttataaatatctgaaaccctgaataccctaaaataaatttctcaagattgttctaagtaggttaaaagaaataaactttcttcttttacagaacattttttgaggggacatttacttcattccccatttgtttctttttgaataatttgctgaatttaagataagagcatttctgcatataaaaagttctcttgtgtggggagtatacatggaagtaacagtatgggatacaatgagggtgggagagaagtctggttttcttctcagcttccctttattgcactccaaatatgggttggatattttgtcagggagatggctgggaagaaatggagattacaagacataagtttcttaaatactgaggactcctctttattattgaatgatctttggtgattttgtatctttgggtgattttgtatccagtgtttcgtttggtcttattaaagattatagaaaagtcatatcatttgagaggtgagagatgttttacagtgatctagtcaggtgattttgttttgttttgttttgttttaagctttttgccccatgggtagaaccttaaataaaatgagtggaagtgaggctgctccttgtgaaatcaggaatgaggatcctgtatcctggctcacttggcctttacccctctgcacaggagacagttcttgagtttgaaaactgccgttgttgatcaaacttcaattttataaagaatgcaaatttgggagaagtgacttgtctagggccatatgccagttagtgattgacatggggctgcaactcagatcttaagcttagaggcaaagattttaaacagggctggaaaaagatcaggtttacatatcttaaaagattgaactgagacaatggatgagggcaggaggggctgagactggcacctgcaggatcagtaggagactatgtgagatcctgaacccaggcgctagaaaggagggctgtcactaaatagccattatcaaataggtaggtttgataagacttggtcacctctagaagtgggaagaatatgggaggtcgaggcaggagaatcgcttgagcccaggagttcaagtccagccctggcaacttagtgagaccccgccgtctctacaattaaaaaaaaaaaaaaaaattagctgggcgtggtggcatgcacctgtattcctagctgctctggaggctgaggtgggaggattgattgtgcctgggagttcaagcctgcactgagccctgattgggccactgcactccagcctaggtgacagagtgagaccctcaacgacaacaacaaagcggagagagcagcgaaggaaagggaggagtggggtgatctccacatttctggtttgctgatggggtacaaggtgagctagataactcggcttattttggggtgagttgatttggggatgtctatgtgactttcattaagagaagcctgattttctggtgggatgtggttggtgtaagtatggaagtctggggaaaataagacaaagtattagatcaccagcattcaagtggcaggcaaaggagatgaagaagggaccttcagagtggaatgagaaatttcaccaatgccagatgttgcataaagttcaatgaaagtgaggaaggaatctggtagattttacagtgagcatttcatataatgccctttgccagaacattttcagtggaatagtggagatagaactctcgatgtaatggggcgaagtgtgaagaggtggagaaatttaaatagcatgtgtagactattttggggaactttgctgtgaaggacaggagacgaggtggtaaccactcatagacataggagtgggggacaaggtttttaaaaaagaaggtgtgagaggcttaagcttatttctagataggggaaggagtcccccgtgtggaggaggaaaataccagcaagggattcaatcccaggaatgggctgttatgggaagaaaggaaagcactgcttggtgttcatgcacatgtcactcagtctgtccgtgttgagccactactttttcttttgaaagctacaaagggtatctaatccaactctgatacttatatcaagcacctttaaataaaaggtggactttaaaaaaaacagctttattgagatatcagtcatatacaaaaggtggaatttatcagttctttctctatacgttcccccttccatttcatactgaaaacctcatctactctaccacttacggacatattttttgttggtataaacaggtggtttgttttccctactgctggaagcgaagagctttttaagcaggagaattactgcttagcgcctgagaaattctggactgggacttctgctgttcatatcagcaagtgatttttgttgtttttgttaaattatctcatctacattcttcatcctgagtatttggcatacaaattcccccttttgagaggggaatgatggataagaataatattagctgaaaagacagactgaaaatctggggacttaagttctgttccctttgtaacgttagctagttttatgactttaaacaagtcactttgtttccttatctctaaatgctcttgaagatcccttcaagacagaatactgtgcttttttgattcctgttttgtgtagcattttgtggaagagtcactggattaaggtcttttaaaattaatttaaaaacatatatatctccaaattactagcttgataatttgttaaagaatacttactgattttctttactaacaaaagaatttttaatgacataccagtgggtattgagaacacttcagctacattcacccacagtcagctgatatttagctgatatttagctgactgcggagaagtcatgtgttttgaatataagaataggcactttcagatgttctctgagtgccagtaattagagtaagccttaatccactgtgctaaaaataaccaaacatacctttcttcttactagtctattattaattttacttcagatttagacttacaaataggcactaagagaacaaaatgagctcattattgatttttttaaaaccatttggtcctaaatataggaagtacacttcaggttctcttggtaatcttttactaaatcagtatggcatattttacttctcttcaaagctcttaaaatattgtttcgagcacattttaatttttgccaggtatgggattacgttaatgcaattgctggctatagtttttaatgtaaaacttgggctctagagtcaaattgctgttcctaggcaggttactcaaacctgggtctcttatcaatgcaaataataatggtatctcatggatacggttgttgtgaggattagagtggtaaaatatgcaaaagccttagctaacatttaatgtctcatgtagggcgaggattcagtgaatggtacttaattattatgtttctgtttttttcctgccctaagctttctggaaagaggtacattattatcctgatagctatctgttcacctacaccaaagaattcattaatttgattattctttttccattccgagtgaaagtaaacattactggctggggcttagacacattgtttctgatgatttttaaattaatgcttccaagtgattcatgcagtttaggacctttgactagtgtttaagtgctttttatttgtaagtaaagaggcagtactgtggataaggagcgaggatggtacgagcattagcttgtttaatagtagcatgaggaaatcttaaataaaaggaattttacttgaaactgttagtaaactttgtataataaattatttagcattctgttcctatcagctagtcatatctggtttttaatctaccatttttatgtcagtccctttaatgtttagttttcttaaatcagggaatcttatgtgtcatttatcagtttcctcaaattcaaagttctatttaatgagcatgggttagggaggatggagagttggaatactctattctcttttaaatagacaaacaaaaacagtaacgatgggaaagagagggagcactttgttaaagttggcattgatgccctgttttgtcttccatgacttattcccttcacaatgatgataaatgaacacatgtgaatacctcctctcaataagactgcagtagctccaccattttaaataacttactgagtgtggaagtcaggtagagtagacatgcacaaactcatgatatatatgccaagtgagtttgtatgatacagtggaaaaaggcctggagttaaggtcaaaagatcaggtttcttatcccagtactagcacttgtaggcgctgtactcttaagcctcattttttttttgtctttttttaatctgtgatcaaggatgaaagatagtacttgctgttgaaaacatcaaataagatgaaatggttttaataatgaaattaatgctgttgtgtgaatactagttattttcatactaaggagcaagaattcattgagtctcaaaacaggttgtgttattctgtatacagtattattttacattaatgctacgagcagtaactgcccattgtgttttctaaaaatcatttaagtgatcttcagtgaaaattataatctccactgaaatgttctgtgtttagcctatcttaggtttttattttctttcttttcaaaagccttaagtacatgtaaaccattttaaaatgcccttttaatcctcctcaaaggacttgctatgcctcagggttgaagttttgcttccttgggtcaagcataacatgattccatatgctagaatcctaatttgaaggagaatataagtttcccaaccttattccctcttctagggtaaataaactacacttcagttcaacagtgtagaacttggtaaatttgagaacaggcctctgtttcccttaagtgataggaactttctgttctctttctctaacttctgtaataacgtggagctgttgttcttttcgtatggtttattctgcaatcctagaaacctttttaaaaacaattctattctgttagaagtcaagagcatagttacccttgggggtgggaggttgtgactgggagagggtagcagaggagtttcagggttcagtagtgttcagcttcttgatgtgggtgctgatatatagttgagttcactttgaaaatttattgagcttgtaggacttaaggtcttctctgtgtatatattatacatattccaataaaatatcccaaaatattgacctcaccttggcattatcctcaacaagtcctccttcagttggaaggtttgttttcttctctgtacttacagtttgaattaatctgctatatattttgttttaattaagtaaacttaggaaaaacctgggtctgctatgttttaaaatgcttatagaaaagaacctgaaaggaagaagggcaaaatcacttattctaagtggtatgattattttgattttttctttatacttgcctatgcttttcaaaatttctgttatgcgtttattacttttgtagtctatgagaaaaatctgtactgtcgtgaaagaagaaataaactgtataaacttggggcttttcataataggatatgaaaatatatttagaaaacatcattataggataacagtttttttcacatttgtactttgttacagatatgctagtctgtatttttgctgtgctattgaggatcaggacaatgaactaattaccctggaaataattcatcgttatgtggaattacttgacaagtatttcggcagtgtgagtagtattttattttaggaaattgaatgccatagtatattttggaaccttttctctaacaagtttattttttggttgtcttggggattctaaccgcgggagagggtgggaatgactatttattagtagaaattattaagttgtccatattgggaacatgcagagcccagtcttatttagcttgtaggaatatgttttcaagtacttgagatttggaaattaagcttacttaaaccagtgatacttagtcatttttagaaagagttaagattgattcactctagttcgattttattcactacctgatagtgaataagcatcttctgcttctgcaagttttaacaattttttcttttcttttttcttttttttttccttttcaggtctgtgaactagatatcatctttaattttgagaaggcttattttattttggatgagtttcttttgggaggggaagttcaggaaacatccaagaaaaatgtccttaaagcaattgagcaggctgatctactgcaggaggtaagctacttattctcttcactaggcactagcatgttttgctcttgctggggaagtctcattcatcattcttacagtttcagaaagtactctgaagcatgcttgtcatgtagtgtccatccatgtgcagtttattgactggaatatgtgtcagtcacgtcaactcagttatctatggatggatggttcagtttggagatggtctatcggtcaggcctcttcccaatggccctttttggaccctaaaacactggagtctaaacctttagaggacagactatttgaagaagggaaaagattggctgaaagtagcagtaagttgagaactctccatctattgcttcaaattgtttaagataaccccctttttcattagtgtagataatcaggagttgactatgagattatgacattttaattccaaattggctcatatttttacctcatgtccattaaatgcaaaagtagccaagcaaatgatagtgttttctaattatactttttgtagaaacttccaggttttttttgttagcaaaactaaacagtatttgcatttctctttgctcttcttaaataacaaaccatgttctgtcaaactgcattcttgtcttacctccatatccccagatgtgtaactcccttttctttctaattaccatagtcatcttgggttaattgtgcagttgatgctgatgtaccttctatttctgaagcttaacatttcatagataaggctacctttttccaaaaacttaatgataccttaattcagataccaaattgaattatgctttagagctaattgtgatttttatcatatggaaagcttacagcatgagaagtgattagtaaatattgaaaaatgaaatgtgttttcactaaagtagttgttaagtgtgtgtttgcatgtatgtaaaagtcttgaatatttttggctcactggttcattttccagaagcattgaaaatatgattttgtatttccagtttattttagtcccttctttgttacatacatgtttatcagtttgttcttgtctttttttagtcaccaaaggtgactttcagtcccattttttagccttggaggcattcagttttaagggagtgaaataaggggagaagagtaacttactttctccattttaacttcttaactcttggactctgtgaggaagggaaagctgtttgagaatctcactgcatcagtcactgactgggacagttgtggggattgcttgaagttgagatgacatcatctggatagacatctactaaatgtgagacaatgcattgtacacttaatgatcttgtagttatcagaagagtggttaaggtgcctgcaaaagtgaagtattagattggcagccctggtgccatctactcttcagtagtgaaatgaacacagaccttttgccttgtgtgtacagtttgccacagtggtttaccaattgattggaaatgttattctggaggtttgtttttaatatcaggtgcgctgactataagcatatactctactgttgtaaaattggtttttaaagttagtatctccttattttgctgttcactaatcagacttttttaaaaattaggtcaaaaccaggattagaaattgggaatttttcatataggtcttcccttgatcactttcatattttgtcacagatctgtattctgctctgtcagaacctggcatttcttccaagtttttctatcattttctgattaattacattggctttaaaatgtatttaaagttattgaagttcaacttttaattttaatatttttcctggagagtaattttttgtttgtttgtttgagatggagtttcgctcttgttgcccaggctggagtgcaatgacacgatcttggctcactgcaacctctgcctcccgggctcaagcgattctcctgcctcagcctcccgagtagctgggattacaggcttgcactaccatgcctggctagttttgtacttttagtagagacagggtttcaccatgttggtcaggctggtctcgaactcctgacctcaaatgatccgtcccccttggcctcccaaagtgctgggattaaaggtgtaagccactgcacccagctgtgcctggatttttaaatgctactgggaaattgctatgggccttagaatatgacagcaatgttaagtttaccttagagcatatattcagtatttaatgtactaggggataagaacattattgcagatccacatttatttgtgtgtgtatatgtacatatgtatatatattcccctatgggagtattttaatagttaatattgtccttctgtttgaagtactatttttatgtctttttttttttttttttgagatggagtttcgcttatcacccaggctggagtgcagtggtgcaatttcggctctctgcaacctccgcttcctgtgttcaagcaatcctcctgcctcagcctcccaagtagctgggactacaggtgcacaccaccatgcccagctaatttttgtatttttagtaaagacaggctttcaccatgttggccaggatggtctcaaactcctgacaggtgatccacccacctcggcctcccaaagtgctgggattacaggcgtaagccaccgcatccagcctatttttatgtctttaattggggaaagtaagtgcaaagagaaaagcataggatgagtatggttggtcccatgtaaaattttccttacccccttgtaacctttgtttaaaataaagaaatgagtactgttaattacagttccttgtctttagaagaaagctgtggtcctgtttctcttctatgactacttttacattgctttgtacacaaacgaaactgagtaccacattgagacattgtctatttagcagtctgagtgaaccatttttcttagccatgtaggtcttggggaagcagtaggtggtggtccattctgaatttagagtgagaatacatcgtaggttaaggccattatgaagccaagctcaagtctgtgtggagcagtaaggcttcaggttattctgttctcttcatcaacatactctgagaagaaatgcaggaatggcaagatgcatgtttcctaaaaatagattcatttatatttttgatgcatgatacaagtttacatctgtgggagagtatttgaatattatgttcataaaatagcaagtggaataagagaaaaagcactccacaaactgctggaaaactttttgttttggataccatgacaacaaaaataattatgatggtaactaacgcttgagtgcttgtatgtgaggccctgggctcagcagtttgctttaagcatcctgtgctaatcctcaagacaccctgtgaaaggttagaggtagcctaatgagaaagtggaatctcagtgaggttccatgactggtctgaggccacctggttagcaactggcaaaaccaggattctaaacccagatctactaggcttcacagctgtgtaaaatcttaaccactgtgcacttcccctaaccccagttatgtattgtcttggtatatatattttaaacgttctgttttagatatgaacttctttgtttctcagtcatatagtgagaaattcataattctcccagaggtttttctgtgtggaaaagagtagatttcctaagacagtgccatctttgacttcttagactgcaaatttttattgtccagattatcagcagttggaattttttattggatatgtagatataaataatatttttcaacctatttcttgttggattgatcaaaatgcctggatttataataacttttttggtcttatagtttggggtatagcattcacttaatcaatttcatgaaatgattttgcttccaaaattgtaaatatagctgtgaagatctaaattcagacttacatttgtagtagaagtcctaattggtcaattttaatctactttttcatgtgtcattatttttctgtttagtgtcaggtcttttacttgaattgattatttctaagcaccaaagatgactttgaacttatcatgtacttatctgttggcttaaaggtgtatacacatctcaatgattttgatttttttttaatttgtgaaatatacatttctatccttaagaatgcttattttcttcagaaaaattaaaaaaaaatttctcttacccaatttgtataaacacatagtttaaggtagtccttcattttatagccaaatagggaagagggtcagtggatacagattttctgttagcatattacagttagtaataaaaatgtaacattaaatgtacattcaaataatagttgctaaaatattagcagatattgtgattagataataaagatatcttttttattttacttcattacttggtaaataaaggattagttttgacatttctagaccaaacttcatgtttattccttttggtgtttggttgtatgaatacataattagatttgggggtaaagcccagaaattggcccgttatccattttttaatgtttggctgtcttaacatgccactggtactaaagatgattcttaaattattaaagtacaacatgctgaaattgctaaattgatattctttgcaatacttggaatacttttccccaccacctattttaagctagatttttggagggatatggtggggggtggtgatgtagttggatttatttaaacacacacatatataatgacaaaggaaataatagtatggctttttttctgtaaagtcaagcacttaccagtttttctctgctccttaattttatagagccagaatgaagaatggggaggtttgtctgaggatatcttatgataaagagcagtctaaggctttagtccctttgatccccaacttatttattggtaactactaaatttaccatttttgtggcatggataaaatggagtgctatgcaaatactgttgcacgtgagatgatttctaagtccttgcttgatccgtgaagatcaaatagttaaatactgggcatttgggctttaacccttagcggttgatgcatgatggtgttgattagtgctttgagatgtgtcaacctttcttttttatactaacagcatcattttgaaatttgtggtgttgtttttcttttgagctttgtttgctgttggtattttttctcactaaagtaatctgtgaaatgcaaaataagtgaggtaccaaaagcaagcataatactcatgaatttgcttttactttgagatgatccactttatgaatagatttactggatttgcagttgtttatctgcctcatctagaaagtggtactctacggaggattagcgctgctaaaattgatttgttttagtgctgggggctgcatgatatatcttagtactatgctatatttttgtgaaagtaataatctgtgggactgcatacaaatggaaaggtaagaatcttaggagaaaagtgatttcttttaaaaaatgaagcttttgtaacttaaaattattttaataagtactttttgaagtattgaataacatatcttttaatatgaagttttggactttttaaaggtcagctcttgatataattaagaatatttgggctgagcacggtggcccaagcttgtaatcccagcactttgggaggccggggcagttggattgcttgagcccagaagttcgagaccagcctgggcaatgtggtgaaaccccatccttacaaaaagtgaaaaaaaaaaagactagctgggcatggtggtgtgtgtctgtagtccaagctaattgggaggctgaggtgagaggattgattgagccctggaggtccaggctatagtgagccatgatcatgctactatataccagcctgggtggccacagaacgaaactttgccgaaaggaaggaaggaaggagggagggagggagggaaaacagaaaaaagaaagaatatttgggcatgctagtccaacttgagaatatcttaaattgttttaaaaaaagagatgcttccaaatatgtacaagaatgtcatttaacagcaaaaagcattttgatataaatcctcttagatttgcttaaataagacaaactcgtgtaactcctttgtaattactactgttcatgttaaaaccttcaagcctcttttaaagttaacaagactatagtcttttattgccagcgtactttagtttttttataggtaaacttaatcagggtttattataacaaattctggacaaatgaagtttgattacattaatgcttgaaatggaagtgcttgaaaggaagggcagaaagcaggacaaatgttgcctttcattttacatttaataagaaacaatttggccaggcatggtggctcacgcctgtaatcccagcactttggaaggctgaggcaagcggatcacttgaggccaggagttcaagaccaacctggccaacatggtaaaaccccatctctacaaaaaatacaaaaattagctgggcgtggtggtgcacacctgtagtcccagatacctggggggctgaggcacaagaatggcttgaacccaggaagcggaggctgcagtgatccgaaatcaggccactgcactccagcctgggcgacagagtgagactctgtctcaaaaataaataaataaataaaataataatttggccagtgtccttactctctggttctcaggttgtagtcattttgctttatgtgtttttgagccttttttcttttcatacttttcaaaattttgaggattttccgcttgctatttctattctattcttttcttaaatgctgatcctgacctagtaatttgatttcatgagccctagggttggaacctgcacagggacctgcaaagggaatagtctgtggtgtcggtggtgattttttttttaattaaaaaatactttctgaaaaatgtcacgtttgagtccttttttcacctactgacattttcttttgtttcctctgagggcctttttttaaaaataaaaattcccattctggaaaaattagcaaatacaggcaaacacactagaatataatcttacccaccaactagagccaattagattaactcagtggttcccatggagtgggagtggtgcagttgtgcccctctaggggacattgggtaatgtttggacacatttttggttgtcacaattgggggtgcagtgctaccggcatccagtaggtgaagaccaaggatgctgctgagaattctgcagtgcacaggacagcccccttagaacgcggaattatctggcctcaaatgtcagttgtgcccaggttaagaagccttggtttaatttaacactatggagtaaagattccatttacatttatagactgctatatcttttcaatattatatgtagaccacagtataaataagtggctaaaaattaatcaaaaatgcaaaaaatcaagaaaggataaatgtgcttaagaacatacaaatagctataaaaatcattcctaggccaggcgcggtggctcacgcctgtaatcccagcactttgggaggccgaggtgggtggatcacaaggtcaggagatcgagaccaacctggacaacatggtgaaaccctgtctctactaaaaatacaaaaattagctgggcgtggtggtgcgtgcctgtaatcccagctacttgggaggctgaggcaggagaatcgcttgaaccagggagtcggaggttgcagtgaagcgagataacgccactgcactctagcctggcgacagagtaagactccgtctcaaaaaaaaaaaaaaaaaaaagtcatctctatgattcaccaaaattacctctacataatgaccagttactggggagataatctatggttgactttagaatccaccctacagcaaggcttgtaggatgtcactctataatttaatttcctcaacaacagccaaatctgttaacttctattaaggtaattgagtttttatgtggaaactgaattgagtataccctgcagacagaacacctttgaattttctgccaatctccccagccactttagggatttgttaatttcttaaaggaggaatagttcaaatgaccagaatttacatatatagacttttgttgcatatatagactttttgttgttgttgttctctggcatcctgttagccttaaaggttttacttagtgaagatatttagtagcatttgagtatttgaaattctgtgattccaagaaatcttttacctttgaaaaaccctaatttagggtattccaaggcaaatacaatacagcatgtcctaaaacatgcttaaaatatttctttgcagtctaaaattatatttgctagctgggcacagtggcacacttccataatcccggctacttggaaggctgaagtggaaggatcccttgagctcagaagtttgagaccagcctgggcaacatagtgagacccctcactcttaaacaaattatatttgctaagttaattattctgcttttttttgtttgtatatttgttttgagacagggtctcactctgtcaccaaggctggaatgcagtggcaccaccatggctcacttgcagccttgaactcctgggctcaagtgatcctcccacctcagcctcccgagtagctgggattacaggtgcacaccaccatgcccagctaattttttaaaaattttcagtagaaatggggtctcgccatgttgtcagggctggtcttgaactccgaggctcatgcagtcctcccaccttggcctcccaaagtgctgggattacaggcgtgagccactgcacctggcctctgcttttttattttaaaagcacaactaactggtagataaagtgatttgtctttagtatttgataactaatgggttttagagtgttatttataagatgtagtaaattatcctcatcattatttttaagacaaatttataagacaagtgtaatagaaatagatcaacagcacaatagaaaaagatggcagaaaacatgaatatgtaattcacagatgaaagcaaaacaaatggtccttttattaagggaatgcaaagttaaaaatcaactagacccttttttgtttgtttcttcttggattggcaaagaggagcacttaaaagctgtattttgttttggaggattagtttggttatgtctactaatgactaaatgtgtacatacattttgacccattagttacacttcaaagaattttatccaacaaaaatgtactgagacacattgcttagtataataagccattgaagcttacccaaatattcatcaatgagaaataggttaagaaaattatagtacaaccatacatgaaactgatgtagctgtaaaagaaatgagatcgatttttttttgtaatgatatggaaggatactcaaagtatatcaagtgagaaaagatctaggaacaggatattattattattattattttattttttgtagggacagggtctcaccatgttgcccaggcttaggagcaggatattagctaactcgtgttacttctgaaaatctttgaagctccccctgctcttttttccagaagtgtaaaaacaagcatgtatttagtattacacatttttaaaaaatgaaaaaatgctgctgtgtgaatgaaagagtatacatcgtgttgctccagatggtaaaactagagtagaatttactaaaataaagtttcagcacgtaaagtaaagcacttctctgctcttggccattttagacactaaccatctggagcaaccatgtaactcttgccactcatagctaacttaatgtaaaaaaaaaaaatcgcttgactttcttagcacttcacaaatgcttgtaagactgacaccaggagccctgtcatctaaaaggcactttatagagtgctttcaattcttctgttttttcattcattgctcaaaatagatcgtagtgagataagatagtctctggccttcttggtctttggcacaaggaagagggttccagagttgagagtaaggactttgcatcctttgccatagaatttgattaggggccataaaaaggaccattgtgttctagaatgtgaaggactaagcataccactttatagtgcaaggaataagtgaagaagtccttttataagaaaaactgcagtagagcaataacttgaaattacacttatttatatttacttttcattaaatgtaaattattttcttttaccacattgtactactagaaagagaatcaggagtttaggcattcagtcatagatattcgataccattgatttacttaagcacttctcatgtcaacaagacttaagcctgcagataattcctattttatcagtgttcgttatagcttccctgttggttttacttgtgagtcataagcctagtatggtgaatatctaggaaatttcacggtaacagggcttgtcttaggttttgagaacaggtgtaacttgacttctctctgctgtttgtcatcctacacttcccactacatctggtcctttttgtagggtgttgagaacaacatttttcttcatgcaggggaaagtggaagtgcatgttttctaagaaggacaaataggaatagaataaaagaaaaagtatattggggctgggcatagtggttcactatgtaatcccagcactttgggaggctgaggcgggtggatcatgaggtcaggagttcgagaccagcctggccaagatggtgaaaccccatctctactaaaaaaaaaaaaaaaatacaaaaattagccgggcacagtggtgggtgcctgtaatcccagctactcaggaagctgaggcaggagaatcgcttgaacccgtgaggtggagattgcagtgagctgagatcaagccactgccttctagcctgggcgacagagcaagactctgtctcaaaaaaaaaaaattatatatatatatatatatatatatatatatatatatatattttggaagggagaatgggagtggaatcaaaaacattggtctcggatgagaagagtctttctcattggttatgtggtgataatggggtaaagctgtagactttttttttctttaattcatgagtaagatgagcaaaattgaggaagtgtcattttcttggccttgagaaatgacatcatctaaaggagaatcgttgggactggggagaaggggaggggtgtatagcttgaggacagtgtgaggagttggcagtagacttggtggggagcaaattagtgaggagcaaaaaagatttcctgggattgaaagcccgtttcaggttgaaataatacattgtcatccttattcaaagaataggtctccagagaacctgtactaaggacaatacatggtttatagttgtacaatacaactggattaaaaaattttttctcactgttttcattctgacctttattcccacttaattgaaatcactggggttttagtgttttaagaaacggatagtttgctgagtattatatgtgactatttcctacgggtgcccaggggaagaacaagatagtaggcctaggcctgcacagggtcccttgtgtgctatgacagactttactctcaccctccctaattcctaattgatataatttttatgtgactcacaagaggtactggtggtaagaggtataaactggaatttataattgaatctactttctttgtatctgaaagaaaaatattttggttaattatgggcatataatttagctaaaaaattaccttaaatgttaagtggtccttaaggcatttataacagaactttttcagaccctagaagtctaaactgggaaattatttaaaacgttattaaagcaatttaaaatggtaaaaataatacatttatttttgtgcattttagagtttcttttcttcttgaaggatgtttttccagtgaagaggggtttctccctatgaagagtattctcacatttaatagatggtaatttcttacttaagtacagtaatatggatcaatggctataaagaatagtttggcttatcatcaacccttttctttcctaaaagcagtaaaaggtgtgtcagggtataagtggtggaaatgcctgggtggtcacattgagaattgttcctgtagaattgctggtgtagttcatagtaagtctcctggggaggaatggttgcatactccgccctgtttgggaaaccacctcttctcttttaatgagcgtaagctctcgatggttggtttttacatggtatgatagaaaattaagagagaaaagaaaaagatgataaactataatataaaggctcaaagaactggtattatttaggcaaaaggttatttgacagattggtattatttaggcaaaaggttatttgacagacttaaacttttcttgttctctctccagaaaacagagactatgtatcacagcaagagtttcattgggtttaagaaagcgtactagaatacgtgctggagtactgacatgcatcaaaatgtagtaggatatataaattcagtttgtaatgacaattttgtcaagtttgttatttatattttagcattacctgaaaagtctaattacattaaatcccaagggatagtcccaattacttcattaaactggtattttcatagggaattttgcttggataatgatccattattggggcttataatttattttttacacagaatatggaaatagcttcagaggttcattgacaataaagcattcattaaatactgtgaatcactaatgccattgatacagaagaatttccctatgaaaatgagagcttctgtgagaaaatgaagtagttgggagtttaatttcttattaatatgattttaacttgctgcttcattccactatattctgagttgggggaaaagggcagctatctctttaaaatatttaggaattctttgaggattaaaatgtaactggcttttgtcctcagatacgtttgtaattaatggttgtgtaagtttagggatttgttagatatttttcttggaacagtttacatgattttgtagttcaacatttcaaagtttcaacttgaataaatattaaaatgaggatactttaaagacactcaaataagcaattttaaacttgctttctggtggggatataatccctttgagagtctgaaggatgatgggctgtcaccccaggaaaatttgcacatcattttgtttctaatttcagggaactctcagagcccctagaagtccttctgtagacactcaaatctggagagttcgttaaaatctgtcttgaggatttttaaaaaagtaatatcctcagtctcagtcaaattctttggattttttgcttttgtaggtataagtaaacggttaaaaaccttcattgctacttaaaataccagatgagtgactacttttccagtttttattgggaaagatttttctctaggttctttagtttatgtaatacaaatgaactaatgaatttaaatactggtggaaggggaatattctaattgaatttttggtcaactcagtattgaccagatgacttacactgaaaatcttttcataatattagtagtaaatatagtgttttaggattttgtaaaatttctggaggatgtctgtcatcattttgaacactgtatgtagtaaagttagaaaaaaatgaatctaaagtcttgggcattgtttagaagttaaatattcagccttaaaccaaagaatgaaagcaaacagaaacttaagttttagttatctttactgtgagctaaatgttctagaaatctgattgtgtctgtgtcagtttgtatactgtgtgtaagaatatatgcatttcttttgtagccacgtcatgaatattttaatgtccctgtgtactaaatgactactcatcgagtatgcagaatttcacagaggaaatagaatgctgatatacatatgaaagaaaatatcctcagcatggtgatttattgtcttgtataataatagtagaacattttagaactagtacttttatgattgtatttttttcctgttcacattccaaacttttctgttttattttcattctatatgtgatcttgatacagctcattcctttctgcaactgatttaatctcatcttgacaaaatatgacctagaagtgttttgagtaatattaaatcttaaacacatacatattattaatgaaccatctgtgatttatcttataagaggaaaacatgacaatcattaaaatgtttaccaaagaaaatatagctgaagtgctaggtcaaaataagcagtgccataatatatagtgtagtttggtcttcaaatatggaggttaaaaaaagaaactattttgtgtgattatcttacaatctgtatgagctaatgtgttctaatgtatcacataaaagtatatgtgaaaatattacaagaaactaaaattaatttgtaccattatataatatttaaggttaaaacattcagtattaagaaattttgtagtgccacatttattgaatcacatttgtgctatataataatatcaaacaatccctttaagaacttattagagagctatgtctgaagtctgttctgcaatatctgttgctgaataataactctttcaaagcattaatgctgagtttatatagttcaaaaattctaatattcattcagttttaatacctaaatacttatattttactagtgatggcattctaatatattaagtcctcatttaaatacttgatactttgttaactgtggcattatatttctgaattttaaaacctttaatattggtaactattgcatattcttttaataaaacatgcagcatatttttttataaaaggaaaagaattcattgtttatatctagagagcataaagcctaagttaagtaagttattaaacaataacttcacaagatgttcaaatcgatttatcactgaaagaagatctatgaaaatgtgttttgaccaaacttagtattaggcaggtacacagataagattttccattcttaacattctcactgtaatgcacgacatttgaagcacctggatgtgctatcaatcaggtgggaaatttagcattatatattggaagcattgagaaacattggtctttcatttctatttttttttcccctcctttcctcctcctgccccacaatatattattcatctggttttaatgctacataaatatgcattgtctcatgcctgtttgtgttggatgccttgtgctaagctgtaacaaaatgttgcttcttttgctgtctgtatacagctgcttgctttaaattagtagattctgaaatagctttccttgcatgtctaaaataaaagtattgcatgtacttcgtctcatgtgaatgactttttcttttccatccctcataaaataacgttttatattttcatttttctaggcaaattttttaaattgtggttaaaaacacataacacagaattcaccatcttacgcagttttaagtgtacagttcagttgtgttagttaagtttattcacattgttgtgcagcagatctgcaggactttttcatctggcagaactgaaactctatacccattaatcaacaattccccatttctccctgtcccccagcccctggcaaccaccattcgactttctgtttctataaattttactactttagatagataatagtttttctgggtagttttgagctacaatttcagtgtgaacatgtgtaagttccattttatattatcaccacaatttattttaaaactctacctgtgcaagtctcacaagaataaaatgtgtaaataattctttgaaactaggccttttagaaaggacacatattttcaataatgcatatttgataagcagtatgattctctacaggaaatgctatataagattgcaggcagtgagcacatggggaaaagtctgaccagctccacggagtagctgtggggcatttttacatggagaagctgagaatgtaaactgtagaattcaatggaggcattatttaattgatacattcaaggctacatgaacctttaaactacttaacattacatggaaataattattttaaatttttcttgaatatttatgagatttagatgtcattctcagtgtatttaatgcttaaggctaaatataaatgaaagggattggcttacatcactcttgggtgttacatcatttccagtggactttcttaaaaaactttatcatgaaaacttcaagactcacgagtataggaaatagtataaagaaccctcgtgtacacatcactgagcttcaagaaccatcaacttaatactgtttccccaaccactccccgcatttttgcctcagtatcttagagcaagccctagacatcttgtcagtttgtctttaatacttcagtatgtgtccctaacagataaagtaccatgccccacaaaattaacaggaattaataattactatcttatgcctggctcaatttttcctaattgtctgaaaaatgcctttttatatttggtttgttagaatcagattccaaccaagactctcacattgtatctgattgatgtgcgttttaagtctcttttaatctttaacaaatcgtctgctttttcccgccttgccattttttttttttaaaacgaggtcatttatgctgcaggatgtcctaccttatggatttggccatcatactcatatggcaatgtttagctgttcttatatccctcatttctatttagatctgtaacctgactagattgaggttcaatttgagggggcaagaatacttcataggttagactctttttaaaaaaataccttttttcgctaaagctgatttttacccatttttattactatgcagacatactaaaaggtcatcatatgagctttataagtagaattggtgtatagtacttgcgtttaataataaatgctaaatcatttcgatttcaattgtgtaactatatcacctaacatttttgaagcactttctataaattaggcagagccttaattcacttaatctcaacatatgaaggtaagtactattatccatgttttccaaataaggaaacagaccatagagtttaagtaatttacttaagattacaccatgaagtgctttacatgcaattaatattctaaagatttatggtttaatataatttctcttctccttgctttgtgctgtaccatgattaggatgcgaaagtaagtttattactggatgccaaaaatttatattattttccatcattaaaatatagtgttgccttttaattacaaaattcgttgctagtaatacctgaaagttggcctccttggtcctttattttgtgatttgcaaaatcagccactttggaaaattattaaataattttttcctggatatgcttactttgttttgacctcctttgacacttaaaaaccagtgctggttgctacatagaataaaaatgcctttggcccatggcattctttgcatatgtggcctctagtgatgccattggttgcactggggaggtctgggaagatagctgtttctgaagacttgccgctgtggacacagttaactaaaaactccaagaggaagacatttctataaatgcatgtgacaaaaagcatggaacacaacagtaggcgaagaactgtgggaactcggagggaagaggttttgaattttaccactaagataacttatctttcatatatataattgagtagcagtgatttcataaattgccagcaggtttgcactgggcttgactgctttttgcatgacagcaacggcatctagcacattggtaggtaattagcaggtacttaatgaatgctgaaaacgtccttttgtggtctccaattttgagggcacaaaaccctaaataaccaatggctgtcaactagaatgctactgtgacacgaaattgctttcttgattctctaaaacaagcatgttcttccatgtcaatgtttcacattctcaagactccctggatctgcttaccagagtctcacattttccctccacaggaagctgaaaccccacgtagtgttcttgaagaaattggactgacataactctcctcccttgttgatgacttcttgtggcatttcacacactgtagatggtcactcccttcatgtccatgttagctcatggtgtaagatgatgtcttgtcagtattactgttttgctaagccgcttcattcatgcctacacaatttttttttaaaagggaactttagttaattaagtgataagggacttaaatatgaattagaatggtgcagaaagagataccttttctggatattttaaagtttaaaggtcagtttctcttaatctgattatgtgcacatatgaaaatggcacatcatatacatgtaaaatcaggcagtatacatttattaattactgtatttgacaaaggaaactcttaaattataatgtgaaacctggttttatgaaaccaaagactagtgcagcatttcagcatatgtaaaaaaaaaaaaaaagggaattgacatgtcacatatcaaatgaatggaaactttgttgaaactttaaaaagcaaatttactccaaagacttgtattggaaattacataccttttttttttttttttaaaggactacagattatttttaatgactaaattggagtgatacttcttacactaaaaattatttcttaggcattctgaatctgggatgagaaacaggattgtttcacaatagtaagcacataatttttaaggccaaggcacatttgactcctgagatgaattttttgtggtcataatcaaatacttagttgtttttgatgccccaaaataaagtgagaatggtaatttgccaggaattcttcataacagtatcttacaaaaaacgtgttgctctcttcacagtattatgtgtaaagtcattgtttaaagcacgaatgttccctctggggtacttgttaaagctaaatttattttgcttccctccacttagaagtgctgcacactttacagcagcttcctttctttccatggcactgcctagttaacagaagtcttataaaaatttaaaaagacacatttcttacaaaaaagagttgaatgaggtaaaatggcattagatggctctatattttttaaagctatgtaattgttcagcgtcacttttctaagtacttatacatatctaaacatgtcttcatggtttatattttcacttatatatgctgggctggattaagctttgttgtgattgtgaccaacattcaggccacgtgagcactgtcttatcacatcgccaattagttgtaataaacgttcaacgtacaaacactggagtgtgtttttatctctttccaaaagtttgtcaaactatgcagagctgctgaaggaagaatttctcatttttttttcagtaaaatgttgaaaattcccctccatttgaatatggtggttgttataagcacacacaagatacatggtggaagatctaaggagtcttcatgtacttcattaaaaaataacatggattccatactgagagcctatctacacatttattttcaatcaataaatgctgcttttaaaaccttg

SEQ ID NO: 464 - DNA, 17539 bp, Homo sapiens
  source 1..17539: mol_type = other DNA
accgcgagtgtgggaattcggcgtcgcgggagctctctgatccactcaggggtcagggcatcactggtctcgcgtgcgcgtgaccaggcccggtttccggtgccaggacctttccgaagcgtcgagtggcctaacggtcacagctgtcgcccatcggagaggcaggactactgcgagcagttttaccgcgacctccggaggccggcgtgacaggctctgtcactaaaataggtctgtccagtcgtactttttcctcaccttgaactttccgtcacgggaatacacgatttggcttaggggccggggctctcctgaggagagagggtttgctttgcggggaagagcgagtcttgacttcgcagcctccaatttcagccgcggtgtggaggggggtgctttgggtggtccccacagcctttccggagtgcccgcgcgtgtaagcttttgagatttgacaatttgtgaagtgcttggtgctgactttcggggacgacaggatccttttacagtcattctcctgtcaggggaggcaggtggggagcgaggaaggatccagatttcgttaacagagctttgagtttaaagaattgacaaactcccgagttgatttcctgtcagaccttttgcggttgagacatagagtctgaggctttgatggtaaccgcgtttgatttagagacagactgtgcagcttcgctgttttattgtaaatacgtaaatgaggaggaagagaaaaacgtagggtgttgggagcagaggcgggaggcgggagatcctgcgaaatcggagtccctttggagtgggggaggccgtcgaggcgtgcgagggcccggcccccttgccgcgtggtcgttaacaggaaaggccctgatttggttggtggcggatcgcgtccctccctcctctccccggctctccccgagtgcggcaaactggcttcaggttgactaaaagatagcgattttccaagcagctttgccgcgcggtgttttctaaagcggggcgtgggctgggtgcccttttgggcctcacttgtccggcctgcggcaagtgctgggcgatgggatgcggttctggcggcaaaggaagggctgcctttgagagtcccgcaggaaggtttagaaagtgattgttcttaaaacaaacagagcgttttgctgtgtgttcctcaaagtggtcccggtgggagtggcgcctcattgtgagctgtgccttatctgatgaattaatggcaggtgaaagccttgcgcctccggagcgaatatttacgacttttgaaaatgtctttaatgtctaaaaaaagtcttttagaaaatcagacggcctcttgttcttatgttatcaagagtttagatttctgtggtaaatataagtgagtttcattttaagtaaactcattttacgagatttgagatttgaaagtgaaattaattaattttgcacaatctagccttgggctctgagaaaatgttgtaaagctgtaattaatcttgtgggacgaagtgaaaaggaactaaagtgtatggtgtaatgaatagtttaaatttctgtggtaaatacaagtgagtttcattttaagtaaactcatttttatgggatttgagatttaaaagtgaaattaattaatttcgcacaatctagtcatggttgggctcagaaaatgttgtaaagttgtgatttatcttatggaaagaagtgaaaaggaattaaggtatatggtgtaattaagagtttaaatttctgtggtaaatgcaagtgagtttcattttaagtaaactcatttttacgggatttgagatttaaaagtgaaattaattcattttgcacagtgtagtcatggttgggctctgagaaaatgttgtaaagctgaaattatttatcttgtgggaagaagtgagaagaaactaaaatgtgtggtattatcaagagtttagatttccggggtaaatataaatgagtttcctttaaactcatttttgtggaatttgaggtttaaaagtgaaattaattttgtagaatctagtcatggttgggctctgagaaaatgttgtaaagctgtaatttatcttgtgggaaaaagtgaaaaggaacttaaatttatggtgttatcaagaattggccaggcgcggtggctcacacctgtaatcccagcactttgggaggccgaggtgggcagatcacttgaggtcagaagttcgggaccagcctggccaacatggtgaaacccagtctttactaaaagtacaaaaattaactgggcatggtggtgcaagcctgttacgctaactactcgggaggctgagggaggagaattgctttaacccgggaggcagaggttgcagtaagccgagatcatgccactgcactccagcctgggtgacagagtaagactctgtctcaaaaaaaaaaaaaaaaaaaaaagaaatttagatttctgtggtaaatataaatgagtttcattttaagtaaactcattttgtgggatttgagatttaaaaatgaaattaattttgcacattctagtcatggttgggctctaaggcaatgttgtaaagctgtaattgtttgccttatgggaagaagtgaaaaggaattaaaatttatggtgtgtctactatgaaccaggcatgatgctgagagtttaactgtgtaatttttggcctaaatagccctgtgaagtagatattattccaactttacaggttagaaaatttgaggcacagagaggtgaaatatttgcctaaagtgaaacggcaaatttggcaatttggacttggattcaagtgtttataactaaagcccagctccttgcatcataccctggtacctaaaagacataaaaactcacttcaggtgcaatgtgaatgaaaatgacgttatgacccaggcttgttgtctatgtgctccttgagaaatagttctgttggatagatgcggtcaatactcaaaagcccttgctatctttgccatgcattactctaagcacttgacatgtattaatttaatcctcacgattccgtgaggtatgtgctattatcattcccattttacagacaaaaaaaaaaaaggatttaagtaagttgttcaacttacttacacagctagtatgtgggggaggtgggacccaaacccaggtattctgaccacaagcctaaggtcttaatgctgtttgatgctgcctctcatgtaaccagatatgtgtgacagttgccgtagaagtattaaagtgtgagtgttattgtagttcagggaaagccgtgtcacatccacatgggatgatcattggcatggtgcccttgctttttggaggtgaaacttgaagtaagccttgaagttgaatagattctcctaggcggagacacaacagggtattatggacggagggcataacaggagcgagaagctcaaagagtgaaagattggtgttgatttgtatatgtaccagagatgtaaacatgttgggagtccagtggtggactcactgcacagtgctcctgtgtctaactacagccaaattttgacaacattgttattaatccaaatagggagttctctgttctctggatgtaagagcttgtaaccattgtctgcaaacttgcctgaaacaggctacacagtaaatattttaggcttagaactgctgtccccagtctttttggcaccaggaaccggttttggttttgtggaagacaatttttccacagatgcagggacgggggagtgctagcggggtatagtttcctaatgaaactgtttcataaggagagtgcaacctagatccctcgcatgtgcagttcacaatagggtttgtgctcctgtgcgaatctaatactgcagctcatctgacaggaggcggagctcaggcgataatccttgctagctcctgctgtgctcctaacaggccaaggaccagtaccaggcggttgcccaggggttggggacccctggcttagagtaaaggggcaagtggtaagaagtgacctctgcgcagtgggcggggtcctgattatggaaggaccttgcaggccatggtaggagtttggattttactgtgttattggtagcaaaggtataccaggtgattttaataatgaagtaaagtgcatagagtgtggtggtagactgcaccatttactagcaatgggacctgggcaaattacttaaatcaagcttgtccaacccgccttattttgttgttgtcgtcattgttgttgttctgttttgttttgttttaggctttcggcagcctgaagctatgctttttagtttctgtctctagggataagtggaaaagagggatgaggaaggggctttcctggcccaaccagaaacaaactaagaacccatgactatattccctcccttggacacccctagtaaacgttctttgcttcagtttcctcataaggaaaatgaggacagtaatagaacctatcccacagggttgtcagtaatttagcaagatagaatacctaatcaaagaatcaaaagaaagtacaaattaaattagaaataataattttaaactgtggttttgctaaaaattctgtaattatgatgaaatgattatccttctggataaaaataatttgtcaaaacaactcaagaaaaagtaggataatttgactagatcatcaaccatggaggaacttagaaaatgttataaaaactggacccagagagttttttttataaattcaaccctttgagcacaaaaattgtcgtgcgatgtaaactttttagagtatagaaagagatgaaaggcttcccagctaattttgcagagcaattttgataccaagtgttaataatgtagcaatacaacactgattcattaattgtgagaaatataccatctcaccaatgtaagatcttagaaatagagatgcaaacaatttctaaataaaacaccaacaaattgaatgttgttgtttataatcagctggacccctcaccccaagaacattaagaaatgtattaatatgttgcatcagtagatcaaaagagaaaagtcacttagtcatctgatgccaagaagctatttggtactatgtattatctgtcctggttttaaaactacatgcaggaccagcaggatactaccttagtttattttggaacatctggctgaccccaacagccctccttagtgggaagaagtagaggagaattttcaaacgtggagacctatccattgtttctacctctaggaatttatcccatagaactacttgcacaggtgcaagactgttctgcagtgttctttataagagcaaaactttagaagtaacttgaatatctatgaattgggggctgtgtttaataaatcatggcatatttacaagatagaacactaagaagtcgttacagtaactacagtagacctaaaagtactggtttggaaagactctttccaccacaggttagttttgcctgtttttgagtttaatatcaattgagtcatatactgtactcttttgtttctggctgtttttaaacccaaggttatggttgtgagattcggccttgctgtatacagcagtagttggtttattcttattgctgcgaagttcctttatataaatataccacaatttaattactgatagcctgtataagttttatggtcagaaaactcaaatagtttaaaaagtgaaatttgattgaagttacagccccaattagagaggtattttataacttgatacttctatgcaacattagtctgcgtttatctaactcgagttagttctcccatcttctttatcccttttgatttctgtcttttgggttcatggtcattagtatctccactatagaatgaaagggaaacaggaaagagatgaaacctgaatctcttaattgtgcctctcattactgctctggttcagaaaggatagggtagctctttcattaacgtacccttcccagtaactgtgatgcagacattcaaagcaaatttctagtacaagatataatccgatactcttgcagccagttttctagttccatagtaaagtgactcagagccataaccaaaccttcctaattttagattgtttggcttacctttcacatccacttatttaggtttaatataaaatttaataaggcaatcctaacttgaaagttgaaatggaccttagagatcatctcaactggtgttcgaaacctggtggatgaggaggtggtgtctcttgtggtccgcccagcccacatagtcgggggggacccaatccagaatagactcctggcttacattttggaggcaatgctttctccttagtcaagagccttttggagctcctttacaaaagcagttagcccttgcgttctcttgttcatttgtttccagcatttactctgtaggctttaagttactaagcagtcacttcacagtttgtaattgtgtttgatttgattcttatttctagtcatgagcaatatggcccttcagttttgaaagatttattctaaattggccatggaagaattctggttttgtcactctctaaaattcaacccaaagtccaattctatttgagttagcattctgagagtatatccatattattaaggtagtaagtgtatgaagtaacttttttatgcgttgcttttcaggagtagaggtttaccactcttaggtgactaagcagtatcacaaataaaccctccagcaagtttaaaaataattaggtccaactcagaggaagtggagtttctcctgttgcacaaaaatgatgtctaacagctccagtgaaatcgatgtggtttgtattcaaattgaaaatctgtctttgttctttttactgtgctatacttctactctaaatttagtttaattttatacagtgaaatgcatagatcataagtaaatttttgttatatattttaacagtaatatataaagctcttgtgacaatttgtgtacaagtttctttgtgaacacacacttaaatttcttttgggtgaacagacagaagttgaattactaggtcatggagttcatgtgaatttaactctgtgagaatctgccatacagtttttcaaagtggttgtgctgtttttacatttctgttatattcttctatatttcttcatccttcaagttgaatcagtatgtagattattaaactataaataatttggcttaacagaaaacaccttttttttagtcacataaggacatagatattaatgctacctaagtagtctaggcaattctcttaactactgtcagtcctaatgtttttcaaaaatctttggagataatgttaactgcctatcaagagtcatttttctctgacataactatgtaaaagcactttgaaaagcataaggcactatacaagggtaagatagtatatttttaaaagtactgaactgtaacccaattccatatgtttttgtgatttctgtcatgtattttgaaacaaaaacatacatagctaccaagtatgtttattataaaattattcccatagttcataattcattcttagaatgaagagttattatactgaagtgtaatggctatttactccttacttatttataccctgtcttatttttaaaagttttaaggtactttagagattaatgtatcaagaaaaataggtgctcaaatgttttctgtcttgtccacagaggggcactgttggattatttagaaatcaaaaaacatgtaacatttatttctttgttcatggttagaaatatttgcttttaaagtatttctggtgctaaaggactagtctttctaccatgaagcatataaagggttaagctcagtgaaaactgttgtcttaagtgtagttgggttaatgagaacacagttctgcaaatacatcttttcatgtagtcatagtatttacagtgagcaaaggtcctttgatatcacaaataggcctttgtaacagcctcttgaaagtgaaattaaaccctcaacttttcttttagttctgtctttcatcttcccttttaatttgttggtaaattttcctcagataaaaacaagaatacctacttacgatgaagatgacaacactattctttatgcgtatgaaacaaaacctgaatttgtcaataaagtatgttaattgctaattgccaaatatattaacatttgctgttttaaaggaaaagatgtaaattcctcgtatactatggagttcccgtaaactcacactcaagaaaatatctctcccctgaatttgtatgcttgctttcatcagagaatgagcacttaaccaatttactttcccctttttcttatatagtagaaaattaagagcagttttgtactcactttcagtataaaactctaaacctggattcttctgatataataaattcttttcttgcccccttcctcaattgtcagtttttcattctcatattaatgtgaattttaaaaatctctgcttaatttaagacttctgaaaccccttgaaaagttggtgataaataaaaacaatttaaataaataaatatagctcccccctgcccccagtgttcagtttggctgttacagaaataaatcattaactacttttaaaatattagcaggaaccgaatattgtatctgacgcatcctgtaatactgaagagcaactgaagacagttgatgatgtccttattcattgccaggtatggaagttctgtctcttcaatgtagttttctaaaatgttaagcaaaaattctctttatctcacataaagggaaagtgtacaattaattgaaattttgcctatcaatttatttatgattatcatcccattgtgatgattttttaaaacaatttatagttagaaccacatttcctgaatagcaacatgtagatttaatagctttttaaaaagcccattaccaaccaaatgtagttatgtctctttcatctacattgctcagtattaaattagtttcccctacaaaatccttaaaggaaattgactgatttggatgaaatttagtatgtgcctaaatgcacatcaagatatctcaatggaaacaaagtggcagcccatcaaggtttagtaaagaaacatacctaaggtagttttgaggagttgttttaagaatcaccatgttggtagagatgtgattactgggaattttgtgagttgcataccccagaggtaatgaaggtttatatatatataatgtttcttaccatatataaggtttcttgaatggaatgagctaacatactttggaaagtaaaattgtttgggtgtttatcatgatcatggaggagaacagaagtggagtgcttccaagggacacatacagtcttggggggaagtgggtgcagaggcgagctgggaagggagggagcaggttctccccagcctgcctccccatgcactgctaggtcatggtctaggtcagcttatacgctgaggtgggaggtagcatctgtggggggaggtgtccagggccatggtcagcctgaaatggccccaagggcccctctccattgctgccaaggggctggctctttcttcccctacccgttctagatcacagaggtggcactccagcctgccttgttctttcatcccagttccctcttgagtctgtctccatcctgcttagtctggaagcagaggaagacctcgccatcccctgcctacctcagctccctagtcctgcctcttcactcgtggagatagtggagcacctggggcagtcctctcctccgagtcctcataactgtccccacagccaaccaactgccctcatccctgcccttcttctgaccccttcccggccattctagtgaccagggctgacacccttgctgctttctgcatctagtcccctccctgaactcagagctgccccccatcgggcatccccctctctctcctctggctccagtccctgtccctccttcccctctacgagttctcccacatcttggagaagccacttctcttgcttcccatccctcctttcctgtcatcctcactctcttcttcctgtgacagccccactcctggaatgtcattcatacttgctgtctccacacctggcttcctgtttttctctctgggtatttatgaacctgctgttccttctatgctgtaagcccttccatgcatcctcacctggcgagggccttctcatgttttaattctcacttcagacctcacctcctctgaaaaggtctccgtgactgcagcctgggttaggactgcttttctgtgcaggcttagcctcctgttcccacctgtgtcacgccactggtaataacaatagtaacatgaagagaccactgagcactgttggaccgggtgtagtgtagtgctgttactgttagtattaacctaatactatagcaaggttctcgtcctcgagagaaccctgagagagcttttcatcctgattccctacatgaggacactgaagcacagagaggttaagtaacttgccctgggtcacacagccaataagtggctggactgtagtatttgaccccaaccatgttccccaagagcctgcactgtttatctcagtgccgcagccctgtggttctcactagggccatcagaatcacctggggggcttgtgaaaacatagaccactgcccccactctcagagttccaggttccataggtctggggtacaacctggcatttggcatttctgatgagcttacaggtgatgttgatgctaccagtccgtggaccacactttgcaaaccactgttccaggctgtttatcactttgtctgctggaatcctctttttacttgtctctctcccagctgagatggtagttcctctaggacaggctggagtgcagtggctcagtcatggctcactgcagccacaacttcccaggctcaggtgattctcccacctcagccttcctagtagcatggactacaggcatgcaccaccacgcttggctgattttgtgtatttttggtagagacgggggtttcgccatgttgcctaggcttgtctccaactcctgagctcaagcgattcacctgccttagcctcccaaagtgctgggattacaggcatgagccaccgcacccggccaggagctttttttttcggtccatgttctcaatacctagcaaagtagttctgccaggtggtaggccatcaataaaggtttagttgaatgagtgaatgaatgaatgaatgaatgaatgaggaaatgtttctggccctttgtttaagtgtatttttctttgcccaaagtttctgtgtatttcaagaagaattctcagatttttatcagcctcctatgtgcttgattgcaatgtttctggccctttgcttaagtgtatttttctttgcccaaagtctctgtgtatttcaagaagaattctcagacttttatcagtctcctatgtgttcgattggcgcgtaagagatgtgtacttaacggttttgtaagattaattgctgactgcgtgatttaaaaatactttgaagccaaaagtcacatctgttatatttggttcagtgttctttctggagtggaacactcactgtctgtatataatatagacttcatatttgtacatatatgaacatatatgttacatatgtatatcataaagtgagtctttgttcttttagcagatttctttcctaaaatagcaccttccttgatgtgcagtgtcttcatcatcaatgtgctagcatagaggcattgtgggacattcattcaccagcattagagcttcctcaattcctacatggagtagagcaggggaggggactactctagctcagcctgttggctctgtgtcacctacagccaggccttgaataggagcaagacatttctgatggcttgagaacttttgttgtgtctagcagttaacatttgacttaatggtattttcacgttacttttctttgaaataaaaaattatattttacattgtataccaattatatgactacattgtattataataggttatatatgatgctctgcaaaacctggataagaagattgatgtgattcgtagaaaggtttcaaaaatccaacgtttccatgcgagatccctgtggacaaatcatgtaagtgttataaaaaacatttttacaactgtgataaacctctggtttgtaaagatgccaatgagctagaagtgagagagtaccagtatctgtgtgagattagcaaggcatgtctatacttgtaacagtagatggagactaaactctgttgggagaacgctgaagtttaggtttgataatttatgatgctgcctatttttatgtttgtaattataatgtgtaaaatacaattaaaatgtaggattgaagaattatataatcaaaagggaccatttatttttaataatgtaaagcaatgttgcatggaaaataagtattaatgtatttgctactaattttatttacttttttactcactgttggtttatgctgtgtttgtgtgatttcagaagcgatatggatataaaaagcattcttaccggcttgttaaaaagcttaaactccagaaaatgaagaaaaatgaggtttacgagacattctcctaccctgaaagttacagccccactttaccagtgtcaaggcgtgagaataattccccgagcaaccttccaaggccatccttttgcatggaagaataccagcgagctgagctggaggaggacccgatcctcagccgcactccgagtccagtgcatccctcagatttctctgagcataattgtcagccgtattatgcatctgatggtgcaacgtatggttcttcttcagggctctgccttggcaaccctcgggctgacagcatccacaacacttactcaactgaccatgcttctgcagcaccaccttcaggtatgctggcccagggagagcccaatttggtacatgcccctgagatgatgagttactcagctttgatggagaataggtatactggatcatctctctgcttcccttctggtttggtgagtttgaaatgccatatttacaagtagcactatttgacctatatttatcaacatccttgatgcaaactagtggaagctgttcgtttcctattttgagggctggttttaggtgatattcagaatgatgactaacatttattcaatgcatattatgtgcaaggcactgcaccaatcagctgacatgcctcttctccacttatactcataatgaccccatggttttggcacatttattacgccatccccacgatcacagagctggtgagtagcacttctagaactctgccccattgtgcttttccaaatcttctatttttatttaccctttccctagataaataaaaaacactcctgatatggcaagagcccagatggtagggaagaaagggtatgtttttggctaattcacacacacaaaaagatcaaattgtgttgatggtcctggttggagaaacaaattttcctaactaattacaaaacccactttagtcatcacacactaattttagggagtctaacactgtgggtgagtaaaaggatacttgtcagtacacaaagaaatttcaacacaacttagtgtagagcatagctaaaactttctgaagtatgagcagttaaactgtctcatatctcagttattttttaaacatataaacctttgaccaaaatctctattactatgcaattaaacatgaaagaggaattaaataaaatgttagttacttctgacctagttcagcagaaaataatcttgttttcttcacaatgcacattagcacttaagccacgagagacaggaatctaaaaagtaaagcgatactaaaaataaccttattgaatacgtggggaagatttgataaaagtactaatttggttcttaaagataatggggttgttattgagattcattgattaaaaggaacaaatttaagcaattataaaactgtaaatttggagaatttccattatattttgctagtaaaattaacctaatctagatagattaagagagaaattccttgaaatacttgaagagagtcataggttaggttagattaacctaattttacccaagtgacagatcttttgccatatttgcctgtggccaaagaagacttggtttacttagtctgttttgtgatctttgaaactttaatgtaacttctgaaccagcttttgctatttaggggaggtcagatgggacactcttgtgtaggcatccccacatcatctttatataggctttcactagattttacagttggagtcttgactccttgctaggaacatcacagaaggttccaacaaagagagcattcctccttacctaacatctcttctttcaggataatgatcaggtcgagtgtgatttgtcttttttttcttttccccctctccattgaagttacaaggtcaccagttgaaaatgacggttacatagaggaaggaagcatcactaagcacccttcaacctggtcggtggaagcagtggtcctatttctaaaacaaacagatcctcttgcattatgccctcttgtcgacctcttcagaagccatgtaatgtatcttttgatcctgttttcctgctgtaatgcctttgaatgacctctgtgcaggtctttcagttggatactgtgtgaatggtgggagaaccctattagctgatttttccatatatgagaaagcttattttgcccaaggttagccttaaatggtaggctaatggtctgttctttaaatgggtgtagaagtgcctaaaatacaaactgcctcagcttcttaagacatgatgattcagcatggccactcaggtgtacctcccctttgtaatgacagatacaaagatcctccccctatctgctcccagctgggcaccaggaccacgaggaggagggggtaaccacaagctataacagggtggccttcgttttatataaccagtgattcaacaactgattccatttgcctcgattattgatgatttgtaatgctaataccctcttgctattatcagaccatttacaaagtaatatcctaggccgaagttttgtaagttctagtttctttaattttgagttttacttagtagaaaaagtatagaaggtgccaaacaaaggttgtactataagggatttcagaccttttcagatagtgttaaatgagtaaataaaattttattttttaactggaacatataaaaccaaatcatatgcttcagcagcataagttgatcaattaagataaggaattttaggagaatgctttgtgactatgttttatttattcagatattttcacagtgtgtcctaacaaaattagtagccacatatctgatttttaatatagtaagaaaattggtgattagttttagcatctaattagtttcagacaactaattggcattcatcataaagacaacattgtatagacatttacagtttgcactgatgttgacgtactcatcttcccagcccttctcagaaagttaatgaacatctgaaattcatttttactattcatagtctttactattttgtcatggatgtgtagtattttattcaacatacagtatatatttaaaattaagtttgacacagtttattttttaagatattatgttaaatttcctttttctcagaacttgaaatgagtttatacattaccaaacggtgcttcactgtacaagttatatttttaatagttttcataaagtagacgcatattcagagaatatacatctgcaatgagctgctctctagtttgctttacatgttctcataaagaactaaccattctgatgaaaatatggaagcattattaattatcgttaagtttcttctctccataggaaattgacgggaaggctctgctcctactcacgagtgacgtgttgctgaagcacttgggggtgaagctgggaacggctgtgaagctatgctactacattgaccgacttaaacaaggaaaatgctttgaaaattgaaaaaatccttgtgcaaatttagattgggccaacttctagaggcaccaatgccttcttagtgtggaatcatttttctgccctttagtcgtttttgttttgtagaaagtatctctcaaaatatattatagctagaattgtagaactatgttatagtccagtctacttctttaaaaaccatttaaactgctagatagtattagaatagtccaatagaaaattcattctttataggtctttaaaaattacttttattatattgtttacaaatatatttcatgcaagaaacagaaaaaaaaaaaaaccctttgattctggttcatctcgatacagagaaccaaaacagctaagagaggtattatcagggttgacaactcctatgattgaatctatgggaattattcctcagaagagaatttaaaggtgtacccatatatatctctttctggagtattttatctgtctgatgttgcagtattctacaagtttccagaaagagaatagccatataaattattttcctttctgctattatttctctatatgttttatttattcagatttagagtaaaaaataagcatataaacttttattatgtgctcttaacagttttaagataaactataggatagatagaatggttattttatgcaagaaatattgtaccgcaagggtggtttggatgaagtctgactactttttttcaaacaaactattatattaaaactgtcatattttggctaagtttggacctataactacactttcattgtttgcatctctctatgaagatacgtctgtccaaacttttaaaaggcataactgtattttatgtgtttattctttatatagatagtattttatattttattctcacccgaagtattcacacaatctttttaaaaaaaatttgaaatggcattttgtattgccacagaggtaggatgagccatatattagtgaaatgttttattttgtaaaatataaatggattatttgccatcattagtacctctcaacttactttttagaggacaagaaacaatctgtagattggtttccatacagggaagttctccgtcctatgcaatgtttctaattaatttgcttaattctgagccattaatcctgctacactttgaatgatacattaattcagactaatctttgggggctttattttgtaagttagaactttcaagggaaacatgttcaacactattattttgttataaatttataactttgttattacattgtgtaacaaatataaggtttacgagctatgagaattggtgctatcaccattagctatttgctgtaatgtcaagaaaatgttcaccagatgcaagaatgtaccttttctttttagaaagccaaatgtactttagacatgaatgcaactatttaaagaatagcttcatcaatgttattccttacatgtcataagattcttacttaaacttggtcttctttcaaattgtttgtatgaagatgctgtacccacttgaacagtcctcaggtgtttacataaatactatgttttacagttttcatattttaaaatattaataaagttaaatcacaatagttcattg

SEQ ID NO: 465 - DNA, 32744 bp, Homo sapiens
  source 1..32744: mol_type = other DNA
ggcagtggcggttgcggggcatgcgcggctccgcgcgcggcttctcaaacatggcggcggcggtgtgaagctcggtgccggctcgcgcgatcggtgggacagaatttcgttgttttcaccgacgagactggaggtacgtggtgattccgggccccgtaaggaatggagaggcggaggtgtgtcccggaccccgaccgttgtccgtgggcgggcgggtagaagccatcagcgcgcgtcccgtgcgaggaacgcccccttacgatcccgcctatgtcccatctcagttcggcttcgcgatagggtatcccgcccccggcgccttccgcggacgcccttcagccgatctcgcgtttcccctcacgccgccccggggccttttcgccgccgcggggtttgggcgcccggccgatagcttccacccgtcccctcgcctgcagcgccgacagcgccctccggcgcatcctccctgccgtgggtagggccgggctggggcctggggggcatcacggtgggtggcggggcggaggaaggaggtagactttgcctggtctgggctgagataacttttggagtttgggagggaaacgtcggcccggaaggatgcgcctgtggcggcgtgcgggcgcaaatcctggtgccaaggtgcgcgccgccgggctcctggcgggggctgggggcgccggtggctcaccctagcggtgcagcgggaccggaatgcgcgtcccgtccggggctggcggggaggcgaggaggggctctaagcctcctgaggggcggagaggcggcctcgcggcctgaccgaaaaaaagttgctgccgtcacttagaaacagtctcgaaatggtttcttacctttctcgctttttccacctgtatcgtgcttgcgccccatccaggtgtgaagagccggagggagaatgggtctaggcgaatttgctcgattttgcgcctcaaggttgtacatagatagcttcctgggccgacttgtaattcggctcccccaaaccccaaatgtttgggcagcacaagtatttacttacaggctcccatttgagactatttattttttaaaaagaggttgttaaacatttgtcaagcatcacaaagtgtgattgcaacttgaaatttgcttcttgtttgtaaattaggagattaacgtttatgacttactttaggtcttctctggaaagttaatggatcgattagtgggggtaaactgaggcagggaaagtgaataagttgcttatgatcatatgatttacaaaagtattggagatagttgtttttttccctaaaacagcttcagatgctgctacattttaatgcccccagagctattcatatttctgttttgagggaaaagtattttaagatgtacaacatttatggagtacagctgcctatgatgagcaattgttttataacaatggttcataaacgcatatttaattcttttcaataacagcgagggaaatgtttttcaataatgacgattttgcctttcttttatttttcttaattactcattaaataaaatatttccaattacgaatgtgctttcaggctgtttgtgtgttttttttttttttttctatttaatgggaggaatgtgaaaataagcttttggaaatgaatccagtgggatttttgagaaaagattgagtttatgagtattcacctgatgccttgtgtttagctttatctataacctttaaaacagtttgatagaatgtaaagaaaaaacaccatttaaactggctttgaaagttttgaatgaactttatatatacatcatgcagccatatgaacttcttaaggatgtatacttgtttaccccagagaacctgatttgctttggaattggtagttggaaaaaagattactgtaactctactgcattatatgtgcgggtgctttaaagttgatagtgtcataacgttcaaaaatcattacagtcagtctaaaaaaggtgtatcagtttttctcatgaggtggttgatcagtccttttgatttatgattccatcaacacatctttattaagcacctgtgctgtctttactatggagttcagtttattcagagcccactacgtgtgctaatttcagggtgtttaaggctttccacccatagtttattcctgaaaatttcagggagttatagctaaaaaaatcaatacgaatgtagaacaagtattcctttcattcaaagggcgaactcgagaagtcagtatttttgtcataattctccaaacaaaattctgagtgtagctgcaaactatttctgacttacgtgatgttaactttgtgattttttggttaggattatataaagctatatattttcatgagattattttctggttcaaatagataacatactggttaagcttgaggggaaaaatgagttgctggtataaatggaaatcaatatgtgctctgaagattgggtattttttaatactaagcaatttctattactaagtagtttaagctgtaattaagttttaactggtattttaaagcactttgttttttcaaaatgttgcagaaatctctgagctcagaaataacaaataagggttatgatcctcagctataagccagatgtgactcttattttcttttgggcttgttcctttttagctgcctgcctgttcctcccagatgcttcctatcacccctcttcctgcccctgttccctttgctgttggtgtctgtttccgcatcagtgaaatggtcagggtaatcctttgctgcttcactgagaaataattaatgatggtaaagtgccttgaaaaggctgagtaaataccaagtcttttgaattaacttgatgtagccacttgttccatttaaggaagagccaaatcccaattttagtttgagctcttgggggtgcgagagaaaagtttcacttgactattttactgcctttcttttggggttaatagcaatgacttttgtaactctagtaactggaacacgggtggatacagcagtatcctctgctgtttgccttattagtcacctctagtcttttttttttttttgcctggttattctgtctgccatttttctccctctattctcattccacttgtgaatggaaatcggaggtcctctctattagctaccctctcggggtggggagggtaggtctcactgtctcctcatagtcatattcctgatttttaggatatacaagaacaaagtgggctctgccagctatcagccttagagctatgagctgtggtgcaaagattagtctgtcattgccagaaggtgttttgtagtttgcagtgggcaaatcaagcatccctaataattttagaaccattattaatgtctgagaattactacataataccttagaatttgaactgattgttgattccaggaactaaaaacctggacattttgaaaatggcaaatgttggtgatgtttttttttttttgagatgggctctcgctgtgttgcccaggctgtagtgcagtggcgtgatctcagcccactgcagcttctgcttcctgcgttcaagcaattttcccacctcagcctcctgagtagttaggattacaggggtgtgccaccatgcccagctaatttttgcatttttagtagagacggggtttcacctagttggccaggctggtctcaaaactcctgacctcaggtgatcctcctgccttggcctcccaaagtgctgggattacaggtgtgagccaccacgcccggccgtgttggtaattttgaaggaagagtttatacccttccctggctttggggcttaatattcaggatctctttgtcttggggaaatagataaaagaaaccactggcgtttatcttagattaaaatggcataatttataccattatataaatactggtataatttagtggtaagtacattttttagactctaagtaccttaggctttggttaccatttataaaaagagtttgtggtagttctttttttgatacggagtcttgctctgttacccaggctggagtgcaggtgcaatctcggctcattgcaacctctgcctcctggcttcaagcaattctcctgcctcagccttcccagttgctgggactacaggcatgtaccgccacacccagctaattttttttttttttttttccgagatggagtctcgttttgtcacccaggctggagtagagtggcacgatctcagctcactgcaacctctgcctcccaggttcaagtgattctcctgcctcagcctcccaagtagctgggactacaggcgtgcgccaccgagcctggctaatttttgtatttttagtagagatggggttttaccatgttggccaggctggtctcaaactcctgacctcaggtaatccatccacttctgctgcctctccaagtgctgggattacaggcatgagccaccgaatctggcctttgttttttttgagagtcttgctctgtctgttgcccaggctggagtgcggtggtgtgatcttggctcactacagcctctgcctcctgggttcaagcaattcttgtgcctcagcccctgagtagctgggattacaggcgtgcatcaccatgcccactaatttttgtatttttcataatttttgtatttttagtagagatggggtttcaccatgttggccaggctgttctcgaattcctggcctcaagtgatcctcctgccttggcttcctgaagttctgggattacaggcgtgagccacctcgccctgccaatggtggttcttaaaaataacttgaaaaaattttagaagctatcaagatttgaaatgtgtatgtgttctttggttttcatgagaaaggcgattttgtttattttgtcattatgttgtctatttctagggttaccttggcaaccttagaaataatactgggtttttttttgtttgtttttttttgagacggagtctcgctctgttgcccaggctgtagtgcagtggcacaatcctggctcactgcaacccccacctccgaggttcaagtgattctcttgcctcagcctcctggggagctgggattacaggcgtgcgcaaccatgcccagctaattttttaaaaaataattttagtagggacggggtttcaccatgttgttcaggctggtctcaaacttctaacctcaagtgatccacctgccttggcctcccaaagtgctgggattacaggcgtgagccaccacgcccagcctggagaggtgttaacataagcaatggagatatcttattgtgtgaaaagtgaaatatttgaggatcctgtagcagtgaatatgatggtgctgttcatcttaatatcatgatcatttgacctagactacatgaattccttatttgaagagttaaaacttatagaataagctgtgagtaaagacctgggaaactgaagatagcatttgattacctactacttgtgacctgtgtttatggctatggctctgcctcttcctaagtttataggagcaaattgttttaagaggggaaagagagtgcccacttttagtggtaacgtactgttgtaaacttcagaagggacagatatattacaattctagggcataccttgaagatgctttcatttctcagagaaaagtttgcggggctctctttggttgtgtttagaatacacatttgatttttcgcaacctctgtttctcataaagattaactggtggcgaattatagacaaacagctccatttgtttggtatgtaccttatagccttgacatagttttttaagtgtattgacaaagtgcttgttttttttggttaacatttggccacttttcctacctttcatcagttttagctggtttaaggtttgattatatatttatttttaaatgctgaatcaaatgtgtttcttcttttcagttctcttcctctttgaatacatttggaaacatgtgccctttgctatgaactgttgcttttttttctttggaaatattttttaaaatgttatttggagtatttttctctttaatgttatttgaaaagcaatatagtcagtattaatttttaactaacttgatagagtttcataaatctgttcaaatgaaacacggcatctttggtcattaaaagaattaatatatagtaggcaatagtaagtatatttagatattgtttggttttagattactttagagactctgatttgagattttttttgtgttgaaatttgagaagttgtagaaatatttgaatgggtaatttgctgacacctgcctcatgtttgaggtattttcaaggatgtttagttttctggtttcttcagattgtggtttattgcatgcttttctgcagtctgttgtctagtggggattgttgttgtcatcatttccattatttcttgtagggccggtgttagaaaccataaatctagactgcagtgataataggaacagcctgtaaccagatccagttcttttgtcaaaaagttgcaccattagctgcctgtagtatattgacatgccctgccattaactcaagtccttcacaaaagtcagtgggtagcaggtctttgggcagttagcctgtagctgtgctttaaaacctcaggaatttacaactataaactgggattttggcaacccttgacttatctttcgtttatctgttttctgacatgacatacttcttcactaaatacatagctttcacataaatcattttgaaattgcaagtgattaacttacaggttttttggggggtaacttaaattagaaatttttgaaaatagttaagccttcttaggtttgttttgacacagaaaaagattaattactaatttgttggggtggactctttactaaagcataatttaaaattgctcctttagaaaccttaatttcctcaagaaggcttgatttgataaattattgctaccaaaaatgttctttgatttttttttacagatttcagaaatatggagatgaaaatgttctttttttttttttttttttttttttttttgagacggagtcttgctctgtcacccaggctggagtgcagtggcatgatctcggttcactgcagcctctgcctcccaggttcaagcaattttcatgcctcagccacccgggtaggtgagattataggtgtgtaccaccgcagacggggttttgccatgttggccaggctggtctcgaacttcagacctcaagtgatctgcccacctcgtattcccagagtgcggggattacaggcatgagcccctgcgcccggcctaaaaatgttctttttttttttttgaaatggaattttactcttgtcactcaggctggggtgcaatggcactatcttggctcactgcaacctccccctcccagattcaagcgattctcctgtctcagcctgccaggtagctgggactacaggtgcccgccaccacacccggctaatttttgtatttttggtagagacggggttttaccatgttggccagtctggtctcaaactcttgacctcaggtgattcacccgcctcagcctcccaaagtgctgggattacaagcttgagccaccgcacccggcttgttctttcttaatattgattagtcttaattcagagatagaattttagttttaaatgtaattacagtattagaatttagtgtttttctgattacttttataactatgtcagaaaatgtgacatttgattatttacttgagtgaattgaatagatacttgtggaatcttaatgtgatgactcatgttcaattccacaaaattatgtatggttatacaatggaatatacactttttctatcctgtattaggataatcactattaccagaaacaaaatcttagttgaaagagagagcttctcttggtcaaagaaaaaatacataactacagtgtattttaattaaatcagtatttttttttgcatttaggcataaatgtgaagtacttcttgaaacaaaataataaactatttacaagttaaaaacataaaggtgttattttatgcagttaactcagaccttccccttcacaataaaggacagcgtttttgtttgttcaagtctaaaagtagtgtctttataacaagatagattttaaaaggaaaagaaccctttctacctgtgctatttaattaatctctggtaaattgtgtatgtataataacttccgtcacttattccaacattttctttaaaacaccagcaaacgtatttgtgaatctctcttatccttgaaacttcttatgctgttgataaactcaaggggctatgatgaaacatttttttcaatagattattttgtgaatagggacttggcttgttgtttctttttttggtgaatattggtttaaagcacatgttttagttatacctgttatgtagttggcatttataaactgaattctataatggtaactcatacggagcctgactttttgagaccatgaacatcctagaaagagataaaattcagagtaaaaaaaaaaggccaatcaacttctgggaaagagagagatattggaggtgggggattgtctcagatctcacagaattttctccttggcccattgacttagacttgtgtgtaaattaagacagctgatttgatattgcaggaaagaacagagaacaacaatgatggccaaaagaaaaatctcggccgagcgccgtggcttacgtgagcctgtaatcccggcactttgggaggctgaggcaggaggatcatttgagctcaggagtttgagaccagtatgggcaacttagtgagccatcgtctctactaaaattaaaaaaaaaaaaaaaattagttgctgagcttgttggcacatgcctatagtcccagctactttgtgtgtgtgtgtgtcgggggtagggggtgtgcagggggtgtgctgaggcaggacaatcacttaaggccgggaggtcaggctgcagtgagccctgattatgccactgaactccagcctgggcaacagagtgagaccctgtctcaaaacaaagaataaaagaaaaattttatcaaaaaattgttttagtccatgtgtggtggcttacacctctaattccagcactttgagaggctgaggcaagaggattcattgagcccaggagtttgagaccagcctgggcaacatggaaaaactctgtcactacaaaaaatacaaaaattagccaggtatggtggtgtgtgcctgtagtcccagctactagggagggtgaggtgggaggatcacctgagcccggggaggttgaggttgtagcgagctatgatcactccactgcactccagcctgggtgacagagagaccctgtttcaaaaaaaaaattgtttttaaaaaccacagtattctggttctatatagtttagatacaagcagcctatagcacagcagagtttactcattcagcaaacattttggggaccctagtatgtgatagacactgtgctcgttattctgaaggatataaagaagaacgagatgtgatactgcccccaggagcttattgtctagcacgggagaaaaggcacttacacagttaaacacaacaaaggcagttttagcacaatggttaagcattcatgaacctagattcaaacctagctgggtgatcttgggcaggtctttgagcctcaatatccttaactttcaaatgaacattaatggacattaataacagtatctactatgcaggcttgtaataagctttagataagaaaaaatacatatataaaagccttagggtagggtaccaggcattcattaatagcaagagctcagtaagtaacagatctgagtagtagtatcaccactgccaacaccattatcattgaatctctgggaacataacttttgttttctcctgccctcatggatccgttttgtctagggtatctggtatattataatatctccttgtattagtctgttttcacgctgccgataaagacatacctgaaactgggcaatttataagaaaaagaggtttaatggacttacagttctacctagctagggaggcctcacaatcatggtgaaaggcatgtcttacagggcagcagatgagagaatgagagccaggtgaaaggcgtttctctttataaaaccatcagatctcctgagacttattcactaccatgagaacagtgtgggagaaaccaccctcatgattcatttatctcccaccggttccctcccacaacatgagggaattatgagagctacaattgaagatgagatttgggtagggacaccaaaccatatcactccttatttctccctttcaaagcacatacggtgtattggagccttgtcttttggcatttgacaaacctcgatttgaatcatttttctttcactaccagcttcctgatcttgaggaatcaaaataacttggtaactgataagacagaagaggaggggagtcaaagatgacttctaattcagaaagattgagggtttgtaatgcttttaaaataaaatgcagaggaagaggagctcattttggatggcaagaatttggttatttatgtatttattattttattattttttttttagagacagggtctcactatgttgcccgggctggtcttgaacttctgggctcaagcgatcctcctgccttggcctcccaaagtgccggcattacgggcatgagccactgcacctggtcttttaaaaaaatttttattttttaagtttcccacaagtcatagggaatgagagtttggtttcgtagttttattttattattttttcttttcttttcttttctttctttctttttttttttttttttttaaatagaggcagggtttcactgtgttgttcaggctggtctcgaactcctgagctcaagcagtcctcttgcctcagcctcccatagtgctgggattacaggtgtgattgtaatccggcccaggtttttttttccttttctttttctttttttttttttttttttgagacagagtctcgctctgtcgcccaggctggactgcagtggcgccatctctgctcactgcaacctccgcctcccgggtacaagcagttctccctgcctcaacctcctgagtagctgggattacaggcgcccgccaccacacctggctaatttttgtattttttagtagagacggggttttgccatgttggccaggatggtcttgatctcctgacctcgtgatccacctgcgttggcctcccaaaatgctgtgttacaggcgtgaaccactgcacctgtccgtattttattgattcttatgttctctcaggttgaaattctacagttgtattcattttataacatctgaccaatggcctaaagttgaaacaggccttgggaaatctctctctctctctcttttttttttccctagtgaaattgaactgaacctggaacctgggatatttcttgctgtcagatttattcagttcctgtccttgtcaaaatgtttacccttactgaagatcactactcttcaggtagtgatctttagagactcaaggtgtagcttaccttatcttaaaaacaaaacaaaataaaaaaaaaagggaggtggggcacacgaaaggaaaaaaataaaaaataaaaaagagaaaagaaaaagaaaaaaactctccaaacaaaaaaccccagaaaataaacaaataatggaaaggccctataatcttagaattatagacccattagtttgttaaatagtactttaaaactgtttttctcaacagattgtagaattttctccagaatcagataagagtaatgggagttttaggcttaataattccactattaatcactgtttacattgtttaattgtgttgagaaaatggtttaaaacaagacttttcaaagcatttgttgatcttttatcagctcttaattctgtaacaagatacaatctgcaaaacaaatggttgtgtaaaagattgcagattgtccatacttgttcagagcttctagatgcaactgctagatttagtataactgtagtctttttttttttttttgagatggagtcttgctctgttgcccaggctggagttcagtggcatgatctcggctcactacaacctccacctcctgggttcaagcaattctactgcctcagcctcctgagtagctgagcttacaggcactcaccaccatgcctggctaagttttgtatttttggtagagatggggtttcaccatgttggccaggctggccttgaactcctgacctcaggtgatctgcccgccttggtctcccaaagtgctgggattacaggcgtgagccactgcgcccggcccaactgtagtcttttggtaagtgaaatttcaatgtcaggcgctatgaaatactattaacctaaccttttttttttttttaaggcttacttacatttgaatgttttttcacacagtggaattgctcctaatatgcattaagtgaagcaacttctactctttatgttgccaaaaacaaaaacaaaagcctgaagcttttaactttttttaaaaccaaaaatttttctcccatgtatcaaggcaagttacttgagggtcttttttgagcctttcttataatgctgaagcaggttcaaagtatattgaaagcaaagataagcttttttgcagttttccttgcagactaccactgtggaaatgtgtttctaaaagaacttcaggcttctaatttttcccagaaagagctgtgctgtctgcatctattgccaccatatttttctatttgagacactctgaggattcaactaagaatccgttgatgctatccagcatttaccaatagattatagtactcttctcttccctttacatctataatctccatccttgtgactgaaagacaggtgagttacagtgtaatgcattttaagagggacaatagaacgttttattttttctcaagttatagtcaaagatagtttctattaaattagtcaatattcttttacatcaggatcttcgcagattcttcctagtattcagtcctagggaaatgtttgtcttttttttttctgaatttgtgtgtatataacccaagtgttttcctttttgcttttatctactaggaagcccagagggaattactaaatttttcccaactaactagtacatttttattttattttattttttgccatgagctgtgttttcattattcacgcaaataattttctataatatcccagggcaaaccagagaatttggcagtctgattggacccatagggaccctcaggctggtggcatcagcacggagtgcccaggttcacgtcacagtttgtggcttgtgtccatcttgtggtgattcttcctccacattactactggggtctcgaagatgacaggggtagggaatcctccaggctcttaggaaatttcacccgcttctcctgctcaatggcctctttggtcagcagggtgttctcctgcatctctgttttcttcagcttggccttattgaagctggcgatttcccctatgtctggtttgtctgccattttcttaaaacaatcctagtgggcaaaccaaggctcttggcctggggctggggaccagtgctcccttccgcattccctgccagtgcctctcaccatggcactcctgctggcagccccaaggcctaggtatttgctcttattaattcgaacaaacaaataaaactttaccctaagtgtatttttatattgggactgctaatccttttttaaaaacaacaaagtataagatacaaaaattatataggaaatgatgaaaagttttggtgatcaaacattatcaaaaagcagtatttgataaatatagttatgaacttaaaaattatgctaagagtctagtaaatagattttcatctgccttattgtttatcacattttatttatttatttaatttttttttttttttttgagacggagtcttgctctgtcacccaggctggagtgcagtggaatgatcttggctcactgcagcctctgtctcctgggttcaagcaattctcctgcctcagcctcctgagtagctgggattacaggtgcctgccatcacgtctggctaatttttgtatttctagtagagatggggtttcaccatgttggccagactggtcttgaactcctgaccccaagtgatctgcccgccgtggcctcccaaagtgctgggattacaggcgtgagccaccacatccggccttgtttatcacatgttagattgcaaaataagcagtaacttctgtcctgagcgtcaatcttaagaatagcggagattttccttaaggaattaactttttacattttatgtattaatttttgagacagggtctcactctgttgcgcaagctggagtgcagtggtgtgatctcagcttactgcaacctctgcctcccaggctcaagcgatcctcccaacttcctgagtagctgggagtgcaggtgtgtgccaccatggcttgctaagttttgtatttttttgtagagatgggtttcactgtgccgcccaggctggtctggaacgcctgagttcaagcaatcctcccaccttgcctctcagagtgctgggattacaggtgtgagccactgtgtccagcctttggtatgaactggcatttattattcattgtacatttcattttagctaagaaatgttggctttatgaatttattatatagagagaatttcatttgaagattatcgatatatggaatttggtggtatatatttaaaagtggttcaaatatatgttgtatatgggtttacatatatgattttttaaaatttgaagggtgtacaccagatggttaacaacaggtattgtttggtggtggagttataggtgattctttcccccttctttttgcttatctgtgttctcatttattttcaatgatgatgaatgtgtaaaaagaaaaagaaaattctggtttctaggagtccacaaggatgttttggctcataaagggccaaaagccaccttctcttctttttaatttaatttttatttttagagctggggtctcactctgttgcctaggctggagtgaagtggtggtgtgatcataactcactgcagccttgaactcatgggctcaagtgatcctccctcctcagcctcccaggtagctgggactgtaggtgtgctgtaccacgcccggctaattattttattttatttttctgtagtgatggtgtcttgctgtgttgtccaggctggtgccaaatttctggcctcaagtgatcctcctactttgacctcctaaagtgctgggattatggcatgcaccatggtgcccggcccaaaagctattttcaatactcacctaccttaaaggaaataatatattaatgaataattacctaaaagtcatacagcatgagatgatgtcaagtttcctttggctttagctagaatgtataacttttctgataatgctgattagtagatgacagctgctttctttgatagtgatatgtctggttgttataaatatatacatttatttatttcagcttaatataagagcaatttaatttagagttcctgttttgttaagcaacaactctttggtctgtactttggaagagtaaccaagtaatgcttggaaatccaagttggaacatagtttcattttacaacatgattaatgttaaatgttaatgctaaaactcactaatttcaggaagttttcattaggacagatggaatgggataaggaacagtctttgagcttctacttgtttgagatactatgctgggtgttcctacactgcctcattttcttttctttctttttttttttttttaatgagacagggtcaccacacactgtcacctgggctggagtgcagtggcacgatcatgactcactgcagcctcgacttcccaggctcaggtgattctcctacctcagcctcccaagtagctgggactacaggcatgtgccaccacacccagctaatttttgtatttttttgtagagacggggttttgccatgttgcccaggctggtctccaacccctgggctcaagcaatcctcctgccttggccttcccaagtgctggaattatagatgtgagccaccacacccagcccctcctgtctaacctaaactttttacactttgaccaactccccattccttgccccttcctccccagcctctggtaatcatcattctgctctgtacttctgtgagttcaactattttagattgcacatgtaaatgagatcatacagtttgtgcctggattgttttttttttttcttttttttttttttaagacagagtctccctttgttgcccaggctggagtgcactggcgcaatcttggctcacttaagcctgtgcctcccaggttcgagcaattctcctgcatcagcctcccgagtacctgggactacaggcatgtgccaccatgcccggctaatttttgaatttttagtagagatggggtttcaccatgttggccaggctggtctcgagttcctggcctcaaatgatcctaccgccttggcctcccaaagtgctgggattacaggcgtgagccaccgtgcctggccctttcatcttttctaatatatgcattcaatgttgtaaatttccttctaagtactgctttcattgcaatggacaaattttgataaggtgtattttcattttcatttagttgaattaaaaaaaattatcttgagctttcttctttgacccatgcattatttcagagtgtgttgattaatctccaaatatttgggagtttttcagctttctgttattgatttctagtttaattccattgtggtctaagaactgaaacattgtatggtttctattcttttaagtgtgttaaggtgtgttttatggcccagaatatggtctatctcagtgaatgttccatgtgagcttgagaggaatgtgtattctgctcttgttggatgaagtagtctctagatgtcaattatatccaactgatgatgttgagttcaactatgtcctcgccgattttctgcctgctagatctgtccatttctgatagaggcttgttgaagtctcctactataatagtggatttatctatttcttttttagttctatcggtttctgcctcacatattttgatgctctcttgttaggcatatacacataaaggattgtcatatcttttttgagtattgacccctttatcattatgtaatgcccggctttatccttgataactttccttgctctcaagtctgctctgtccgaaattagtatagctattcctctattcctgcttttttttgattagtattagcatggactttctccatccctttacttgtagtttatatgtgtctttatatttaaagtttttttttttttttttgtagccaacatacaattggttgttttttttttttttttttttttttttttgagacagagtcttgctctgtcgcccaggccggagtgcagtgagtggcgcgttcttggctcactgcaacctccacctcccatgttcaagtgattcttctgtctcagcctcccaagtagctgtgactacaggcacacatcaccacatctggctaagttttgtatttttagtagagctggggtttcaccatgttggccaggctggtctcggactcctgacctcaggtgatccacccgccttggcctcccaaagtgctgggattacaggcacccagcctaaagtaattcttgatatagttggattaataactactgtatttattgctgttttctgtttgcccttgttttttattcttatttttgttttctacattttctgccctttgtggttttagttgaccatttaatatgattcagttttttctcctttgtaagcatattattcttttttttcccacttttttttagcggttgccctaaaatttgcgatatacatttacaacgaatctaagtctgcttttaagtaacaggaccattcttttcttattttattttatttattattttttttcgagacggagtctcgctctgtcgcccaggctggagtgcagtggcgtgatcttggctcactgcaaactccgcctcccgggttcacatcattctcctgcctcagcctccagagtagctgggactacaggcgcccgccaccatgcccggctgattttttgtattttttagtagagacggggtttcaccgttttagctaggatggtcttgtactcctgacctcgtgatccccccgcctcggcctccaaaagtgctgggattacaggcatgagctaccgtgcctggccattttttttttttttttgagaccgagtctcgctctttcgccaggctggagtgcagtggcatgatctcggctcattgcaacctccgcctcctgggttcaagtgctcctcctgcctcagcctcccaagtagctgggactacaggtgcatgccaccacgcccagctaatttttgtatttttagtagagacggggtttcaccatgttggccaggatggtctcgatctcttgacttcatgatctgcctcggcctcccaaagtgctgggattgcaggcatgagccaccatgcccgccaatgggatcattcttttaaaaatatttttctttttcccattggattaccttgttccctgagttgaaaatcaattgaccaaatatttgtgggtctatttccggactgcctagcctgtttccactgatctaatttgtatatcctatgccaatgtcacacagttttgaataccgttgccttatactatgtcttgaaataagatgatgtaaattctccatctttgttctttttgaagattgttttagctattctaatcttctccattttcaaaaatataaattttagaatcagcatatttctctgaagaccctatgaggattttgatgatcagtttgttggttctgcagattaatttggggagaattgacatcttaagaatattgagtcttccagcttgtgaatatggtgatttatttaggttttcttcaagtatgtattttcgatcatctgtatacgtattttcactccttccaggattacaaaaataacttattcagccaatggaagcaattgctaccagctgagttaagcattcagctatgggttagatatttgagagaacatgggaacctggttatatcttctgtgtgtgacccatccctcagtttattggactgaattcatttgtatagtaataagactatttatttatttatttttttgaggcagggtctcactctgactcccagggtggagtacagtggcacaatcacagcttactgcagcctggatttcccgggctcaggtgattttcccacctcagcctcctgaatagctgagactacaggcatgtaccaccacacctggctaatttttaaattttttgtagagatagagtttcaccatgttgcccaggctggtctcgaacccctgggctcaagtgatccacccacctcggcttcccaaagtgctgggattacaggcatgagccactgtgcccagcctgataagactcattttaatgtaattcacaggtttttgctctttgatgagagtcggtaagtaccttcacttactacctggattacagtgctttatcatctgtgtggattcaacaccccgtatatattttactttcttgtctgtttctttagccactgggctatagtctttaattgatcagtgtctctgatgctgagtgtcccaggctgatcttgaactgctgggctcaagaaatccacccgccttggcctcccaaagtgctaggattacaggcatgagccactgcacccagcctatgaatgtattcttcataggtttactttaagtgccagattaccttcagttatacacatcatcatgttcttattacaggcacatggagtaatggcgggatagatagccttttgccatattaggtttatccatgtacatatttttttatagcacttatattgtgttttgttcatatgcttatttctgactagactggggtcttggaggccaaggacagcctgttatttatctttgctgcagaatgtctggcatattgaggacatgcaggaaaagtttgaattaatgaattatagctcaaaatacacaaggcttctaacaaataattcttgttagacttgactcttgcagttcttacaggttttcccaacacggtcataattcttgtacctcttggcaacatgatgtagcagaagtgggcttcctggaataggcctcagtttgaatcctaactttgctaacctaccaactgttcttttttactcaattaattttaaaaattgagtcaaaatttgcataccataaaactcacccttttaaggtatacaattcaatgatttttagtattttcacaacaaggcgtataaccatcaccactatctaattctaggacactttcattatcccacaaaggaaacttcatacccatattcatgccccttagcagtcactcctcaattccttcttcctccattcccaggcaactaggcatatacaaatcttatcatttttgtttaagggaaacagattaaattgatctggccttataactgacttcttatccttcagaaatctaatatgctaaaaggaggcattaattggtttttctccttgtaggaaacaacaccaaatagggataccatgggacaaacagtgaatgaaggtaagatttacttgttaaaggcaataatgtttttagttactcatttggaatgaatatcttctggtatactgaacttttgaaataaagcctttaaaaaataaatttataggagatgctaggtgcttagaatttgaattttagaactgaatagctattaaaggtcattgtctttccttgctagttatataaatgagaaaactgaaacttagagaggttaaggtcatacaacagtttgtgacaaagccaagattagaatccaaagagtgattaaaaaatgtttcatcctgttttgctctatgagaagtctgctcactattccatgaatatgccacactcatttgcagtcagctttgtgttgtatcttccttcccataatacattctttacatattggccttcctacatcctgtttctccttcaagcgctgtatctctcatgacttttcctctggctgaatgctgagtactaaatgctgttctctaattttaagtgtatcagtttagtgtagtctcttgactagattcttagcttctctagaagctaagcatgcctttacagttttactttgttttcttttagaaaaatccttctgtagaactatttagtaaatacaaatttgtacgttctttgtacagattcaagtttggctttttggtgagagaggagaggataagatgacttcataagtggtgttgtgtatttctcacaggagactcctaatatctagttatctctctctgtctttttttaaatttttatttttatttttttttgagacagggttttgctctgttgtccaggctggagggcagtggcacgatcatggctcattgcaatctctgcctcctgggcttaagtgatcctcttgccttagcctcctgagaggctggggccacagacgtgagctaccacacctggctaattttttgtatttttagtagagacagggttttgccatgttggccaggctgctttcgaactcctgacctcaagtgatcttcccgcctcggcctctcaaagtgctgggattacaggcatgaaccaacgtgcctggcctttttttaaaaaatatttttttacagagatgaaattactcagactagagtgcagtggcgtaatcatagcttactgtaaccccaaactcctgggctcaagtgatcctcctgccttggcctcccaagcaggtgaggctgcagatgtgtgccaccacacctggctaattttttaaaaaaatttttgtggagactgggtcttgctgtgttgctcaggttggcctcaaactcctggcctcaagtgatcctccctccttggcctcccaaagtggtgggattacaggtgtgagctgtcacatccaacctagttatctctttttgtgatgtgaaaaatcacaaaaagtcatggatggctattccctggatccattcatttattagtagttgtaaaatgaaggtattctatcattctttattggccaaaaaatttctatatagagaaactacctttcttcaaccactcagttgaaatcatttaaacagaaagcagctcatatatccctctcaagtgttcacacatcttgaagagtcactcagtcataactagtaagtagatctgttacgttgaatggcatcattcttagatccttctttaagaagtttgtcacttgacaattagaacatcggtaagggtaaaatagcaacacaagtatgtttaaatccatgagttcataatgataataaaaagcaaaacaaataaaacttactggtcatctgtggagaatgctagagatccagctcatcactttgaaaactagaaatacaggaaaataataaagtgctgattgtgatttctctatgtgatccgtgccttaaggtaactgaatggttgaagcatggaagcttctctctatagaagttttctggctaataaagaatgatagaattagaataccttcattttgcaaccattaataaacgaaaggatctaggcaatagccatccacgactgttcacatcacgaaaagagagataactagatattaggagcctcctgtgagaaatacacaacaccacctatgaagtcatcttatcctctcctctcccaccaaaaagccaatcttaaatctgaccaaactcttctggattgaaatatgaatgccaatttaaagaaaatacaagaaacagaggaaccgaactctgtggggaggtagtcagcaaaatccagactggaaaacttgaaaggaccaaccaactggtattgtcagcaaaaaaattgtaaaggggaagaataaaaacgagaagaaaggaggaagacacctgtagatcaaaagagatgtaagagacatatcaaccattgctatgtgtgtggacttatttgggttctgaatcaagcatacacactaaaaatagttaagacaattggggaacactggttatttgatgattttaaggaattatggttaatttttttagatgtaatagaaatattatgcttaagtttttaaaaatgagtccttttagagatacatactataatacatgtggatgaaatgatacatcttagatttggtgaggttaccaggtccagtgttatttgagctctttagcttagcaccaagaaaatctctgcccagtccattgaattacagtgtattgtagcttctctgttatgttttgaactctcaaaagcatctgttttatttctaggacatgttaatttaaacattgtaaagatcagctcattttgatttattgatgcactgatttttttttttttttttttttttttttttttgagacggagtctcgctctgtcacccaggctggagtgcaatggcacgatctcagctcactgcaacctctgcctcccgggttcaagtgattctcttgtctcagctgcccgagtagctgggattacaggtgcccgccaccatgcctggctaattttttctatttttaggagagacagggtttcgcatgttggcctggctggtctcaaactcgtgacctcatgtgatctgcctgccttggcctcctcaagtgctggaattacaggcgtgagccaccacgcctggcctgatgcattgatttaacaaatgcttgagagtgttgcgatgccaggtcctgttttaggcgcttgaggataccacagtgaatgagatagacaataaaataaataaatctctgcccttttggagatttcatttgagtagagtgagacaataaatgagcagattataaaatgcatagtacattagaaaatggtaagtcctacatagaaaatgaagatattataaaactaaaattggctctttaaagttttttaatttatatttttctgagtgctctttcaagctgttgctgtggactcccagtattgctattttcttttttattagattccatggatgtcaagaaggagaatcaagagaaaactcctcagtcaagtacatcttctgtacaaaggggtaggttttaaagtaatttaatacagcatagttttcttcctcactagtgttaaaattaactttaagtgcaaattttcttattgttttgatttcttattgtacagtctgtatactgtaaacttctgtaaatacaaaatgtaataagaaaggtcaaaaattgtattttattttgaaaattttacttagagataagttgacacggattaagtaaaagggtaactttgtatatttcagtgcaaattttcctaaattataggtatctagttattaattgccatgtattaccaatttaaaataatttggttattagcaaaaacccttctaacgttacagtcaatgtgaaagcttttttttcatggtcagaagacagttcagtggttaagagcttataggcattgtggtgagtccgacagatgtgttctggaattctgtcctcactccttactggccatggtgaccttgggcacattactcaacagctcttagacgttttttcttcttctttctttgagacagagtctcgctgtgtcacccaggctggagtgcagtggtgtgatcttggctcactgcaacctccaccttccgggttcaagcgatttttgtgcctcagcctcccgagtagctgggactacaggcatgcaccaccacgcctggctagtttttgtatttttagtagacatggggtttcactgtgctggctaggctggtctcaaacctctgacttcaggtgatccacttgcctcaacctcccaaaatgctgggattacaggcgtgagccactgtgcccggctcttttttcttctttataacacagggataatgatagtacttatctcatggcactactggaaataaatagaggaaatgaatttaaagcacctaatataatgcctaggcatatagtaagtgttcagtaaatgttaactttattaattcatgttccttattatgaacagtacatgtataatattgcatcagagacactcaggagatgtaatagaatctgatgcattggcttgctcttaaatgagaaaataagtcatatgtacacaaaaggcattaaaaaataacgtagcaaactattgttttaccagacatttccagagatttcttgccccttgtgtttctgttgtatctgccctgccagccccagtgcagagcagttcaccctatgaccttctgttcctacttgaagattgcctatagaggtaatccccacggaattgttgttctctcactgtagctgggccctcagtgctcccttaactttctttaccatggccttatttgttcttcaactcttccctgggacccccaaatcctctgaggaaatggaggccattgaattagactgttccttatccctacaaactcctctccatctgtttttaaaaatataacagctttactgagttataattcaaatatcatataattcacctatttagagtgcacaattcaatggttttcagtatgttcacagagttgtgcaaccaccaccacagtcaattttagaacatttttatccccctaaaaagaaatcctgtacccattaacagtactccccatttctccctagtgcctcctgtctcccccagctctaggcaaacacaggtctactttctgcctctatagattttcccattctagacatttaattaaaaaaatagattacttaagttgatagccatctgcagatacttctcaggcctgggccctaacatcctattttagaaatcagtgagtgactaccagaaggtaagctccaagagagccagggttttaatctgttttattaactcatgcatctgcagtacctaggacagtgcctggcacatgctgatgacctgctatgggaatccagttacgaacaatatagacatgattcctgccctcttttattgactgactgattgagacaaggttttactctgtcatgcaggccagagtgcagtggcatgatcatggctcattgcagctttgaccttctggtctcaagtgatcctctcacttcagcctcccgagtatgtgggaccacaggcgtgcactaccatgcctggcaatttttaacaattttttgtagagacggggtctctctgtgtttcccaggctggtattgaactcctgggctcaagcgatctgcccgcctcagcctcccaaagtgctggtattacaggtgtgagccactgcacccagcctcttaccctctttgagcttagtgggcaagatagaaattaacagatgcctaattgtagttgtgataaatgctgtgaattagtggatgctgatcattcagctgagaaacttctatctctaggtattttgcccatcttcacatagcaagggatcccaaggatagcactggtggaagacatgattctgatttactctagagaagaccaggggagctcatatgggttatattcagtacaaaaagatgttggagctaatgtgtagactagaatagagtacaaataaaaaaagaagagaccatgggcacatgtgaataacaatcagatcacaaggagatatatatataaaatcatatcagttcccaggcctctcttctgagatagaatactgcccccatccccagtctgtcaatgaagacatgatgcagaggcagactgggacctcaggcttaactaagactttctgactattttggcttctggttgggaattccaatggtggtattgacgtagatgtgtcaagtctaaattagtaaagcctggagctttgtgtgtttcccctatgttatgaacacgtgggcagccaagatgaacagttttatcaagatgattaagaattttgccttatggaaaaaggggaaaagaaaacaaacaaaaaccaacgaacctgaggctccaaatggcaaatgctgcatatggtcattaaccagtaatttgatagaaaattatattgtagagcactagtataaaggatttgctagctcagattgtagcccattcagacacaaatggtaatagaatattttaaaaatttgtgttatggagatgaattaagtattttctaatattactgaaaaattttacaaatgtcattggtttatggaagagtgttagttctttgggtattcatttcctgcttgttatttctgacttacactattttcctccagggtgtcaacttcttaatgacatccatccatcccaactaaatgttttgttttgttctttttttgttgttgttgttgagacggagtctccccctggttgcccaggctggagtgcagtggcgcgatcttggctcactgcaaccttcgcctccaccttccgggttcaagcgattctcctgcctcagcctcccaagtagctgggaggcacccgccacgatgcccagcaatttttttttttttagtagaaacggggtttcgccatgttggccaggctggtctggaactcctgacctcaggtgatctgcccacctcggcctcccaagtgctgggattacaggagtgagccactgcgcctcgcccgttttgttcttttttaatgctctccaagatcatatggtagtagagcttcacttagaatctgtagtgctagggggcaatcactgaaacatctggtctgtttaattttgaagccgtggatttcggttttcacttttgacaaagctattctgtattaataaatttgagcacaactatgacttctagttttataacgtgccatttattgagtgacttacatatatgctactttatttagctctcaacatatctagtaccatgtacattacttttcccgttttataaatgaaggaactgaggctaagaaagtgaatgacttgctcagggtcacatagctagtaagaggtagagccatactggaagtaggcagatctgactctaaagcccacattcttttttttttttttttttgagatggagtcttgttctgttgcccaggctggagtgcagtggtgcgatcttggctcactgcaacttccacctcccgagttcaagcaattctgctgcctcagcctcccaagtagttgggaattacaggtgcccaccaccacatccggctaatttttgtgtttttagtagagatggtgtttcaccatgttggccaggttggtcttgaactcctgacctcaggtgatctgttcacctcagcctcccaaagtgctgggattacagagccaccgcacctggccctaaagcccacattcttaacactctctctgatgcatgattttcaatgctggtagtgcttgcttcacatcatctggaagtggaatcaaacccagtattttcttttagatgaaacggtctcttagatctattaaccaaaagcaaggtgcaaaatgttacatgtgacatgcttaataccacatataatatgtatacatacatatagaaatgcatacacacatatgtaatggtggtacactggagctggctcacaccggcttgggagagccaattgtgtacatcttttcccaatttcatggttggtggttttaccttggcaccttacagtcaaccatggtggtcatatttacatcacggaaatctgcaaacgctgtcagtcaggttttttgttgtattttccagaaagctggttgttaaacattatcagcactctgtaggtttttttgttttttgttttctgcaaggggggagtcatctaagtataatatcttttgaaggaaatgtaagaagctggtaaacgtagattcttccaggaaagagaactgtcaaacccaatatttttatagtgaggaaatttagcaagagtatagaaaagcctcatgaatgatgagaattaaacatcatgtgaattactagtttgttcactactactgtcaagtctttttctcagtgtcttgacagtctggctggcacagtgaaatgatacgttcaagccaggcaatgtgctctgctttctgatcttctcttctaacattataatatgtcatgaaaactaagtgaggaaggacagcaagagtctgtagaaaatgtaggtcattaaaataatccatattagtgactgtactgatgactggtttattgctttgttctgccaccatcttcttgacactctgaatagagatctaatagtccattgagaaactactctggttaccacatttttttctttccataaagcattgcaagggtaaaattctgtttgactgcacactaaacctttagctccccatgaataacaaagaagtgccttcacattaatggaataaagtggtgaaaacatatttattgaataaatttatattagagacagatgggtagacttcgctattactctaaaacaatttctttagttatttctaacgtccacatttttagaatcactgtgctgtagtccacattacaatgagagtatctaggttataatttatttctgagccattattatcaggatatcgtcttattttttatttttatgctggtcatgaaatgtagatcaggatttttgaatctactcttttggaagttttttttttttttcttttaagaggcatggaactaaaacccattttaatcctgaaagttgtatatactaaaagttacattgtatatgctttaagaaactattttgcacatgtgttttttccagatgatttccactgggaggagtatttgaaagagactgggtctataagtgctccttcagagtgcttccgtcaggtatgccaagattctgtagctgttagttaatgtaaactattaacttgttggaggacgtctgtgtgattgttagattctggtagtgtgaggagatagtgggattgtggtagtgcctcttaagagccagatggtctctttgcattcattaagaacttactctatgtcaggtataataagctttatgattgcccatctggcaggaaaggcagacatataaataaataattatgagaagtgtgataactccatactggaagggctcacaggagcgatgctatttgagatggttggaatgggaggaaggatagtccaggcagagagaacatccaaagccaaggcacatgggcatgaaagaatctgagtattaagggatggcttggggtggctggagcacaaagtggatagaggcgataatgtggaaatgaggttaaaggtgtgggggcatttaaactgtgctgaggagttggacttcattataggcagtggtgagctgctggttggctaatttcaaggggaatggtctaatcagattcttactttagaaagccactcggtatattttagaggctgtatttgggttgcctggaagtgggcagatgagtgagaacagcagcgggtagtgtttttatgctgcatgtcaagccaaggagagaattttgaagatcttttccttgactcttacagctctgacctcactcatcatccactgtgactgttatttaaaatgttcctcaggtattctggtgacatagctgtccatgtgtcttctcttatagttgatgcattttaaccaaattttatttatatatatagtctcagattccacctgtgaatgatttcaaagttggtatgaaattggaagcccgtgaccctcgcaatgccacttcagtatgtattgctacggttattggaattactggggccaggttacggttacgactggatggtagtgacaacagaaatgatttttggaggcttgtcgattccccagacatacaacctgttgggacatgtgaaaaggaaggagacttacttcaacctccactaggtaagaagaaagttttaaaaatagcgtattctttctaatgtgatattcaatagaaatggctttaagtggccttttaaaatttattttcttgggcattcttgcaaatagatggtcaggtggttgctgtggagaatgtatgatgagagaggaaatcagcaccatctgttgtggagttttgcttaagtacatatttggcatatgtgtgtagaagttttctccactccagggcaagactcatgctaggtcttcaaacttgaaatgtcaaaaccagctctactagattacatatgcagattcagaactccttctggggaagaactttgtagcgtttgatacaaggcacatgctctctcaatattgtccactgagccattcagcaattttggtatggggataagcctaggggaagggtatgattccacattcaggttccagtttcaaactcaagaatttcatttcacctacagtgggaagaaatcagagcgagagggacaggaattagtacctttaggtctttgaaaaggagaaaatggagattttagcaaagattttaaggtacaaaatatgtactttaattttggccacatttttgaaaggtaaaaagggtgtaactaatttggggcaacatttttctttttaaaatgtaagcataccatgatactctgtaggaaagaaatgatttagtttatttagttgctgttctatactttgagtgaatggtgggcatttacttttatttggttctttacagtgctgaaaatgaaaattccttgttgcaaagcacaataaaagaatggatttttttgttttcctattagtgaaaaattcctttttcactaatttaagtgaaaatttttcacaaatttaagatattaacaatagccactctttagtaatatatctttatgctgtccttgttctatttgttcgttataactaatttggtttaaaaaatatttttttttgagatggttttcactcttgttgcccaggctggagtgcagtggtgtgatctcggctcactgcaacctccgcctcctggtttcaagcgattctcctgcctcagcctcccgagcagttgggattacaggtgcccgccaccacgcctggctaatttttgtatttttagtagagacggggtctcaccatgttggccaggctggtctcaaactcctgacctcaggtgatcttcccacctcggcctcccaaagtgctgggattacaggcgtgagccactgtgcccggctaaaatatttttaaaaactagttggagatatgttattccaagaagatggtttggggcatgtttgttttttgccttttgccttctttcactcacgtcttttgtcgtttatttgttgtttataatatttctcaaattacacagaattctatgtgaaagataagtgcaatcctaggcttagtgcttccctatttggattttatttctcttgttgcaatatggtatgtttttgcagtttgtttaaaggagatgctgctgttgtaattgtcagcatttcaaatacataactagatttatggtcattctttttaataaaattcttagactttgttttatttaaaaatatgaaatgtatagaaatatgtgctgattagtatctgttttggcagtatatttaaaaatgcaccattggtgccagtttgctttttaggtacttttgaatagtttaacttccattttaatacaacttatttagttttccttttaaaaagatttatttgtttaaactttaaaggttattattaaaagattttataaagttttaacacacaaactgaaaggtgtacaggtcataagtatatagcttataaatgaacacatctgtaaagccatcatccaaatcagaaaatagaaca

SEQ ID NO: 466 - DNA, 2740 bp, Homo sapiens
  source 1..2740: mol_type = other DNA
ttaaataagagaaaaaagcataaaaggagtaggcttttttggcagatactgttatatgggatggacaggaggggaagacatgaaaatcaactaaaatgaaatacataaaaaatcagtaaagagcctgcttacgaaagtggaaaaacaacagctgggcggggtcgcagggtggcaaacgtacgcgggcacgtgcacgtgcttttggggccgacagacgcgccagttgcctaggcgcatgcgtctggctatcccagaagcacctgcgccttccggctcgtgctttcctcagtctcgcgcctttctctgcagctcgcgcctttctctgcagctcgcgcctttctctgcagctcgcgcctttctctgcagctcgcgcctttctctgcagctcgccccttcctctgcagctcgccccttcctctgcagctcccacctcactcccctcagcgttctttttcccacggtcttcccgttgccgctaacctaactaactctcagccatggcctccaacgaagatttctccatcacacaagacctggagatcccggcagatattgtggagctccacgacatcaatgtggagccccttcctatggaggacattccgacggaaagcgtccagtacgaggatgtggatggcaattggatctacggtggccacaaccatccgccattgatggtgttgcagccgctcttcacgaacacgggctatggcgaccacgaccaggaaatgcttatgttgcagacacaagaggaagtggtgggctattgcgactcagacaaccagctaggcaacgacttggaggaccagttggccctcccggatagcattgaagacgagcacttccagatgaccctggcctctctgtcggcctcggcggcatcaacatcaacatcaacccagagccgcagcaaaaagcccagcaaaaagcccagcggcaagagtgccaccagcactgaggccaacccggcaggcagcagctccagcctgggcacgaggaagtgggagcagaagcaaatgcaggtcaaaacgctggagggtgagttttccgtgactatgtggtcccctaacgataacaatgaccaaggggcagtgggtgaaggccaggctgaaaacccacctgattattccgagtacttgaaagggaagaaacttcctcctggggggttaccaggcattgatctctcagatcctaaacagctggcagaatttactaaagtgaagcccaaaaggtccaaaggagaacctcccaaaacagtcccttgctcttatagcggctgcgaaaagatgttccgggattacgccgccatgagaaaacatctccacatccacgggcccagagtccacgtatgtgcagaatgtggcaaagcttttcttgagagctcaaagctgagacgacaccagctggtccacaccggcgagaagccctttcagtgcacattcgaaggctgcgggaaacgcttttcccttgatttcaatttgcgcacacacttgcgcatccacaccggcgataagcccttcgtgtgccccttcgatgtttgcaacaggaagttcgctcagtcaaccaacctgaaaacccacatattaacgcatgtgaagaccaaaaacaacccgtgaaaaggagaagacccctctcagacttgggaattatcttccaggactgcggtagggaataaatatgcctctcaaagctttgtatgttgtttctaagagttttaaaaaaaaatgaatcctgcacatttaaggttcgtgttttgttagagtagtaaaaatagaatttaaacgtttttaaaaaggtaaaccttgacataagataatagtgctaagatgccatagcttgttctgtaactatttttgtaaagtttggtcccaacaggagaaaaattcgtagacttcacatcaagagacggttcttacaaactgtttaaaatgggacttttcacattcttagaaataggaagttcatttattgtttacaatgtttttaaaaaacttgttaaaaaattcaaagtgttcatgtttatacttttaggaatatgcttaataagtctatgtatggtttttctggaggttgataactttgggaaagatttactttaaaagagtgaacaattatatgcatacgtgaagtattttcctgcttaaaaaagttatataggtgttatttgttttaatcttggttgtagtcttggatgttaacacatcttgcattttagctgtattaggtcatgtagtattgatattaggtgatttaatagtactagtttaaacctattttagtcattttattttccccaaaatactaccagatgctgttgtttagtgtaatttctttgcctgttcagttaaagtagtgcttgcttgtagaatatattgtgtatatgttgactttaacacttaagaagtacatcctgtgtaatagaaaaagcaaaataaaacacctcttctaaagaaggaaaaaagtagtttgcctatatcagtacagaagttagaactaaagaaaagggggagggtgctactggcatctggtgagtggagggagatcaggaatgccactaaacatcctacaatgcacagacagccccacgaaacacataattatttggctaaaatgccaatagtgtcaggtgcaggggctcaggcctgtaatgtcaacactttgggaggccgaggtgggtggatcgtttgagctcaggaattgaacatcagcctgggcaacatggcataactcggtctctacc

SEQ ID NO: 467 - DNA, 32744 bp, Homo sapiens
  source 1..32744: mol_type = other DNA
gggtttgcgttcacccgctgcccgggcgcgacgcgctgcggctcagcgacgcggcttctagaaccgggtgattgaactaaaccttcgccgcaccgagtttgcagtacggccgtcacccgcaccgctgcctgcttgcggttggagaaatcaaggccctaccgggcctccgtagtcacctctctatagtgggcgtggccgaggccggggtgaccctgccggagcctccgctgccagcgacatgttcaaggtgagagcgtggagtcgagtcacagctgtcaccgccccctcccggccgcccgagccctccccgcgctctcttggggcctctctgcagccaggcctggctcaccccgaggcttttcccgccactgggccggctgcgtcccggccccgcggttcattcactggtctactggggatgagcggctgccgggcggaggcgggagacccccgggtgggtgggggcggccctttgggttgtgctttcgtgaattaaacactttgaaaatttaaagtgccttcccccaaagtacccatcccctcggctagtaccctcttgggatcgtgggtagggtgaggccagctcagggcactgtggggttcgcggctttagttgcctggcagggtcaggtttcagaacctgatgtgtggatgggggagggtcattttaggagaagctgtgcagggtatgggggaggctggggtgggatggctgggtgacgagggaagctggagctttgctccactcctcagggaacattatttaatacgggccagtggacccccttccctgcgttttgtgaactcgtgtcctttggaaaaaaatcgacttttacgatgaagacttaatttcgaaaatctgcactttagcataaagccattattctactttttaaaaagtaaattatatgtattttgtcataaaaaatcacaggctaccagaaattaatctacaaaattgagtcttcaagaagcatagtacccataaaatagtgctaatgaaatctcagaattgtactattcatttaaaagttttattgagctctgcaatgtgctttgggtacgttaataaaggctgtaaaatcagaacatgcattctgccttctagtcctggcattgccactttctagctgtgtgaccttgggcaagtcactgtgcctatcttcctttggtgaagttggggtaataacatctacctcatagggttgttataaggagtaagttggtatgtgtaaagcacttggaaaaggcctagtatttgctcttactctgttttcaggcagctcacagtttagtcaggaagacagatcctataatcaacattcatttgataaatttgtgtgttaaacacctgttatgtgctaggagctcagctccatttcagggttacaacaaggaaagatatgctgtggccagtttaactatatgtgtaccaacagtgtagtaaagtagtaaaaaggagagcaggatccacttggcttaaccaggggttcctaacctggggccctcagctcctcaaaggatctgcacatagatttcagaggatccctgaactttgatggggaaaaaacataactatttttagcaatctccaattggaattgagcacttcctttagttacgcatatgggtaatgtctcagttatctattgttgggtaacaaatcactgcaaaccagtgccttaaaacaagaattgtttctcaaaatctgggttggctgggcagttctgctggtgacttgactgaaagttggcttcactcccatgtctgggggcttggtgcccctccatgtgcctaggttggacttcctcacttggttactgacttccaagagggcaagtcccaaggcacaaacacagcatcatgtttgctgatgtcaaaacaagtcacgtagccaagtccagagttgatatggtggggaaccacacaaggtcatagatatgagttggtgcacttcgctgggggccattcattttacaagttcctactgtaacaaatcacagtagtattagcagtacctgttaccagtagaagtcacagtaccagcacaagtcacagacattttcatattacattacagttgttgcagatgtcaaaatatcacttatgctcattactacttcagaactatggtagttataagactcactgctagatctttttgtttagtgggctagtaaagaagcacatactgcttatatcagatatttgagtttaaaaaataagattatttcaatatagttgggacttttttgtatgcaattagaagcattattttgagaaggagtctataggactcactgacggccaaagaggtccacggcagaaaaaaaggtaaggaacccctggggacttcagagaaggcttcacagacgggacacttaaatttagttttgagacaggtaggagttcttcaggtaaaaggggtggggaacatcagtggtattccattgggggaagtgctggaagctcagttttgatgtgtcaagggaaagacatagtgagctgagattattattattattattattgttatcattattatttttttcagacagagtctggccctgttgtccgggctggagtgcagtggtgcgatcttggctcactgcagcctccgcctcctgggttcaagtgattctcctgcctcagcctctgagtagctaggattacaggcgcccgccaccacgcctggctaatttttttgtatttttaataaagacggagtttcaccatgtgttggccaggctggtctcgaactcctgacctcgtgattcgcccgccttggcctcccaaagtgctgggattacaggtgtgacccaccgcgcccgactgaactgagattatttcaggtgaacatgtactttgggtagaaaagatcacaacaaaccttggaggacaccaaaatgtaggagtaggcagaggaaagggggaggccagacttgagaagcagaagtaggagcagaaaagagtgatgtttagaaaatcgagggagaaaagtttcaaggagaaatggctatgttaggatgctttcagctgggaaaacccaactgcttaaatagtaaggaaaattctctcacaaagtccagaggaagaatggattccaggctctgattcagttggtcaacagtgtcaggccaggcacggtggctcacgcctgtaatcccagcacttcgggaggccgaggcgggcggatcacgaggtcaggagatcgagaccatcctggctaacatggtgaaaccctgtctctactaaaaatacaaaaaattagccgggtgtgttggcgggtgcctgtagtctcagctactcgggaggctgaggcaggagaatggcaagaacccgggaggcggaggttgcagtgagctgagatcgcaccactgaactccagcctgggagacagcgagactccgtcccaaaaaaaaaaaaaaaaaaaaaaccagtgtcatcaaggacccatctcttcttgggtttccacagtcaggttggtttcctttagggttgcaagatgactactagtaacatacacactttctcattctctagagcaagaggaggaggagagagaaaaaactcccacacttggtccttcagtctgattggaccaacttaggtcagttgtctgaccctgtaacagttgtcagaggaatgccatgatctgattggcttagactaaacaggatcaacccagggtggcgtcacttaatcacaggggagaggaatgcattcatgaacacaatggagttcttttaggaaggaagagggagaatagagactggatatgcaaccaacaatgtccatgacggagatataagctagatgagatatgagttagttacatatcatgagtcgtgttcactgatttgggcactttggaaagctttcatgatccttatactttaggtttactgatggaagtgaagggtagattaacctgggttggtgactgagggccaagtaagtggacactatgatggttgataagcttgactatcaagggaaggagagagaatttggtaactagaaggatatgttcagtcaagattctagagagaatacctcagctgtgcaagggagagatattcccacccgagagatggaaggaaaagaaaggtgcgagagattgtagaccagtggttctccatagaatggtacgactcaacagaatggtatgttttggaaacttgtggggttgttctttttttcttttttcgtttttaactttgcaaaaattataactgaaaatggggttgttctttatgtctttagttgtgttgaacatttacatactgaaatataattcacataaatctttcctttttattcacctttatgctaccatcagagtatactgatttactttttggacttatgcatgtaacttagtgatgaattttatttcaggataccagaagagtgtcagaaaatatttgtcataaaatggtgatgttaggtctagtagttgagaaccagtgcttgtcaaactttaatgggcatgtgactcttgttaaaatggattccaattcagtaggtctgggatgcggcctcaaatgctccatttttttttttttttctagatggagtctcgctctatcacgcaggcttgagtacagtggcgcagtttctgctcactgcaacctccgcctcccgggctcaagcaattcctctgcctcagcctcctgagtagctgggattgacaggtgcgcgccaccatgcccagctaattttttgtatctttagtagagacggggcttcaccatgctggccaggctggtctcaaactcctgaccttgtgatccacccgcctcagcctcccaaagtgctgggattacagacgtgagccgccgcacccggccagattctccattttttaactagttctatagttttcgttggtcccctttgactagcaagaattgaagccaatcggtagatgaatggttcttgtgttttcgagatggatggtcttatgaacatggtgggatttgggagaggcactgaccaaggaacaaaaagataggccagaccctttgagggctctgctgagagcactcctgtatgtttgtgcagagtggggatggagtaaacggtaggattgatcggggtttgggagttaacagcttgggttaactagaactggagggcaaaggagttaatagtataggtgttggtagtaaaagtacaatggtagtaaaagtgcagtgtgtctgactagttatgtgcatattaagtacacattgtacttaaaatatatactgcgatgttttgatatagttattcatcttcaggtcactagggggcattggtggattaaaaaacacatttgaaaagctgcccagtatttgcattccattgtaggaagcagcttttccttgtgctgctgcaggaagtttgaatattggatacatatacccagattcacgttattagatttccttcattacacagattttatcctagtccaactatgggctgggcatcatgctggaccctggtgggtacaagtgaaaagacccagttcttatctaggagagaggtcccaaatctggccacaaatcagaattattcaaggagacagtttccaagcccctgcgcatggttctgactgactttttagttggcgtccaggaactgctagttttgaaaaagccccccaaggtgattatgaaactttcatttcagaagctcacaatgcacttaccagcacagacattaaaggtccgttaacgatgcagtgggtctcaaccttgactgcatgttagagccacctggggagcttttaaaagtcccgatgcccagtctagaacctataccaatgacatcaagaatctctaggggtaggattaggcatctagtttttggagcaagcagccagccttgagatctactgacttagagggaagagcaacagcagggggcatcagaaggctttatagagaagaacatgcctatgctgatctttggagctaggcagacaaggttgaaagggccttccaaacagagaagaaaagcacatgcaaggacacagaagtgtgagagtgttcagaacagtgttaagaccttgggcttcactgtgttccttgtgagagatactaaagttttctgtagctgcttcctcatttgtaaaacaaggatgagatgcttaccaacctcaaattattgtgtggattaaattcattcctacgcaaagcttagaacagtgcttggcccaaagtaagggctgaagaaatgtgagctgttacttttagttggcatcttgtaagatggcatcttgtaactacctgtgttacggtggtgcacggtcttggggctctccaaaagtattttttatttcaaaacttggtagtcagttggatgtggtagatgagggagaaggataaattaaggtttctgcccaggcttttgacttttgactgtgggatctattcattgaggtgggaactattcattgaggtgggaaagtggaagaaggttgaatttggtttgagggggaggtgatggtttggttttgaacaggttgggcttgctgaaatatctgggcattggaagggggaaatcagttgatgtagaaccccagggtatggacttttcctgccacagacgtgggctggaaattgggaaatcatcagctgctaactgaagcctccagggcaagaaggtggcctagtgaaaactggtctgtgtcacttccttcctcaagggcaaataacatgacctgtactcagagctcaccacaccaaggagcctgagtgaacatgtccatgactatgaggtgttattacctcacacattctttgtggcttagtgtaatacttacattgcctgtcttcctgaaattaattttcttaccatgttactagtatgttactagaactgcgcggagaattacaatgctaaatggaaaaggaaaatcatctgtaaattggaagagtaatgtaacttttatacttgagcattattttaaaagccacatatttggaaagataatgaaggttttttttccctaacagtttaagcatcttcaagggaattcttcttgaggaattatagtaactacatttttactcacataaatacattttttatgtgcagaatcaattggttgtttctttttcctttcttacctttcgaagaagttagacagtggatcacagagacgaagaaaaaactgctctgtagctctggatgcaatcttttcagcctcaggttctagttgtgtttctggctgagcgaccttgttgagatttctttttttttttttttttttttgagccggagtcttgccctgtcacccaggctggagtgcactggcgcagtcttggctctccgcaccctccgcctcctgggttcaagccggtctcctcccttagcctcccaagtagctgggactacaggcatgcaccagcacgcctggcctagtttttgtatttttattagagatggggtttcaccatgttggccagactggtcttgagctcctgaccttaagtgatctgccctccttggcctcccaaagtgctgggattacaggcatgagtcaccatgccgggccagttgagatttcttaatctctcagcgtcctctgatcatgatcctgtggggatagtagtatgtccctctgtatctcacaggattgttgggagattcaattgagataatatgcgaaaagaaccgtgaactacaaagcactatatcaatgtaaggtgttttctgttcctcttgtatcacatttgtccactgaagtaatctatgcttgcaggttagcactctggacttaacaactgtaaaacgtgaattaacttgggttatttcacttctcatttggaaatgaattctgctcaggacactgtagcattcttctatctacttctgaaatgcagatagcctcacagttgtaactaacactggaagaggagaaagaagaagtaaaacgatacattaaaagaacggagagattagaggcacagtggaggagaaaagtagatgatgtaccagacatttatgataaatgaattgattaccccatgaggcctgttgatatttgtagacttttatgacgtaaaggtttaatttataatctatatgtatatgtgttccacacccatgtcctttctaggctagactggaacttcttagaggctaggaaacgaacttgcatatttgtttgtattgtacatttaaaattagatatataaatgcatgttattaggtgtgtaataaatctcaatagcaaagatatctgtttcaaaaagtttagacttatttttaatatgacaagaaagtactaagagatctttaaaataaaggaattgaaagagtgtatcagttgattttccccaataatgcttaagtggaattttacagttagttcatacagcatgaaactttatatattttcagggacaaaaaaatcctagtctaaagttatattttagaatttggaagttatttatttttcacttttgctgagtttttcctaatttttgcatagcctcatgccagttttgttagaaaatttaatcagtgccaatttcttaatgtggtaggtttttaaacttattttcagtgttcactaaaacttggagaagcaggaatgtagggcaagggtcgtagagttttcagtatgctgaaagcctatgactttgattgttaagctatattttcctgatacagctttatgcattatggatagtatagttgaattttaagtgaatattgttttaaaggcactttaagtgcagttatcctttgtcttcctatttctggctgtttgaagcaatgcagcgtgttttattcaaagcccacactggctcccgcttaaggacttctttgtttggttccatgaggatgaggagccccctctgtgggagctagagatagatccacaagtgcatgttcattgccttagtgtggaggaattcccagtagtttcttttttcagatattcctgaaaagaagtctattccttcttctgaacagtcttttaaaatggaatatatgaaactaactaataaaggttctttttttcttttcccccattccacaaacttcagtccttgtgaactagcctgtttttgtttgtgcttgctgaaaatgagtctcctctcctattagagatgctgattcatgtgacatgggttagactggtgagtgagtaagtaagcaaaaagtgattatacgggctccaagaagtttcctacattgtctgttgatggtttacctcacttggcagatagaactgagcctgtttgtggagtcacaccatttgggagtcctgttaaagttgctgggtatagtccaaacatttactttacttgtttttgttccttatttttgcacagattttcattatgaggtcagatggttatcaaccgaattgagtcttgtacatgattttttttttccaaaaaaggcttacagttttccttaaagaagaaaaacgcacatgaataactgagatgaagtcaaaggcagttttcattagtgagtttagagttctctgtgcacatggtggtctgttaagatatgaaacccgggtctaggcccgacgtggtggctcacacctgtaatcccagcactttgggaggctgaggcaggagaattccttgagtccaggagtttgagaccaacctgggcaacatggcgaaaccccgcccgtctctacaaaaaatgcaaaaattagccaggtatggtggtgcctgcctgtagtcccagctacttgagaggctgagatgggaggatcacttgagcccaggaggttgaggctgcattgagctgtgattgtgccactgcattccagcctgagtgacagaatgagaccctatgtcaaaaaaaacaacaacaaaaaaagagatatgaaacccatgtctaggtagattttttttttttgagacagagccatgtgtctagatagaaacctgtgtctagatagatttttttttttttttttgagacagaatcatgctctgtctcccaggctggagtgcagtggcacaatcttagctcactgcaacctccacctcccaggctcaagcgatcctcctgcctcaccctcctgggtagctgggactatgggcacgtgccaccattcccagataattttttgtattttttgtagagagggggtttcacctttagcctgttgcccaggctggtcttgaactcctgggctcaaaggatccgcccacctcggcctcccaaagtgctgggattacaggcatgagccagcatgccctgcccagatagattttactttgacagactagctctcctattaaatgatgtacattttattagttgcttggaaacacagatgcatttgaaaagctaaacttgaagtaaatgtttcccaacgattttttcctccctatatttccttaattcagaaaagattgagtgggtcccaggatgccattctaatagagaaaaaaacacatatatataggagtcttaagtagcagtaaatttctgtctggatgaggaagttcaaaataaattctggacttgataaattacatattatctgtgttccaagtctttaaaaccagtatagcccaactggatgactcaaaacctgcctaaatgaacaattatctcactctttggccctaaggttttcttcctgtttatcgcacaagtttattatttttctacatgaattttataaaatctaatcgctatctttaaagagtagaaaatgaaacaattgcagatgagacattttgtttgctttgctgacctaattttgtggtgaattctaccctccaaagatgaaacagaacttggttttctgtgagaaaaagataatattagtcttgaaaacagcctcatttttttctctgcttatctctttagattgtagtctgtttacagtggatgagaaagagctaggaaataccaattactgtagtacagaactaaagaattaaaaatttctcataaaatagttctatgtttgttgtattaggaagagtttttttaatgttgtttgaagtctaaactttactgggcatggtggttcacacctgtaatcccagcgctttgggaggccaaggcaggaggattgcttgagaccaggagtttgagaccagcctgggaaacatagtgagactccatctctaccaaaaaaaaaaaaaaaaatagctgagtgtgctccgtcacacccatagtcctaggtacttgggaggctgaagcagaaggattaggtgagcccaggagttcaaggccacagtgagctatgattgtaccactgcactccagcctgagtgacaaagggagataaattcttggctttatatcctcctttgctgtgaaacagatcgaaatgattgtgggttttattgttattgttaaagtatgagtgctcccaaattttacattcaaatgaatgcatcaaaacagtcgttttgagaggatagatttaattatactgtcattatatttattccaaaaattctatcactgatcaaaacatttttactcttcctcatttggaattatcttcaaactttgtggcaaacctttataatatcctcaggagctagccatttttgttctttgcatgttacaaaacaaatcaatggtttttttgtaaaaacttcaggaaatagagataagaattacctttaatatcaccacctatagacaaccactgttaacatcatattttttttttttgagacggagtcttactctgttgcccaggctggagtgcagtggcgccatcttcgttcaccgcaacctccatctcccgggttcaagcaattctcctgcctcagcctcctgagtagctgggattacaggcgtgcaccaccacgtccggctaatttttgtgtttttagtagagacagggtttcaccgtgttggtcatgctggtctcgaaccactgacctcgtggtctgcccacctcagcctcccaaagtgctgggattacaggcatgagccactgcgcccggccctaacatctttttagactccgttctggacatattcaaatatacccttggtatgacattttcaaaaaactcggtggaatcatactacaagtccccttcctcttttttttttttaaaaaaaatgccattttcttttcttcttcttcttttttttttagtagaatgagataatcttattattgaccaagtttacataaagcttgattctttaccgccaccaccaccacaacagaaagaaaagtttatgttggacactacgtttaattaggagatgtagaaaaggttccagtagagattgttttaatgaagactaatattgtaatttttttttctattttactctaagtcctgggatacatgtgcggaacatgaaggtttgttacataggtacacatgccatgttggtttgctgcacctatcaacctgtcatctaggttttaagccccgcatgcattaggtgtttgtcctaatggtctccctccccttgccctccatcccctgataggccccagtgtgtgatgttcccttccatgtgttatcattgttcaatcccacttatgagtgagaacatgtgatgtttggttttctattcctgtgttagtttgctgagaatgatggtttctagcttcatccatgtccctataaagaactcattctattttatggctgcatagcattccatggtgtatatgtgccacattttctttatccagtctatcactgatgggcatttgggttgcttccaagtctttgctattgtaaatagtgctgcaataaacataggcgtacagatgccattttctcatctttgtgtgtgtgtgtgtggagataatgaatctttttttttttttgaggcggagtctcactctgtcacccaggctggaatgcagtggtgcgatctcggcccactgcagccttttgcctcctgggttcgagcgattctcctgcctcagcctcctgagtagctggggctacaggtgcccaccagctaattattgtatttttagtagagacagggtttcacactatgttggccaggcttgtctcgaacccctgacctcaagtgatctgcccgcctcggcctcccaaagtgctgggattacaggctcgagccaccgaatccggcccattctctattctttaccactcttatttaaaatatatcgagactgattttctttactttttttttttaagcggagtttcactcttgttgcctaagctggagtgcagtggcatgatctcggctcactgcaacctccgcctccagggttcaagcaattctcttgcctcagcttcctgagtagctgggattacaggcgcactccaccatgcctggctaattttttctatttttagtagaaacagagtttcaccatgttagccaggctgctcttgaactcctgacctcaggtgatctaaccaacttggctttccaaagtgctggattacaggcgtgagccacggcgcctggccgagactgattttcttttaggcttaaaatgtgatctgaaggcatttagaaatggaagccatatgattacatattaaaagtaaattttggttgggtgtggtggctcatgtctgtaatcccagcactttgggaggcctgaggtcaggagtttgagaccagcctggccaacgtggcaaaaccccgtctctactaaaaatacaaaaattagccaggcgtggtggtgtgggcctgtaatcccagctacttgggaggctgaggtaggagaatcgcttaaacccgggaggcggaggttccagtgagccgagatcacaccactgcactccagcctgggtgacagggcgagactctgtctcaaaaaataataataataaaataaattttaaaaaataaatttcacttatgaaatttatataaatagttgtagtaaattccgactccatatatgatttatcaaggtaactgctttgaaaagaaaacatctatttaaaaaaaatgttgtaagtaatactgaaatacttttccttgtaaaaagtcaaaatagtacagttggtcaggttgctattgtccacctccccccagccccctttccagagaaagcctctgttctgtttggtgtgtggccctacatgttagaaaggattgctggccgggcatggtggctcatgcctataatcccagcactttggaaggccgaggcaggcagatcacctgagatcaggagttcgagaccagcctggccaacatggagaaaccccatctctactgaaaatacaaaaaaaattagctgggcgtggtggcaggcacctattattccagctactcaggaggctgaggctggagaatcacttgaacccaggagacggagattgcagtgagccgagattgtggcactgcactccagcctgggtggcaagagtgaaactctgtctcaaaaaataaaaaatataaaaataaaagattgctgtataaaatgtagatactgtcctgaatgctccttatggaggagagtattctgtattcttttgacgtttcaagaattgtggactcatttctcttgatttttatttttatttatttatttatttatttttcagacggagccttgccctgtcgcccagactggagtgcagtggcgtgatgtcggctcactgcaagctccgcctcccaggttttctcctgcctcagcctcctgagtatctgggactacaggttcccaccaccacgcctggctaatgttttgttttttttttttttgtatttttagtagagatggggtttcaccatgttagccaagatggtctcgatctcctgacctcgtgatctgcccgcttcggcctcccaaagtgctgggattacaggcgtgagccaccgcgcccggcctttctcttgatttttcattcaatttacaacacgttactgaggacaacagtgtagcctgattttgacaaaatttttttattgtcttcatcattttgttgtattctgagttctttcacatagttcttttttttgtgttggttacttagaataagaataatctcaaaagtattgtcagtgttcatagtttgttttttttttttgtaaaaaacccatttcagatttttacctcctaaataattagaatcagattaaaatagttttgtttcgagtgaaaaatgctgtcagaatggaaattattgcagaaaaggttgactgaggccaggcgcggtggctcacgcttgtaatcccagcactttttttttttttttgtgacggagtcccgctctgtcgcccaggttggagtgcagtggcgcgatcttggctcactgcaagctccacctcccaggttcacgccattctcctgcctctgcctcctgagtagctgggactacaggcgcccgccaccatgccctgctaattttttgtatttttagtagagatggggtttcactgtgtttctaggatggtctcgatttcctgacctcgtgaactgcccaccttggccaattccagcagtatgagaggccaaggcaggtggatcacctgaggtaaggagtttgagaccaccagcctagccaacatggtgaaaccctgtctctactaaaattccaaaaagtagctgggcatggtagcgggcgcctgtaatgccagctacttgggaggctgaggcaggagaatcgcttgaatccgagagacggcggaggttgcagtgagtggagatcgcgccactgcactccaggctgggcgacagtgcgagactccgtctcaaaaaaaaaaaaaataattagctgggtgtggtggtggctgcctgtaatcccagctacttgagaggctgaggcaggagaatcgtttgaaccccaggggcacggaggttgtcttgagccgagattgcgccacttcactccagcctgggtgaaagagcaaaactctgtctcaaaaaaaaaaaaatttattttcattctttatcattaaagagttgcttttatgttgtcctttgtgtggcttgtaggatcattaaataaggtagagaatctcataaaaacagttttggagaaagatagttgaaagcataatgtcatacattttaaatatataaatgtaaactatatatagaaatacataaagtattatatatacttaaactatataaactatatttttaagtatatatagtatgtataagtctataagtatatatatacatatagtttatatacatatatataaacttggtagaagggtaagatactgtaagtgtatatatacttacatagagagagtttaaattatttacatggaaaatagaaataatatattccatcactccaaaaaaaaggtcacctttggatatagcctgtttgaagtagcagttgaaaagcctggtaacatgtccctcagggagttagaaacacaggaaacacacaagcctgaggcttagggagaggcccaggctagggatactgatttgagcatcagtagcatatgagtgggagttaaagacttagattttggccaggtgtggtggctcacgcctataatcccagcactttgggaggctgaggcaggtggatcccttgagcccaggagtttgagaccagcctggccaacatggcgaaaccctgtctctactaaaaacacaaaaattagctgagcgtggtggcgggcgcctgtaatcccagctacttgggaggctaaagcatgagaatcccttgaacccgggaggcggagattgtagtgagccgagatcaggccactggactccagtctgggtgacagagcgagactctgtctgaaagaaaaaaaaaagaaagaattagattttaatgaaattgccctggagtgagaagaggagagagttaaagactactccatgactcatcaaccttgaagagctatgcagaggaagagaaggcccaaaaggggaggagagagtacctagaaagcctctagaatggggatagggtagaatcctgtaagccaaagaaaggggttgaagatgtagagtagtcaccagtttcagggtgcaaccaagatgccagatgtccagtggggtttagcaactgggaggctattggtggtcttgggaagaaaggttttaggtgcatttagtagtaaagggaggaggagataaaattgagaaagcaaacagaatctgcctttttgactttgtgcttaaatgcggatgctcctcagcttgtggtggggttgcattctgataaacctatcataagttgaaaatatcattaagtcaaaaattaacacacctaacctaccaaacatcataatttagcctaccctcccttaaatgtactcagaacacttccagtagcccacagttgggcagaatcatctaacacaaagcctattttataataaactattgaatgtttcatgtacattattgaatactgcactgaaagtgaaaagcagaatggttatatgggtactcaaagtgcggtttctacagaatgcgtatcgcttctgcaccatgtaaggttgaaccatttgtaagtctgagaccatttgtataacatacatataggaaagtaaacggggcataagtgaatttttacaaactaaacatactagcactctagaagctcttctcgtggcccttctagtcactacccagcttgctaagggtatccactattctgccttctaaccatagtctacttttaaaataaatttgtcaatggaagttggtagaagggtaaggtagttgttagagagggaattaggggtggagggtatttgttgtgttttgtttaagacgggagagattttcttgaatgtaaataaatgtcataatttctctagtgggtggccagtcactctgtttctttttatatttaggacagttttcattttatactttcaaatgtttttaaaagtatgtttgagtgcttatacaaacttaagttgaataactgttctctaagcatatgtttgtggaatggtggttttcaaaactttgcttatcttgggaatagattcttgggcccctcttagattcagagtcagacactctgggggaagctgttagaatctatgcttttaaaaaattccccaggtgggccaggcgcggtggctgacgcctgtaatcccagcactttgggaggccgaggtgggcggatcacgaggtcagaagattgagaccatcctggctaacacagtgaaaccccgtctctactaaaaatacaaaaaattagccaggcgtggtggctggtgcctgtagtcccagctaccaggaggctgaggcaggagaatggcatgaacccaggaggcggagcttgcagtgagccaagatcgcaccactgcactccagcctgggcgacagagcgaggctctgtcttaaaaaaaaaaaaaaaaaaaaaaaacaactccccaggtgattctgaaacctcttgtgtacacaggcctgcaaaagccttctatcatgaagctggcatatattataaatggaagtctaataagataatagttctgtaattgtgggagaaaagagtcaccctttttttaaatgggagagagtattcactagattctctataaagttgaaaaagaaagcaagttgttaggtatttgagccccaccattcatgagagtctgaataattctgagggtgacttatttagcttaaggtttttatttgtctttaaggcagttttactggaacataatcacaacatgatcccagagctatggaattctgggcagtcagtgtacttttatttgcaaagcaagaacagtttagccttctggacacccattatgatttgtttgtttacgaccttaccagattcatgtcttggtaaactgtgtctaagaatctacctttaaagctgagggagctgactgataaactcaatctttttattttattttattttttgaggcagagtcttgctcagtcactcaggctggaatgcagtgacgcgattatagctcactgcatccttgacctcctgggctcaagtaatcctcccacctcagcctcccaagtagctgagaccataggcatgccccaaacacctggctaatttttttttttttttttgtagagatggagtcttgttatgttgcccaggctggtcttaaacttctggcctcaagtgatcctcccacttcagcctcctaataaactcaatcttatgcctgaatcttttttttttttttttttttttgagatgaaatctcactctgttgcccaagctggagtgcagaggtataattttggctcactgcaacctccaccttccaggttcaaacgattctcttgcctcagcctcccgagtagctgggactacaggcacatgccaccatgcctggctaatttttgtattttagtagagatggagtttcagtgtgttggccaggctggtcttgaactcctgaccttgtgatccacctgcctcggcctcccaaagtggtgggattataggcgtgagccactgtgctgggccctgaatctttttttgaatgttaatttattttttaaattgtggcctgagtctttgattaaattcataagcttcctggaagctctataagagcagggaccttgtctgcttatgtgttttatctgtttagtaccatgtctgacatgatgtgggtgtgcagtaaatatttgtttttgaaataaaaccctggttgacctcttctaattgttatatataaccttgcttgcctgaccagatttgttttgccaacatcagtccttcgcaagcttcagtggagacagagtaagaaccaaatgtctttaagatgatgacagcctacccctttacacttcttgttagggcctcatctaacccaacaccaatactggttgctctgtttccattgacaagccccttgcgggctgtgcgaaacaaaagttttgagacatagagagtctaaggtccaagatagagtgtaccttgatactttgctggggagtaggatcagaccagaaagaaagaagagttagccacaagagtgagaaaactcaatgacactccctctgaggtttgcaaagctaagggccaccagtttacctttaagccaaattttcgttttctctgtgactatgggtcttacagctgtattcaaaacctcagagaagccaacacattagagtccttactttgagacccccaactagctgaatgccaagaaaggcatttagtaactgaagggtatactcccgaggggctggatctaaagaaatgccacctttgatctagcctgtaacttagcactaattggagattcagctcttaacagagcttgcttgactttgattgagcaagcctaactcatataatgcaaagtagaccatatctaatcagttcttggcaggtgcatatgtactcattttctgagccaactcatctgccctgaccagggagtgtacctggcaacaaggcttctcaaggactatcacttgggaaagggagtgctcagggcgtgggtacatgcagtctagagattacagccctgcatcagaaaaagtttgggggaggccgggcacagtggctcatgcctgtaatcccagcactttaggaggccgaggcggacggatcacaaggtgaagagatcaagaccatcctggccaacatggtgaaaccccgtctctgctaaaaatacaaaaattagccgcatgtggtggcgcacacctgtagtcccagctacttgggaggctgaggcaggagaatggcttgaacccaggaggcggaggttgcagtgagccaagatcatgccactgcactccagcctggcgacagagggagactctgtcgcaaaaaaaaaaaaaaaaaaaaaaagggaaaaagaaaaagtatgggggagatttcacttcttgggaggtatattcagtccgattatatcataatgggtcaggactcctcatggagagagaatacctttgtgttcatgtctcacaaagcaacccatccagagtgcgaacaggaggaaagttgataaggctagagatttttttttattatgtcccagaccctgaaagttgattgtgtttcttcaaagaactggattgttcttccttggggagacaaaagattgaagaaggttcatctcctctttgtgcccttacactgtcctggggtgattctacccatcttagcctttcccttcttaaatcctgattttgaataggttggcctgaatactcaatatgagccctaacaaattatgataaccacctggcaggcacacagtgtcgaagatggccatttgtgatgacatctggtctggccagcttcctttttactgttaagagggaaaggtggtgagcatgctgaggcagggtggggtcatctcgcaccaggaggagccccctttgaagctaaaaaggaagatgaatcagccaagatgttgagtgcatcagcttcagccatgtctacctggggaccttttaccaaggctcctcccatgggtttccatcacacagatctataccagttccttaccatggtcaggtgtgtggctggctccttaggaatgagcttggcatggattaggtgtgctagagctgatggattttttaaaaagtctaatttacatagagtgaaatacatagatttttaagttgtacagtcttagttgtacaatttgagctttgacaaatgtatataccttgaataacccataccccaatcaagattgtttcaccccagaaagttcacttgtgccacttctcagtaagtccacttccttccaactcccacctccccggcctagtagtgattgttctggtttctcactatgtttgaggccatgggttttaaaacatacagattttcttcaagtctagatggtgagagatgtcagaaagtaatacttactcaagtaaatcagaggttctcagtgggagagttgctccccaggagacatttggcagtgtctggagatgtttttgactgtcgtgactgggaggaggtgctactggcatctagtgggtagaggctagggatgctgccaaacttcctgcagtgcacaggacagccccacaaagaaggacccaacccaaatgtcagtagtgctgagtttgagaaatcctcgagtaaatcatgtgttctctgcaaactaagaattatggtcctggggagtgttcatttgtaggtctcccaggtctcctggggtgaggtttgctttttctttgttttgtttgcttgtctgttgagagcctgctggaagctgaaaaggccgctgcaggagccagctttctttggtgctaccacccttgtggccacagttcttgctgtggaatgggtatcagggtaggcttagggaggaaaactaataggagaagaggaagaagaagaaaacagtttaggcagtaaagggaggcaggcctagaataatattaaaactagaaaaacaagtaagataagaggggaaggtaaagtagaaattaataattaagaatccaataaaatgttaaaggaaatgagttgagatttaaaatcaaagataggctgagtgtgttggctcacacctgtaatcccagcactttgggaggccaaggcgggaggattgcttgagctcaggagttcgagaccagcttgagtaacatgatgagaccctgtctctgctatatatatatagttatgtatagatatagttatatatttatatatatatataatatatatatttgccgaggctggagtgcagtggcacgatctcggctcactgcaacccctgcctcccagtttcaagcaattctcctgcctcagcctcccgagtagctgggattacaggcgtctgccaccacgcctggctaatttttgtgttttttgtagagactggatttcatcatgttggccaggctggtgtcgaactcccgacctcaggtgatccacccacctcggcctcccaaagtgctgggattacagacgtgagccaccgcacccggccttactgtgctttatgagaaataaatacacccctgaagtgctgaggaagtccagacccaaaaaacatgttcttatggacttaaaatttcaggtcaactttttcttaatttccaaaagacaacagtttctaagtttgcctactttagcttttcaagtaaaataaaagatacatagatagatgactagacctctagctgtctgtcggtctctggaacatgtccaaaaccaactcatcatttttccctcagacttgcccctctttttctacttcctctctcaggaatgctgtgtcaccacccaactagaaaaacccatcggaaaccccaaggtcacttaaaatctactcttttcctgattttcgaaaatccaatacattgttgttaactctagtcattatgttgtacaacagatctcttgaactactcctcctaactgaaactttgtacttttgaccaatatctccccaactccccccagcccttgccctggtagccaccattgtgctctctacttccattagttcaacctttttagattccacaaaaattaatttgtgaggtagtgcatatgttaattagctcaatttagccattccacaatgtacacatatttcaaaacagcatgttgtacacaataaatatacacgattcttgtcagtttaaaaattaaaataaatgaaaataaaaattaaaccaaggtcatcgtcactcttcctttccctttggtcactaagtcctgctaattttgcctattaaactatctcaattctactttctcctctttctcctctcctgtgcaatctttccttgggcccttatttctttccttcattgttttagcagcaccataactggtcagctggccctttaatgacttaaagcgccacactgagaaataatcgtctttctaaatggcaaactcgattctatattccatccttatttgagatcttttggtatttattacctaggacttttatgtgagccacacgagtcccattatgatctggctacaaccaacttctctgactcatctctctgtcactctgctccctcccacaaaactcgaactccctacacttctcccatgctgtttcccagcttcgtggcttcacacatgctgattcctctgtctataatgtcctatacttgttttgtctttctgtagaactgcctaagagccgggagaattcatgcttttgaaacaaggggaatttcccttgtccctcttacagggcatgtgatgggagtgtggcccacttcttaggtgccccactgctcaaaacccctagggaaagcaggcagatgggcaggtcgtggggagtgtgggctccaaccccatggcagcgtctaggggtggatgtttacagcttctgcagccccagtgggcgtgtgttacgtgtgctcttttagttttgctgtcagtaggcagcttgtgttcatcagctcagttagaccctctgccttattgcaaggacagagggctttctgtatcctagggttcttgcctgagtataccagaaaaaccggatcacacgtgggcttggaggatgagtgcaaggttttattgaatggtggaagtagcactcagcagatggaaacggagccagaaggggtatggagtgggaaggtggttttcccctggagtcaggccgcttagcagccaggctctcctctgaccgccctcagccaaactccgcgttgtcctgccgttctgctgttggtggcctgccggagtctgtcactgtgttcttctgctggtatgttgttccttgcctctgcttctcttgacgtccagccgcttgtgtgcctgcccgctagggtctcggggtttttataggcacaagatgggagtgtggtgggccagggtggtcttgggaaatacgatatttgggcacaaaaacagaaatgcctgtcctcacctaggttggtgggcacaggcccaggggtggagccctagccagggaccacgcccttctctacccagcatttccctgcctgcccctcccgtatcacttttcttttatttatttactttttgagacagggtctcgctctgttgcccaggctggagtgcagtggcagtatcttggctcactgcaatctccacctcctgggttcaagcgattcttgtgcctcagcctcccttattttattttttaatctgtcccaggccaagtgcagtggttcacacctataatcccagcactttgggaggccgcggtgggtggatcgtttgaatccaggagtttgagaccagcctgggcaacatggcaaaaccctgtctctacaaaaattacaaaaatgagctggacatggtggtgcatgcctgtagtcccagctatttgggagacaagacaggaggagtgcttgaacctgggatgggaaggttgcagtgcagcagaaatcctgctgctgcactccaacctaggcaacagtgtgagaccctgtgtaaaaaaaaaaaaaaaagtttgtccatttatttacatctatcaagttcttcctaccagaatggaagccctttcagggtgaggatatgtcttactccatattcctatttctatggctgtgcctaacacacaaggcatgctcaataattgtttatttcctgctcaaatgagacaaaaggaaatggatggaggagaggtggaaaataaatgagtgattgatttctctctaactatttaggcatgatttagcatcttggaaatcatattactgagatttgcagtgcctgtaatgtgaaagatgaggctattctgtaatacaaaacgtaatgccagctaaaatataacaaaaatatctgttgaaacgtatggctgcaaattcccatatttcagaagcaaataaagagctgaaagccattaagaaaaaaaagggtggttgttactttaactggtttaaaaacaattgatacatcttgaagtattaagtgtgcatcttgaggtcttaatttcaatgcagttttgctacagatttcttttgcttccacgatacagattagccagctagtgctgacattagttcatgtggtttgtgcccatcacaattattaggcagaaccagcagcaccaggatacaacctaaggagatcaacgtccctcctagaaaactgccacggccttcgcaggaggggtctgaatttttttttttttttttttttttttttttgaggtggagtctcgcactgtcacccaggctggagtgcggtggcacaatcttggttcactgcaacctccacctcccaggtgcaggtgattctcctgcttcagccttctgtgtagctgggattacaggtgcccgccaccacgcccagctaattttttttttttttttgtaattttagtagagacgggatttcactatgttggccaggctggtctcgaatgcctgacctggtgatccacccacccgcctctgccttccaaagtgctgggattacaggcgtgagccactgcgtccagcacattttttatattcacaattaaattaataaaccataactctcctcctctcagcccatctttttttttttttttttttttttttttttttagtggagcgattattttgtgtgtgtgaaacagagtctcactctattgcccaggctggagtgtagtggcatgatcatggctcactgaagcctcaaactcaagagttctcccacctcagtctcctgagtagctgggactacaggcacacaccaccatgcctggctgattttttaaaaaaatatattttgtaggccaggtgcactggctcacacctgtaatctcagcactttgggaggccgaggcgggcgaattacctgaagtcgggagttcgagaccagcctggccaacatggcaaatccccatctctactaaaaatacaaaaattagccgggtgtggtggcagacgcctgtaatcccagctacttgggaggctgaggtagaagaatcgcttgaacctgggcgttggaggttgcagtgagctgagatcacgccactacaccgcagcctgggtaacagagcaagactccatcttgaaaacataaaaataaataaaaataaaataaagcacagtaagcctttcagggtggggagtggctgaggttatgaatatgctcatgttctgcacattcggtctgtaacatagagaggtttaagattgcttctgcatttcaggtaattcagaggtccgtggggccagccagcctgagcttgctcaccttcaaagtctatgcagcaccaaaaaaggactcacctcccaaaaattccgtgaaggttgatgaggtaacatgttgttcatgttgcgatatattttgagtgtctgatttagttactgtaggataattttttacaaattgtatatcaggaagatgtgactgtttaaaatacatttatttatttatttatttatttatttatttatttattttgagacggagtttcgctcttgttgcccaggctggagtgcaatggtgcgatctcggctcattgcaacctcctcctcctggttcaagccattctcctgcctcagcctcccaagtagctgggattataggcatgtgccaccacgcctggctaattttgtatttttagtagagacaaggtttcaccatgttggccaggctagtctcgaactcccgacctcaggtgatccacctgcctcggcctcccaaagtgctgggattacaagcgtgagccaccacgcccagccagaagacatttaaacagagaaaatatatttccttatagtttgtttaatttgtgggaaatattaaactatggctttttcaacagataaactttaatgatacttaggtaagggcacaattaaggaatactttataaatgtttactggggaatccactgtgtcccaacaggttataagcacaactcacttttctaagtggtctgcctgattcttggcttatcttgattcttatcgagccaagaatatattcacattttttcctctctaagaaattagagatctggatcctttctgtttcttggctagaggagccgctcataagtatgtacttaataaatactaaatttaaaaaaaaaaaaaacaagaaatcttctctctactgtttacattcctttttggtctgtacttcccactaattattttggatattcagtttctgttgcctttgaataaagtgaggtaaggatctaccttcagtcctgggtagggttactagattggtgtttacataaagctaattagcttatcttttgccctttactcgcttctcaggccttggcacagtggcatttttgagggtaaagaaggcagccagcagtggctgtaagaagttctctgggtggagaataaacctgctgtcctgctttgattaacatcagaccaatcatttgaactgaatgacatgccctttggttactctcaagcttttttaaccccttcacccaccctttagagtaataaaatcttttttccaagctcaatctaaggtggaataccaaataccagtatataaaatggataaagaggagctgctttgtttgtagtcagtgggtggggagaaagtaggacacctcatagccctgcccttttggccttggcctcgttgattatggaaataaggtgcagagatagtttgagataaagttcaggttgcttgtaacccttagagtcactggaattcatgaagtattattattattatttttgagatggagtctcactcttgcctaggcttgagtgcactggcacaatcttggcttactgctacctccacctcccaggttcaagagattctcccgcctcagcctcccaagtagctgggattacaggcgcctaccgcgacacctggctaagttttgtatttttagtagagactgggtttcgccatgttggctaggctggtctcgaactcctgaccttaagtgatccgcctgccctggcttctcaaagtgctgggattacaagcgtgaaccaccacacccgaccacagagtcactgtaattcatgaattactagaaatattatattaaatacttacaaatttgataaatgtatcctgtagacagtacatcttttaaatctttgttttgttttaatgtgcgcagctttcactctactcagttcctgagggtcaatcgaagtatgtggaggaggcaaggagccagcttgaagaaagcatctcacagctccgacactattgcgagccatacacaacctggtgtcaggtacaactgttctgaaaatggagtgaacgcatttctgtttagagtccatagaggaaagtctgtattggctgcatgtttttggaaaaaggcatgataaagggccctgagatggttgacagaggctgggaagggtagtgggggtctgggggaaaggtggggatggctaatgggtgcaaaaaaaaaaaatagcaagtagcaagaatgaataaaacctatttgatagcacaacaggatgactgtagtcaacaataatttaattgtacattttaaaataacttaaagagtgtaattggattgtttttaacactaaggataaatgcttgagcggatagattccgcattctccatattgtgcttatttcacattgcatgcctgtgtcaacacatctcatgtgccccataaatgtatatacctactacgtacccacaaaaaatgttgaaatacaaggccccaagttaaaagtgcctgacttacagatgttcttcagtgccatctgaggaggggttgcagagatgccctagcttcctggtgacagctgttgccacagctacagagagaatttccctctccctgggcagtgcgtaacgccttaactagagagcagaggggctaggaactaccttgttgcttgcagttatgaaaacattgttgtctaccaggggaggcttgtgggctggaactctaaacaaaggaaaaagatgcaacgtaaacacttacataaaaattgcgaagtttttctccccccactatacaaatcagtgccacttaaaccaggaggggatatggcattttgaatgctatactaaaatagggtagaattccatactggattactgaactatttgttctagtgaccaaagaactacatatacagattggtttctgtccctgcctgggttttaggtcaggcatttgtcattacgtaaatgaaaagtatttctgtgatttttaacatcagtaaccaacgtttacaatctatagaatgcttttgtaggctttgatacatatgtttgttgtacttgatcttgattttgaaaattgaaattaataaaaactaatagatgtagatatgtgggaaattgtctagatttaccttgcttgagatttataaatttagtctttttgtttttttttttttttgagagggagtcttgctctgtcgcccaggctggagtgcagtagcgtgctctcagctcactgcaacctccacctcccgggttcaagcagttctcccgcctcagcctcccaagtagctgggattacaggcacgagctaccatgcctggctcatttttgtatttatcgtagaggcagagtttcgccatgttggccaggctgatgtcgaactcctgacctcaagtgatctgtccaccttggcctcccaaagtgctgggattacaggcgtgagccaccatgcctggcctaaattcaattttgatccagagcttgtttaaaaatttttaatttccgttgcctatgctgctgttgaacttttgttcaccaatttagaaagaaaatagtaaagcatggactctatcaacaataagaattaggccattatacttaagtatcataaccatattattgagttaagtaatacctaaagactttaaacataacatgttgtaaaatgattagactttattctcttgttctagaagatttttaaacttctggtagttaagataaagtcagcaaatttgtgtgtatatttttgtatcatgtaggcatgactactgttacttgtagtctgtctgttttttttgtttgtttgtttggtttttttggcaataaaagtactttgtaccttttagcctaaggttgctttttgttttttaccttttcttccatgcgtgatactcagtgcagcaaaatacctctctggatgatggattagttatctatatgtttatttccactactactaaatataaaaacttgcttgtaattataatagtttttgtaattataatggttttgttttcctgggtagaacaaagcctttatgagtagaaatatttctaattcctggttcctttttcagaccagcaatttctagcccttttcttgaagaaccaatttaattttgtttttttgttctttgtttttctttttttgagacggagtctcgctctgttgccaggctggagtgcagtggtgcagtctcagctcactgcaacctccgcctcccgggttcaggtgattctcctgcctcagcttcctgagtggctgggactacaggcgtgtgctaccaagcccagataatttttgtatttttagtagagacggggtttcaccatgttggccaggatggtcttgatctcttgaccttgtgatccgtccacctcggcctcccaaggtgctgggattacaggcatgacccactgtgcccggccttaattttttttaatagtaaaaatattaagctagcaaaagaagtcggcaatcattctagatattgatctgaagttttttcttttttttttttttttttggtagagacaaggtttcaccatgttgcccgggctgatctcgaactcctgggctcaagagatctgcccacctcagcctcccaagtagctcggacatcatacacataccaccatgcccaactaatatttttatttttatttttattttttttatttttttgagacggagtctcgctctgtcccccaggctggagtgcagtggcgcgatctcggctcaccgcaagcaccgcctctgggttcacgccattctcctgcctcagcctcccgagtagctgagactacaggtgcctgccaccacgcccggctaatttttttgtatttctagtagagaccaggtttcactgtgttagccaggatggtctcgatctcctgacttcgtgatccacctgccttggcctcccaaagtgctgggattacagccgtgagccaccgtgcccagcctaatatttttatttttttgtagagatggggtctctgctgtgttgcccaagctggttctcaaattcctgacctcacgagatactcctgtcttagcctcccaaagtgttgggattacaggcgtgaaataatggattttaatgaagcgatactcagttctttagatcttctggctaattcggcatttattatttcaggtcatttaaaagaatgaggatagcttgttctgacttgaactgaattacacaaaacaaatccttttccaggccgggcgcagtagctcacgcctgtaatcccagcagtttgggaggccaaggcaggtggatcacctgaggtcaggagtttgagaccagcctggccaacatagcgaaaccctgtccctaccaaaaatacaaaaattagttgggcgtggtggcgggcacctgtaatcccagctactcgggaggctgaggcaggagtaatcacttgaatccaggaggcggaggttgcagtgagccgaggtcgcgccactgcactccagcctgggcgacaaaagcgaaactctatctcaaaaaaaaaaaaattaattaataaaaataaaaataaaaaaaaaatcctttcccaaatggcaactagttttgataccttctgatacccatgtatctcttcttgtcttcactgtagacttcttgaaggtgggtaccttctagcgggtccctcgtttcctttaggatcatgtgatattcatgtacaaagccttttttttttttgagacacgcccaggctggagtgcagtggcgccatctcgg

SEQ ID NO: 468 - DNA, 8800 bp, Homo sapiens
  source 1..8800: mol_type = other DNA
aaaggcggggattgcgtagggaaaggccctaggccataaacgggggtggggcctccccggaggccagtgcgcggccgcggtgctctaccggcgtgtcgctccgccccagggagagccggcgctaccatggaggagtaccatcgccactgcgacgaggtaccgccccttggctacctgggagcgccccccactcccgccttcctctgcgcggggctcttgccgggtggtctcccagcgagggcggtcccaagagttggggtgcggcgtcctccgagcccgggtcctctcccctgggcccgggatccgccccgcccgacccgttctccccaccccaaagtcctgagattcggggtgggaggggtggccaggagcgcgcggatcagacggtggggtcggggcagggttgggaggacgaggcctgacttgggtgcgaggagtgggcatggggtgacgggcgccgccctcctaccgggcgggcctcgaaaacgggtcttcccgctgctgcctccgtcccttggcttcctcagcgcgggtgctgcagcccccatggctcggagtctcggggtcctggtggcactgccattcccgctcccggtaatgcttgccaggattaggcaaggaggtgctttatggattacgagcccttgcttactgactcaggctttcccaaccctcaccagaaacccatgatgtcagttgttatctccctgttattgatggggactccaaagaaaagactaagttgtcagaccactttatagtactaaagtgatattaatcttgagttatcaagtattttcataatctttaatttgggaaaggaatttttgcctagaaatttttgcctagcataagttaaaaacaaaattgaaaatagtctactaagcattctcttcatatggaccacttcattctctcacttagctgaaaccatttctatattcttatgacacataacatcctcatagtcacctcttgcttatttcctacgttttacaatacaatgattcttaatctaggatgttcattagaatcaccagtataaagcacttttttaaaaaaaaatgtagacttgcaggctctgccccagacctcacgggaggtaggtagggaaagcattcagtatttttaagtgtttaggggcaagattggccccttctgtagacctgatgccctttaacactttaacacctgtctaggccagcctaggatattctgtgtagcgtcatacttgtaagcctgtgttgaaagcagctttaccttttgttttccctttaggttggcttcaatgctgaggaagcccacaatattgtcaaagaggtgagtcatacattttgtttctcttgaagcttgctgcactggtggagatttttaaaagctatattttgagtttcagcacaaacttagaaaccttactgttaaaagaagaatattttgttttgttttattttattttattgttttttgagatggagtctcgctctgtcacccatgctggagaacagtggtgtgatctcagctcactgcaacctccacctcctgggttcaagcaattctcctgtctcagcctcccgagtagctgggtctacaggcgcccgccaccacacccatccaatttttgtatttttagtagagacggggtttcaccttattggtcaggctggtttcgaattcctgacctccggtgatccacccgccttggcctcccaaagtgctgggattgcaggcgtgaaccaccacacccggccaagaacaagattttaaatatttatccactaactctttataggggtccttctatattttgttgtgtgctatcagcatcttgaggcttattctgaaagagatgcttaaggattttcttagtctagaaaactggtttaaaattgatgccctgtcttttggataaaataacttttattccagaaagcaaacattattttaaatgttaatgctataaagtatatgtacgcatatatatgtacacacgtcaacttttataatgtaaagtatatgtataatatatatgtatattgtataaaatagataacaaaagccctagaaatatctgcctttgggcatgtacacttttttgcccaatataattggaaaaaatgatcatttaacatattttaagcattgatatgatagtgaatcaaaattttaagaaaaatatttgaaactccttttaggcaaatagaaaagaaattacctttgggaattaattctggcaggggaccgttcattattttagaggtatcacatacagaccacagtgtgggaaaggtattttttgacacccaggtctggccttacacagctagaattaactcaaggtctgagaggaatagacaggcacctgaaaatcctgccatatttgaatacttcagaattatgcattctatctatgtagcctgagagtatttaattattaaaagtagaaagcaaaggtttttaatacctttacaatgtaaaagcacaaatgagggaaactgggaggtggaagagggagtggaggtaatgagaagggagtgatcttagttttcaaagtggcaagtcaggaaagactgtccttggttgatggaacataaaagaaagaatgctgggctatttgggattccatttaaatagtgccttcttccttaagttctgaaccaaatgaaaagaaaaaagagccattagaaagagaacaaaataccacctttattattgataaaaaccagtttgatgattgtaccttgttttgctaactcccattcagttcagccctgggaagagtcatccaagagaaagtttgagtcagcagagagaaacacttgttcaggctggtgcctttcattggtttgggtggagagggaaggagaaactaaagcccaagttcaacacatttgggagactcccaaatgagatgttagaacaatggttatcacccaccaaccaggtaactcattccacctccatggggaggaataactgacaggacaagaggccaggaatgttaaagaacaatcctctgcgttgaagaaaacatccagagtggaaaagaaacatgtttctaacagtgtaaatatatttaagttaaaaaatcgtgatttcactatattgagagaagggggcgggtggtctgagggaaccaaattttcatctatcatagtaggagttacatggatgttgcctataattcataaatcaggaaatagtgagataaacattatttggagatacataagtaacccttggaagaaataaaaacagttgtacactgatgagtttcctctggggaatgggactggggatgggaaaggaaagggtgggaaggaaactcttcattctaagcttttctgttctactggatttttcaaaccatatgcctgttactttaatattatatcaaattaaaagaatcatgctttttcaactgggaaatacatactcggcagtggctaggtggtgctagaagtcactggatgcattttagaacatcagtttttcttgaatatttgtgagagggagttaagtaatataaataatataactgaaaacatttttgaataaaaacaaactctgatgcattatgtagtcaaaacaagcttctcttgaatttttatatgaaatatgagactgcaaagaaactcagctttgctacaggttacttgcagctaaatgtctatctttcctcttcccatgaaccaaccctcttctgccattgaaacatttccattgagacattggaaatgcctgagaatgagcaacattttaaaacagtttagcacttcctagatgattacataatttcagcagttatttctgatttccttactgatcttattttcttattgatcttattttctttcctttgatttcttgctctgagcccctatgctaatatgtttttccttctgaactcagagacacccatttatcagtaatatgcatacattttctttagtgttagtaatagaaattgcttccccaaaaaatcgtcgaagaaaaagtgagctacaaatgacttagaatttagtctaaagtgtatttgatttaagatacccagcgagtatatcaaaaccaatattgcttcaacaacatttgttgaatacctgctaagtgcccaggtcctgagtttagcactgagaatacagagctgtttaaggacctcattgtctcatgggcctccatgttaatgtaattaattaggctagatgttaattaatagtaattagcagggctatttacagtggcacccacaccccatggtgttttctgctgtttagagcaaaacttggagtggtcctactaaataacctgaaagaaaaatgagtgctcttactttatccttaaggaaaggtgatctcaagagaggaataggtttgtccaaaggtcaccagcttaggaatggtaaagccagaattaaaattctattcccctgatccttaagccactacccttcctactttgtcatgttattgagctttctaggagaaaaatttgagccatattacttttgtcaaccttgctaaaatatttcatttctcttttcatattttatcattagtgaagattttatactatccaacttaagattttgtattagtgccttcataaatctttactgtggtctaattatagtaaataaagctgcatgtgtgtgtatgtgtgtattattaagctagattctaaaaatgaattaaatgagtctaatgatagtaaatgaagctgcatgtgtgtgttagattctaaaaatgaattaaatgagtgctttattatccaggctttatcactcaaatataaaatataacagcagcaatatgataatagtagttaacattatttatatgctaactctgtgctagtcctgtttgagcacttggtattcattgtctcatttcatcctaacaacaacctgataagatgatgctgttatccttactataaggattaggaaaatagggatttgaaggggttaagtcacttgctaaaggtcacatagcagataggtgtcaaagtaggccttaaaacctaggattgtgatactagagccagtgcttttaatcaggtgtcagaagtggatgaaatcaagcactatgggaaattatgatatttgactttatctttctagagcatctttatttactttcagtggcaagtgtgctagttgtttcatagctaaacaatcacatagtatgaatgagaatataatcagttgttgtttcatagctaaacaatcacatagtatgaatgagaatataattagtatacataagaattatgtttttaaattagtcccatcctgtttctagcatgtgagccctagttcaaatcccagctgtttcaaagctacttgttaaccaattgatagcaccttttaatttccccaccataatttttatgacataatttatcattagtcttccttgtgttatagatattcgaatttttttattagcttctctgctagattaagttatttacacagaagccatgacatatttatctttatatggcccatagtatctcatagagtgagataatgcaagtggaaactctttcaaaactcttaagcaattagagacagtgcataatcaatgtttaccaagtgtatattttctaagatgccttattgagctataagtatattttatgttttgaataaatttttactgcaatttgtgtaaaaattgttctttttgaacaattttactgactaaattaactgccctctgtgcccttttagtgtgtagatggggttttaggtggtgaagattataatcacaacaacatcaaccagtggactgcaagcatagtggaacaatccttaacacacctggttaagttgggaaaagcctataaatatattggtaagtatcagtatccttcctcactagttcacttgcttttgtcattgtgattttctctgaattttgagaaggtatatgtacaatagacatttaagttggatactaaaagggtataaaggacttctgatttactcattcaaagataatctataataatacttaaaagatgaagatctttcactactcaaaggcagtttgagctacttttctttggtagcatcaccctttgcatttccatcagttctttctttccactgagacccccccttagctcaactgtgtttctttcggtagtcccatgcctctttacctgtaattccacacagcaactgtttataaagtggagtatttcctgcatttctgtgtctgaattctgcccatggtacaaagcacagaatttgactgatatttttcctgcaatacaatcaccaatggtaatgacaatggtcagaaaaccaactgaatccagtggggtcaaaatcatgatggtagataaagatgagagtcttttatttttttttcaatctatttgctgaacgctttgttttctgttttttgtttgtttgtttgttttttgtcttgttttcggcttgtagagctctgaactcacacactttgaccttggttctcttttcctttgtctgtaagtgccctcattctgtgactttatttgcagtgacctgtgcagtggtccagaagagcgcatatggctttcacacagccagctcctgtttttgggataccacatctgatggtaagagatcttaagctgatttacacaaaatccaacttttagcaaagtcaaactgcactttttaaccaagtacttatttaattctgattaaattctgaaaagactatcaacagtattgctttgtacctagtaacaagtataccttcagaccgatatgaaatgtgaaaacttaacaggttgaaggaaataagatattaaaacatgtgaaaaatgtatgtgtatatatatatatatatatgtgtgtgtgtgtgtgtgtgtgtgtgtgtgtgtgtgtgtatatgtgtgtgtgtgtgtgtgtgtgtgtatatatatatatatattctctgataatttttatgttttgctggtatttcaaaatcctttttttgtgtttcaggaacctgtaccgtaagatgggagaaccggaccatgaactgtattgtcaacgtttttgccattgctattgttctttaactgactaaaaatgttgggctaaagccattaacttaagaatttgtcagtgtatcctttccaaaaagagtaatagttgtttactagtgtgctagatgaaaagcgtgcaatatgctttaaagctatcaacaaaaactgaatattataagcaagcaatatcatagtaattggcagattagctcatattctatacagcatcgtttaaataggaaaaatttaatgctagcaaaaaataaatttagaaatatggcatgacatgaaaatacaatcttatatttacaccagcttttcactaatattttgtacctaaggtgatggggaactccattcagataataaaattctctttcagctagagaagttaacaggaataaatatatgaacaaaaaagctgcaaggataaatgtggagaaaatgatgagaattagctaacatttttaagtttttttaaactttcttcccctcagttgtacttaatatttagtggaaagtaataatttttttaattttctatcaactaatagtatagtaacaactatgattaacttgtttactttttctgaggattagtaaatcaattttttttaatttcaaatttttggatttacacttgagggtaaattaaatctggtaaactgaatttcctagttaaataaaattagttgcagtatatgatgaacagtgtatgactcaaacagctgccttacaattcactcattccatgtggaacaaacatttatcagatgcctattatgggcatatgtctctgctaagcaccatagttgtcaatgtgctgtgcaaatgctaagttccttttagcaattgttcagttggaagacgtattaatatttggggaaggaaaagaaagtagttgttttacaagggaggaaaaaagtgaatctggttacacatatggaagtaagcaaaatgaaaagcacttattgctttctgacagaattatagatgtaattttaagagttgctcctagcaagttaaaagtgcatataaaatatgcaactcttagttaaaggccttattatcagtcttacctatacaagtagtaaattttgtcattgctttagttacaaccatctgtaaataacttaaaagacttattatgtggggttcaaattgagtggaataaagtatagattaaaagtatacaatccttagcacgttatctcagggcttatgaaatgtaattaaatttattaagaaaatagatgaaaaattagggtacacagctggccaccaaatgcgaagtcaatctgctacttaaccctgaaaacaaaatcagttttgcatattaccactaacactaatacatatagagagcggaaccataactcattgaattttggagaggaataagcttagcgttaatattgacaatattaaggcaatattcttgtaggaatactatgtgcatgtttgatattttgccaaataacaataattaataattgttcaatgtttaagaataatattaacaaaataaaggagtttaatgcagtgatctttgtttttggcacatcaaaaattctcagtcattattcatgtttctttatgctgctggcttttgtgccctggaagatcataatagtgaccaaaatatacatgcagacttgttttttattattgttgtttaagcataatttaagaaaaaaaatttttacctggtgaacttgctatctgctctgtttctagttaaaatataataaatattatcttcctgtgctgt

SEQ ID NO: 469 - DNA, 25672 bp, Homo sapiens
  source 1..25672: mol_type = other DNA
tggacgagtccgagcgcgtcacctcctcacgctgcggctgtcgcccgtgtcccgccggcccgttccgtgtcgccccgcagtgctgcggccgccgcggcaccatggctgtgtttgtcgtgctcctggcgttggtggcgggtgaggagccgggggccggcaggacgtgcctggggaggtcctgcgccgcggggcttgggggtcgggggcggccgcgggcgagtagctgcgaggcaggtgccgcagtgcggtccgtcagcggcggcctcgcctcagccgcgtccccgtcagcatcttctctggatcggccgtggcggcgcggcctcacgggccgccggggccggggctgggctgcgtagggggcccctgagcctgcctccaccctccactttgagggcggcgcgtccggccggcttcttgcgcctgaaaaggcccttcagagtacggagatgcatttctcagtgaactgggattgagtcgcagcccgctgcgaagaagagaaggcagactttttagctgccactggctgccacgatgtttttgcatttgtatggtgccttcatttctagtggttgtcatcagtaattgctgaaatccctgcccctcccttcccttatgtatatttccggatgcaaaagttgagatggagtcattatttttatatgacttatatttcttaaggcgaatacaaagcacctctcaatagtttgtcagagttccaaattttaaggatttggaaacaggatgtgagtcgcatttttagggtcacatgtcaataaatggtagctttctgagtagaacctagattcctaagcattcagcaagaggtgaagaaatcagctaatacgtggcctcttactgcatatcatgtggtaatgtatttcatttgacagcagtccttagagggcatcatctttgttttgcagggtgatcaacctaaataaattacccaacactaaacaggttgggtgctggatttgatttcagatgaggtggtgccagcgcatcggccttttccattatatatgttgtgttgcacaagtaacgctattactgtgtgagaatgtgggagtgatggggactgagactggaggcacagacagtagtgaacaagaggccaagttgagaacggcttggaggaatgggtgctctgatctcagtgtgtcagtttaaaacctatgggaggccgggcgcggtggttcacgcctgtaatcccggcactttgggaggccgaagcaggcagatcacctgaggtcaggagtttgagaccagcctggccaacaaggcaaaacgccatctctactgcaaatataaaaattagccgggtgtgttggggcacacctgtaatcccagctactcaggaggctgaggtacgagaatcgcttgagcccgggaggcggaggttgcagtgagccgagatcgcgccattgcactccagcctgggcgatagagccagaccttgtctcagaagcaaaaacaaacatacaaacaaaccaaaaacctatgtgaggtgttgggaggtcctgcttgtggaatggcgatttaattctgcaccagtatgctcttgaaatctgcagatctctgtccctagaggtgcgggggttttgtgtgttaatgatagttacgttgtatccatgccccaaacgttttcgagttctttgtttctttcttctgtttctggctctggaaaggtctttctgatctactgagatactttgagggaattaattttaattcagtttttgaaattttaaaaatattccctttgatcctgtggtttaactgaacatctattgagattccatgttttaatattttgactgatattattttgattcagtgaggtataggcttttttgttttgggtctgagataaaataattgcttctgcacatggtttgaacatgttttccttactagcatagccgagttcatacagaacaagaacctgatcctgtcagcttctgaattgctcagtcttgtcagatgaggttcagttattattttccacaatgactaaatgtgatgtagtggaaaacatctttaagagctctgacttctctattccaggcagaaacaaaaatagaaatcctttaaaacagtgttgccaaactagagggagaactagggacctagagagagaggaagggaactaggattttgaataccatatcatgaggcgtatttgataaaattcagatatttagcctggagaagaaaggccaagggtgaacacatggaatttgaagtgatgtcatgtagaagagggagataggatccatttttttattattattgattccatccaccattcgtagacgataatagcacagtatagtggagttcctagagggaaggacacttagcccagactggggaggctgaggaaaatttcccatgggaggtgcctcccagggctaatgtgttgaaaagttggggtgggaagaaaaggtatttgaaacagaacagcatgtgtaaaagcatggcgatgtgagagcaaaggggcaagtagtttggtggggctgaaatgtacaggattaagttggggagataccagaaataaggctgatgaggtttcttgggtgttaatgctttgggttttgcctcagagtctctgggcagtgagagaaggcatttaagcagaagggtgaatgatcagatctgtattttgaagcagttatgggaaaggctggattagagagtggcatgacaagggtcataaggcacccaattctagcaaacctggagagggcctgaagagtgtgccctggacatagaggggaaaggatttgtgagataagaaaaaaagatgaaattcagtggctaattagctgtgttgctgaggaagatttaaagacgactgattccagccactgggtggaaggaaggtggtatcatccttcaagatagaatacaggagaagtgtgtggaaagatggtgaattgggtgtgtttttggtgtttgcagccttaggagtagttgggctcagcctgggagagatgtagaataggaaagcagtaagagtcaagaatggagccctcagatctccaaagtggagtatgctaggtgatccatttggatgccagatgaatgtactagaaattccatttatatcctttttgtttttgtttttgagacagggtctcactccgtcacccaggctggagtgcactggtgtgatcacagctcactgcagcctcgaccacccaggctcaagcgattctcccacctcagcctccctagtagctgggaccacaggcgcatgccaccatacccagctaattttttgtttgtttttgtagagatgaggtctcaaactcttgggctcaagtgatcctcctcctcagcctcccaaagtgctgggattacacgcaggtgtgagccatcgcacccagcctctatctttttttttttttttttccttttttgagacagagtcttgctctgtcacccaggctgaagtgcagtggcacgatctcggctcactacaacctccgcctctggggttcaagtgattcttgtccctcagcctcccaagtagctgggactactcttgttgcccaggctggaatgcaatggcatgatcttggctcactgcaagctccaccttccgggttcaagtgattctcctgcctcagtctcccgagtagctaggattacaggcatgcaccaccatgcctggctaattttgtatttttttagtggagacggggtttctccatgttggtcaggctggtcttgaactcccaacctcaggtgctctgcctcttgagtagctgggactacaggcatgcaccaccacatctgtctaacttgtgtatttttttggtagagacggggtttcactatgttcaccagactggtctcaaactcctgacctcaaatgatctgcctgcctcagcctctgaaagtgctgggattacaggcatgagccaccacacctggcctcatttttgtatttttagtagagatgaggtttcgccattatggccaggctggtcttgaactcttggcctcaagtgatccgcctgtcttggcctcccaaagtgctgggattacaggtgtgagccatcatgcctggcctatttttatcttatctctttttgaataataatggtcaggtattttgtagactgtccctcaatttgggtttatctgatgttttctcattattagattgggaaaaatactacacaggtatctcatccttttaaaaacttttatttttgtatgctttgtaatatagcacaaatcaaatacataatctattactatagtagaagtatatactttacatggagaggatgagagggacagagagaagaaagaagggctactttccaattttgggctgacagggttgaaatctaaaaagtttggctaccactgctttaaaggacaggaagggaaagaaacagaggagaagcagccaaagggattgcaaggaaaaccaggagccgtggctgcatgaagaccaaagcaggggcttttcaaggagggagttgccagtatcaaatgctttgggaagttagataaaattaagggatggaaattgccttttgagtttggggagtcgtttcagtggcatggtgggcttggaaggtgtgggcggccaggtggggtggctcacgcctgtaatcccagcactttgggaggccgaggcaggcggattgtttgaggtcaggagttcgagaccagtctggccaacgtagtgaaaccctgtctctaccaaaaaaatacacaagttagccagacgtggtggtgcgtgcctgtagtcccagccactcaggagtctgaggcaggagaatctcttgaacctgggaggtggaggttgcggtgagctgagatccttaccactgcactccaacctgggtgacagcaagaccctgtctcaaaaaataaaaataaaaaaaatttttaaaattttgtgggttaagtagtaaacttaaaatgaagtatagaagcaaacggtggttgactgctcttcctggattcttcctctgaaggggagcaaggctggtagctggtggagactggtaggaccaaaggaggttttttatggttttagttatagaatgggagtgccttgagcgtatttttatgctgaagtgaaagggccagtggagagggaaaaaactggtggtttgaagtgtgacttcattcattcattaactcaacaagtacttattgagcaccaatgtgtcgggctctgttctcagccctggggatagtgtgtgaacaagacgcactgaaatccccgccttcatggagcttgtattctatagggccatcttttgatggctattaccatatagccacctcactcctgatgtgttgtctgtcctagaagagtggcttccttaacaaacagtgaaggaacaaaggtccctaaaaagactgaacacaggattgtcttagtctggaggagggacatccctgccctcatgtctggagggagaggagttacagataggggcttatgcagataaatttgtggtggggagaggaagcaggtagctcaagaaattcctctgttttctctgtgaagctggagatgaggttatctggtgagactgagttggggagtgatagcataggaagttgaaagttaggaagcccatttcagttcagtacaaggaaaaacttttcaaaggactagaatgttaggaaaatggagccagttgctggcaaatgtagttcgtatattgaggtggtgtccccatcactggtagtattgaaatagaggaggggtgactttctgccaggtatccctgagacatgcttatacttataataagcagaagtttggacaaatgaccttcctctgtataggagtccctgactctaaggttttctaaagctctgggcttctgaaggactgttgtacaggcatggaagttgaaactacgaagctggggcaaagttatttggtataggtttgccagaattgaatgagtagggccgtgtctcaaaacaagggtatctccaaatcaaaatatggttttttaaatgtgtatggtacctggggctgggcgcggtggctcacgcctgtaatcccagcacatagggaggctgaggcgggccgatcacttgaggtcaggagtttgagaccagcttggctaacatggtgtcaccctgtctctactgaaaatacaaaatttagccaggcatggtggcacacacctgtaatcccagctacttgggaggctgaggcaggagaattgcttgaacctggcaggcagaggttgcagtgagccaatattgtgccactgcactccagcctaggcgacagtgtgagactctgtctcaaaacaaacaaacaaaatatgtgtatggttcttgggaagcataggtctcttggttccccatttttcttagtgtttgcagtactactactttagtgaaccaagatatctatcagttacaaaagaccattccattctgctaatttttttggtctgtcttcagctagagcagtttggacattcctgttctgacagctgtgccggattgaaatttgtaactcccgtgtatcagcaccaacctgaagccttttatttactgtcaatactgcaacaccaaaacatttactgttgcttccaactttatttccatcccctgttagtggtactttccttaggtcaagagaataacactgattctttactaaagtctaattttcccatactaggtgtggctaacatttgttctagacttggagcccatttttttaataggaaccccaaattaaaaaatcagccaggcatgatggcatgcatctgtagtcctagctactcagaaggctgaggcaggaggctgaggcaggaagatcacttgggccctggagtttgaggctgcagtgagtcatgcagactcaaactcagcttgggtgacatagccagaccctgtctctaaaaaaataactaggtacaaatttcatccttaaatgtaaacaaccaatcgtgttcactttggttgcccaaagactacaaaaagctcaggggctctgcccttaggcctggcagtgaagcagttcccaggcagagtttctgttttcaagggtgctcaggatttggagaaaagttcctttcagtaactgaaattagctacttgtccctgtgtaagctagacatcacgaggttaatagataatggatgaagaggccaaatacctcatccttagctgtggagagcttataaaatagtccctttattctcatctttatcttttaatcctgaatccttagactagttgactttatcattacagaataccttttcttaccctcttgacatgtcaactacaaatactgtttcctggactttgtttctaaagtctgaagtgtttttatgtttctacttgtgacatgtatgcccccccccccccccaacatttgacagtccttatttcactagggttgcctatgggacataaggaaagatgttacctatcctaagacatagtaacctggtaaaatcttatagtgaaataataggaactttatgaatttgcattgtgtagaaaggattgatggtagaaataatttagagatttcaagcttcttcctttttagtctgtgcctgggctttgttttttgttttttaaattttggagatatgccactgatttctaattcctgccaaattgccacatgcctctttaagagccatcagtaggaaggtgtctatatcattaggaaaccctgttttgtagttgtacctttgttgatctctttttgagacttttgtttgtttcttgttcttatcaggcagaccctgaaccagaataggttcagagaggctctgatagttgtacttttgttccagcagaatgtgtggacttaaattcttagagtgatactttgaaaaagaatttgttattgtttaggactcagcattttgaccagtcataatttaatacgctaagtcagtggtgaatggggaaacatgtattatatttaataattgtcaaggtaaatgatttatgatgttgataattcatttactgatctgttttcttttcaggtgttttggggaacgagtttagtatattaaaatcaccagggtctgttgttttccgaaatggaaattggcctataccaggagagcggatcccagacgtggctgcattgtccatgggcttctctgtgaaagaagtatgtatatattttttaaatgtttggagctgcttttaagaacatttttactgatttctgctaatagcccaaaaaagcatcaaacgaacgtaggtacgtttggtacagattacaaaagttaaaaagctcatctggaccaggcacagtggctcacgcctgtaatcccggcactctgggaggccgaggtgggaggctcagttgaacccaggaatttgagaccaacctgggcaacatagtgagactcccatctcaaaaataaatgaattaattttttaaaaacccatttgtagttgggaagattttggatgagtgcttcaagcttggcttctgaaacaaatcattagaaatcattaactatataattatttattcatagtagtgaaattctttgtatattagagaatgcatctgtcctactcttaataggatatctactttctggttttttttttttagtataggcgatagattcactatgaatgataaaatatatatgcattatgcctgaggttaggaaaataatgtggtcagtagccatggggcagccaaggaccttggtttcctagaatggagctatgacctgttgtagtaattggctgcttatgtgattgtagggggcgggagggtctagatccagtcaatgtgagagatcgaaaggtaagggctcagaagaaaggaaatacagcttgctcggtgctatcatctccttctctttgtaagtctggtgcttttgatgtggtctctagatatatatcatcagtcactgaaaggaacttttctccaaatcctgagcacccttgaaaacagaaactctacctgggaactgcttcactgccaggcctaagggcagagcccctgagctttttgtagtctttgggcaaccaaagtgaacaggattggttgtttacatttaaggatgaaatttgtacctagttatttttttagagacagggtctggctgtgtcacccaagctgagtttgagtctgcatgactcactgcagcctcaaactccagggcccaagtgatcttcctgcctcagcctcctgcctcagccttctgagtagctaggactacagatgcatgccatcacgcctagctgattttttaattttttgtagagacagggtctcgctatgttgtccaggctggtaggtctttaactcctggcctcaagcaatcctttctgcgtcagcctcccaaagtgctgggattacaggcacgagccaccacacccagcctgtacctaattctttttttgttttgttttgttttgttttttgctacagggtcccgctctatcacccaagctagagtgcagtggcctgatctcggcttactgcaacctccacctcccaggttcaagagattctcccacctcagcctccccggtagctgggaccacaggcgtacaacaccatgcccagatcatttttatattttttgtagagacaggattttgccatgttgctcaggctggtcttgaactcctggacacaaggaatctacctgcttcagcctcccaaagtgctgagatgacaggcgtgaacaccacacctgaccatctagttctttacaaccttaaacttgactactgatggctattaaaataactgagaaataattattagtaaactaatgatagttacttttagtaggaattgttttatttataaagatcttagtctaaagaggatgttttaatgaccatcttgctatgtctctgtgaaagataaaagtgatgctgtatatgagggcaaaaaatgatgtgggggaagaaaatttccatggctacatgaagaaaatattttgtgatctgaaatttgaaaggtacctatgttttgtttacttgcttgcttttttccacaaaaggtgtcagatgacttactattggactttatttcaaatctgtaaaattttaagaaaatgaagagggtagaaatcagcattcttgattaggggattgcaacgactgccacaaataaaatgtttactttccctgtgaattttccttgtcagtgtcatctcagaaccccttaactctgcttattagatgttattggggaggtgggttcctgagttgataattaagcaccgctttgtgcttttcaatgtttaggacctttcttggccaggactcgcagtgggtaacctgtttcatcgtcctcgggctaccgtcatggtgatggtgaagggagtgaacaaactggctctacccccaggcagtgtcatttcgtaccctttggagaatgtgagtatttattataaaaaattaaagggatgcattttacattttcccttgtcagctgtcattatgaattgcattctaaacatacttctcttatctgtttttgatgcacagtttcttttgaaattctttgacaaacacaatttctttttaagaaaattacatgatgattgtaattaactgaggcttggctgttctctgtggatgagagtactgtttaagataagagatagagaaattgccccactcagaatagccagaggcttgaaaaagagagccactaaaggagaaaccagttggggttgtatcctgctactgtttttttggccattgtcttgtcatcttccctgcaggattttacctcttttcgtgtgtaaggacactggaggctgcttgctggctcacttactccttcactggctattcaggcaatgtgggtgactgtgctgatctaagaggccctccttccattataagcatatagaagtgcttgaaagaatgtcacaaaaaacatttttactagcataactaaatttgaatgcaagagggggtgatatacacaggtgttacatatggatggaaaactcagaagccatagtggtgagcagaagctgacgctgaaactgtgtttcctgcagaaagccagggactagaaatgctgtcaacttgttcttgaaaagcagactagtaaaactagtaaagctggcttgctgcccttggctgttggacccaaagagtcccctgagataaattagaattagaattataggcttatgctgtgcagagtggttctttgcaaattcacatgacctgccccatagggacatctccatagccaagggctcctttggtcaaatacggaagatgagtggaatttacaaagcacctgaaggaaaaaaaatgccatgagaaacaggtgcaacaaacagaattcatctccttagaactacggagaataggccaatttccaagagatctaaaaatacatacattaaaattgtgaaaaaaagggccaggcatggtggctcacgcctgtaatcccagctttgggaggccaagatgggaggattgcttgaggccaggagtttgagaccagcttggtcaacatagcaagaccctatctctagggggaaaaaaaaagaaagaaagagaaaaaatttgtgaaaaaaaggaaggaacagaaactatgagggagttataagacatttttgatacatggtgctttagctgatacttcaaaatatttcataatttatattgtgattctttaacccatgagttatgtagaagtattttttccaaatgcatgggttttaaaaaagtaatttctaatttttaaatttctaagttcactgcattgtaatactgtggtctatgtgatgctgaagttttgggatttttttttttttcagactttcctgtggtcgagtatagattatttccaagtacacatggcatacttagaaaaaattactgtgcagtagtccacaaggcaaatctcaacaaacaataaagaatcagtgtcatataaactaacttctctgaccacaatgcagttaaatctgaaaataataataaaatgatatcttaaaagggtatttggagcccggcaccatggctcacgcctgtaatcccaacactttgagaggccaaggcgggtgaatcacttgaggcgaggagtccgagaccagcctggccaacatggctaaaccctgtctctactgaaaatacaaaaattagccaggcgtggtggcacgcatctgtagtcccagctactcagtggctgaggcacgagaattacttgaaactgggaggtggaggttgcagtgagctgggattgcgccactgcactccagcctgggtgacagagcgagactccatctgggaaaaaaaaaaaggtatttggatcaacatttctcctttccccatccacccgtctcccccagcgtcttctaaccatcattctactctacttctatgagttcaacttacaagtgaggtcatgtagtatttgtccttctatgcctggcttacttcacttaacataatgtcctccaggtttatccatgttgcaaatgacagtttcccgcgctttaaaggctgtatagtattccattatgtttatataccacattttctttctgcttttttcttttttttttgagacagaatcttgctctgtcgcccaggttggagtgcagtggcgcaatgtcatctcactgcaacttctgcctcctgggttcaagggattctggtgtctcagcctcctgagtagctgggattacaggtgcatgccaccacgcccagctaattttttgtatttttagtagagatgaggtttcatcatgttggccaggctggtctcgaactcctgagctcaggtgatccacccacctcagcctcccagtggatctcagtgctgggattacaggtgtgagccactgcacccagctgcacattatctttatccattcgtttgattatggacaccgaggttgcttccatccatatcttagaaattgtaaatagtgctgcagtgaacatgggagtgcagatatctcttcagcatactgacttcaattgctttggatatatatacccagaagtgggcttgctggatcatgctttagtgatctattgcacaaaatggtgactatattaaataataatgcattgtgtatttcaaaattgctaaaggagtagattttagatacttttaccacaaaaaaaatataagtatgtgaggtgatggatttgttcattagcctgatttaatcagtctactttgtaaacttataacaaaacataacattgtaccccataaatatatacagttactatttgtcagttaaaaataaaataaaaagtatttggaaatagtaacaaacagaagataacaactcctcagatttaaagcatatggaacacccagtaggcaaaagccagatccacacctacatacggtgaaattgaagagtcatcaaggaaatggaaaatcttaaaagctgtgagggagaaaagacactgtcattacaaaggaatgagagtagaaggaaagcaaggaaaatgtagtgattgtgtagtatgagctaggctgagtattatttgcattgtcataataatgaaatgatgctgatcaagtgaaaattttgatataactattgggtaagagtggggagatagaaacagaagcagagcgcatggatggctcagcgcatggatggggcagtggttggtgatgtgagagagctaaagcctcattttctataatggatagtaaatagacaagacctaaaattgaaaaatcaggagatgtaatttaagtgtcttatttagagatgttaaaagcaaaaaaagtcaacaagaaaagatagttggaatagatgcactcctaaataattcatgggttgaggaggaaatcactgtggaactttttaaattatttggaactgagtaacaatgaatgtagcatttatttacaaaattgggaggtgcagctaacgtggtaagaaaagggaaatttatagccttaaatgcatgttttagacaatttaggttgtctaagaatggaaattaatgagctaaagaaagcggaagaacttcagagtaaatacacataaagtagaaggaagggaacaatacagatcaaaaggcagattatttcacagggagcatttaagtcattttttatgtgatttctgtgaaaatcattgcagaagattttctttaaaattataaaaatccaaaatgccattttgagatttttattagcatgtaatccaaaaataaagatttaaaaacagactagcctcattttacatgagaagaagctgtgctgtgtgaggagctcattttattgcttggccctggttggctgctcaatgcttttcctagcagaagatggtaaatgagataaaagattcaggggcaaaccccacaaaacataaaaatcagagtatcttagaattccatttaacgaagcttccatttgattagctagctgttttagttagaatttcaagtcatacaggtacagaaatttgaggacagatatgcatctcccttacaatacagtgagagaaaaaccatcattcgatattaagcagccaagctttttactttttgagcttagctgcctatataattatttcttttccttcattggtgttcatttgattcatgagctgcttcaatttgatcgctatggacatggttcctaatcttcaactttcctgaaccgagcgccatttcactaagtgaagtgaggctggaaagtttgcatcatttgctcatgtattcccctcacagcctgaggaggtaaactctatgatcgctaaaggaaagcacctatagatgattcagggcggctgctagcagtatgcttttgcaactttgaactctcttccccctcttcacttactcattaactcattttgagagaatttggggaagagttaataagcatcttgagtaagagaaaaaaattatttcatttcacagaatcataaaattgatcacttaatattgatgctgggcctgggcatggtggctcacgcctgtaatcccagcactttgagaggccaaggcaggcagatcacatcaggccaggagtttgagactagcatggccaacttgatgaaaccccgtctctactaaaaatacaaaaattagccaggcgtggtggtgcgtgcctgtaatcccagctattcaggaggctgaggcaggagaatcacttgtacctgggaggtggaggctgcactgagccgagatcgcgccactgtactccagcctgggcaacagagtgaggctctgtctcaaaaaaaaaaaaatgtgatgctgggattttatcagtaagacataatcacattgatttctgcctgtatcatattagcgttactttgctacttgtaaacatgaatctttaagtagtaagggaactactgaatgaaagatcaatgtaagaaatctccattaaaacaaaaacatgactgtactgcttgttttaatacagtaatactgggaatgaaataatttttttaggggaaaaataactgtaatttatttttttaaatcatgtactgcaaaacaaatctatggggatagaagtcagaatttttgttacccttgagggtggaggtagtacttcgagggcgctgatagtgttctgtgtcgatctggctgggctacctgagtgcatgcatgtgtaaacatttgttgagctgttaccccaagatttgtatactatattatatgtattttgcactttaataaaaaaattgaaggaaaaaagtaggtcttatcaccattggttatttcaatctaataatatcaacatgtcctaagataaaggcttcaaaaaccttgtgacatacttaacaccttatctaagagtctttaggctatctgaagacaaatgttaaatctcattaaacatttttaaaattttgaaatgaaagatgaattccatttttatttcaattaaattcaatactcagattcctctaacctcttaaatgcaaattaaatactttattgtggaatatgcattcatcgtggcacatttagtcaatattgaaaccaaatgtattgctgcttcaaatacatgaatgaccaccagaaaatggtttgtgctagatatagtgttgtgtccatcaggtttaagttattttccactgaggcatgatgggagatacagacttggcttaccagggggctgtttaatcttctgtgccctcaaaagggcttgtttggaaatgatttcgggcttctaaatttccatagaaagtgctggaaaaaagtttaaggcttctttttaaataccatctgaatgatttttcttcccactttggttcacataataattgcgttcttactcttaaatttcaggcagttccttttagtcttgacagtgttgcaaattccattcactccttattttctgaggaaactcctgttgttttgcagttggctcccagtgaggaagtaagtgataagggttttattcaagacattttaaaaaataagcttttattatttgaaaattatgaaatgtaattttattatgaaaatataaaactaatttatgaacaatgttgtcatacctctgggtattggaactaatctgtagaatttgagcaacttaaaattttctattcttcttacagagagtgtatatggtagggaaggcaaactcagtgtttgaagacctttcagtcaccttgcgccagctccgtaatcgcctgtttcaagaaaactctgttctcagttcactccccctcaattctctgagtaggaacaatgaagtaagtgcagttattcaatgaatacatgaatatcattaatttccgtctttttaaaaaatagagacagggtctcactctgttgtccaggctggtcttgaactcctggcctcaagcaatcctgtcttggcctcccaaagtgctgggatcacaggcttgagccactgcatctggcctcccattccttatactacttgaaattttggaaattttgctattttagaaaatgaaagattgtgcacatttactgctggggtagattcttctttagtgtaattttcttatgactctcatgaataaactgatcctttttgtgagttgagctgtggtaaataacatcacattttagcacgagggttgccacctattaattcaaacaagccagaggtcatagatctacttggtgactggtggagctgtgtggatctggtaacttggaagccattgttcactgcctctgctgatttgttgccacatttttctcattcattctggacattgcagtggagggagccacctctacttttgactcctgtccttcagtttctccatctgctcatgcgccctcttaaccatgtggcatgccactttcgtggtggcctcccctttttatttgctgtggatgaccagggccatcatcctttattctctgatgtggaaactattcaagggaagtgagcaaactgggccaatggtaggatgtcattgcagagtgccaggatatcctgatgctttgaaggaaaaccactggagaacttggatgctttatcatggttttgccaaaaatatagctattgagtggcagtcactgtgctagggaatggccatcacctttttgttaggaaataatgttttatatgcattttcaattgaagcaaacataccaaatggaagataattatataaattcacttatatgatcaacatttgtaatatcctgtgccttgcttggtaaatggcaaataaagatctctggtgcacatttaaaagaatgctctttttttttgggctctctgaaggttgacctgctctttctttctgaactgcaagtgctacatgatatttcaagcttggtaagtaggctgctctaattttttaattccatttattttggtttctagagaatccttgaataatagtaaaggcagttgaaaagtttgattaagtatgccctagatttatgatcccatgaaaattgaaaaattagtggcaatattgggaattttgaacacatccatgttatagtcaaattattttgcatttctgctttttagggagagacaacatatcttccaagaacacaagcctgggcgtaagaacaccctggccatagtcctaacttggctgttgatttcttgtgagacttaattcctatctatatctttgggcctaaaatagaaataatagtttggactaataatgctgtcagtcaagtcaagaagggacgaaatccgtctgaagggtatttttttggtgaatgattttttaaaaatcatccttgttactgaaatagaaattcttatctgtttgctaccttctgaagttgttttccaaactttttcaacaggtgttggttcggggagtctggaagtgtagtgcattcctgggatcaaactggtccagccatctgttctttcatacgttggcccatacctgagtttttaaaactgaggaattttgttgaaagcttttattaaatatccaaggagtcttgtactgctcctaaacatgagattcgtgttggatttatcagaaacgcttattcaaaccagtttcttttgccaccattttagactatttgcatgttgtggtacactggtatggtttagtttagcctagtttagttaggcataaaactttaactggctgtgtttgacgtctttcatcttactttatccgctacctttttttgtttgtttgttctcctaagctgtctcgtcataagcatctagccaaggatcattctcctgatttatattcactggagctggcaggtttggatgaaattgggaagcgttatggggaagactctgaacaattcagagatgcttctaagatccttgttgacgctctgcaaaaggtaaatatcaatgcgacatgagaggttggagtatgaccatttcacttttagcctcttaatagaaaaatctgctgtttcaaacactgttgattgaactcttatttgccttctttggggctcctctaattatactggccaaggatggagtagggtcaaaaatgtatattgatatatttcttcctaatgctagaaagaacagcattaggaaaagttatctcacacaaagctttacaaaattattgtggtaaaatatatataacataaaattaccactttaaccatttttaattgtacagttcagtggtattaagtgcaagtacgttcacatgttgtacaaccatcaccatcttctatttctagaactttttcttcttccccaactgaaactctgtactccttaaacactatgagataactgaagtagaacacccagcacagtaccagacagtagatgcataataaatgctagttcccctctgcccttgaagttcttcacctgcatcctttcagtgaggcttcatattttaatctttatagatgtttgtgattaaccagagaccacttaggaagatttcatttctctttccaacttcccttcctccaatttatatgctgacaaattcagtctcttcttaaagtaattttagtctaaacatttgaatatatgttaaagcttaacacttttctgtatagttgagcaaaatcaaaacctttaagacttgcttattgtaagatgtagtatatttcatgagccaggaggtaagtgtacattgttcttgtagctgcacaaaagctttaaaaataattttaataagtatgtatttgactcactgcataaaatgataagtaggaggtaatgcatatgttaattagccaatgtggacttaagccattccacaatgtgtacatatttcaaaacaatatgttgatgtgataaatatatatgattttaatttgttaattaaaaatgaaaaaagtacatagttgagattcccaataatgttaataactaactttcagtttgcagatgacatgtacagtctttatggtgggaatgcagtggtagagttagtcactgtcaagtcatttgacacctccctcattaggaagacaaggactatccttgaggcaaaacaagcggtgagtatattttgagatcctgctttaaaactgtaaaattaacttcttataaaaaaaaaaaaaccaagtcctatatcacctaagggtgacatgaatgagcagtcagtaaatctgaaaaacaatttcagttaaaacgtaagcttcttgttcacatacatatgtgtgctttgccagtgatgatcagttctttagggttataatcagataatgcaagaatttgaattagggataaaagtaaatctgtccaagattataattcaaatatcagtacacacaaggagatatcagaagttaatgtggcgccaggtgcagtggcgtgcatctgtaattgcagcttctcaggaggccaaggcaggaggattgctttagctcaggaggagtttgaggccagtctgaggaaacatagcaagaccctgttttgaaaacaaaaagaagtgaatgtgtgcgggagtggtgtggtgcccacatcctatgggctctgcttttctagcaggcacattgtctttgtggcgtagtccctcacttactgagatcctctgtgtgcacctctttatgattttgatttacttaacagtttttttgggtatggatcttgctttgattttaagcatttagagggtcagggttaagcattaccatggttgctggccatggtaaaatacatatctgtttatgtgtatgtacgtgcacatttacatacatacatatatacttacagctgcagcagaacctagggagggtgatgggaaagagtagtgtagatgctccctaacatcctacgtctgagaacattgcttagggctggctgtatcacttgcagcagatagatatccactcaattacatacacctccgcttcagacccatttgcagccctcaccctgctcagttttactgaagtcagtgtgggacttggagtcggaaggtcgaagccagtgcctgtttgagatagtctagcgattactggtttgagattgtttctttctaaattaaattggggatggaaggacctttgtttcagacagcatgtcagtctagacaaccacccaagatttcccaccataaaacgtctagaaatgctagataaaaataaagatcttttaaaaagtacatagtttgggctgggtgtggtggctcacgcctgtaatcccagcactttgggaggttgaggcgggcggaacacctgaggccaggagttctagaccagcctgggcaacatggtgaaaccccgtctctactaaaaatacaaaaattagcctggtgtggtagcgggcacctgtaatcccagctacttggaaggctgaggcaggagaattgcttgtacccgggaggcagaggttgcagtgagccaagattgcaccactgcactctagcctgggagacacagcaagactccgtctcaaataaaaaaaaaattacaaaaataaaaatacatagttcagctcgcaagaaagggaaattctcttacagagtaaataaagaagaggaggccgggtgcggtggctcacacctgtaatcccagcactttgggaggccgaggtgggtggatcacaaggttaggagttcgagaccagcctggccaacatggtgaaactccgtctctactaaaaacacaaaaaatcagccgggcgtggtggcgcacgcctgtagtcccagctacttaggagtctgaggcagacaaatcgcttgaacccgggaggcggaggttgcagtgagctgagattgtgccactgtactccagcctgggtgacacagtgagactccatctcaaaaaaaaaaaaaaaaaccgaatgtggtaagcaggccgccctaaggatatttgccagctgggtcaccaagagtcctttggtgccttgtgtgtgggggatgggaatggacaactccagataaagctggggaccccgagagagctgtgccctcagtgagagggtagactggaaatttttgcccaccagcacagggaaacagaaaggcacctgggctctgggtggtcagcacatgtgttgagagtggggatgcctcccagagaattcttttttttttttttttttttttttttttggattttttggagataggatcttactctgtcacccagactggagtgcagtggcacaatctcaactcactgcagcctccacctcccagattcaagtgattctcctgcctcagcctcctgagtagctggaatcacaggcatgcaccaccacacccggctaatttttgtacttttagtagagatggggttttaccatgttggccaggctggtcttgaactcctggcctcaagtgatttgctcacctcagcctcccaaagtgctgggattacaggtgtaagctaccatgcccggcctatgagatttctttttagggtgatagaaatgttctagaattagattgtggtgataactatgaaaccactaaaattccttgacttgtacacttaaaatgggtaggaaaaagaacatgtttatcaaaaaaaaaaaaaggaaagaaacaaagaggtcttcatgggcgtgaaatcctttaacgtttgcctcagctctgagctccccgcaggtaaatatgcatgcctgtgtacccattctctcctacatttgaaatcactctcttccattagtttaaggagacaggagtttaaggaacatttactgagtactcacaacattccaggtgctggggctgtagggacaaatagatctcggttacattttcgttctcatcctcactgccaggcaccctgcccccatttctcccacctcatttgactgccgcctcctaacttgtctgaactcatctgtctctctgcttcccagctggctcctcccaaatccatcctacacattgtcatcaaagttatcttttttcttttctttttttgagacagggtctcgccctgtcccaggccggagtgcagtggcgcaatcatagctcactgtagcctcaaactcctgggctcaggtgatccacctgtctgagcctcctgagtagccagttctataggcttgagccaccacactcagctaatttttaattttaatgttatctttttaagacaaacctgatcatgtcactcactttctgcctaaagcttgtcaatggctccttattgcccagaggctcatgtcagattttctgtagcttccctgcttctagcttcatctcctgctgtgttcctacttttaaaattctctagccagaatgaatgatatttcccaaacagtgcctttgtcagaatgaattcagtttcccaaacaatgtttttacacagctctgtattttaaaaaaaagtgttaagtggatcatacatacataagtatataacatatttaatactagttatttaaataataaaaataataacactgtatagctccgttttcatatggctataaagagctacctgacactgggtaatttataaaggaaacaggtttgattgattcacagttccacatggctggggaggccttaggaaacttacaatcatggaggaaggggaaggggaggcaggcaccttcttcacaaggtggcaaaagagagagaaagtggcacacttttaaaccatcagagctcatgagaactcagtatcatgagaacagtatgggggaaactgcccccatgatccaatcacctcccaccaggtccctctctcgacacgtggggattacaaatcgagatgagatttgggtggggacacagagccaaaccatatcaatagcttaagagaatgcttgcttctttgaagctccctattttctccctctaccctccctcatccagaggtaactgctgtcctggatatcatgttaatcccttgcttttctttacagattgactgcatatgtatttgttcttaaacagtgttgtttggttttgcctgtatttgaattttatataaattgaatcatactacatgtatttttctgtgttctttgttcagtattctttttaagattcactcaggctgacaaatgtagctgtagtttagtcattttactgttacatattctgcttgtagggatataccacaattccattctgttgatgatttttttttttttttttttgagacggagttttgctcttgttgctcaggctggagtgcaatggcacagtcttggctcactgcaacctccacctgctgggttcaagcagttctcctgcctcagcctcccgagtagctgggattacaggcacctgccacgcctggctaatttcgtatttttagtagagacggggtttcaccatgttggccaggctgctctggaactcctgacctcaggtgatctgcccgccttggcctcccgaagtgctgagattacaggcatgagccactgtgcccagccttgctgctgatattcttatacatgtctcttggtacacatatagaaattttccctagcgtatggacttactggatcacaggatatgcacaccttcaactttattaggtattgtccagttttcccaagcatttggactggtttatacttccaccatcagtgcaagtgtcgtctccacaaaggcgctccttcttgcttcctcctagtataagtagctgttatgccacttatgaagaaatgtttgttagacaaatgaatcacagtcactagactgggataatttcctattttaaaattcttccctcttgatttttctttcttttctatattgtagaagaacccagcaagtccctataaccttgcatataagtataattttgaatattccgtggttttcaacatggtactttggataatgatcgccttggccttggctgtgattatcacctcttacaatatttggaacatggatcctggatatgatagcatcatttataggatgacaaaccagaagattcgaatggattgaatgttacctgtgccagaattagaaaagggggttggaaattggctgttttgttaaaatatatcttttagtgtgctttaaagtagatagtatactttacatttataaaaaaaaatcaaattttgttctttattttgtgtgtgcctgtgatgtttttctagagtgaattatagtattgacgtgaatcccactgtggtatagattccataatatgcttgaatattatgatatagccatttaataacattgatttcattctgtttaatgaatttggaaatatgcactgaaagaaatgtaaaacatttagaatagctcgtgttatggaaaaaagtgcactgaatttattagacaaacttacgaatgcttaacttctttacacagcataggtgaaaatcatatttgggctattgtatactatgaacaatttgtaaatgtcttaatttgatgtaaataactctgaaacaagagaaaaggtttttaacttagagtagccctaaaatatggatgtgcttatataatcgcttagttttggaactgtatctgagtaacagaggacagctgttttttaaccctcttctgcaagtttgttgacctacatgggctaatatggatactaaaaatactacattgatctaagaagaaactagccttgtggagtatatagatgcttttcattatacacacaaaaatccctgagggacattttgaggcatgaatataaaacatttttatttcagtaacttttccccctgtgtaagttactatggtttgtggtacaacttcattctatagaatattaagtggaagtgggtgaattctactttttatgttggagtggaccaatgtctatcaagagtgacaaataaagttaatgatgattccaa

SEQ ID NO: 470 - DNA, 25672 bp, Homo sapiens; identical to SEQ ID NO: 469
  source 1..25672: mol_type = other DNA

SEQ ID NO: 471 - DNA, 19336 bp, Homo sapiens
  source 1..19336: mol_type = other DNA
gcggagacaggactacgcgcctggagtaggagaaggaggaaaaaagagaccatagacttccatcctggcctagagcggcccttaaagtgccagggagaggagggcgggtggggaccactccagaattggccgctggcggtatcatggcgacccggaacccccctccccaaggtgagcggccagggcccgaagtggtatctgggacgcggctcacagctctcgaccttgctcctatggcacctcttccttcccctgccctaggattcttcgagctccattttttttttaaggcagccccttcgagcaccccctccgagctagactttttcctcccctctctgcggaactcaagcggagagccacccccacccccagcacagccctacctgcctcctgccttaccttcacctccggcccttcatctcccatcttcaaatgtattattttctttttttaaacgtctggactcaagtgatttcgctgagctccagactagttctctcaggaggacccctccccacccccattcctcccactgatgaaaatggaccctgctctgaccttgaccctactaaggtttggaggtgggggtgacccctcactactgtgtcattctgagttggccctggcttcgtgaccccaggctggtccccgggcctttgggaaagcagatgggggtcattgttgcagggtcctttactcttgaggccctggtctcaagaattgagttaaataaagtcagtagtttctatgtgggcatttttagctgtaggccagaactaatgagttgtaacagatttttaaaaagatgtatagaacatttctgacttttgattgactctacatttattttttgcattttgctattttgaagactatgaaagtgatgacgactcttatgaagtgttggatttaactgagtatgcaagaagacaccagtggtggaatcgagtgtttggccacagttcgggacctatggtagaaaaatactcagtagctacccagattgtaatgggtggcgttactggctggtgagaacaacgtctttttcattaaatttcatttgggggcctgacactgctgtcctttcatacatgggcaagaatcaccgtgcacaggcagtaggtctacactgttaattccagaagaggcttttctctgagttaaaattgatgtaatctacattcccaggctccctgttgagttttggcgatcccctcccccatgcccaccactgttcctcttctccctcctcatccttcttttgattctttatataatttccccattctcatgttcagcaaatgtcgtggatctgattcagtgatagtagataggaagaaatatatgagttaattatatgtaaatttttacatttcattcagtgctaactgctgaaaaaacctaagaaactcccacggtagaactggcctctagtattgtcagccctgtacagagcagtgtaaaatgctcagtatgaattattggtgatgatacagatgattctgttttttgtgggctcgttcagattatgataactctttgaaaaagagctgtagaacgttaattctgtgtttaaaggtctgattgcttacttgataatattgtggagtccattaagaagtagttaataaccatcagcctgaccagttaacatttcagaccacgtgataacacaatggctactgtggatctaattctgttcttataataaaaaaactagccagataacaaggggcagaaacaaatttgactgttttgaaaatgttcgtgactgtagagaaattttggagttagtgagggtacttaacttgtgcataagcgttttttcttagattcttatttaaattcatcttacatagatttaattgaaatatttacctgtttccacttgataagtataacgatgagttttttgatttgtgttttacatgcaccttggaataatgacccactcttctatgcctttttttttgcaaatgccattttatgatagaagtactcattgtgaagattctgtggtgcagaggtgcggcatttattcatgatatgtacttactagtgctgctgcaggaaaaaagcctgcaattagaagagagatgcctgtcagggcctggtcattcagataattctccacaggctgatagttcctctagccctgtaattcagggtatggctctgcttaaataagctcacaatttggttccatgggtgattggttaatgtcagtcagggcctaaagcccagtcttaaaacagactcaaaaataattgagaatagaattatcaagtcatttcattgtttctccttggagaccagactccttgtagatgaagccccatcattggcagaagtttgctcggaaagcctagagacagagcagcaggagataggttcattttagtgactgatgccatcaagcaatggatacacatgcttgtggaacacagtccaagggacattgtggctgctgcctgccttttctgttcccttttctgagcctttgttgctgacatatatgtatatatacatacacacacacacacacacacacacacacaacacacacatttggattacagccaggtgttggtccaggagctgtataatacaactctaataattatacaggcgatttgttgcaatgactatattcagtgtagtaaatttttgcaattttcttaggatgtaaaactgatgtgatattatggtgtatattaaggaggaacagttaataggcactaacctaacaagttagcaatttagaccaattcaagacatgtataggaggctgaggagattttattttgctgtaggtagctgtaggcttttgatcatgacaaaaaattaaaactattaggatgggtccttgctaggagagatgggaggtgttgagaccagttagagggcccttaaagtgttctggaagcaaggtaatgatgaccttgagagtggaaaggagaagacagtcaaataatgttttggagataaaatatatagaactgtggaggccaggtgcggtggcttacactggtaatcccagcactttgggaggccgaggcgggtggatcaccagaggtcaggagttcaagactagcctggccaacattgtgaaaccccgtctctactaaaaatacaacaattagctgggtgtggtggcgggcatctgtaatcccagctattcaggaggctgaggcaggagaattgcttgaacccgggaggcggaggttgcagtgggctgagatggcaccagtgcattccaacctgggtgacagagcgagctccatctaaaaaataaattaattaattaaattaaataacagaaatttattctctcacagttctggaggctagaagtctgaaatcaggatgtcaacagggtttgttccttcttggaggctcagagggagaaatctgttttatgtttctctgctagcttctggtggttgccagcaatccttgtcattccttggcttgtagacgtattactccagtctctgcctctgttgtcctcacatgtcgtcttccctctgtgtgcgtccttatcggattaaaggcccaccctgtccagtatgatctcatctgaacttattacatctgcagtgactctgttttcaaataaggtcacatttagaggttttgggaaggatatgaattttgagggggacaccattcaacccagtgcagaaggctagagttagaaatataggattcatttgcacagtgtggatctggaatgctgaagggaatgtgagctcactgaaggagcgaattaatgacaaaagaagtatgagctgacacagggtagatgagacacaaaaaacatttaatataaaaataggtagatatagataaggaggcctttagaaatgtgggctgaagtatagttattgagtggaacaacagctggacctgaaagggtaggaatggtaggaaagctttagataggtagagctaggaagaaacccctagaagcagggagattaatagcttgagcaaaggtgatgacctatttggaggttaatggggttggagccgaaggtgggggtcaaccaggtgtatggaccatcttgactgtattaagcaaaacatcacttttattacgggaggtttcagcttatacaaatgtaggaggaatataatgaacccctgagtacttgtcgttattttagtagctgctcttttttttctataaattctcctcctcttctctccgtcccttattttgaagcaaatttcagacattttagattgtgcatttttgactagcctgtataactgaggggtttctgagaaggtttctgagcaggtaagggatgtgatcaaaagaaatgcaaagacataagattttattaggaaagcaatgaaaagtagaagagggagagggtttagtacataattgattgttttcatcttttgttatttgattaaaggtgtgcaggatttctgttccagaaagttggaaaacttgcagcaactgcagtaggtggtggctttcttcttcttcaggtatgtcagagctttaagcacttgcctttgctttcatagaaggtggaatttttcttttaggcatcagtttatggaagagctacaatgagttttggaagctgacttttgtcttgaaagataacaatttaaatacttctgagttattaagcatagtttgatcccagctattaaaaagacagccattaccgagcgcattggctcacgcctgtaatcccagcactttgggaggcagaggcaggcagatcccttgaggtcagatgttcaagaccagcctggccaacatggtgaaatcccgtctctactgaaaatacaaaaattagctgccatggtggtgcacgcctgtagtagtcccagctacttgggaggctgagacaggagaattgcttgaacccaggaagcggaggttgcagtgagccgagatcgtgccattgcactcccgcctgggcaacaagagcaaaactctgtctccaaacaaaacaaaacaaaacaaaaatccataatcttatatctgaggcagatagatttgaagttttagttttgttcatattcttgtaagtataagatctaaaaatgctttgccattagaggatgtttatcagggcatcatctggcattcatgtctgtttggcatgtattttttcaaaaatatcattccttgaagatcaaatatagtaaatccaaaaattgaaaatctctacgaatgaatgtgagcagcacttttaaagatacagagaactgtcacttgtactagattttaaaaatgattgatgttcatagccaccagaatctgaattcagcacctaagccatcgatcatgtaataactagtgtagttgtagtacaaggggactagatttgtatgtatgaagcacagattttgagttgttcactaaacagccttttaaaaatatatatgttttctttcttttggtgacattattacgaataattgcttattacttgtggtaagaggtaaaaaaaatgattaatacctaaatttagttctttggatgaatatgccagcattagtacagatgataattttacttaagctgattttgacttggttttatatggaatcaagagcatattttattccatagctattttgaagactcagttgtcatttctgttagtgtaaaagggtactggactgaagcagagtttcctaaaatgttcacagaatggagagaagtgtatattttaatccactctgcatgtcagtttttcagaagtccatttcagttcactcaatatgcaccattcaaatccacattttgtcattgccacctcccacttttccgcatttagtacacgtagtctttgaagtttttaaggcagagcaacataggacctatctgcatcaaaccagtttttcccacaaatacgactaaccttgaaaactcagtagaaggaaagtgaaaggggaaataaagtaacaaatggcttttaggctaattgcctaatattctttaggcccactttcatatttttatgacctttcttatatttaaaggtaaatattagtttatttagaacttaaagcttttctagtaacaatatcaagtgttttccaatagatatttattacactgccatcttaaagtacacagtctcttcgttttaattttttggagttatacatccttataattcaaagggccaagtacttgtgcaaggcttgttacagattagagtaatcctccacctctctcactacccccatttttccatcccttgagacatccagtttgcactcttaactgattcttaaggtagtaatctctttttccctaaacaagttaattggacatttcttgatctttcagttttaggtgtgaactattggcttcccattatggaatgggaaaatttagctgtcatttattgacctgttttgttttccctatacttccccaaatctcacatacctgaatgctttcttccctctccctcaatcgtctgagtgtagttacttcccttttttcataattgtgttagatcattcattatatggagttcactgagattgattacttggagttcactgaacttcttgagcctgtgaatttatgtctttaatcatgtttgggaaggttttggccattatttctactaggaagtttgggattttttttttttttttttcgagacagagtctcgctctgtcgcccaggctagagtgcagtggcgcaatcttggctcactgcaacttccacctcccggattcaagtgattttcctgcctcagcctcccaagtagctgggattatagactacagctgcctgccacagcaccccgctaatttttgtatttttagtagagatggggtttcaccatcttggccaggctggtctagaactcttgacctattgatccacccgcctcggcctcccaaagtgctgggattacaggattacaggcgtgagccaccacgggcggccgggattatttcttttcttcttctttttttttttttttagacaagagttttgctcatgttgcctaggttggagtgcaatggcacaatctcggctcactgcaacctccgcctcctgggttcaagcgattctctttcctcagcctccgaagtagctgggattacaggcacctgccaccatgcctggctaatttttgtatttttagtagagatggggtttcaccatgttggccaggctggtctcgaactcctgacctcaggcgatccacccgccttggcctcccaaagtgctgggattacaggcgtgagccaccgcgcccagccaggattctttctttttttttttttttttttttttgagacagagtcttgctctgtcacccaggctggagtgcagtggtgcgatctcagctcactgcaagctccgcctcccagggtcacgccactctcctgcctcggcctctcaagtagctgggacaacaggcgcccgccaccaagcccggctaacttttttgtatttttttggtagagacagggttttgctctgttagccaggatgatctcgatctcctgacctcatgatctgcccgcctcggcctcccaaagttctgggattacaggtgtgagccaccgcacctggcccagtattatttctttagacaactactagttgtgtaaatcacctttcattgtcgtatgtatcaaatagttcatcagtttaaccgtctgggcaaacttggtcccagagtcatctgtcctgtttgctttctaggcctggtatacggctctcaccctgggatctctcttcaataccttctggatattccctttttgttttgggttgtttcttgtatgttatgtcttttgtttgtttgtttgttttttgagacagtcttgctctgttgcccaggctagagtgcagtggtacaatctcactcactacaaactctgcctcctgggctcaagggatcctcctgcctcagcctcccaagtagctgggattacaggcgtgtgccacatgcccgctaatttttgtatttttgtataatagggaggtcttgctatgttgcccaggctggtctcgaactcctgggctcaagcattccacccgccttggcctcccaaagtgttgggattacaggtgtaagccactgcacctggcctatcctatgtcttgatgtattctcttgttttggtggacacatcctccaatagctttcgtagaaaatgagaatgggaactatagtttttgagactttgcatgtctgaaaatttcttcattttatcctcacatttgtttgataatttattaatagctgtgtttaggtattgctccattgtcttctgacttccagtgttgctgttaaaagtttaaagtaattctaatttctgaacctttacatgtgtgggtttttttttttcctttcagttaatgcttataggattttcttttgtcctcagtattctgatttttcccagtgatgtgccttactgtgggcctattttcatccactgtgctggaaactcaaggggccctttcagtttggggaaattttctttatatttatttagttaatgatatcctgctctttaattttcccatctttttttctgtagttccagttatatggatctcctggaccagttgtctaatttttctttctttatttattttacagttttagacttatttttaattttttttaaatagagatgaggtcttgctatgttgcccaggctggtctcaagcaatcctcctgccttggcctcccaaaatgttgggattacaggtgtgagccactgactgcttggcctaataattttttttttttctttcttagatttggtagaacactaataatcttttcaattttccacttctatctttttggtctattttctgggagatttcttcaacttcaacaagttttttttgttgtttttgttttttgttttttttttgagacagagtctcactctgttcacctgggctggagtgcagtggtgcgatcttggctcactgcagccttgacctcccgggctcaggtgatttcttcacgccagcctcccaagtagctgggactacaggcatgcaccaccatgcctggctaattttttgtatttttagtagagatggagttttgctatgttgcccaggctggtcttgaactcctgagctcaagcgatccacccacctcggtctcccaaagtgctgggattacaaatgtgagccaccatgcccggctgttgttcttttaatgtgactttagcattctgtttcttgcttttccttcatggatgcagtgagcagtatcttttttaaaaatttttaatggctaatacttggatactatttttttgttgttgttgttttgttgttttttttttttttttttttttgagacggagtcttgctctgtcacccaggctggagtgcagtggcacgatctcggctcactgcaagctctgcctcccgggtttgcaccattctcctgcctcagcctcccgagtagctgggactacaggcgcctgccaccacacccagctaatttttgtatttttagtagagacagggtttcattgtgttagccaggatggtctcgatctcctgacctcatgatctgcctgcctcggcctcccaaagtgctgggattgcaggcgtgagccactgcgcctggccttggatactgtttttttaagagattggtgggatgtatttattatgtgtgacttgtcctcctccaacccattgtttcaaccaatgcaatggttagaagaccgtcccttcaataagacttttagaaacacatcatattactggagcactaacattcttggaaaccattttaattgcatgtctatagaccaagaaggcttgtgagagatggtatagttgaatgtcttctctaattcgaagatagaagcttcttagaaagtggcagagactgaaagttttccttagatcaccagatgctagttggaagtgactgccttaatagactgcaggttcagagtgttgatccaaatagtctgtcctacaagcaattcttagcatctacacagaatgttcatctagcagtttattttttcagctttacaaacaactctgcagtgactagccatttatatacagctttgcacacttgtctaagacaaagcaaaaatatacatatttaggccaggcatggtggctcacgcctgtaatcccagcactttgggaggccgaggcgggcggatcgcctgaggtcagaagttcgagacaagcctggccaacaaggtgaaaccccatctctactaaaagtacaaaattagccgggcatggtggtgcatgcctgtaatcccagctactcgggaggctgaggcaggaggatcatttgaacctgggaggcagaggttgcagtgagccgagatcatgtcattgcacgccagcctgggtgacaaaagcgaaactccgtctcaaaaaaaaaaaatatatatatatatacacacacacacacatatatatatttaagcctcttgattgtcaagtagccttccagaaagtattcctactatccccatatgagaggatccaccagcttttcccccttttcatactgtactcttggggttccttttttttttttttttttctgagacagagtttcactctgttgcccaggctggagtgcaagtggtgtgatcttggcttatggcagcctcagtctcccaggttcaagtgtttctcgtgccttagcctcccgagtagctgcaattacaggcgcacaccactgtctggctaatttttgtattttccgtagagatggggtttcaccatgttggccaggctggtcttgaactcttggcctcaagtgatccgccttcctcagcctcccaaagtgctgggattacaggcatgagccaccgtgccgggcctcatactgtactctttggaagggagtcactgtgtatagcccacatttcaggagtgtaattatgctccacctttctgaaggcagagtagctacataaattatttagaaatagtctgttggaaggtttgtctcttatttattcagtcatttatttatatcaatatggactcatggatatttattttatactttggtttataatctaatgctcttttattgctcaaattttaccagctttggccattaagagctctttcagttgtgcattgtcttttttaagctctctgaggacataaatgatcaagcttctgtgtgtgtgtgtgtgtgtgtgtgtgtgtgtgtgtgtgttttaagcttcttcctaccaagtccctgtttgtctaaggtgttttgttccccctccccaacctttttcctgcttgtttattttggtttctagttttcaagttaaaggccttcctccaagtctgatgatccttggttgtctgctcatatttaagaattgagcactaaaagttgatggaaagctctaaacaatatggacatgtggattgggctttcccttctctgggaaatctgaccagtccaagaaaaatgatctaaagataaggagttgggggtgggcagaatttcccgcagtgaaacagcccaattagatcagcatatggtgaagttcacaagcaaaaagccccatctacctgtttagagctttctggccaacatgaatcttcatctgaaagccgtgtgtgtgtgtgtgtgtgtgtgtgtgtgtgtgtgtgtgtgtgtgtgtgtgtgtgtctggccaacatgaatcttcatctgaaagccgtgtgtgtgtgtgtgtgtgtgtgtgtgtgtgtgtgtgtttttctggaaacagtctcactctctggcccaggctggagtgcagtggcgtgaccatgggtcactgcagccttgaactcctgaggctcaagcgatcctgccacttcagcctctcaagtagctgggactacaggtgcatgccaccatgtctggctaatttttgtattttttgtagagacagaatttcgccgtatagcccaggctggtctcaaactcctgggctcaagcagtctgcctgcttcaccctcccaaagtgttgggattataggcgtgagcaaccgagcctggcctctggcattattatttatttatttatttatttttgagacagtctccctctttcacccaggctggaatgcagtggcgagatctcagctcactgcagcctccgcctcctgggttcaagaaccgcctcctgattcttgtaactcagcctcctgagtagctgtgattaggtgtgagccaccacacccagctagttttttgtgtttttagtttcactgacatagtttcaccatgttgacatggctgatctcgaactcctggcctcaagtgatctgcccaccttggcctcccaaagtgctaggagtacaggggtgagccaccacgcccagcccctctgtcatcattattattattattttgagacagtgtctcactctgttgcccaggctggagtgcagtggcgtgatatcggctcactgtagtctctgcctcctgggttccagtgattcttttgcctcagccttccaagtagctgggattacaggcatgcgctactatgcccggctaatttttgtatttttagtagagatagggtttcaccatgttggccaggctggtcttgaactcctggcattaggtaatccgcctgcctcggcctcccaaagtgctaacattacaggcgtgagccacggagcccggcctggaattattttattttatttatttatttttaacttggaagcttttattctaataaaagtaccttatgtaatcccattaaatattttagtgttataggaagtcaaatgttcaaaaagcagtcatcactgccccattccctccccagtctgttggcttgcatttccttgtagttgcagatgaattttgtgtggacaagactgaattgggtcctgtatgtattggttggttaagttggttgtacctgaaccccacttggggcagattgcttgtccttggtcatctctgtactggagcagggtgctcaatttagactggtattcttcggtttgatcagaagtgtacttctcagctgggtgccgtggctcactgtaatcccagcactttgggagaccaaggcaggaggatggcttgaggccaagagtccaagaccagcctgggcaacatagtgagacttcatctctctctctcttttttaaggcattaatatctttagcatctcaaggtttttcatttttcctgcaagggaacagattctcaagggaatttgttcagtgatggtagatcactccagcatcaaagatcattctcttgttagtagacatgctaggttgggtcctttgggataatctagctcatccattttgttgctgagagtcattatttgagccaggttggttaatacagcttttgagatttagtctttattcattgtctttgttatcatttatttactatgtctcattcatctggcattagttgggactctagggatatagagattcacagcccatatggtcagtgctgagctagaagggtgtgtttagtgctgagagagcagagggaagacgctctgtctgcttggaggtgttagggaagtcttcttccaaagaggcgttagtatctttagcatctcaaggtttttcattttccttgcaactgtttgacattttcccccaaaacgtagagaattctttaaattatacaaaatctttatctcagataacactgggtttactaattatcagtgacaaatggctatgtaaaaatattttgtgtatagaatgctgtttgtgagaatttgtttaatctgtctcattaaaatggtttcctttattcatttgctggggattggggggtggataaggggtctcacccagggaatatagttaaggtttgttttttgtttttttaatttcacttccaatttaactcatggcatgaagattagctttttaaaaaaaactttgtaacttaaaatgttaagtcttgaaaatgacagttgaattgggagttgctgatgagtggtggtatagataatatttttgttctgccgggcgcggtggctcatgcctgtaatcccagcactttgggaggccgaggcgggtggatcacgaggtcaggagatcgagactatcctggctaacacggtgaaaccccttctctactaaaaaacaaaaaatcagccgggcgtggtggcaagtgcctgtagtcccagctactcgggaggctgagacaggagaatggcataaacccgggaggcggagcttgcggtgagcagagatcacgccactgcactccagcctgggcgacagagcgagactccgtctcaaaaaacaaaaataaaaaaaattttgttctaaccaaaaaataaagccatatacatacataaaatatttgtacttctcacaagctttggattaagaagaaatgttaagattcagcaaaaagtaaaattctgcaaaagcttcaaagtaatcaactattttgattacttagtgcaagccaataagaagtcttttcaatttatatgtagaattttcctaaggttcatcatcacctccatgcctgtgactcaaattgctgtatcaagtactaacagaaaaagccttcacttgccatttgatttgatcaccactgttttgctgaggctggagtttgaagtgatagtagatgaataaatacaagaagaaatgcagataaacaaattcttctatggagtcattcacagacaaaatagaacctaagatttctagtcagcctgtttatgcaaaatcagatatttttattatttaaagtattttctgtgtggctaaaagtcagtgtgttcattcagggtgcaaatggcaaaagaaaagtgatgcactaaaaaattacaaagaaagcataagcttgacagaagtgatttataatggtatatatggctattttattatttggaggcactgagttactggactggcttgcacacacactgttgttcctgttcagatattgcagtctctcagtagtaccatatgataatttttcttatgataggcatttagctatagttttattaaaaggatttatggcatgaaacttgtgtagagtgcagtttgttttatattctactttcaaaagcaattaccagaaagtattcttaatttaagtaaagagagctatttaaatacttaccaggctacttaaatttctttagtgatctaataactgattggcttatgatcccttataattaaagatctatttaattaaaaagtatttttaaattagctatataatctagataatctctgtatctttttaactaattccctattccaaaaggtgtgacagaatgatagtatagttaaaagacagtttttggaatcattttcccatcatgtactaaacactgttcatcacatctaaataattagttacttacttatgcttaatatctgttttccctaacagacctgaagctctctgaggataggggcttatgtctcccttattcagtacttagcatagggtaggcactagtgtctgttaaatgaataaactagtggagaaaaagcaatttcttagctataagttttataggttactagaactcttaagtgtttatatattcttggctattatagtcagcaacctagttggtatagtattgataatttttattatattttttgcagattgctagtcatagtggctatgtgcagattgactggaagagagttgaaaaagatgtaaataaagcaaaaagacagattaagaaacgagcgaacaaagcagcacctgaaatcaacaatttaattgaagaagtaagatgatatataattttgactttttttttttttttcctttttttggttaatgggtatcccttagcagaaaatgtgaccgggggggattactgtcttttttaaaaatggtgtttttggttatatatctagagtgttaagtaaaatttgagatcacaccactacttaaatcagtcattatttttttttttttggtggttatcatagattcccctgcatatctctagctcactttgatcttgttgtaaaaactaagaacattcttttcaacatatttcctctgcctttataaatgaacatgtacaggtgtagtaaaacttaaaagtacacattttttttcttgaggatagtttgaaaatatgtttttttaatatgattaatatattttattaatgttttcaggtgtaatttgaccctttacttttgtactgtttaaaatggaattgaatacttccttgcctttgtttttgttttatccttttacctccctcaactttttagtttgaaaaaattcaaaccagttaaaaagttgaaagacaaatatagtgaatatctcaatacccttcatctattcaccaaattgttcatgatttgccgtgtttactttatctgtgtgtgggtgacacacacagataattttttttccaaagtatttaagatgtcataacttttcatccctaaatacttcagtatgtatcttctaagagtacagatattctcttatacaactatgaatacgccccccccccttttttatttttttactgtgtgggaactgccacttcagaaactttttttttcttttttgagacgggttctcgccctgtagcccaggctggagtgcagtggcgtaatcttggctcactgcaaccttcgcctctcgggttcaagcgattctcctgccccagcctcctgagtagctggaattacaggcacgcgccacctctcccagctaattttttgtatctttagtagagacagggtttcaccatgttggccaggctggtctcgaactcctgacctcatgatccacccgcctcagtctcccgaagtgctgggattaggggcgtgagccaccaggcccggccaactgtttttttttgttttttttttttgttttttttgagacaggtctcattctgtctcgctgtgttgcttaggctggaatgcagtggcatcatcatggctcactacagccttgactcccctggctcaaatggtcctcccacctcagcctcccaagtagctgggactacaggtgtgcatgatgcctcggcctcccaaagtgccaggatcacaggcgtgagcccccatgcctggccaaatgccattattaataaaaaaaaaatgtaacatgagataatagtatttcctttctttgttaattttttttagacagggtcttgctctgtcacccaggctggagtgcaatggtgtgatcacagctcactgcagcctcgagcacctgggctcaagtgatcctcccacctcagcctctcaagtagctgggactacaggtgcatgcccagctaatttttatatttttgtagagatgaggttttgccatgttgccaggctggtctcaaactcctgggctcaagcagcctgcctgcctcagcctcccaatgtgctgggcattacaggtttgagccaccacacccagccagtattttctaatatgcagttcatattaatatttttctacaaaatatcttgtgtggctttttttttcccaattaagaattatatgccaggtacagtagttcactcctgtaatcccagcactttgggaggctgaggcaggaggatctcttgagcctaggagtttgagatcagcctgggtaagagagagagaccttgtctctacagaaaatacaaaaattagaacggtggcatgcacctatagtctcagctacttgggaggctgaggtgggaggattgcttgaggctgtgagacgtgattgtgccactgcactccagcctggctgacagaatgagaccctgttcccactcacccccccaaaaaaaattatatattgttttcggttatcatgtctatgaagtctcatttagtcttaaacagtcctttcatctgttaattttattcccccatctttcatggcactgacatttttgacacctctaggcagaatatcccacagtctggctttgtctgatggcttcctcatgattttattctggttaaacattttaccaaagtaatttgttttggttttgatcctgtacatttttttttctgttggctaaatggactattaataaataccattgtgcctgctgtgacaatttattaaataatctgtgttaataacttgatgatgggccattcatctctaccttacaggtagatttctttttacttgtgagatcattgctgcccatatacttattatctcaatagccaaggagcttactgggcatgactgtgttctctagtctccttcaattagtcagggacatttctgggatcttgcatgctatttgatacctgcagtagtaggtgcacaggaatttttgctgaatatttattgaattgaggaaaatagctgaaactgctacttggctctggattcagtaagaatttttttttgtgcatctttttattgtggtaaaatagttatacaaaaattttaccagtttaaccatttttaagcatacagttcagtggcattaagcatattcacatttttctgcaatcattaccactatttccagaactttttcatcatcccaaactctgtgcccattaaacattaattttcagtttccctctctccccagctcttaatgatctgtattctgctttctgactactcatacgagcagaatcatgtaatatctgttcttttttgtctaccttatttcactttgcataatgttttcaaggttcatccctgttgtagcataattaagagtatttttgtttaaactttgtttcaggcaacagaatttatcaagcagaacattgtgatatccagtggatttgtgggaggctttttgctcggacttgcatcttaaggacatgaatattctcccataacggattcaactatgagaagagaagtggcagcaataaggcagtctctcaaaagtcatactgccagagtctctagggcaaggagaaacaactagctggacaatactcaattcacaacttagcattttgccatctgaagcttggcaaactagtatctgctgtaaaacaacctatatggtatgtgaaccgtagtattcctgagcaaaacgtggctttcatcgctttgtaaaaatttgcatctgtttagaaactagcctataaaatatcaccattggatgtagatatggagagaaaagaaatatgttgggtttattgcttagcgaaatattctctttttatttaaataaaatgttcttcattgtgttttatggtatgtgtccataatttaaaattcatgttatagtttcagtattaaggctgactttttttttttaagatatgtttgcaataagttaaaaaactgtaatacccttttgtggaaagctttagaaatgatataattattaaagatattaaacagactctgctgatgtaatatg

SEQ ID NO: 472 - DNA, 2985 bp, Homo sapiens
  source 1..2985: mol_type = other DNA
aagcaatgcgcacgcgcagtggctttgaaggcggggcaacaaagcctgtggccgatgtggcgctcctcggcccgcgcttcagtggttatgacagtgttcgctctaaggggagaaggaatgtgtgaccatttccaacggtaagtcgtacaaaaggtccggggaggcgtacctgggcggcgagaggcgagagaactccgcgcgggctttccagtgcccaggcccctgccggctccgaagccgaaatcccttcttccacttcgttctcttgcagtggacgtggggtgttcccacccctctgtccccaaggccactgtttctgtcttccgctcctaggaataggaaaaagagtcgcgcctctggcatctgtggcagctccagagcgcggccctctagggtccaggcaggccacatggagcggggccctaggcctggctcagagcgtcctaagagcaacaggtctggctcagtcggggaagtggcctggaagaggggctttggagccgggcttcagagccagcaacctcccgaagtgagggaagaaagcctcattctgattgttctctacccagtggtggggctccggttcctaggatcttagacaccctgggagaatctggattttactttttagcggagaggtgttttctctgagaatgccagccagtggcaacatggcccgctaaaaaggcctgtagtaaacttgaggaaagttttctgtttcctgtctgggtctgggagaaagagaacaagtgttgttctccatgcttactatgcctgcctggtcaccaagcgggcctctttgggtcaagtatgacagagtctccctcaggtacacagcaaacccttctgtgctagagccagctggtgccagacactgttcatagatgtgtccaagacatttgtgtaatctatcagacacgtatttaatttccatttgaacatgagtgtttttcctctttctctttctcctctcaggttaacttgcattccccagatagtttggatgagttacaacctaaatctgcaaactcaatacagccagaccctgggaagtgactctctccaagcctcctgtacaagtcccaggaaaagagcctgttttcccttggacatgtgagcagtgaattactgctcattcagaatttcatgtgtatgtgttactgatggccaggtttagagataccaacctatttatttctagaggagaggtgatttgataaccttttcagatatcactatcagtaggcagaaaagggttaatagtatgatagggttaatatgtcctgaggagagtaaagaaattgcaaactgcagaagcacctgatctgtggccctggccagcatctctccatatcctgattctgtaagatcaagtgtttatgcagaaagagaagggactgatgatttgaatgtgaccagatgcagggcatgcccttattgccatgccagcatttgctattcatgatgttagtattcaaaaatcaagaaacacccttcctgggccattggtgtctactaatccattggaagaaaagactggaatccaccacttactagcttcttgggcctcagtcccctcttttctgccatagctaaggaccacctaacctagatggctgttgttattgttcaaagggacatctttagagcctcaagcccaggaatagcccgtggcaggcacctggtaaatgttagttttcattgtcctatcccaacactatgaaacatgcagcactctctgcaactgcccctgtggatttccataggcaggagagtatccagtgttgagtggagctggtattctcagaaacgaagcccctttcctcattttgcgccaatctcttcagtcatttttaccctagtagtataatgctttgtcaaagtcactgtcatctgatgttaacagttgttttcgccagatgacttttcaaaaggtaacttcaccataataccggttaatgtgataaaaacactgcatgtagccaattttttttttttttgagatggagttattggctcttgttgcccaggctagagtgcagcggcgtgatcttggctcactgcaacctccatctcgtgggttcaggtaattctcctgcctcagcctcccgagtggctgggattacaggcacacgccaccatgcccagctaatttttttgtatttttagtagagtcggggtttcactatatgttggccaggctggtctcgaactcctgacctcaggtgatccgcctgcctcagccttccaaagtgctggggttacaggtgtgagccactgcacccagccaaatattttcttatttatttatttattttagagacaggatgccattatgttgcctagtttggaatgcagtgtctatttagaggcgtgatcatggcatactatagcctcggctcaaaggaccctggtctcaaaggaccctgccaccttagcctcctgagtagctgggacaagtgtgcgccaccacacctggctaattttttaaattttttgtagagatagtgtctcgctatgttgcccacgctggtctggaattcctggactcaaggcctcttcctgccctcagacttccaaagtgttaggattacagggtgagtcaccacgcccagccagtgtgaattttctaatgctgagtaagttgtgatccagaagtaaatgtatctgcaagctgatttaaattgtagattttctcttcattgcatattttctgatgttgaataaagtctgagtattaactaaagtttttgcttcttaaatatgtaagaattgtcctcaaaatctctattcttgagcacagtagtaaaaatatttttacatacattgtatttcaagggttctgcataagcaaccttgttttattgtgacaatttatttgggaattgtatcaaatatataatactgagatgttctcattccttttgtgaaaatacttttgtttaaaaaccactgccttcaaatgaaaaccactaggtttgttat

SEQ ID NO: 473 - DNA, 32744 bp, Homo sapiens
  source 1..32744: mol_type = other DNA
gaaatgctcggctgacccggagggtggcgcttcgttcacactggctgttgtcatccgcccctgaggtttcaggctgtcggcagtgaagtaagcgggagggtgaggtggtgatggttttgatcgggggaaggggggacgggaggaatgacgggagtttacggggccgtggggtcatggggccacgggtgagcgtccttgtggggattgagtgacacaggcggtgggcgtgagtgttgggggcgaggttcggggccagcgagtgactaattgattgagtcactcagcgcttgtatcctcacccggtggtaactgccagacactcttgcaaatgtttcacattagcaggagccctgtgaggtgttacgatgattattttcatgttatagagagaaaacggtacagtgtggcttggcaacctgtccaaagtcccgtaggtagcaaacccgaggaatcctttttctttttcttttcctgtactttgtttatcatgtttattgtttccagtgtgtctcttcctccagactagaaatctggagctgggaatttgagattttgttcactgatggatttgcaacacggagaaccggctcatggaaggcaatcatttcttcagtgaataaaagtggcacagcagccagtcagttgattccaaagcccggactcaggaaggcagggtttcgctcactgaggataattgagctgtgcatgaatgttaactcttaaaactagaatgaggggttgtccctcttctgttgggtaaaaacctttgggtttcactcaacttcactgcatggaagggagcataggtgttgctaattgaatctcctgtggtcattgtgtttccagggtcagagtgcagacctgagaccactgctcaccgatttcagactccagtttatctgtgcctcggcttccccacttagtcgcagaagacttaggctgaggccccaggaagaggtgagttccctgggtcacaggcagagatctagtgctatagtgatggccccaactggggtgtgtttgtctctgaatcccttggtcctgccgccttggacacaagagaggtacgctgagctgaggcgagttggaggagaagcctcagcaagagcccagacccagatcctcagagcaaaggaggctcacgggacagcaggtcctagaagagctggacccgtagtggcctttgtccctcacttcagctgagacagagcaaagctggctctacttccaggtgccatggaggaccatgtgacagtgcagtttgattcctgctggaggagggacaggtgaaagtcacaggtggatggaggcatggatgtcccccatgggggcaggtgccctgctgtagtacctgcaaaggcgggatgaggctgggaaggatcacagccagccacagaggattggcctctcctagcacacctatttgtgcacccccatgcttccttctcttgccattggctatttctgaatttgagtcagccccacaccatcaaccaggcacctgcttccaggggaaatgctgagtgtccgttcatcctgaccaaagtgcagaaaatatatttttagtttatagaatttcagagtagtctctaggtatgctgtcatccagctctgctgccttatttcaatgcttaatgaaagtgggccaggggacatgacctgctaagctacacggagctgaaccctgttgtcctgatggtatcacagtgattgctgcagtatgaaatggttactctgcacagaatctccttgctggaactttcttttgaaaatctgccaaagaaggaggagcatggcaatcaaaatgcaaatcatgggaaaggaggaagtggtggggtgggagcagggtaggtggccagttagagaggtggatgcagggaagcaggcacagtggttttcagcccctcacagaactgacagtgcttggctgttacccacccagccccacacctctccttccctgcggccctttgagcgctggttgggctccttcctccaaaccacatgaagagatcttactcatacacacttggagagtgtcttttcacctctagggctctgtttgataagaagtgattttttaataaattttaatttttgtttcattagtaattaatattccttgtcaaaaatgcaaataaacaagaaaattaaaatcaccgaacaatgtaaccaatgtcagcatttgaataaatgctgtttgaggtcaggcgcggtggctcatgcctgtaatcccagcactttgggaggctgaggcggatggatcacctgaggtcaggagtttgaggccagcctgaccaacatgatgaaaccccgtctctactaaaaatacaaaaataattagctgggcatgttggtgcatgcctataattccagctacttgggatgctgaggcaggagaatcgcttgaacccgggaggtggaggttgcagtgagctgagatcatgccactgcactccagcctgggcaacaagagcaaaactgcatctcaaaaaaaaacaaaaaaaagaataaatgctgtttgagacttcatatttgtacatattgcttaacaaaaatgagattacactgcagttgctttgttggaacctccctttaaacacccaggaactgaaaacaaagttcagaaaccatctttaaagcctgtgtagtatgcttgttttgcacgtgtcatatttttttactaagtcccctttgctgcacatttagttgcttcgaagatttttttatttttttgtttatttttgagccaggctctgacgttgtcacacaggctggagtgcagggacgtgatcatggctcactaacctcgcactcctgggctcaagagaccctcccatctcagccttttgagtagctgggactacaggcatgcaccaccacgccagctaatttttttaattttcggttttgtagagacaaggccttgctatattgtctaggctggtcttgaactcctggcctcaatcaatcctccttcagcgccccccgcatgcagggattataggcagatttttcatagtggaaatgacaatggtgaacattttgcatctttgtgctaggaatagaactcttgagataaaggagatgttaagttgttactggtttctgacatgtagatggctttggacacaagtcatacatctgtccagtaagggagacaaagtttcatgtgcaaaacccacatgatcttagtagcgtcccatggaataggctgaagctaccaggccttatttttagatgattcttcccagggtgcaaaggtaattattattagggtggtgatgatgatcttatgtctatacccactgaactcaacccttctaattctgtatttgtagatctccatcctttgcaggagcacaacaagatggccatgtcccaggtgagttctaatgtacccctactttttttccagtgaaattgaggcaaagtttggaatctatataataaacttgaaaataccaattatcccctcttctctggctgttttctgttcaacttgtcctcagcctctggtttctctaatccttcccctcaccaggagagaggaaaaacaaaaagatacctctctctacttgttcttccagaaactgtacctcatcttttcttcttcttctcagagaagaattgtttaaatacatagattcaccttgctttttcctctttcttcacttctagatcgcttggtcttttttactgtgtttaagagaataagtttgtgtataatgttttaatgtacatagaagaaactagtagccaataaagtttctatttcttctccccccagtaccacgttcctccttagagatgtccactgttaacagttgggtgaaactgtggggtagatgcatttatgtcagtttaatgaactaaaaacgtacacgtatatattttttttatgcttttacacaaatggcatcatattcccatacccatcttgctttctgaacctgattatatcctgggtggtgttccttgtcaatatataaagattgttttaattcctatttcatagtatggatgtatcatgtaactatttttctattcacagatatttaggtttttaatttctttttcttttttttttttttttgtgacggagtttcactcttgttgcccaggctagagtgcaatggtgcgatatcggctcactgcaacctccgccttccaggttcaagcgattttcctgcctcagccaaccgagtacctgggattacaggcatgtgccaccatgcccagccaattttgtatttttactagagatgaggtttctccatgttggtcaggctggtctcgaactcccgacctcaggtgatctgtccacctcagcctcccaaagtgctgggattacaggtgtgagccaccgtgcctggccttttttttttttttttaaatggagttttgctcttgtcgcccaggctgcggtgcagtggcgtgatctcggctcactgcaacctctgcctcccaggttcaagcgattctcctatctcagccttccaagtagctgggattacgtgcacgtgccaccacacccggctaatatttgtatttttagtagagacggggctttaccatgttggccaggctggtctcgaactcctgacctcaggtgatctacccacctcgtcctcccaaagtgctgggattacaggcatgagccactgcacctggcctaatttttttttactattgtatacagtacctcatgaacaattttctctgtatctacttgctctgtagtaccagtgtttatggaggttatacctggaagtcgggttttgactaaaaggtagtgagacttaaatttgccctccgaaatccttcataattactcctttcactaaatgtaaagactagataatttctgcgttccatttttccaggctattaaagatgaaaaggtacccagttcattttgtgaagccacttaacctgaaatttgaagaggatactacaaaaaagaaaattatagaccagtttcccttaagaacatggatgtcaaaatgtaaaagtattctgaatagagcattaaaaaattgaacatttaaaagtaatgcatacacatagtaaaaattcaaatgaaagttttgttcaagaaaaggcaaaaaataattctcccatcctcaagattccttcattttttggtacagtctttcagagaatatgtatgcttatctgtctggatgtatgaatctttctttttttttttttgagacagagtctcgctctgtcgcccaggctggagtgcagtggcaaaatctcggctcactgcgagctccgcctcctgggttcccgccattctcctgcctcagcctcccgagtagctgggactacaggcgcctgcaaccacgcccggctaattttttgtatttttagtagagacggggtttcaccatgttatccaggatggtctcgatctcctgacctcgtgatccgccctcctcggcctcccagagtgctgggattacaggcgtgagcccccgcacccggccaggatgtatgaatctctttgtctgctcactcctgtgtgtgctagttctcactctgacacgctttttctctaacaaattagagctcattctggtccttctggtcttgtcttcatgatcattccactttacttgtatttagttgtccctagggtttcttactgcggcactattgtcattatggttctgatcattatttgttgtggctgctttcttgtgcattgtatgtgtagcagggtccctggcctctatctctactaggtgccagtagaatccctccccaagttttggcaaccaaagtatctgtagtcattgccaaatatcccctaggggagagaattatccaatgtttaaaaccagtggtctaccttgtttgcaaaagcaactgcttggtatttcattgcatgggaacaccaatattcatttacctttctcctagtgatgaacatttaggacatttctagtcttttgctgctataaacagcatagcaatgtacagtacattccgttgcctgcatgtgagtatgtcagatgtgagatttctaggtcagattcatgtgcatcatgaattttgattcagaactgtcaatttgccctccaaatagaatatactgatgtgtactcctagcggcagtatatgccttttcacgtaagtgggcaatcacagtgcattatccaatgctttgatttttgccatgatgcagcatataagaatggtgcattttaattcacatttcctgaaattagtgtcttttcatattttttgtttgtttgttttttggagacagggtctcagtctgtcacccaggctacagtatggtggcacgatcacagctcactgcagcttcgacctcctaggctcaggtgatcctcctgcctcagcctcctgaatagctgggaccacaggcgtgtgccaccacacctggctaatttttgtattttttgtagagataggattttgccatgttgcccaggctggtctctaactcctgagctcaagtgatctacctgtcttggtctcccaaagtgctgggattacaggtgggagccattgcactgggctatttgttttttgagacagagtcttgctgtgttgcccaggctggagtgcagtggtgtgatcatggctcactgcagcctcaacctcccaggctcaagcagtccttccacctcagcctcccaagtagccaggaatacaggtacatgccaccacacctggctaatttttcaattttttgtagagctggagtcttactgtgttggccaggttgttctccaatgcctgaattcaagcaattctcctaccctcgccttccagtatggtgagattacaggtgtgagccactgtgcccagtcttcttttcattttttttaaccatcatttgtacttccttatttcaattatttattctagtcatttgcctccttttctcttgggtgtggaattaatttgattgctggatggtagccctttatgttaactcaagtaaataagatctctatcatatatgttgcaaatattttttcatacttcatttgctttgacttgtcttattaattttggggagtggacacttacattttgttaatgtggtctaatttcacaatcttttgtgacttctagatttcttttattgcttatataggattctgtgagtcaagattataaaaatggtatttcagttatgtggaaaaagtggttactgaatgatggtggcacagttgagtatctgtatggaaacaaagactcttctatatcatataaaagtgaattctagattggttgtagacctaaatatatatttgaaaaattgggtaaaaatttaggaggatatatggataactttatgcagtgcaagaaacttttttttttttttgagatggagtctccctctgtggcccaggctggagtgcagtggcacgatctcggctcactgcaacctccgcctcccgggttcaagcagttctcccacctcagccacccaggtagctcagactacaggtatgtgccaccatacctggctaatttttgtatttttagtagagacggggtttcaccctgctggccaggccgatcttgaattcctgacctcaactgaactgcctgcctcaatctcccaaagtgctgggattacaggcgtgagccaccacgcctggccctgcaagaaacatttttaatgaagatggaaaacccagaaatcataaagggaaatattgtcagattagactgtattaaaatgttaaaacctgtagagtcagaagacatatttgaagctgagagaaaatacctgcaatgcatataatacacagaggatttatgtatgtaatatgaacaatgattaaaaaacaaaaaaatgtggtagaaaggagtcaaaaagataaggcaggcaatttataagaaaaaaatatgatgccatttgaaaggatatttactttttccagttttcaagccaggaaaacagggccaattttcattcctccctttctgttgcattccaacaaatgaacccagtctcagcccttctactgtttgcctttcagaatttttttgttttatatatatacaaaaccacaacattttgcatgggttgtttttaatgaaaatatgctcctactgtgcttttctgaaatttgcttttttttttttcatttagacaaaagtatcccaggcatccttatgtgtgagtcaattttttttttgagacagaatcttgctctacaggctggagtacagtggtgcgatctcggatcactgcaacctccacctcccgagttcaagagattctcctttctcagcctcctgagtagctgggattacaggctcacgccaccaggcccagctaatttttgtatttttagtagagatggggttttgccatgttggccaggctggtctcaaactcctgacctcagttgatccacctgcctcggcctcccaaagtcctaggattacaggcgtgagccaccacacccgtcctgtgtgagtcaatttttatcatgacagttccagagtatagatggagcaatttatttaactacgctctagtcctagtccacatgcagattatttaccaatcaggggtcatttttctcataagcaatgtcacctggtaatacagctgttgttctaccattttggggttcccaggaacacaggacatttgggttttctttctttttcttttatttttttctttttccttttttttgagacagagtctcactctgttgcccaggctgaagtgcagtggcatgattttggttcactgcaacctcagcctcctgggctcatgcagttcttccactttagcttcctgagtagctgggactacaggcacaaaccaccatgcccgtctaacttttttttttttttttttttgagacggagtcttgctgttgccaggctggagtgcaatggcacgatctcagctcactgcaacctctgcctcctaggttcaagcgattctcctgcctcatcctcctgagtagctgggactacaggtgcgtgccaccatgcccagctaatttttgtattcttagtagagacagggtttcaccatgttggccaggatggtctcgatctcttgacctcgtgatccgcctgcctcagcctcccaaagtgctgggattataggagtgagccactgcgcctagcccttttttatttttgtagagatggggtttcaccatgttgcccaggctggtttcaaactcctgagctcaagcgatccacctgccttggcctcccaaagtgctgagattacaggtgtgagccactgtgccagaccttttagagctttcttctactttttgttaatacgaataggactgccttggacatccttatgtacacataaatatttcactagaatagagtcctgtaaatgcaactgctggttaaagtaagaaacaaatacctttaataggtataaccaaattatgtatcaatcagcctttatatgagagtatttaatttctaatactcttcatcagcagtgactcttatggataaaagacaatatcttattatttaatgagcatatatgtgacttttagtgaggcttataatctttttgtgtttctaggcctctaacatttctgttgctatgagcattttattcatactgttgggctgtctcttcttactgatgtgttaaaggtatagggtaaaatcctagaaaggtcattgctttgttaaacggtatttgcaatgtaaaatttgatatatattaaccaattattcctcccaaaaatgctgtaaatagtttataacttctttggtgttttttctacatacttgactgtactaagtattattaacctttttagtttttaagactatgaaagggatacatggtaagttatatatttattttatattcattcagttatatgttaggttgtggtctttttcataatgatttgttagaattttagtgtataaaggaaattagcccattgttttgtatatttctaatacttttctcactttgatattgatgtttcataatataatttttggccaagtgctgtggctcatgcctgtaaccccagcacttggaaggctgaggcaggagaattgcttaagctcgggaatttgagactagcctgggcaacatggcaaaaccttgtctctacaaaaaatacaaaaattagctggacgtggtggtgcgtgcctatagttccagctacgagggaagctgaggtgggaggatcgcttgagcccaggaggtcgaggctgcagtgatctgtgagcatgccactgcattccagcctgggcaacaacagcaaaaccctgtctccaaaaaaaaagaaaaaaaattcattctgctatttagaaatttctaatgtctaggcagtcatgttgatcagtctgtgactgtatgtcttctgaatttggggattgcttagaaaggcttttagccggctggaagcggtggctcacacctgtaatcccagcactttgggaggttgaggttggtggatcacttgaggttaggagttcgagaccagcctggccaacatggtgaaacaccgtctctactaaaaatacaaaaattagttgggtatggtggcgggtgcctgtagtcccagctacttgggaggctgaggcaggaaaatcactcgaacccaggaggcagaggttgcagtgagctgagatcacaacactgcactccagcctgggcaacagagtgagactatgtcttgaaaaaaaaaacacagaaaagaaaggcttttagccactgtaaaattataaaaactttgatctattttatggttatcttgtacacatttaaatctctaaggctgggtgcggtggctcacaccagtaattccagcaatttgggaagctgacacgggtggatcatttgagctcagaagttcgagaccagcctggcaatatggtgaaacctcgtttctacaaaaaatacaaaaattagctgggtgaggtggcgtgtgcctggagtcccagatactttgcggggctgaggcaggaggatcacttgagttcaggaggatcgcttgagcccgggaggttgaggctgcagtgagccataatctcaccactgcactccggcctggatgacagagggagacctgtctcatccctgtgtaatttatttgagggttcagagtgagatgggtaattcagttttattgagttattttcctccataaatacctagccagaagatatggtttggctgtgtccccacccaaaatctcatcttgaattgtaatccccacgtgtcaagggcgggaccaggtgaaggtaatgggtcatgggggcggtttcccccatgctgttctcatgataataagtgagtctcatgagagctgatggttttataagcttctggcatttcccctgcttgcacatctccttcctgccaccttgtaaagaaggtgtcttgcttccccttcaccttccgccatgagtgtaaattttctgaggcctccccagccatgctgaactgagtcaattaaacctctttcctttataaatcagccagtctcaggtatgtctttatcaacagcatgagaacggactaatccaccagattttcctaatgtcatcttttctgcatagattttatgtgtgtgtgtgtgtatatatatatatatatatatatatttttttttttttttttttgagacagggtctcactctatcacccaggctggaggactggagtgcagtggcatgatctcggctcactgcaacctccacctcccgggtacaagcgattctcctgcctcagcctcctgagtagctgggattataggtgattctcctgcctcagcctcccgagtagctgggattataggcgtgcaccaccacacctggctaatttttgtatttttagtagagacagggtttctccatgttggccaggctggtctcgaactcctgacctcaagtgatccactcgcctcggactcccaaagtgctgggatttcaggtgtgagccaccgtgtctggctgatttatttttgctgtaaccagccagtgggttattcccacccactgcacagtcaaaaccaattcactgagaccacggcattgcaataaagagtttaattgatgtaagtctggccatgccacatgggagatggagttattactcaaatcaatctccgaaaatttggagggtagggtttttcaaggatagtttggtaggccatggattcagcttctgggtggggccataggaccggttggtggaggttggccagtcctggtggagccactggtcgtcagaaatgcaaaaacttgaaaaaatgcctcaaaaggccaatcttaggttctataatggtgatattatctgcgggagtaattggggagttccaaatcttgtgacctccggaataatagctggaaatcttttatgtctacatgttagcagattttagcctcctcatatcctcctaaccttgtggcctctcagctttacaaaggtggttgagttttgcagaaggctattataagcttgtccaacccacagcccatgagccacatgcggcccaggatggctttgaatgcggcccaatacaaatttgtaaactttcttaaaacattatgagacttattgtgactttttttgtgatttttattttttagctcatcggctatctttagtgttggtgtattttatatgtggcccaagacaattcttccaatatggcccaggaaagccaaaagattggacacctgtggtctattatcttttaaactataaaacaaatgtctctcaaagttttcttgggccaggccgaggaatgattaagggtaatttggaggttaaaggcaagataggggttggttagatcagatctctttcaatgtcataattttctcactcttacaatttttgtgaaggcagtatcattcttttttgaacttgacactgcgtggtttatttagtccaataattttttttgcgacttaacgagacaaagggtttaaactccattgatgttttttctctctctctaatgatgaatttaccaaaacacaaagatatgtgacacaatgaattgctcatgttttaaactaagaactatgttttttctctttgctatatgattagtagaatgagtcagttcccaagacatgaccagtttcaaagtggagtgaaaatgcagaggttttctgcatgatacttctcaaagtcaccaggagactattaaaagatttgagatgaagtaacacagtagtaagattcctaatagaggaggtttagttgttaagagagtcacatacatactttgttttgttttgttttttgtttttttgagacggagttttgctcttgttgcccaggctggagtgcagtggcgtgatctcggctcatcactgcaacctccaccttctggtttcaagcgattcccctgcctcagccgcctgagtagctgggattacaggcgcccgccaccacgcctggctaatttttgtatttttagtaaagacggagtttcatcatgttggccaggctggtctcgaactcctgacctcgtgattcgcctgcctcggcttcccaaagtgctgggatcacaggcgtgagccaccgcgcctggccacatacatatgttttattttttttaatttattttattttattttattattttttattatactttaagttctagggtacatgtgcacaggcagtatcatttttatgaagtaacctctgacactctactcagaggatctgttagtggttattaactttcatcatcattgtcatatttagctgtgtgtgactagaaacgtgacagtggaatgatggctgttttactgggtctgagagataaggaaggaaacccaagtttttcctactgtctactctcacttgacacaacactcctgacacgagatgtaatcccaggccccaggctgtttacccaaataccaagtcattctccagtggacaccagctgggtctcctctaagtcaattccattctgacaccatctacctggagttagcgtcagctcccacaggttgaggcttagtcccacaagactacccccacctgagatgccagtctcgagtagggtatcatctatacatctgattgatgggacacaaatcaggggttcccttgactccctcctggtgtttgattaatttgctagagtgagtcacagaactaacggaaactgaatttcccctatttgttataaaggatattacagaagatacagatgaaccgccagatggaagagatgcatagggcaagggatgtgggaaggtccacagacctttcatgccctctctggactcactaccatccgggaaccaccaagtgttcagctgtgtggaagctgtctgaacccacccagccctttggttgttgtccttgttgttgtttttgagaaacaaggtcttgctctgtcccccaggctggagaacagtggtgcagtcttggctcactgcaggcccaacctcctggcctcaagtgatcctcccttctcagccacccttagtgctgggatcacaggagccagccaccacacccagccacagtggggtttttcggaggcttcatcacagaggcatgatcatcattggcccttggtgatcaactcaaccttcatctcctctcccctcccaggagttttgaggatggagatgaaattcccaaccttctaatcctgtctggttttctggtgaccagcttccatccagaagctacctaggggcagccagctaacagtcatctcattagcatataaaagacactttgatcacttcagaggctattccaagggttgcaggagcttcttgccaggagacaggacaaaaaccaaatatatatttcacaatatcaaaccaggtgacattactccagataaaattgactctggattggttaaacaaactgcatctggactggaggactgagtaaactatgactggctggtaggaagccatggattggggttttctgagcacattgtcactcagtgatatgtaactgggcccatcttttgctgggatcctcgaagccatgccactgggaccattacaagagatactggtctatggaacaggttagggcttccaagcaacatcatcctagcactccgcagtgtggttttgttccccagcaccggagctatcacgagggaggggcagattgggctaacagctcctggattgctctgagaagccctcctgctggagaaacctgcctgtccccgccctctggcacactggctttcctgcccctctcctgcacagctgggtaaactggtgccactgtggctgatttgggccttatgggtgcagcgagtggcttgaattgaaggccaccaagtgtgggcgttacaggataggatctggagcagaaacaggcgggttattagtctttgcaaggaattgggggcacttgtagaagtgagttcttgtttggtggtgacaaggccaagcacagacctttccccttttgcttcagtcagctgcccaggccacaaacctctggcttcctgttctttgtttcatgattgatgagtgaaggttagaacggtttgtcatgattgattagctatgtttagaactgtttgttgtagctctgtgtcccctgcaaggcctgctctgtcagcgctaagcagaattgacttcttcctttgtggacaacccggaccccgtcctacatctgtcactgtccctgtgaggcaggcttcctcgctgcctctgtttcttctatgagtgtctaagtgtcgcttttctccctccactaaactgaagctccttgagtttaagaggtgtctttttttttttttttttgagatggagtctcgccctgttgcccaggctggagtgcaatggcgtgatcttggctcactgcatcctccgcctcctgggttcaaacgattctcctacgccagcctcccgagtagctgggattacaggtgcccgccaccatgcccagctattttttgtatttttagtagagatgcggttttaccatattggccaggctggtcttgaactcctgaccttgtgatccgcccgcctaggcctcccaaagtgctgggattacaggcgtgagccatcacgcccggccaaggtgtcattttgtatcaatctttatgtcacaggacttaccagcctggcctctattcagtaaacatgtgttgaatgaatgaatttccagggtaagatatttctcatactctatctctttctcctataaagttcaaaatgattttagtcatatactctatgtaatatgctatgccaaactgactagtgactggcataagaacagttatataaagaaaggccagcgtggatgcgggagccagactgcgtggattcgaatccctcattcctggctgtgtgacctggactggttatttaggctctgtgtgcctcacactcttcatctgtcaagttccttctagggtggcggcgaagactgaaatctttagtacatgtaaaggacctcaaagggcacagagtaagccctccgtgtgtgtgaggtgccatgtcccagtgccccaggctggtcctggggtgctaaagaggaatgtgccgttacaggaatcattgaccttcaaggacgtgtttgtggacttcaccctggaggagtggcagcaactggactctgcccagaagaacctctacagggatgtcatgcttgagaactacagccacctggtgtccgtgggtgagggaccgcgccacagggtgatgcagaatgcctccagtactgtgtttctttctcagctgctccaagctctggggcctaggaacaatgagtgtgggttaccaccctcagtgagtttgggttactgcccactgtgtagtatttgtagtctcctttggacactggagagcatattggtgcccttgcttgctatgtgaatgttctgtactgaggggcagatagctgtgtgcatggggccatcaccgaggccgtgccaccttcagcctgcaggggtgggcctaggttctggaattcctcagcattaataacaaagtcctatgtcatgtcccctaaacagggcatctagttgggaagccagatgtgatcttcaggttgggaccaggtgacgagtcctggatggcagatggagggaccccggtacggacctgtgcaggtgaggacaggccaggtgagtcaggccagggaaaagggaccaggttggttggtgagagcttggcctctgggatgtgctcaggagctcttctcagagcctcggacttgtggacatgcctaggctctgatgagcagaactgttgtcatgtccaaatgaggcttctgcctggccgccggttacaggctctgtgttctttgcttggcattcacatagattgtggccactcttgttctgagatcccatttctaccttccagcctcctggcttgttagtgagaagtgccaagccccttctcattcctctcaccctgtcctttctggaagcttttagaactttttctcccttcttgtgcttatgtatttttaccagactagatgcaaatgtcagcatttcctctttattgggcatactgtgggccctttcaggctgaaagttggagtcttttttttttttttagactcaaggaaattatcatacattattttttggagttggtataggcaacaaagctttgctggtgacctttactctacccagcctggtacccaccatgttcttgcctgctcttattttgtggtaaacactgtaaacctcacactgttttctattttctctttgtattccttcccagactcttacaaatctgacttgatgccacctgttttcagattcctcctgttttcagtaccttcctcccactcaactcttgttttttatattatctctttatttattcaaaaataaacttgagagaacattattcccaggttggaatactttataaaacactgctaaactgttttccaacatggctataccactttttttttccgctagcaatgtatgtgagttccacgtgtttcacatccttgccagcacttggtattgttagtgttagtccttttttctagtaggtgtgtagggggatctcattgtgatttaattttgcatttttctaatgatgaatattgttgagcccttatttgctatctttatatcttctttgtggaagtatttgttgtaatcttttgccatttttctttgctattaaattgtaaggttctttatatatcttttttttttttttgagatggagtcttgctctgttgcccaggctggagtgcagtggtgcaatctcagctcactgcaacctcgcctcctgggttcaagcaagtctcctgcctcagcctcccgagtagctgggattacaggcacccgccaccatgcccagctaatttttgtatttttagtagagacgaggttttgccatgttggccaggctggtctcgaactgacctcaggtgattcacctgccttggcctcctggagggctgggattacaggtgtgagccactgtgcccagcaggttctttatatattcttgatgcaagtcctttaagtatgtactcccagattatggcttctttttttcttaactgtgctttgtagagtagacgtttttaattttgataaggctgagtttatcaagttcttttatggttcatgccttttgtatcctatctaacaaatctctgactcagagcaatggagatttttctcctatgccttctttcagaagatttataattttagctcttaaatttagacctatgacaaagaatgagttaagtttgtaaatctgacatgaggtgagggtcagggggctttttgcatatgtatatccaatttttccagcagcagttttgaaaatactcttcgttgttgttgttgttgttgacttactttgccatcgttgctgataacctttgaatggccgggcacagtgactcagacttgtaatccaagcactttgggaggctgaggtgggaggatcagttgagcctaggagcttgagactagcctaggcaacatagtgagcccccgtgtataaaatatttaaaaaatttgccaaccatgatggcatgcacttgtactccccactacttgggaggttgaggtgggaggattgcttgagcacgagaggacgaggctgcagtgagccgtgatcacgccactgccactccagcctggggtatagcaagaccctgtctcaaaaaaaaccaaacagttgaacagagatgtgtctgtctatacatcattaatacactgtttaattactgtagcctaacattaagtgttcaaatcaggaagtatgagttttccaactttgttcttcctttcctaatgttttgcctattctaggtccttggtatttttatataaatcttagaatcagcttgtgaatttgtacacaaaagcccgcagggatttttgtatgggattacactgaatctgtggatcattgatatactgacaatattgagtcttccaattaatgaatagcatgtatctctatttagatcttcttaaattttatctcaatgttttgtagttttgaatgcataagtctttcacattttgtttaattaataccagctttttttgttcttataagatactataagtggtattttgtttaatttcaatttcccattggccagtactatcttatagaaatgccattgatttttgtatattgatcttgtaccctgggacctttctaagtgtacatattaaaacttgtaacttttttgtagatagcttgtaacttttttgtagatagcttgacatttcctatgtaaacaatcatgtagttgtaaataaagacagttttatttcttcccttccaatctggatgtcctttacttctttttttgccctcttttttttttttgagaaggagtttcgcttttgttgcccaggctggagtgcaatggtatgatcttggcttaccacaacctccgcctcctgggttcaagcgattcttctgcctcagcctcccaagtagctgggattacaggcatgcaccaccatgcccagctaatttttttttttttttttgtatttttagtagagatggggtttctccatgttcatcaggctggtctcgaactcccagcctcaggtgatctgcctgcctcggcctcccaaagtgctgggattacaggtatgagccaccatgcccggcctctttttgccattttttactggctaggatctttagtattgtgttgaataggcatagtgagaatgacttctttgctttattcctgattttagggcaaaagtactcactttctcatcattaagtataattttttatttgtagagttttccattggtgggctgacaatgcttgaggattattccttttaatcttagttttttgaatttttatcatgaattgatgctgaatgttgcaaatgctttttctgcatcaatgaatatgatcatacttcttctcctttatttttaaattaattaattattattatatttagagatggagtctcgttctgttcccaaggctggagtgcagtggtatggtcatagctcattgcagcctcgaacgcctgtgctgaagtgatcttcctgccttagcctccagagtagctgggactacaggcatgtaccaccatgcccagctattttttaaattttttgtaaagatgaggtcttgttgtgttgcccagactggtcttgaactcctggcctcaagtgatcctccatctcagcctcccaaagtgctgggattacaggtgtgagctaccatgcctagtcaatttgcagatttttcttttttttttttttctttttttcttttcgagacggaatctctgttgcccaggctggagtgcagtggcacgatctcagctcactgcaacctccacctcccaagttcaagcgtttctcccacctcagcatccctgggattacaggcacctgccaccatgcctggctaattttttttgtgtgtatatatatagagacggggtttcttcgtgttggtcaggctggtctcgaactcccctgacctcaggtgatccacccgctttggcctcacaaagtgctggggttacaggtgtgagccaccatgcctagccaatttgcagatactgaaccagcctttcattacctgtgtaaacccctcttgataatgacctatcattcctttgatatgctcctatttatttttgctcatattttgttattttgcatctatgctatgtgtcataatcatttgtagttttcttcacttacactgtttgtgtctggttttgacgtcagggttatgctggcctcataaaatgagttgggaagtgtttcctcctcttctgttttctgaaatttatataggactagcattatttcttaaatgttctgtagacttcatcagtgaaaacatctgggcctagagttttcttggagggtaagttttgaactacaaattctttttttttttttttgagatggagttttgctcttgtcgcccaggctggagtgcaatggcacgatctcggctcaccacaacctctacctcttggttcgagcaattctcttgcttcagcctcctgagtaactgggaatacaggcaaacgccaccatgcccagctaatttttgtgtttttagtagacacagggtttcaccatgttggccagggtggtctcagactcctgatgtcaggtgatctaccagcctcggcttctcaaagtgctaggattacaggtgtgagccactgcacccggctacaaatttgtttttttataattataggtatattcagataactcttttcttcttgagcaagctttggtggtttgtggcctggaaggaatttgtctcatctaaactaccaagtttttgatataaagttttttttggccaggtggggtggctcacgcctgtaatcccagcactttgggaggcctaggcagacggatctcgaggtcaggagttcaagaccagcctggccaacatagtgaaaccctgtctctactaaaaatacaaaaattagccgggcatggtgacacgtgcctgtagtaccggctactcgggaggctgaggcaggagaatcgcttgaaaccgggaggcggaggttgcagtgagccaagatcgtgccactgcactctagcttgggcaacagagtgagacttcatctcaaaaaaataaagaaataaaataaaataaagtttttttcataagatttccttattattttttaatatttgtaggatctgtaatgttgttctcctgatattgataatgtatgttttttcttgatcagtctgacttaagatttatccattgtattgatcttttcacagaaccagcttttgattgtgtttatttttgtgtttttcattttctatttctttgagatagaaagaaatccttattgattactatatcttgcatacagaagagcatttagaacacgtgcgtacttttcagaagaaatatatagctaacacctggataatcaccactcaggttgagaactacgactctaccccttccagatggcatcctcctacctctctcctggatgtaacctgtatcccaaattcgggggtaattatttttaagatttttgttagagcttctgctatctatatttgtatacacaggcaatatattgtttagtttgaacttttcttttttgagctttgtaaaaacagaatcatccatatgaattattttgtgacttatttcttttattcactactatagttgtgagattcagccatgatgtttattttcattgcaggatagtgttctagtttgggtatcacacaattaaaagtacctactcttctctcttttaagttatttatttattttttagagacagggtctcactctgctacctaggctggagtgcagtggtgtgatcatagctcattgcaggcttgaactcctgggcttaagcaatcctcctgcctcagcctcctgagtagacagtactataggcatgtgccactgtgctcagctattcttgtttttcatatagagatggggtctcgttatgtcacctaggctggttttgaactcttggcctcaagcagtcctcctgtcttggcctcctaaagtgtgggattacaggtattagccactgcactcagccagtatttactctcttgatggtgtttgggttgtttccggtttaaggctagtatagttaatgataatactgccattattttacatgtttgctaggaacatttgctgtgagagctttcctatgtatatacctaggttgtggtgtctgggttctggaggtgtgaataatttatagataaggccaaatgttgttggtttgtaaaacatttgtagatgctccctccgtgccacttctgcttgtcagacttttatttgttcccattctggtaggtgtgtattagtatcttattgtgattgaaactttcatttccttgattagtaatgtaattgatcctcatttcatattttatagagaacttgagtgacttgtgtaaatcttacacggtgcctgcgtaagtcttcaactcatttatttcttatggtatgtgccttcctcctacttattcatagcactcttttcttttcttttctattctattctattcttttctttttttttgagacagagtcttgctctgtcgcccagggtagagtgcagtggggagatctcagctcactgcagcctctgcctcctgggttgaagcaattctcctgcctcagcctcccgagtagctgggattgcaggcatgtgccaccatacccggctaatttttgtatttttagtagagatggggttttgccatgtcagccaggctggtcttgaactcctggcctcaggtgatccacctcccccccctcccccgccttggcctcccaaagtactgggatgacaggtgtgaaccactgcgcccggcccatagtactattttctttctttttttcgagacagtgtctcactttgttgcccaggaaatcatggctcactgcagcctcaacctccttgggctcaggtgatcctacttcctcatcagcatcctgagtagctggtactacaggcatgcaccaccacacctagctaatatttgtatttttttgtagagatggggttttgccgtgttgcctagactggtctcaaactcctgggctcaagcgatccacctgcctcagtctcccaaagtgttaggattacaggcatgagacaccatgcctagtggcactattttcggtagagtacatattaatcaatgctttattgcaagcatactgtccctttgttagattgtctttttttttttttttttttgagatagagtcttgctttgtcacccaggctggagtgcagtggtgtgatcttggctcactgcaacctccacctcctgagcaacctccacctcccgggctcaagcgattcttccgcctcagtctcccaagtagctgggattagaggcatgcaccaccatgcccagctaattttttgtattttagtagagatgggatttcaccatgtttcccaggctggtctcaaactcctgagctcaggcaatacacccacctcggcctcccaaagtgctgggattagagtcgtgagccactgcgcccagtctagattgtcttttcactgtctttcttgtgtctcttgttgaacacagattctttatatttaaattgcgtttcttgtagacatgatatagttgaatcttgtgtgtttaatctcaactgacaatctgccttttaattggtgtgtttttgtaattattgatattgttggatgtaggtctaccattttattatttctttcttctttgtcccccttttgctgattgttgttattctattttcccattcctctcttctttggaacatttgaatattttcttaaactttttgttttgagatcattatacattctcatgcacttgtaagaagtaatacaaagagatcgtaatgtaccctttatccaattccccccattggtaggtaacatcttgcagaactgtagtacagtatcccaaccaggatattgacatctatacagatcaaatatggaacatttctgtcactgcaaggatccctcatgtcactctttttattatttatttatttatttttgagatggattctcgctctgtggcccaggctggagtgcaatggtgcgatctggtctcactgcaacctctgcctcctgggttcaagcaattctcctgtctcagcctcccgagtagctgggattacaggcacccgccaccacctggctaagttttgtattttagtagagatggggtttcaccatgttggccaggctggtctcgaactcctgacctcaagtgatctgcccaacttggcctcccaaagtgctgggattacaggcgcgagccaccacacctgaccgtcactcttttatagtcataccgattttctcccagcccatctcctcttatagcctggtaactactaatatgttctctgtttctataattttgtcatttgaaaaatgttatataatggaatcatactgtatgtaaccttaagggattagttctttttcactcagcataatcctccagagattcgttcaggttgttgtatgtatcaagcttgattctttttattgctgagtagcattccatggtatgcatgtttgtttaaccgttcacctgttgaaggacatctaggttgtatccagtgttgggctattacgaataaatttgctacaaacatttctctgtaggtttttgtaataagtttttatttccctgggatgaatttccagtagtgcaattataatttaaatattatattttaaacatacctctttactgtttgtcactgtctccttgtttttaaattaaatttttatgtatgtatgtatttatttttatttatttattttttttttttttgagagcgagtctcgctctgtcgcccaggctggagtgcagtggcacaatcttggctcactgcaagctccaccatcctggttcaagcgattctcctgccccagcctcccaagtagctgggactacacatgcacactgccatacccagctaatttttgtatttttagtagagacggggtttcaccatgttggccaggctggtctcgaactcctgacctcaagtgatccacccgcctcagcctcccaaagtgctgggattccaggcatgagccaccacacctggcctatctatctatctatctatctatctatctatctatctatctatctatctatcatctatctttatctatctatctatctatctatctatctatctatctatctatctatctatctaatctatctgagatggtgtctcgctctgttgcccaggctggagtgcagtggtgcaatcttggctcactgcaacctctgcctcctaggttcaagcgtttctcctttctcagcctcccgagtagctgggactacaggcacacaccaccacgcccagctaagttttgtatttttagtatacacgaggtttcaccatattggtcaggctgatcttgaattctgacctcaggtgatccacccacctcagcctcccaaagtgctgggattacaggcgtgaaccactgtgtcctgccctatttatttatttatttatttatttatttagagacggagtctcgctctgtcacccaggctggagtgcagtggcgtgatgcgatctcagctcactgcaaactccgccttccgggttcacaccattctccagcctcagcctcccgagtagctgggactacagccacccaccacaatgcccagctaatttttttttttttttttgtatttttagtagagacggggtttcaccatgttagccaggatggtctccatctcctgacctcgtgatccgcccgcctcagcctctcaaagtgctgggattacaagcatgagccaccgtgcctggcctatttatttattttttaagatggggtctcactatgttgcccaggctgatcttgagctcctgggcacaagcaatcctcttgcctcactctcccaagtagcttggactacagaagtgtgatgtcatgcctggttgttattttttaaaatcagtggctgctgtagatactaagatagtcacacacaacctttcacattctacttatagtttaatacttcaagtaatatgtagaagctttacaacagtatagatatctttaatttctttcatgttacagttttcgaacatattacatctaataacattttaaatccctcagacagtgttatatttttttgctttcaactatcatatatatcttaaagaattcaaaaggagaaaaattatacattacatttacccatatattttgccatttctgttgctcctcatttattcccaaagttccatgtttccctctgatatcatctcccttcacctgaagaagaacctacagcatttctcttagaagaagtctgctgttgacaaaaatctcttaattttcctttacctgataatttttacatttcgtcttcttttttttttaatttttatttttatgggtaaatagtaggtatatatgtttatggggtacatcagatattttgatacaggcatatgatgtgtaataatcatatcagagtgaatggggtatccatcccctcaagcatttatcctttgtgttataaaaaaaatgaaacccttgacaaatttgcacgtcatccttacacaggagccatgctaatcttctctgtattgttccaattttagtatatgttccaattttagacagtgagcacttgtcttcattcttgaagggtgtttttgctggatgtagaattatggattgatatttcttttcctttagtatttttaagatgttccattgttttctgacctccactgtttctgatgagaattttgcagtccttgaatccttgtttccttgtaggcagtgtacctttttttcctctggctgcattagaaatgttttaagttggctttccaggctttcgattataatgtttctggtgtttcttttgagtttatattgattctggtgtgctgtgcttcttgagtctgtaaatatatgtctttttccaaatatgggaagtttttggttattattttttgcaattttttttctacagtagtctcttcttctccttctttgaggactctaataacatgaacattggaccttttggtattgtcctgcaggtccccagagaccctgtttttttttccaatcatttttataatttttttatttttacagtttctgtttctctgttgagaacttctatttatccattcatttcaggtgtttgccattacctcatggagcttagatgtcataactacttaaatgtctttgatatttccagcacctaggttatttcaggattggcatctgttattgtctttttccctggagaattggtcacatctttgtgattggtttttatgttgaataattttggattccatcctggatagtggtggactgtgtcgttattgcttttcttttttctttttctttttttttttttgagacagagtttcactctgttgcccaggctggagtgcagtggcacaatctcagctcactgcaatctgtaacctctgcctcccaggttcaagcaattctcctgcctcagtctcccgagtagctaagattacaggtgcctgccaccatgcccggctaattttttgtgtttttagtagagacgggtttcgccatgttggccaggttggtcctgaactcctgacctcaagtgatccacccgccttggcctcccaaagtgctgggattacaggcaagagccaccgcgcccagtccattattgcttttcatctttatcaggtaataaaccactaggtctgtctcaccttctatgggtgtcagttccaaccagttcagttttcaaagccttttgatctgtcgtgtgcatgtgccatttagggattagagactcgagtggtgggttcagtctttgtgcagtgttcaaagccttcactgccctgcttacatttgtcactcaggtgttagtctcagacttgagctgtggcttaaatcttagttcagttctcaaggcttggtatgtagctttgctttctcttgagtgaagagttcctggatgaactcaggacttctgtatgttcataagtcactgggacctgtatttgggtcagagtcttgagagagaatatgagggataaaaggggaacccactgatgtatgagttgcttctctactttttggctcacctccgtagtcttcctggttttgttgacttgtcagagtcctcgggtagttactttatgtattttgttcagagatttttgttgcaataatcagtaggagaggctgtagtagacttactctattgtggctagaaatggaaacctcgatttcattcattcttgcttttatcttttttatttctgtctttctgctagtttgaatttaatttgctctttttctagtttcataaggtggatgcttaggtcatcatttgagacccttcttttctaatataagcattgtgaatgccataactatctctaagtactgatttagctattttaaaccctttactgtggtttaatttggcatacaagaaattatacgtacttaaacagggatgggcacagtggctaacacctgtaattctagcacttggggaggctgaggtgggggggattgcttgagaccagaagttcaagaccagcctaagcaacatagcaagaccccatctctaccaaaaataaaaaacattagctgggcatggtggcacatgcctgtagtcgtagctactcaggaagctaaggtgggaggatcacttgagcctaggagtttgaggttacagtgagctatgattgttctactctagcctgggtgatagagcaagaccctgtctccaaaaaataaaaaataaagcaaacagtttggtaagtgttgacatgtatatacccaggatcacatcaccacaatcaagataataagatcacagaacaagctgggaagtattccctcctctttccaattctttggaagagtttatgtagaattgtattctttcttccttaaaagtttgatagatactgggttattcagatgatctatttcttgttgaatgagctttcataatttgtgtctttcttttctccttttttttttttttttgagagagtctcgctctgtcacccaggctaggatgcaatggcaccaactcagctcactgcaatctctgcctcccaggttcaagtgattctcgtgtctcagcctcccgagtagctgggattacaggcgtacaccaccatgcctggctaatttttgtatttttagtagagatggggttttgccatgttggccaggctagtcttgaactcgtgacctcatgtgatccgcccacttaggcctcccagagtgttgggattatacgcatgcaccatcacgcctagccaataatttgtgtctttcaaggagtttatcagtttcgtctgtcaaatttattagtataaagttgttcttaatattcccttatcctttcaatttctgagggtcagtggtagtcttattttagttttaaagtaagtctaatcacatatagtattgaaaacaataaagttcatttaaaggaaaagctctctcccagcaaatacctgcttcaggctgaaagattttagtggcaaaaagaacatgctcagtgttttctttctttactcttccagctagctcttctcccttccctttctcccccactcaacacctaggccatctctggcccttgagtgtagtgggtgaggaaggaaggaaggagatacaatgggcaaaaaaagtttgacctaactaacaaagttgtaatctaatactgatgccctctctatgttgcagattccaaagactgattcttcctgttcttgacactttatggtttccttggagatgtcctagctggagtcccctgactgcaatttccttgatgcaggaagggccactttcccaaccagttatttaatatatccccgggccccatggtgtaccttcagtctccttttgctgaggtcaccttgatgctagcaaaaagccctctttctaaagtaacccagcctgttcatgtccagagggtccacatctggcttgtggagtgtgtgtgattgtgggagtaagacccacagttcacccccacgcaacctcttctctactaccacagactgcctcagcctgtcatttatagtttttctacatgaaagacaggtgccaagttctctgtgtcccctaaagtctagtggatgtacatcgaacaggtcatctctttgaaatccttctcatcagattggggtggggtgaacacactcctcactcacctattggagagagaaaatgccgcagctttccaatggctatctctaaagaaattattttccttagcgtctttaaccttaacactcttatactttgtttttcttctttttaaaattttttgagagagggtctctctctgttgcctaggctggagagcaatggcgccatcttggctcattgcagcctcaacctcctgggcccaattgatccttctgcctcagccttcagaatagctgagactacaggcacatgccacgacacctggctaagtttgtttgtttggtagagacagggttttgccatattgcccaggctgctcttgaactcctggactcaagtgatctgcctgcctccacttcccaaagtgctgggatgacagatgtgagccaccacacccggccaacactcttatgcttttaaagggtatgttagagataaaggacattaagtggttttgacctattccttttgagtcccgtaaaggcctgcggactgggaaaatacttgatagtattttattaccagtctttgaaataaaaagagctggttttaacatcatgtcaaattaatcccctaaaagcatggattgcagccaggtgggcagatacagcttcgtgaaatgtatggaattcagcttttgaataggaatcatcaatgttaaaatgcaaagctctatgaccttatgtggcaaaattaatgttacagatagtgtgtgatttagactcgtgtacacacacacacagaattatagattttgaattttggtaatatggcaagggtaaattggtatattattgtaattttcacttccctgattactattgaaagtatttatcatttcatatgttattgactagttagatttcctcttctgtggcttacctgttcatattctttttttgtttttgtttttgttttttttttgagacgtagtctcactcgttgccaggctggagtgcagtggcgcgatgtcagatcactgcaacctctgcctcccgggttcaagtgattctcctgcctcagcctcctgagtagctgagactacaggtgtgtgccaccacgcccagctaatttttgtatttttagtagagacagagtttcgccatgttggccaggatggtctcgatctcttgacctcgtgatctgcctgcctcggcctcccaaagtgctgggattacagacatgagccactgtgcccagccacctgttcatattctttattcatgtttttgttgagtttgtctcttcttattgctttatatgaattctttgtatattctagatttcaattttgtgtatagtcaatatctttccttagtctaggttgtttatggtgtctttttgagtagaagttttaattgtaaaataatcaaatgtatcaatttttagtttgctttttgtgtaattttttttttttttgtgagatggagtctcactctgtcacccaggctggagtgcagtggtgccatct

SEQ ID NO: 474 - DNA, 32744 bp, Homo sapiens
  source 1..32744: mol_type = other DNA
gacaggggcggctctttcctgggtggggtttgtgaagtcgtggcccgttagcaggaagcctaacagtcgccccgacgctagtgagggacccaatctgagtccccggccagccgaatccaagccgtgtgtactgcgtgctcagcactgcccgacagtcctagctaaacttcgccaactccgctgcctttgccgccaccatgcccaaaacggtgagtgccggaggtgggcgctgtcgaccccaatggctctggctgagcctcatagccctttgctgatggctgagggcttggccagccaccggcccgcctgggacgccgcgccctccgccatagccaagggtagggaggggaccggagtgggatcctggtctggtgcgccctcaggggttgagggggtgtccaggctggaagtttggacggggcgaggcctgcctctttctcaggttccagttccctgtgtctgagatgcaacagtcaggacggcttcgttggggcctggggtttccccttttccctgatgggccatgggcacagaggagaggattctggtccagaagacaacactttccccaacccaggaattggcacctttctggggcaaggctgccaatgtccaagaggggacatgggaacagagaagcagggagaaaggagggagccgctcggggcggatccggcacccccactcatctttcccacagcctcaccgggtggctccagctgttttccactaggaggtgaggagagagatgtgaggaaatcgtcatcgaggctgcacccgagagcaccaacacttatttaggcaccagtctgaggagaggcctaccccatctcctgggagagaggaccggtttctccctcctctccacctccaaatccctgcccctcctattgcttaatgcctctctatctcctcctatcccctccggactattttgtgtggtgtgggttttctcgtggggccacacctttctagagtggtggttgatttggggatgcgtctccaccccactggctgttacgagaggaacagaagcctcctgggagtggggataggggggccggatgcccaggagggagaggggaggaggggtgtgcctgactaatgagctctgcttgcttttgtgcaagtcatgccaaatggctgctgaggcccttcccttgctcagaaaggcctggtgaccaccctggcttgagtcccttaggccaaacagcttgttgagctggcctaggcaatgcagtgctcccaaacatgtctccccaggactgcttgagccttgtagaggtgagatagtgactagtagccttgaaaagggctgaaggtcccctgggatgagaggaggagagttgggggcccagccttttgggtttgtgatgagctttggttgccacgttactgtataccagcctcactgccaagtcgttcttgcctttccagaaccttgtccttcagaaacaccaagttttcaaaaagtatgtgctttcactgtctatctcctttaaattgcttgtggttttaggacatgaggcttttacacactttgttccctagtccccgcccccaaagagagagagtaatggttttggagagaggggaaaatatcccattgtctgccaaaacaagattataaagatcctgtcaggagcggctctttgggtctctctctgtggttgactcctgactcctcttaaggtgcggctttgcctgaacagttgggtggatctctgggaatagacattgctccacggtctttcttctgtagtggcatatctcatcctcagttctgagatagcccactttgaaacacagcttcatgggcctggaagttgcttcaaacttgcattaaccgtctcatctgagtcaaagtggcaaagaagacaagacagcgtgtttattgttttcctgggaatggagagagaatggagtataagctgtttgtagtcaggcctggagtaatgagggtacctaaatactgaaggcatttttatgcagattgactgaaacctgaatcaaattggaaggagagggctgaattttgatagactggaagtattagagaattttctatactttgactcaaggaatggtcaacttttaggaaaagcaactatattatgtctgttaagatcatagaatcttaacctgaaagggaccttggagactatttagtacaactctcttaaaaaaaaaaactaaaactaaaacaaaaatctaatgaggctattgagacctacagggaaagacctacctaagggcacatggtgactgagccaagattggggtccaggctttctgatgctcatctcattgaccctttattctgacccaatgattgagttcttgacatttgagttccctttcttgctccaaacaaattgcccactgttctcagacctttatggtcctcagataaaaggaaatgagtaatttgagcaaagtggccaaggttgacatttgtgtggtctcctggtaaggttcggtagtgtcaccaggtgccttctgttacttttcttattcctcataccaaggccaaggtgttcaggggcacaccctagttcactgaataccaaccagtaattttaattaaaaggggaaaaaatttccctttctctgctccattttcatttatgtgctttaggctatttctagcgtgtgacagatggagaaaggtagtggaaaatcaaactcgttcattcatattgcagcatgtctacaacctatctagggtcggtttcacttttatagctaattgtccctcctagtcagcccaacctcccctacatttgttaaaacacgccagccgggcgtggtggctccagccagtaatcccagcactttgggaggccgaggcaggcagatcatgaagtcaggagttcgagaccagcctgaccaacatggtgaaaccctgtctctactaaaattacaaaaattagctgggcgtggtggtgtgcgcctgtaatcccagctactcgggaagctgaggcaggagaatcgcttgaacctgggaggcggaggttgcagtgagccgagatcacgccactgcactccagcctgggtgacagagtgagactccatctcaaaaacaaaaaaagcaaaaaaacaaaaaaacatgcctcactacccaccgccacccttgccttcttgccattccttggactctgcttctggttgccagtttcctgagtctgctttagtagccagaatggaaaagcttattaattgccatctacattttttggtgatgatgacagttatatatatatatatatatatatatatatatatatatatatatatatatatatttaaaaaggcctttccccctccctaccttctttaatttttttcttttaggatcacaaaggctttgaggctttcttggatttcctaaaaaaagagtgttttgaattttcgagatgttcttgagtttctggtttccttccttgggatttattagatgttagtattgaaaaggctctccacaactataaagtccaattcctctcattgtatagatgatgaaactgaaactcatgttagggggagactaacctagagtgatgcagtatgccagttgcaaaactaggacttgaatctaggtcttagttagagggtcagtcttggtgaaacacctctttgatctgctggggttttagccatagatcaacagatcaggggaaaggcaatcgagtggtcatttgatgggaccatcaatgtgagcagacatagagcctagatccttgaagtatttgaaggtgtttgggtcggcattcagctaaactttaacagggactatgtggactgtttattctcctgccattcctagcattacttgagccactcgagtggcactaaagtggtacttggtaaataggagccagattcttagtcttttaacccttgaaccagccctgcctacagacttaagtggggggaaaaggatcaggaagagaggtcatatgagagaggatcctgcatctctccacttgggttcttcagttcacttggccctttgtgaaagtgtagatgatagagacagagcaggaaccatcttgggaatttcctttacgcttttcttttaacagccctctgggtagggagggggctggtggggcaggaaggcctttgtgggacccacaccaactaatctatgctctctcgtgttaggcttggagagggaaaggttgctctgtgagtcagtgatagaagtagtattgatcactaatcttctaactttccattctctagctgcctgcaacagtagcttgttttagggtgttgttcttacttttctcttacctcctcctcccatgaaactactttaccgaatgatggagctggaaaggacatttggaagtcatctagtctatttcccctgcctccaaatctaattctctctggatgagataatatgacagctacaattattctgaactctgttctagtgttgcatggcaacagcctgtcttaggtccctttgtatctttctgggagtttcccccactggaatttctagactcagggtccccagaggggagaatatctggctaccaacactaccagagttaggcctttcataaccatagctgctggaaatttggcattgttacagattgctaatagtctgtctctaatctttcaaagatagaattgaatttatcatgtgcctctttcctaactcagaatcttctttccctgccacctgctctattactttgcttgcaaaaaggaaaaaacagggtacagatgtggtctcctttgggatagtctgttggttcaagtgaagggggtggtcttttcatgactgactggctttgctgtccatccctccttccatttcatgcttgagagagctgaaaaacttttcaattccaggttctaatctgtggtatagaagttgtcactttggaggattagctcaggattccatgaatttggaaggtgggtgctgggaaatggaaagcatcactgaactgagaatttttcttctctttccatataagaagaacttctctcctgtcctcagtaaagtgagccaaatgaagtgggactttaggcaagtcctttcttcaggccctctgtctctccagcttgtcatgagggagctgtaccagtgatgggtaaactctaggaatccctccagtactgatgtttttgagaatcttgatggtataagagcattgagtctcttatatgtatgttcattccttcagacattctttcttcaacatttgggtaccttctatgtgccaggcagtattggaaatacaaaattgaacagcgcttattaaaatgtatcctcttgtcccattatacttcttgagtgctgtttcttcttaagtgctgagttcagaatggactgtttctcacatgggagttggtttgtttcattagtagatccaagaagaatactggcttgagtactcttggccatttcttcccgagtcatgggagagaaagggctgtgtctttccttactgtggaaagaaataaaccaagtgagagtatattatgaagactgtgggttgactgaaaagctttggacaaacactaaaagcctcatagattttcctgccattcttcccacatttttcagtgaccgcctgcctgatagtagaatagtcctttttatttctgctgaaaggaaggcccggaagctactagattatgtttcagattttcttctaacatggtgagtgtggtagttagatatattggtagatattgaggccttcctaagggctcctaaacaaacctcataaagtatctaccaccagtgagctgaggactggctattgtggggtacagctttttttttttttttgatacggagttttgctgttgttcaggctggagtgcaatggcacgatctcagctcactgcaacctccacctcccgggttcaagcgattctcctgcctcaggctcccgagtagctgggattacaggcatgcgccaccatgcccagctaattttgtatggggtacagcattttaaaggcatttgcatctagggcaacccagagcttccctagccttaagctttcctttagctggttgttctggatgggcagggtttctcacaggagtgttttgaaccatggaacaactgagctggccttaaatcttctgcctcagcctttatcttcttgatgggggcactaaagtccagaaaagggaaaggatttgagtgaactggtgatagtgccaggactaaaacctaacttgcttggctccagtgtaggggagggatggtgaatgcctaccttctaaatggcactcactgtgaggtgctcagtgtcttctccctctgtgctggtggtgacatgaccgtggagttatggccatgggaagagcaagttcctctgagtgtgtagagctgatctcatgggtttctttatttggaaatggctcaggctctgaccttgtctcaggaactctttgtagcacttcccaggaaggtaagtgttttgctttggcttgtgacgggtggtggaaggcatatgtgtaggctgaagggaggtagagagaggacactagtcacattttcctgcttgagactaggccttgctgtcctaagaaactttagagagtaatttcttcatcgtattcatagccagaggggttaggcagcttgttcgaggtcacatatagttggtaacagtattgaaaggagaacttggatttcctaattcccaagttagtggtctcccactggacttggctgtcttagaaggatgactccacccagagagcacagacttccagagaactggctctgtggtgattacattaacaagatgggtacaatggagttcccctaaaatggttttgctatagcaagtttttctgggatctccgatgactgtcttctcttcctgtctacccctcaccccagttccctgctttctctttgccctgtttaattttgagctctgacctttttgaattctgaattctgactcagcgctccagcttgatctgtcccttgagttaggagaacagtatggcactttttcaatttagtgacagtatttgctgctgtagcaaattgtttgaatgcagactagaatctcctggcctcaaagttcaccactcacctctaggtgcttataggccaagcctggggcaggaagctaaaaaaagacctttcaagcctccgtggaaaggaagcatagagtagtgttgaaaaacagactctggaactagactgcctggactcaaatctagctctgcgaccaactagttatatagccttggacaagttatttaacttctgcacctcattttccttaaccataaataataatagtacttacagagttgctgtgaggattacatgaggtaatttatgtaaagggcttagaactgtgcctagaatctaacaagtgatatacaaatgttatgattatttactgaattttactatatgcctaactttgtgctagatgggatggataagaaagaagacaggtagttgaattcttaccatttaatgagtggttactatgtactatttaccataagggatagaaataaatgaagggatgatacaactgctgccttcaaagatctcctatctcctatttaattggggatttagggctaattcacttaaaaacggcttgagaaaaatatatactttgcattgcattttctacaactttttgaggagaaagggtttactgggacatgaacagggccttaaagggtgtgtacacttgggagcagtggccgttctgggtgggaaagtgatgtgtttttggtatgtgggtgtaaaccaatggccctagaccaatgctctcttgaaagttactttatctgaagtgaagggaggcttgagctgctgactgattcaaggggagccacagatataagcatagatgaagctactctttctagggtaatttggatccaacaatcctttcttaattggcaaacaagggcctgtgggggagaccatacctttggttttccagaattgggcaaattaatttttttttttttgagatggagtctagctctgttgcccaggctggagtgcaatggtgcaatcttggctcactgcaacctccgcctcctgggttcaagcgattctcgttcctcagcctcccaaatagctgggattacaggcatgcgccaccacgcccagccaatttttgtatttttagtagagatggggtttcaccatgttggccaggctggtcttgaacttctgacctcaggtgatccacccgcctcagcctcccaaagtggtgggattacaggtgtgagccaccacgcccagcctgggcaaattaatttttaaaaatgttgcttttgttgcctaagtaggtatgtgagagggtcttttcttcatgcttacacatgaactaaaccaaagaatagagcttggcaataactttatgtcagcagcctagaaacagcttttaattctctcattgactttgctataaaatcaggtatttgggaaagggtggagatggcagggaggatttctcagtgtgtggttgttagaggtggaggagtatgacgttttctggccagggcacagctgcagcatctgggtcttgaatttggagaaaaggccttttgggcgactttcaaagcacagccctttgtctgtgcctaatgacacagataccagatctgatgctcctttcaatcggcttgttgtggcataaggtaagtgttgacatagctcttaggccactaatatggcaaatggctctgtgcttgcttagtagaactgttttgccagttatcttctgtgattggtgacttcgaatattgaagtttcttcccattcctggcaacccttctaccttgtgggaatttgatagatactttgtgcatccagggtagtgatcagggcctaatgagagaagagttgagatatgacaatttggttgtacaaaacaagatataatcctgaaaatttttttcctgggtatatatttgggaagtgactggggccaaggcctaggagggggaacaaggcatacctgtcaggcttgatcagtatttctttccctctctttagccttggcctccattaaatacctgagaaggatcaagtcttatttttctcaagttgtgtgtttagataaggttcctgatcttactttcgtgatctaatctgccttccctccaacccatgatccatttccttttttttcttttcttttttttttgagacggagtcttgctctgttgcccaggctggagtgcagtggcatgactttggctcactgcaacctccatctcctgggttcaagagattctcctgcctcagccacccaagtagctgggactacaggtgtgcgccgccacgcccggctaatttttatattttttttagtagagatgaggtttcaccatgttggccaggctggtcttgaactcctgacctcgggtgatctgcctgcttcagcctcccaaagtgctgggattacaagcgtgaggcactgcgcctggctgatccatttattttttcagattctcagcctggatgtttgatgaagctcaccaagagcctcttttatctgttgtaatttttaactgaggttgactaatctatggtatagagttggagggtgagggtcaaggtaacagtcaatctgggcatcattagttaagtcgtacaaatctttgctattttcaagggttttaagtgagctaaactcctctccaaacatccttgtagatacttgtgggagactgactaattcctttacaaagaagaaaagtcacataacttctttgccttttaattttctttttctccaacatgaaaatatcagcaatattagaaagaggcacatggagtttgcgtgtggtggctcatgcctgtaatcccagcactttgagaggctgaggcaggtggatcatttgaggtcaggaatttgagaccagcctggccaatatggtgaaaccttgtctctactaaaaatagaaaaaatagccgggcgtgttggcgggagcctgtaatcccagctacttgggaggctgaggcaggagaatcacttgaacctgggaggtggaggttacagtgagctgagatcacgccattgcactccagcctgggtgacaaagcaagactctgtctaaaaaaaaagaaaaaaaaaaagaaatatgtaaatggaaaagaacaaacccccctcccaggttccttattccccttggtgcctgggccattgtagatctagcatatgcttggtggggacatctgccatttgctttagggttacactacatctttctactttgagtgcttgaagagttgctccagcagggcctgatgtgggcctggtgaaaatctagcctagttgcctttctgtctgccatagcctgggcattttcctaaggttgggagtttttttccttctggtcttaggccagttgccagaggaaaccgatgactaaaggcttcctccctgcaacgtcaacttctggaacctttcctgatgattcctaccagtcaagtctgccttatttggctattttctcccccctcaagttactccctctccttgccaccccacctcaactagtcctctgttctcctttagtacagggaatgccttcttcaagtttatacaataccacctgcaaacttcttttcttcttgtttagagtcctaatataggggaggagtggggaaggagagaggaagatgggagagctctggaatgactgtgatttctccaccctgctttcttatctccctttatcctcttggcactgcctggtcactcctctacagcttcttacctagatctctgacagcctaggagtggtctcgattggcctaaagaggttcagagtgtgggggtgggatggggctagggctttcagcatttgaaactatttctttggagcaggtaaagccttccagttggtaagtctagttctttaagtatgcctgttgtatgcctagccttctcacttggctttcctgggtgggctgagtctaagttccctctacctccccttcccagtcctgagctgtctaactttaggttagaagagctgagcttttgacacttacagcttggggcacttgtctgggtgtctttaaaaataccttttagtaaaaaatggtacaatggaaagaagagtgagatatttggtttttaatctctgcctgtgtgaccttgggcaagtcacttttatgaggcttaattttcttatctacaaaatagagacattggctttttctgacattctgattatttgtgcccagtctttaagaggctaggaaaggggtcttggaaagcgtgtagcagagcagagtggtgacttttcggagaagcttccttttcccatttagaatggcattgagtgtgtcattttctcctctggctatcaacatgtaagcagccccctctatttcagtgagctctgctctgggatatactgaatctacctaccagagagctcactgtggagattctggcttggagagacaactgttgactacatgccttgggtggggtcttggagtccagcctgcagactacagttgctggctatttttggtcatctgtgactcaggaagaatagaagacccttggattggtcattgttccatcagggaaagggaagacaaagaaacaagctaaaactgaggacatatgagatttcacttcctttactccctcccccacaacatccctttttgtagggctatgaaattgcttttgactgagtcttaaattgctaagctccctttccccttcctctatctgaatcattgttgactatgttgcccttggacggggagagctaggtgatatgggcttgggtggagcaaaagggagaatttctagtcaggaagattgccacacacctagtgttgggctttcaactgatcctgtattttgtaaatatggtttcctttggtattagtcctggagatcaaaggagagggacttctgaattttctgtgagggcctacaaggctgatagggaataagcaagtttatgggaaaggtgtacccttcactggatctgtttttacccatcctctacttcttcctccttttcgtccttctcactgacactttatccagtgcttgcttgtgaaacaaggatcccacattggatctcagccacctaagagttggccatgaacataaaccttacctgctctgagccccctggagaaagcacaagaagtcttggcatctgttttccttcctttagaaacaagttccttgggcatccttgggcagtttaaccagagaagccttagttgggtagtgctgggcagtgctgttagggggaagattcttctccagcattgagctggaatggcctgtgggctatgcaggagcttgctgctggaagcagctgccttgctggaagcttctcattcttcctaggtacctcacatgggttgttagcgatgccagttgtaggtggtggatcaaaatggctgttggtttgggaaggtaggcaagcaggtggaggaagaaggaatgtagagtcaaatggaagaagagtggttctttttttatatttcccctttttttaaaactcagcatggcatatgacaaagtttagcaaatagagagagaaattgtgtataaattcatcattttaacatggcaataattatttgtatttcttgtcgtatctcatatatgtaccttagtttttggtggtgcaatcatagtgtacataaaaaagttctccttctttccccctacttaacacatcactaaaaacttagataaatgctatttaattttaagaaatgaacattctaatggccatgtaaaattctattcaaaggctatgccataatttaaaaccattctcctttgggggagcatttagattactcccagcatttgctagtatagatacattcccatgaatgtgaaaagagaaaattgaaacctcttagcatagcatatagggaggtccctttggtacctcaccccattctagcttcctctcccaactcagctcccatttattcccacatgtatgctatgtggtagctttgtgggcccaaggtttcccaagtccaagtaagctatacccgtcctttttctttttttcatccagctttttcaggttgaatttgttttgttttgttttgtttttttgagacagagtctcactctgttgcccaggctggagtgcagtggtccaatcttggctcactgcaacctccacctcctgggttcaagcgattcttgtgcctcagcctccctagcagctgggattacagggatgtgccaccaaacctggctaatttttgtatttttttagtagagacagggttttaccatgttggccaggctggtcttgaactcctggcctaaagtgatccacccacctcagcctcccaaagtgctgggattacaggtatgagccactgcacctggccatgattttttttttaactgtggaaagcaatgccatacctcttctttctgctttagcctatgttctttccttcagcttgaaatttcaggtgcctcttcttcatctcccccccactccatgtcacttccattggaaactttctttattactcccagatagtattgtactatcttctatgtgcccactgtactttgtaagaacttctgttatgttatttaccatgcagaattgcagccatctgggctcctaggcttgctctttcattaaacgtgtgcatttggaagcttctagctcttcctgtctcaagaaggggccattctccaggtggaggtggttaggaatggacaaacctttgaggagcatttggtcagtaatatacatggtgagggagaagcagtagcaatgaatgcaggggatccaacagtgttggatgagcacctggtagggcatactaaccactagtaatagagaaaatacaccttggagaagggacaggtgtattagcacctatggggaagagaggcctgagtgtaagtacagagaaagcctagctggccttgagtcaccagtgcaaattctgaaaccattccagattttagttccccatctgtggaatggaaagagtaatagcaacctactttttagggttatgctgaggattcattcagtgcactaatgcatctgcaagtggtctgtgaggtgtgaggcacaaaggaaggaaggtaggcccaggacactccagtatgtttgttccagttggccttttaaagttctgtgctatatgtgattccaatcaagcctctgaacccagaatgccagatgctacagtttctctgaaccccacataggtgcccctacagccagttttttattttttttttaagtaggaagtatgcagggaagtaccatctcctcactcatttgagcagcctgactccaactggccctagcacagccctactcaagaatgaccacaagtgcctggggagggaggggccaccatcaccttagctctttagtataaaataagtggtttagagtagagggtttcttaacatccctttagctataggtagaagtgtagaagctgcagtgaaactgagcacctttcaggtcttctggtctgaagcctgccatgtactgtgggaaggacagatcttcatgtctgtcactaactgtatactctttagaggcctgcccatctcatctgtcttaggaaaacagttcatgaagaaccatctaagccaaattcaaggtctttgagtggagaatctcaattaattgctttttgttttcaccacatactacccatggcttcttttgttgtttttattgttgttgttgggacccttggcttcttgctgctgccttggccatttgcatacccccattccaccccaggactttatgttttgtaaggaagcaaattacctgagccagtggaagatctactggtcacctataaatcaacacgaagaagggacttgctcaaggtcatgtattgaggcagaagcagaaactggtattgaaggcaagactctcaggagtgtgttctttccattatgtcagtctagcccactagtgtgtaagcttcatgagaacagagatggtttctcaccacccattatatccccggtacccaacacaatgatgcctggcataaagtagattctcaacaaatatttattgaatagatatgttaatagctactattttcatgttggaactgtcttctttagattcctttagctagatctaccagatagccaaacaacaattccattgatccactggaaactacctaatgtggacccagctgggccctggcagaatggaacagggtagcaccggggaatgggaaggcattgtctctcttgtgcaccttggagagactgtttatctgtgagtggccagcatgttcatagccatttctgctcccttttcccatatcttcacataatacagtagtgttcgtgtcaagtgggaatattcaaatcaaaactttttgtggattctaacaggcagccatgcaaacatttctgtccacctttgtgaagtagcccaaagtttggctgtacagtacatatttgagacattactcaatttttaatttttttgtgtttgtgctgctcattatggcatggccagcaggcagggctgcattgcataatttaatcctgagaggtttgtgcacctgaggtttagggatttggttggcccctgtgctgaggcctaggaagagacaggcatagaccagggaggatagcaaggaagtcctggcgatcataatgttggggcatccagtggatatccactcttgctattgctactgttgccgccgccgccaccaccaccaccaccaccaccaccaccaccaccaccaccaccaccacccaggctgctttagggcccagagctgcttatctttgcagacttggtattttttggccaaggtagactaattttgggggcagtaggagatattttcctcccatccactcctgagaaaagggtagggccagcatttgagaggtgtaggtttatgcttactaggtaaggttgactgtcctaaaatagagagagcttctgaagttcacctagtctttaaaggacttttcccatctgtttttttagtcctgagccatataaggaaagttaacagacacaatctctgctgtgtggtggaacagatttaaataaatacagactttgttttacaattttggattaatttttcattatgaaactaaacatgtttgttgtaagaaatgaaacagcattgaaaaatataaagcctcctgtcttctgcccctgactgtattctccagagacaaccatcattaaccagttagttatgtgaacataaactcttttttttctttctttctttttcttttttttttttttttgagatggagtcttgctctgttgcccaggctggagtgcagtgatgcgatcttggctcactgcaacctccgcctcccaggttcaagtgattctcatgcctcagtctcccgagtagctggggttataggtgcctgccaccatgtccagctaattttttctatttttagtagaaatgtggtcttgccatgttggccagcctggtcttgaactcctgacctcaggtgatccacctgcctcggcctcccaaagtgcggggattacaggcatgagccactgcgcccagcccatagactcttttttcatgcatttgtatatatatgcctttaaatgcacagatagtacaaatccgtattgttctgcttttttaacttagtatgtgctggccatcttttaatgtcaaatccgattttaaagtctacaggggctcattaataagcaaatcagcaaataggtagaacactttttaaacattaaaatcttttttttcttttttttttttgaggcagagttttgctctttttgcccaggctggagtgcaatggcgcgatctcggctcactgcaacctctgcctcccgggttcaagctattctcctgcctcggcctcccgagtaactgggattacaggcacatgccaccacgccagactaattttgtatttttagtagagatggggtttcatcatgttggtcaggctggtctcgaactcctgacctccagtaatccacccgcctcggcctcccaaagtgctgggattataagcgtaagccactgtgcctggccaaaaaagcttttttatatagagacagcgtctcactctgttacccaggccggagtgcagtggtgtgatcatagcacactgtaacctccaactcttgggcttaagcagtcctcctgtctcagccccctgagtggctaagactacaggtgcattctaccatgcccagttatttttctattttttgtatggacagggtactagctatgttgcccaggctagtcttgagctcctgggctcaagcaatcctatcacctcagcctcccaaagtgttgggattaaaggcgtgagccaccaatgcctggatgaattggtggaacacttaaaatctacacaaataaaggggccatactcttcattaagtggaaaataaagaagttgtaatgaggatttgtctgtctgagagggaaggttttctgaagatgtgatatgtgaacccttctgttgcgatgaaagatgatggtagctgctcccctttctatgctcagtaggccccacctatagagattgctttagatcctgtgtctaaatgagctcagtggagtgattagtggtaggataaacttattttctatgcttagcatggtccccttcctgttttgtggttttgccagcttggggtggtttgattccagacagtacctgactgagaatcctgcacctcagaagacctctggctgttggagctgtctgaggtgaaggaaagaaactttgtgagtgtacatatgtgtgtgtttgtgataggcacatgcttttccaatgttctccacagaagagcagtggaggctggtccgatggtagtgggttaccgatggtactgggttgtcagaacttgttaacattagcatcactgaagtttttgtttttgtttttgtttttttgagacagagtcttgctctgtcacccaggttggagtgcagtggtatgatcttggctcacggtagcctccaccttccaggttcaagcagttctcatgcctcagcctcccaagtataggcgtgcaccactgtgcctggccaattttaatatttttagtagagacaggtttttgccgtgttggccaggctggtcttgaactgttggcttcaagcaatcttcctgccttgacctcccaaagtgttgggattgcaggcgtgagccaccacgcctcagccactgaagtgggtgtacaaccccccactgctaaatttgactggcttaaaaacaaacaaacaaacaaacaaagaagagctgtggaagggcctgtcaattatcagagaagctagattagaatccccttcctaacaacatacacatcaggaatcttgtccaggtggtaggaaagtggaattttgcagagcactcagctgtaggtgagccaccagttgaataattgaggaagatagtgatttgtgaaatacaaatattttgaaagaaaaattctagcctagtggtcactggtcctggtcttagaagctttctaacttgagagtattgattatgttgaaggaaccaggccactagaggagaagcagaattaccagaaatgctggctctattctgcccactcatggcaggccccacctttctcttgcctttttattcccagacttccacagttggtggggcagagttctgcttgcccagcctttaatcctggaacctctgctaccagaggttgaccctgactgggctaggcccacaggccactgcaggcattattcccttccccttcagacaaacaggaagctgcctgcacactcttagtgattggcactttcaggagctttgtgaggcagggagtttgagatcaggttccaaaaggaaaaggaaatgacattttaaataattttttgggctacttgagaaggtgtggatccaaagtatctccaggcatttattgtaggccaggcttgcaggaatatctgtgtttccatacttacttgctgtttgaccttggagaaatcccttaacctccctgagcctccacttctcccgttggtaaagtgggaatgattatgtgttaacctcagaattggtgggaaacttggataagttagcagtggaaggctctgaaatgttagctcgtagaaaatcaagtgttcaggattcaggtgctcagagaagtttaaatcatgttttaatagtctctgttgacaaaagcagtagagtatatcagtagatgaaagactttcagctcaccactaagaatagttatgatccttaaacgggtgagcctcagttatcagaaaatgttcacttctgtgatacagctcatttatagaccatttaggaccaatgaggcattgccatataatcatctctcaaccatccataataaaactctcttctcggccaggcgtggtggctcatgcctataatcccagcactttgggaggctgaggcgggtggatcacgaggtcaggagtttgagaccagcctgaccaacatggtgaaaccccgtctctactaaaaatactaaaaaaattagctgggtgtggtggcgagtgcttataatcccagctactcaggaggctgaggcaggagaatcgcttgaatctgggaggcagaggttgcagtgagctgagattgagccactgcactccagcctgggtgacagagcgagactctctcaaaaaacaaacaaacacacaaacaaacaaacaaaaaaatcccctctcttctcagctacctgtggactgcctgttctaaataatgtgagctcagggaatacaggctcttctgataatccaaataacacataattagttatgcaaacgtgtcctaaaagtttccagggtgaagtggttaggttgctgttgctgagtaatccatagagtattactcttatgttgatgtgggtaactgaccttaactataaggaaaatggtgaactttgcactctggagcaaggaaagtgataggcttctacttctcaggtcatttgtgccttcactgaccatccctccagctgtgaactcaggtagaggcagcatatttatgagaatcggattagaaaggaggcaatccttcaaagatcggaggttgagaagacatgtttgagtgtgccctgcatggacttttattccagggagagtcgagtagttctcccttcatcacactctactgagattgtcctttggcaagaagaaccaagcttaaagaaaatcttaaaagagccattaggaacctcttggggcaagttcttctggaacctctagctgcttaacatcccagaaaaagaaattctagggttaggaagctggaaaggatttataattttaggggatagctgcccattttccaaatagttttctgtttaaaatagccaagtcagatgcgaattgaaggaatctcttgacaggttggctggcattgccctgtaatttttttccagtgtccaagtaatgataattctctatatttgtaacaagtttcatagttgtaaaactcttttttattgttattactatgtcatttgatattcatcaactctctacagttggcaggttaggaattattatcttttttaaaattattttttaaaatagagacagggtttcactgtgttggccagcctagtcgcgaactcctgggctcaagagatccgcccacttcggcctctcaaagtgctgggattacaggtgtgagccaacacacccagccaggaattattatctttacttttacataagggaaaactggggctcatagactttaagtggctgcaaaaattactcagctaatgagtaatggagacaaggcttgattgggagacagaagactttggttttcgactatgcacggggtggagtgtgggaagggaaggcagtgttgtttcataaaggcctggacttaagctctggtcatggttaggtcagagttctgaagctagaaaggaagtttcagctttaaacatttggcccttcccccgttccagtggttgcccaacctcttttcagtctctcttctaaatattgtaagtcaagactaatgtttagagagagagcacttgggggctgtgtggggatggccacctgttatatttgtgtcctgcctacttggggcctggcctgactctggttttgcaactggcttcctgtgtaacccattcttggtagtgtcagaccactgccttcaaggctaattgtgctttccacctggttgagccaataacttattttgttttgccatgctcctggacatatgggagttgcttattagtaggtgagaattgtttgggggctgcttagacctagctaatgtagagtcttgtttgtaccttggtgggagcaagagcatcaatccaactttttgttgagaggaagaggtattggagaatcatggaaaaggcactcttttttagttgaagagctgttgtttatgctgggccttgctgttagctttccagagcaatcttgaccaagtccttgctcgtttttgggccatagcctgttccacaagaggttggtttggctaacctctgagggctatttcctgctctgaaactctgatttattcagaaatgttatactcccctaacaatggaggctggtctgccctcccatgggtacgggaatggtggcacacatctcagaaatggttttgttctgtgcggaactgagccaaatggacaactctaccagctccaaaaagttggaagtggtcagctgtgtctgaattttgtaagggagcataactgggtggaggggtgaacaggcatcattagaggccggatgtggatgaggagggaagaagtgccctggagaggtagttcatagagaacccaccagaaacaggtgataagctgacatcatgaggtagatggtttatcccagtctgtggccaggtagttcctggtcacaagcagttggtacgccctcaggaatgtgataccatcacatgggaatgtgtcactagagcagccaaaaggctgtggatgcaggaagagcagctctctcttgtcaccattccctctgtgaagggtgggagattcttaaaattgggccatagagaccatatgtggcaaatgaaaaaaacaattcacaatggcagataggactggtcctttagagaaaggaaaagttgtaatgcttgcctgatgtcaaagcatgtggggttggatttgctagttccaatacattttaattttttttcttgtggacttgaagcaaggtttggaaaaagggggaaatttgaactcatgacctttggaaaccagaatgaagcttaatgttgactgttagagctgcccttcttatagtagggggctgagttttgcatggagccatctaggctccctgccttctgatctaccttggccagggtgtacctggggaagtccagcttgcctgtgtaattgatcttgaccagtttgtaggagcacgtgtagactctgattaattggtttgggttaaggctttgggaatcaatattttctgagcactcccacagggaattctaacattgggcaaaggttgattactgcatctctaatagaagcctctccttgctacatgtgacaaaactgaaccagagaaaggggagggaggcctgtgcccatgtcaatatggcatggatacagctgatctgagcactgagctaatgctttttccagggctctttggactcttctaacagttcaattggacatcctctaaacttggtcagaggtccagaaggagatagtagttatggcccccaacccaaaagtgctggaggaaggggtggggttaactaattgcacccaagggaggtgagcagccctttttagagagtgagttcaccgtctgggcgtgagcagaccagtggttgggggaaaggggaaggatagaacaggataggaggtgagtaatgctgtgggcatcaagacattcagttagtgggaacattatagggagctggtgagctcaaggacctggtgacttcactcctcagatccatgtggacttgcagggctggagccctgtctcagtgtccaagacgtgtgtcttgtgcctgggaactgaggactgcttgttctctgcttcctgcttcagctggatggcctttacgcttgattagggagtgagcccagccatagagcagcctctccttggccccagcccctactgctactatcctttcagagtggatcaagctctcgcgcatattggggcacactgtatcacagtgtggtctttgattatttttccactgttttacatgtagtatcccgagtagagaataagctccttctatggtaggaaagggggctttgttccaagtccttcctaggggcatgggaaggtgcttaatggagagaagcaagcagcatgagtaggacactttgggtttcttttctctcgccagtatcaaaaggaacttttcttaggagagaaaggtaactgggagctttagggtggatatagtacacacttcattctctggggtccaagaattatgtctttttcctactaggtggggaaccccttgaagtagtacttggcatagtctctgtattcccagtgcagagtaaaataccccacactttgcaggggttcaatagctgctgaattggtttaagggcattttttgtcttatcctctcccttgagtcagattagattccccagaagccccctatctcctggctgaagactatggaagctaacaggggaggaaaggaagggctgcatccacagttggctgtctggcacctcttggatccagaaatccacctataattcttagcagtagttaacttttcaggtgtatatactttcacatgtagatgttttttatttctttttgtttcttttcctttttttttgagatggagttttgctcttgttgcccaggctggagtgcaatggtgcaatctcgacttactgcaactttcgcctcctgggttcaagtgattatgctgcctcagcctcccgagtagctgggattccaggtgcccgcctccacgcctggttaattttttgtatttttagtagagatggggtttcaccatgttggccaggctggtcttgaacacctggccttaggtaatccacccacctcagcctcccaaagtgttgggattacaggcgtgagccactgttcccggctcttttctttttctagaggaggaacaattgtgaagagccagggtgggaggttagaaggtaggcactcctgaatggttgtttcttcccaccacttttgagagaagggccaagcagatcatgaacatcctagacttagtccagaggagaaaggccttagtgtagtgttggccactaatggaggtcattagccgtggagctctgtggtggccttctttcattcttagcctctcactcccattgagtttggcatccttagcttgatttccttttattctccaaaccttttctgagggaatagggagagaagcaaggcacacatgttcctttgcttcttgagcccttaattggccagctgggagggatccccttcttgcttctttcttcttcatgcatgcctgttgctctctaaggtcagggatttgagccagaggcctgggagtcaggtactttatggctcagcccctggcctggggcctcctattgtggggatcagcttggcccagggccttcctagtatgagaatggaatgagcttttgtggaagatggttagtggtctaagcttattatctattttttctgccagtgcctttgcataggaagggagtaggctgctatgtatgatcaattggtatgtgggccagttatctttggctaactttcagataaaacctttgctgtccatcttttttggaaagtagaatgtgaaaagagatatttatccaggtttgaggccttgcagatagtcagtggagttatcagtatttggttaagtctaggaattggtgaacttgcctgttggaccagtttttgtatgtatcataaaaataagttttaccattttaaaaacattttttgtttgtttgttggtttttgtttgttttgttttgttttcagacggagttttgctcttgttgcccaggctggagtgcagtggcatgatctcggctcactgcaacttctgcctcccaggttcaagcgattctcctgcctcagcctcctgaatagctgggattacaggcgcccaccaccactcctagctaatttttgtatttttagtagatacgaggtttcgccatattggctaggctggtctcgaactcctggcctcaggtgatcctcccacctcggccagcgttgtttttttaaaaaagaaaaaagaatatgtaaccaagactataagtggcttacagagacagtttgccaatctctgctagtctgtgctttagactgccaatttattgtatacctatttcttatatactcatggcttctttatagtcacctctttcctgatccagacacactgcaggcctttgaatcctgcttcttgtagccaatcataaataccttccatgttggttactaactaaccaaaccattgtgtctccttccatgtatacatggggtctgtggtcacctagggttagaattaaaattgtacttttcaaaaaatcagctcctgggttcattgattttttgaagggttttttgtgtctctatctccttcagttctgcactgatcttagttatttcttgccttctgctagcttttgatgtgtttgctcttgcttctctagttcttttaattgtgatgttagggtgtcaattttagatctttcctgctttctcttgtgggcatttagtgctataaatttccctttagggactaaagaatatttatgagtagtcaatgagtgaggttggcttaaatggttttcaggtgataattaatggtgagcatcctaagtagagttgcctcaggtcttcctgcgatttttttggggggcctagagtctcatcaacattgctcaagttgattcaagagaaaggagggtggtagttataagataaatgacagaccaaatattagaatcattttaaccattatttattgctgcatgactttgggtaatgtatttaatgtctctcaaccttagtttccccatctttaaaatggaggatagtgggccgggcgcagtggctcacgcctgtaatcccagcactttgggaggccgaggcgggcagatcacgaggtcaggagatccagaccatcctggctaacacggtgaaaccccgtctctactaaaaatacaaaaaattagccgggcatggtggcatgtgcctgtattcccagctattcgggaggctgaggcaggagaatcgcttgaacccaggaggcggaggttgcagtgagccaagatcgcaccactgcactacagcctgggtgacagagcaagactccatctcaaacaaacacacaaacaaaaaacaaaaaaaaaaaacaaaacggaggatagtactgatacctacttcactgagatttatgagagttaaaagagctcaagagtatgagtatatctaggagagtacctggcatattgaaagtgcttgataaatggctgagttccctaagtcttttccatcatactttgccctctttaaggatttgagatcaaataattttagaaccctgaagtctgcttttaatttgtgagtgtgcctcctatactacattatctctttaagatttttttttttttttgagacggagtctctgtctgtcgcccaggctggaatgcagtggcacgatctccgctcactgcagcctttgcctcccaggttccagcgattccctgtctcagcctcccgaggagctgggactagaggcatgcaccaccacgcccggctaatttttgtattttagtagagatggggtttcaccatgttgtccaggctagttctggaactcctggcctcaagtaatccacccgcctcagcctccaaaagtgctgggattacaggcgtgagccaccacgcccggcactctttacggttttgttttaatagatgaggaaactgatacttcaaacagtgatgccaatgactggcctagtttgtggtgaaacccatcgtgccttctgctgcaatctgttggagggaacggttgtctgagaatccatgtgggtgtatctatcactttgtaaagaggaactccagctctgggaagccttaaaagtcccaggatgagggagtagtagaaaaggagaagagggacatgagacccagggtagaaaggatggttatggggtgtgaagaatggaggatgtaggaaggagaaaatgattagaggaatccttacttaagaaggcaaaacagtttgtgaaatcaatggatctccacccctttgcagaagccaggcagccttggctggggcccacctcaggcccttgttatgctggtagctttcacttcttctttgtgtgtgtgtgtgtctgcgtgtgtgtgtgtgtgtgtgtgtgtgtgtggtggtggtggtggtggagtatagatgcagagggatcttagtttggttgcctttccaggtctatctgtaggtaggcaggttatccatgtgtattgaaagtatgttgtcgggccgggcgtgttggctcacgcctgtaatcccagcactttgggaggctgaggtgggtggataacctgaggtcaggagttcgagaccagcctgatcaacatggtgaaaccccgtctctactaaaaatacaaaattagccatgcgtggtggcacatgcctgtgatcccagctacttgggttgctgaggcatgagaatagcttgaacctgggaggtggaagttgcagttagccgagatcatgagatcgtgccattgcactccaggctgggctacaagacaaaactctgtctcaaaaaaaaaaaaaaaaaaaaaaaaaaacaaagaaagaaagtatgttgtcatgggctccctcaagtcctgaagagtgattcctctgaggtctgtgtgagctagggtggggagtgctcattaagctaagctggtgcctcagtggggctgtgggaacataatcagcttcttatctttattttatacattagtctatcttgcctggctttgtcttcagggatttctgtctctgattgtggcccatctcccccaaatctatgagctggcacctaatgccaaagtggtgggaagatctttaattcattttcttctgataaattctgggaagagggtcaggaagctgggaaaggagacactgatatttaacttcatgcctttgagagaaaggcatactttgtgtttcttacctctgtatccctgtacatgctgtctctctacccagaataccatgaggttccttttccctttaatctttttcttgtgacagtctcctttgtccttcaggagaggtcagctctatctcaagcaaccttctgccttctcacctccccttgtctcctcaccttccccattatggcctggatgcctcttgcttgtgtttccacagtccactttaattacctctatctctgcccttgctgtatagaatggtaatttctcatccatttatctgcatatttcctccatctgacaaaaaaatgccctcacgtgcttgctcattcacacacacacacacacacacacacacgaattatttcaaagcctgatccgatccatattgggtgtctgataaagtggtggtatgtagaacctgtatgtgtatacatatgtctgtgtcaatgatgtgggttctttctgaaacacctgaggtaggtaagaggtagccttacttgtttttccagatcttgctagaatagtagatttttagggtttgctttggattatggaacaatgtatgttgccttgaccattagggaggcttctgggtaatttccatagagattctggttggcctctttactgttgtctgaaaaaactagaccaaacattcggggctgggggtaggattcttattctctccaaagaactgatatgaatatgtgtgtggggggctagataggttcatgctcgctcacctcagcattgaggggtgtgaaggttatatgtttgtggtggtaggggtgctaaaaacccttgtattattgcaggataggttaaatagtttttactagtctcagtaaattgttagctgagcttgtggtttggagggaaagatgtggctttatcaactcgaaaaaacaaagccagcttttagagaagttacctcaagctacatagggaccaaaactaataagctggatgccatgtggtctcttatcttatccttgccaccaagagactcttccaaaacaatcatagatccatacagcccaagagcattctttgggctctctgaacctctgcttccaggaaggcggtcatacaaaaatgaaggctgtgagctaatggctgtaaacaaatacacttgcagcaggttatgaggccacctttcaaccttcagcacatccactggaggtaggtatttttgagactactctcaaaaaattttttcttaaggcctacgtgataaaccttgttccctaatggggatgagaattggattaggctgtaagattagcctaggggaacagcaggctgggtggggggttggggacatcctgcttaggggtagccagccaaagtcccccatacaagcccaaccaaggatcatgccacattgaaggtctgcacagtagtgaggcagtgctgtggaatgacatctgccttccaacttcttacgtgagtaaggaggctctccctgaatattcagatggatgttcagccacattctttgctatatttatagggtggggagggaagacaagggggagccagggagtccgagctgtttagagaggagagaaggaagtttcaacaatgggtaggttcaggctgtggttcctcctcactgccccttcctctttgagtttgtcaggggaccttcctatggcctgagatcattttctttttcaaagtggccaaagccactgtaggcacatttaaatcagggtgctttagcagaaataccaatgctggcatctaaaacccatgtgtagtgagacttgattgacatttgggacctttttaaaactgtaattttattgtatttttgcatttcctggtttgttaatcaaggaagaacattggcatgtcatcttccagtctccaaatgtaagttaaattgtcaatttgtgtttttccagaaaatttctttttccagaagtgctttgaatcatgatcatctatctgtaggcatggatcctccaatttagaagttgctcctagtgttacctagttacccttcctgttccattctgtgaaactgggagatttactgtagattattcagtctggtcagacagaaaactgcagctccctccccagtcaaccaaagcctcctctatggaggggaggtatggtaatgacattatctttccttaggcagccgcgtgttctctgagaacaggatgtggggagggctgggccccagtcacagggtatgggggtgggcaccggaaaatgggctggtggtaaggccatgaggattagtgcttgccttcttggctttgagaggcatgaagagctcctgtattcttgattgttcactcatgtgtacaccccaccctcgcacatggcatgtctgtgttcttaccctaagaaagactgtacctgagaaacaccttgtgtaagagccccagctgtttggcttgcagaaactcagtgaggtggagtgagtgggcccaggctgctcactgtaccaacccatgccttgtgattctttatgacagcctgtggcttcaggccacttttgctaagctttattggggagctgggccccagtagataatgggcagctttgctgctctttctcagggccccagttgtttccctccccacaaatggctccttagctgaggtgatttgcatgttcaacttcctttcaggccccatccttctcttctccctgccccccactgcttctgctggggacctgtggtgatgttctgcctggggtggggaaaagaggatgtagctagcttcctgtgcaaaagagggtggggcgccggccttcctgcctgtctgcccacccacccagtgcttgaggaattgcctgaagagttcagttcagagtcaccagagcctgaagggctttcttcagagtagagattgacctttgctcatgctggtctctctccacagttttctactgtgggaatagctggacacttttttcctgaaatcgcaatgctgaaaggacctttagaggccaactagaccaaccacttcacattacagatggggaaactgaagcccagaaagtcatataagtcctataaggaatcagtggcaaagctaggatgagtagaattctagaaggtcagacctagggctctctccctcccgtcaagctgctaatccagtgggttacaaactgtttggctgggctacctggtgagctacagcctcccttcaaccagaacagctctacttttacgtacttcatattttgaagttttgtgtgattttctgtttgggagattgaggaggcaggaagctgttagaaatgtaataaagtcaaaaccactgagcaaaacccagccattacagttgggaacactcagacctacagggggaagtaaatatccgaagtttactgggattggactcagagacccaatctctgaaccaccattcatggctggttgctccgagctaaagatgtggctccttctaccacaagggctgttcccaccctgtgttaccaatgctattctcctttcccaaagacagcctcttttgtagcatcctaagacagacctgaagtccagaggctgctcaatttcttggatgaaacaaatgataagccaggagcggtggctcacgcctgtaatcccagcactttgggaggccgaggcgggtggatcacgaggtcgggagatcgagaccatcctggctaacacagtgaaacaccgtctctactaaaaataaaaaaaaatagctgggtgtggtggtgggcgcctgtagtcccagctactcggaaggctgaggcaggagaatggcgtgaacccaggaggcggagcttgcagtgagccgagatggtgccactgcactccagcctgggcaacagagcgagaatctgtttcaaaaaaaaaaaaaaaaaaaaaaagacaaatgataataggcaagcctttggaaggacctttgtgtagccttaaataagataaacttggaaaggtaaagaacagaatactagtagttggggagatcagggttctagttctatttctttcacacttgagcatgttgctttttaccttactgaacctccatttctcccttctttaaaatggtacttgtctcgggcttgtctttttcttacagggtttaattcagtgagagaatgcatatgggcaagtatcttttaaattgtagagcactgtgcgcatggggctaggattattgttgtatacaagtgagccagagaccctggaagaatctgggttggataatggcattgcaggagaaaggaactaaaatttatgaaacatctactacatgccaggtaccaagccaggtgcttttctgtttgtaaaggataaaatgtcagccttgcaacactccggtgaggtaggcattattactcccattttacctgtaggaaaactgaggctttaagaggtctagggacttgtaatgttccagagactacctctagagcccagggtttctgtcaggtatttgtgaagagatcttaagaatgtcctatggtttctattggggttttctagc

SEQ ID NO: 475 - DNA, 3587 bp, Homo sapiens
  source 1..3587: mol_type = other DNA
ctcttttcgaccctgcggagcatccgcttccggttcccagactgaattgtcagtgagcggagtctgaggtcgctgtggactgcccactggtgaggtggtgcggcgtttatgcggctgagagtgcgggtctcaggcagaatgtggggcggggacgtgggaggtggctggtcaggtgaaggaagggtcgatctaaggaccctaccattactaatcacatctaggaaatgtggggcggtgccttgccccgagtccctgcggatagttaacactcccttgggcttcgaaagtagatctttttagactcgaccctgatttcctcttctccaggtttgagacggtaacatctgttttgcaggattgtgaaaaatgaggtcctctttctagagtacctgacaggttgcttggcatccagaagatgtttagctaagttaagagttttcttctgtcttccttctctcctccaaccttaacacctagatatgggctgggcctgtagactgactgccttggaatgggttggagctgctgtctgaaacttgctgggctgctctcccttttgaaccactttttgtctgttctgattcactcttccagggccttgcccgagatggacagccggattccttatgatgactacccggtggttttcttgcctgcctatgagaatcctccagcatggattcctcctcatgaggtgggaaccatctgtattcctgagtaggagatttttttccccgtgggcatgagatgatgcatgaaaggtaggatagcagggttagaaggcgaaacggagagtgaatcttagcacttgtagccagaggacccagaagctggattctgagcaacaggacccattgggaacttctttatggaagcctcctgctagggtctgttcacaccggttaattctggaaatttggagccttcatttccatactgttaagaggttcagcgcggtggctcatgcctgtaatcccagcactttgggaggccgaaacaggcggatcacctgaggttgggagttcgagaccagcctgaccaacatggagaaaccgcgtctctactaaaaatacaaaattagccgggcgtggtggcacatgcctgtaatcccagctactagggaggctgaggcgggagaattgcttgaacctgggaggcagaggttgcggtgagctgagattgagccattgcactccagcctgggcaacaagagcaaaactccatctcaaaaaaaaaaaaaaaaggtgaagaaatggggagctactgggctgccccagtgctatccatctactcatttagtctgtgttatctgttctacttaaattaagtctatgacctttccttttcctgacttcagggtaattcattagtgtttcagatgaaggtaggtgtgaagtaagactggtaaaatttctggggttgctgtgtcttgcagagggtacaccacccggactacaacaatgagttgacccagtttctgccccgaaccatcacactgaagaagcctcctggagctcaggtgaacttatgaaaccttatttcaggctagattcatccataccacaaattggcagtgttggggggatggattggaaagcaggtgcagatgtgaggaaactttccttcttgtggacagaaaagctgagataacacttctgcaacttctgactttcctctcagggacacacaagctgagctattgtacgatgatgctactagttgttcttgtgtttgtggtctccattgagcccccattctgtgctcttgtcttacagttgggatttaacatccgaggaggaaaggcctcccagctaggcatcttcatctccaaggtatttatgcccagtaggcaatatggatcgttacttccctttgttaaattaacagattgcagaaccctaatgtcccaagggctgagaggatgactctggattcatagaaggggtataatggagacaccccctttcccacttaaaacttttcatttggcaggccatctgtctgcatacattgtcacagaaaaacaatagcaccatacatttgaatagcaccgaatttcactgacagtcttctgaaattatcgcatcccaatcacatgtattctctctttaccaacaggtgattcctgactctgatgcacatagagcaggactgcaggaaggggaccaagttctagctgtgaatgatgtggatttccaagatattgagcacagcaaggtgagcacagtacttgggctgtggtgctgcaagaagccatctcaaataggacagattggacaggagtagcctaatctgtaacttaataagaaagcattttgctgggcactgtggtacacgcctgtaatcccagctacttaggaggctgaggcgggaggatcacttgagcccaggaatttaagaccagcccaggcaacgcagcaagaccctgtctcaaaacaaacaaacaaacaaacaaaaagagagagagaaagtaagcacctctcctgggaaagtacaggagggaagcagctattagtgacacacaggttggagtggcaaatccctttccccctattatgattctgtcttgggtcatatctcttcatttgtacaagctgctgtgttccttccaggctgttgagatcctgaagacagctcgtgaaatcagcatgcgtgtgcgcttctttccctacagtaagtgccactttcttttttcactttcctgacagggccctaagtaagaactctttaaatactgatgactagaggccctacaagttggggatagggaatcaggagctcaagcgtgaagataacctgctctgttcctccttttcttcttctttccttcagattatcatcgccaaaaagagaggactgtgcactagaaagttgcagcccacagcccttcatgtggactctgtcatgacatgctaactagacttcaggggagccacttctgttttcagcccctccctggaatagtgagttgggaggatggggagacagctaaccaactgcattacccaaaccatattgcacttttagttccctagttttctaggtgagcttcattccctgaaaggaggatgatgatatctaggcataacctagcctgtgaggaacctagttaggaaagacaactgacatttattgaatatcatgcactagtcccttacatatgtcatattttaattatagaaatcagtagcaaaaagaatcttggggattttccatctgacttccctggccatcttatcccatccttgcactaccagaagattcatacacttttgagactccagtgagacgctgttttcaccccttcctcctcctagcctctctcccaaaaagtaaaacacaatgctgaagaaatattggtgtgacttttgaatgttaccgattggatgtaaaatgctatcgagggaagaaaaagctcttccaaagagaggagccactggaaggaacagagcaatactataccttcctcgcaactacctgtgatgtctgaccagaacattagcaaggccaaggaactttaaccacagtataactaagaaatggcatagagtgaggggcactgaaagaaactgcccgttcccctagga

SEQ ID NO: 476 - DNA, 32744 bp, Homo sapiens
  source 1..32744: mol_type = other DNA
ggcagtccgcactgcaattggttggcgtctccgggacggatttgaaacttggcggttaaagctccggctgggacagggcggcgggaggcccagggagaacggggaagggacatttagtttggtgagttacgggggcacaccttagctcagaacctgtttttacccagtaccctagggctttggttctttgtcgccgtccccgttggagttttttctttgcctttcagaagcccgtgcactctctttagagtgcagggctgacgggcggtccagccctggccaagtcatggagcgtgaatctcccaagtcagtgttcccgctgaggagggtcggaaccggggaggacgccctcccacccctgctgacctactaacattcatcagcgagccttctttttccccctcgcagagacggtgctgagataggatcatgaaggaagaggtgaagggaattcccgtaagagtggcgctgcgttgtcgccctctggtccccaaagagattagcgagggctgccagatgtgcctttccttcgtgcccggagagcctcaggtgcgtagcagagtccagagcctgtgtctgaacagctggggccaaatggtaacgaggggtgtggtcttgcctttcatttttaaccttacgccttgtcccgtgccttctctaggtggtggttggtacagataaatccttcacctacgattttgtatttgatccctctactgaacaggaagaagtcttcaatacagcagtagcgccactcataaaaggtgtatttaaaggtaaggcgatttgattcctcgaacgtaacatatatattccttgagcatatactatgtgccaagcactgtgcttgggcactgcaaatacaggaatcgatgaatcatgattcctgccttcaagaagcccttagcctaataacatttgtcaacgtctctgtacccttgaagctagttttattctgtatttgctttatgtggttctgttcatctttgacttgtatatgtttgtttatcctggaacttcattagattataaactctgtggtggttgctgatggtgataagtgtgccaacctacttgaggcccaggcactgcaaagcttgttgagggattcaggtgataaataatatagcttcgaggccctgaaggagttcaaagtccaggggataggaatggagatagatgactacataaataattttgaatatataaaaatttttaaattttttgtacctatcttttagaagaaaaatttttcaagttaaaaatatacaacagagtcagtcctatggaagtagtagctctgctctcatacaaagtggtatgaaaaacaaaaggatggctctaactctgcttggggaatttggggtgaatttcacagagtgggaaaactttgagatgggtcttgaataatgagtatacttcttttaggtggagaaggggagtgcctaaagcctctgaatactatcaccagttaataatctttactggggaagctaagtctttaatgctgttgaggaccatagcagggttctaaagaagggagcagtgcctgagagatgtctaattattattctaatacagtggttattcaagattcaaaacagaggttcgtttaaaagaagtagaatcatggcatgctagtgccttaaagttgaaagagacatttgtatatcatctagtttgtttttcatccaaagaaaaatgcgttctaacaatatctgttaggtgaactgccagtgtctaaaatttttttgacagggaactcactgactcacaggtagtccagttgagatttgggttttggacaagtctaattatgttataaagatctttataatgagatgaaatttgcttcctggtaatttctacccagtgatgttagttcattcctttagaagccttcttctaggcaacagctattcacatattttttcacgtttttttgtttaatgatatggctcaaggaacactgaaatttttgtttcaaaattttaagatattaatgcaataatttcaaacgtatagaatgttgcaagaacagcataaaaaacattttttccctgaaccatttgagatgaatcattggcctgataaccccccatactttagtgtatatttcctacaaaaaaggactttcttctaagttaccacaatacaaccatcaaaacaataaaatttgcactgctacattactaccatctattcctgaaaccccattcaagtttcaccaattgtcccagtaaatattttatggcaaaaagatctagttcaaaatcacgttttatttagttttgctgtctctttagtctccattctaaaacagttctttagtctttttttgacttttatgagtttgacactttgaagattacaggccagttattttgtaaaccttttctcaatattgttttgtctggcatttacttatgattagattcaggttgtgtatcttttagcaggaatatcacagaagtggtgctgttttcttctcactgaagcctattgggcagcacatgattttgatttattctattactactgatgttcattttgatcatttgattaaggtgttaatctgctgggcttctccactataatctttttcctttttacatacagtatttggaaaaccgttaagtgtttctacctaattctcttcaattatccccgcctttcctttagccattcctgaaacaatatgcttttcagaccctgcactatctggtcagattcctcaggctatacctccacagcttagtaagagcaccacagttctacttttacattcttaacttgggaaactgatagaattaaattatgttctttaaaggcaacataaagtagaaagtgattccaatatacatgtgtttgcttaacattacccttggttgcaaaaacaaagtcaatattttttatagtcagctcaacagcaccctcttgtactctgaactcctggtaccacagagccctaagtattttgtaaaaactactaaaacctcatttcccaagttattgctatctgcacatatctgtggtattgcagaaaattatggaatgttattctcttgccccatagtcatgccagctgataccagcggtctattacagtgaaaatctcaatttagcatcttcttatgatccttcatttagaccaacaagttttttcaaaacttcaaagttttcatttagattaaaacgttgtttcaaagtttaaagggttttttccttcagactgcaaaattatcttggtaaatagcagataacagctttgacataaatatgatgatcatttaacagagaaagcttgctttgtgttccttgacaacatgtctgccacactaataaggaacagacttccctaaggtcattatttttttcaccttgaagtaaatttgcatttgtagttccttttaggtgccatgcttatagttttagaagctactactgtacaattaagtagcaagttataattatgcatcagttaacgacagggataccttctgagaagtgcattattaggcggttttgtcattgtatgaacatggtggagtgcatgtatacaaacctagatagtatagcctcctatacacctgagcctactgctcctaggctacaaacctgcaaagcatgttactgtactgaatactgtaggcggttgtaacatcatggaaaatatttgtgatctaagtatagaaaaggtgaggtaaaaatacagtatgaaaggtaaaaactgatacacccgtatagggcaattaccgtgaatggagcttgcaggactggaagttgctctgagtgagtcagtgatgagtggtgagtgaatgtaagggcctaaaacattattgtatactactgtagactttataaacactggatacttagcttacactaaatttattaaactttgtgtctttcttcaatcataaattaaccttcgcttattatacgttttttactttataaactttaattttttaaatctttttgacttttttgtaataatacttagcttaaaacacaaatacattgcacagcggaataaacattttcactctgcatctttattctgtaagcttttttctttttaaaaaaatatatttttttactttttaaactttttgttaaaaactaagacacaaacatacacattagcctaggcccacccagggccaggatcttcaatatcactgtcttccacctccacgtcttgtcctactggaaagtcttcagggacaataacatccatagagctgtcatctcctatgacaacaatactttcttctggaatacctcctgaaggacctgcctgaggctgttttacagttaactttatttatcataagtagaaggagtatactcttaaaaatgataaaaagtatggtatagtatactaaacacataaactagtaacaatcatttattattatgaagcgttacatactgtacatagttggatgtgctgtacttttatatgactagcagtgaagtaggtttctttaccccagcatcaacacaaacatgtaacatgttgcactgcaatattataatggctaagtcaataagcaacaggaatttttcaccatcgtgtatacattccacatgattgaaatgctattatatggcacacgactgtaacaattgaagttaaagtaagaataacctgtctattgtctaattgtttctttataaaatcttgctacagttgtttatcttcctctagcttcaatccaaactttgaatttacgggataaaacgaaaatgcccgctgggcatggtcgctcaagcctgtaatctcagcactttgggaggctgaggtgggcagatcatttgatgtcaggagttcgaaaccagcctggccaatatggcgaaactcgtctctaccaaaaaatacaaaaaaattagctgggcatagtggcgcgtgcctgtagtcctagctaccctggaggctcaggtgggaggatcgcttgggcctgggaggcgaagccgtgatagcacacactgtgctgcagcctgggtgacagagtgagaccttgtctcaaaaaaccggggagggggagtgctgagtaactagtaatctggattatctgacaagagaaaatataaaaactaatctacaaaataaacatttttaccagaactaagcccaaacagaaatatacttttttttgaaaccgaatctccctcagtggcccaggctgaagtgcagtggtgcgatctcggttcactgtaacctccgcctcctgggttcaagcaattctcctgcctcagcctcccgagtagctgggaccacaggcgcccaccatcacacccagctaatttttgtgtttttagtacagatagggttttgccatgttggccgggctggtttcaaactctgacctcaagcgatctgcccgcctcggcctcccaaagtgctcgattgcaggcgtgagccaccacgcctggccaataaactcaaacagaaatatattttatgggtctttctgcaaacagtactgataacataagtgataacgaaaaacacagcctctgttcaataatgccttctatttaataatttaaaaaatacaaacgggggaaaagaaaacacaaaaaatttaccatcctatggcttggtgtggtggctcacgcctgtaataccagcactttgggaggccaagatgggcggatcacaaggtcaggagatcaagaccatcctggctaacacggtgaaaccccgtctctactaaaaattcaaaaaattagctgggcgtggtggcacgcgtctgtaatcccagctactcgggagactgaggcaggagaatcgcttgaacccgggaggtggaggttgtagttagccgagatcgcgccactgcactccagcctgggcggcagagcgagactccatctcaaaaaaaaaaaaaaatttaccatcctatttctcagagataaacatcaaaataattaataatttatatacttttgatcttttcctatccatacactcatatttaacaattatttttaagctgcttttttcagttaactatattgtgaacatctttgaataaatgatgcttttttttttttttttttttgagacagggtctgctctgtcacctaggctggagtgcagtggcttgatcaaggctcactgtaacctctgcctcccaggctcaggtgattctcctgcctcagcctccaaagtagctgggattataggcacctgccaccatgccctgttaatttttgtatttttagtagagacagggtttcaccatgttgcccagtctaatgttaaactcctgagctaaagcaatctgcctgcctcggcttcccaaagtgctgggattacaggtatgagtcacggaacctggctcattaatggatgattctttatcaattctcaataaaagcaaaggcatatatcacattgaattatgcttaaatgatgatatttctgtaagcagcctgataatatggttcaaatgcattctgagagttcagatatgaagtagatgctttcattgactgtaaaaagcaatgttgtttccttttcagataaatactgttaatcaagaaaatacatgccagaatcctttctttttctttaatttaatttctgtaatttaaaattgcttaaggtaggaagacagaattttcaagctccaatggcttttgacagtggcttggccaccttcatttagtcagtcatatcttttaagtgtttgatttcttagcttctaagggctatcactacggggacacattttagggttgggttttgttttgtttttgtttgttttttgcttattttgagtagtgcaaggtcatggtacccacagaacttttctttgtgtctgccattcttaagagactgtattaagagagcaatctcagttttattacaaataattgctgaaggaaatggagtatattgattagatgaaaatgtttaaacaccactatgcatgtgacgtctattttgtcaggatataatgcaacggtcctggcctatgggcagactggctctggaaaaacctattcaatgggaggtgcatatactgcagagcaagagaatgaaccaacagttggggttattcctagggtaatacaactgctcttcaaagaaattgataaaaagagtgactttgaatttactctgaaagtgtcttacttagaggtaagcaatttatgtttaattattctgaattcgaaattgtctttgggtcgaaaaataaatccaaatcaggtttttcctgacatgactcaaattagtaagttgcattttaattaattgatagagaaaacttactgactcagttggatccggctcccacccagttctttccttggtgttagaatagtctgtttaatttgattgttggaggaattgacattgccatataaaaggtgataggaattctttaattccagtttggcctctgttactgattacctgtatagtctgcagaagagtgtttgatttccctttactgtttaagacttaaatgataatgctgttgcctcatgaagaatgttaaaaaccagctgaaatattgagctgtataagcggtgatagagtgtgtttattaaacagatatttactgagaacctaccatgtgccaggcccaattctaggcacttgggtatatgaggtacttggtatatatcagtgaacaaaacaaaaattctagcccttatgggagtttgtgttctagtgtatattagtatagttgtagactggccaattgtatctaacttcataacatcaaaaacacatctttagggaactgatggcttctgggaagctagctacttgattccatagcagtgatgtcttatcctttagggggtaataattaaacttatataatttaagcatgtgaacacttaatcctgaagttcaatctcagcatgctaacaggtaaagagatgtagaactggaagacaggggattacatcattaagattagccttcttggccaggcccggtggttcacgcctgtaatcccagcactttgggaggccagggcgggaggatcacttcaacccaggggtccgagaccagcctgggcaacatagtgagaccttgtctctacaaaaactttaaagattagccaggtgaggtggtgcatgcctgcagtcccagctgctcaggaggctgaggtagggtggaaggattgcttgagccccagagtgagaccttaaaggcaatttttaattctatttatttatttcttttgagaaagagtcccactctctcacaggctggagtgcagtggcaaaatcatagctcactgcagcctccagctcctgctcaagcgatcctcccaccccacctcagccttccaagcagctgggactacaagcgtgtgccacttcgcctggctaatttttaaatttttgtagagacagggtctcactatgttgcccaggctggtgacagacccctgggctcaagtgatcctcccattttggcttcccaaagtgctgggattataggcgtgagtgactgtgctcagctagattagccttcttgagtctcttgattaacctagttgtggccaacataattgaatatcaaaataactccagatcctggtatgttaaataatagcaatagcagtaatagcaaacacatgtagtgcttagatgtgctaaacactgttctaagtacttaaaattctgtttcatattgaaatattagctgccacttcttccttttccatccacccccatctatgtacctgttattcacattttaacaaaatgggtgaatgtaatgctattatgatgccatcaaagaactgaatttgcgtggtcatgtaacttttcatgtgtctgctgttcctaagagactgtcttaagagagcaatctcaattttgctacaagtgatatgtgaattcattcttataaaacatcaagtgattacctatagggttatggtccttttcttaattctacaagtaatacatgttcattatgaacaaatgtttaaatatagaaagtcacaaataattttaaaaattacctatgatctcaccacccagagattaccactgttaacatcttgtttttgccactttattttcaacaatatcagatttacaatgaagaaattttggatcttctatgcccatctcgtgagaaagctcaaataaatatacgagaggatcctaaggaaggcataaaggtgtgtttgtctctcatttgatgttattaaaaaaatttggcaattataatactaaagttcacatcccttttatctgccactgtggttttaaatgactactatcatctcagtcaggttttctgtggtcctaagtccctttgttaatctaaaatttctaggtgggagctcttgtggggaagcaaggaaagacgcatgttcagttttatcaccttcctgttacctagaggaatgccaatatcaattaaatattatttacagagttctaaggctgagcagtccagtatgttagccactagccacaagtggctatttaaatttaaatgaattaaaattgaataaaattttaaaaattcatttcctcaggcacactagccacgtatgaagtgctcgatagctacatatggctagtggtaaccatgtttgagagcacagatagatacagaacatatccatgtattttcttctgggtcattgttagccagctactaatgcatggatatgattgaacatatctatatccaatagaaaattctgttggacagcactgtaatagacattttgctgggctttgggatgatatttttaaaattgaaaagttaaactatatataatttttaaaacatgtaagtatcataggaagaagagatagcttatttgagaatcttctgtcagatggtatagatgcaagatgaggagctagaactgaacagaaaatgtgaggcaaaattgagagtttcctatgtgggagtgagccaaatccagaagccagtgttgaaaacaggcagagcttgagtattcaggagtgggaaaatcagaggctggaggtagatgaggctaggtagtactctggaaaacttggaataatatcttactcctgttctccttcccttcttctcttgcacaaagaaaaacagagaaagttgaagatttggggtaccagtgagggacaggtgcctgtgctcctgatttttttttctgggtcattaagttgttagccagctactaatgcaaagtttaaaggatcagccctgataagcttggaatatgcaaagatgatttggatagtgaggataagaaacctggacaaaatacatgctattgtactgagccagcacttgaccctgtttcaagatcttttatataccccatgttaaggcaggaattaagtcctaagagttgtttgaggtgagatttgcaatacagagaagtatgagttcctgacacaaattggtaaggaagagtttgtaaacactcttcagatgggatggataggctttaagtaagtagagaaaataaggatattcttatggtaaggaatagctttagcaggaaagcagaaaatatacacctgagggtaataagactacacaagtctgtctggattagaggatttgggctgggaagtaacaggagatatgttaggaccagattatgaagccgggctaaagagcttagtttctatccctgtgaaccatataaactatgtaaaacttctgagtgagggattactgtggctacttttaccaagtttttatcttatgtgtgtatctctccaactctgttacaagtgatatgtgaattcattcttataaggaattcaccctaacctggaggtcaggggagtactttgaaatctctttgtatcttcgttatctagcacagggcttagtaggttggtgacattttaggaaaaccaaacagaaatggattgaaaaggagaaagactgggatgagaaagaccagttggggaaactgttgcttattttttaggtgtgaagtaatatgggcctgaactaggcaagtagatgtgtaaaggaaaaggaagtgatggattcaaaaggagaatgactagtagttggtgatagatattatatggaggagtgggagaagttgaaggtgatgtgagtttttgagaatatgagacaagattaatagaaatggagaagtattatagtagagagaattagtgtttgtgggaggaagatgaatttggtttataattgactgatttcaaagtgtaagtggtaaggtagatcattagaaataaaagactagaaattagggccacagaagtaagtttgggagctatgaagtaataaaattatagcatattggagctagaaaagacttcataagcatctagtccaatcacctcagaggctccaagagattcaacttgtataagttctccaaggtaaatacagtactaagcctggggtcctgttttcctggcttcctaatccagtggaaactgtaccatgctatttcctctagtgaaaatgaggttaaaaatgaatcagaggtacagagaggagcatggggtcagataggggtgaaagtaacaaagagaaatgccatcgctgtttgtgttgtacttgctctccttgggaccagaattaacttcacttggggtttcttggaaggcacgtagccattgctaccctaaaatcttgagatcttttctagctccagtattagctggcacgcttgtttctgaagttcctaaggaagattggagaccttagtttccagctatcttcacagagttgccagttaaagcagttcttatcaccatgactgttctatttgaggttctactagactatcaaggcatttttttaaaccaccaatccctatatttctgaccaagcatttgaagtataaatcataagggaattttctctttcttgcaattagattgtgggactcactgagaagactgttttggttgccttggatactgtttcctgtttggaacagggcaacaactctaggactgtggcctccacggctatgaactcccagtcgtcccgatctcatgccatctttacaatctccttagagcaaagaaagaaaagtgacaagtaagttacaatttaaagagtcaagatttttagtattagttctattaaggttaaacattagactgcttcttcaattgatttgacaaatcatcagacatcagtattgtgagcacgagtgactaatggagccattttgactgacttgaaagaaaatgagagctgacaggtcagctttgatattcagttactctcaagcttgtgtaccattctcactgtgtcttcctttcattatcacaggaatagcagctttcgctccaagctgcatcttgtagacctcgctggatcagaaagacagaagaaaaccaaggctgaaggggatcgtctaaaagagggtaagagagtaattaaggtcacagttgtagattaaaaacttctagtactcttgttggtattgttggtgttttcgactgggatttgagatcacattctaacagtagctacgattcagatttgaggctgagttcagaaatagcgaaaaattgtttctttcccttgctctcattctctaattcaggtatgagatttggatctggcctttggtttgatttcatctggtccaggcaagttttagttttagttttgttttgttttgttttaccccaactatttataattaaaatcagtatcctgattctgtcattttaagtattcaccatcccttccagatgttgtcacatataaacctcagcccaatttccatgccttcattcaagttgttgaatttgaaaagtgatgaaattcctaaggctagaagaaccctgtgatgtaggctattagaaaccttcttctaacattatagtgacctggtaatctgcatgccttggtaatgatcttgaagtgattattaatctctctaacaaaaattaacatccagctctatatctcaattttgttcttaaggatatcataaaatagttcatcagatgccttgctaaatccagatacaccatatctactgtatttctcatagctaccagcttagtaacaatacaaaaaagaaataagggattttagcctaaagtgctttttcttggtgaattcaaggttggcttctagtgcttattcttctgttttctaggttcttgcatgctgtccctctaataatccactctagacttatatcaaacccactgtttggtaatttatggaattaacttttatccctgttttgaaaattgaaattgcatctgcccagtcttctagaatgtctttctctgtgattcgtcaaagatcattgacatagcttcagcagtctcgtttgaaattactctatgttcccttagctataattcatctggtccaagatatttgaactcttattaaagcagttgggtttacacttactacctctttactcatattgggcttcatttctctcttgggaactgagaaggcagaaggaaaaatattaattgaggaattttatttctgtcatttatcattattatactgttggcactgagtgcagacctgtttcttcctcattcagctttttgttctgagtgtcattcaaagtaccctttttgttctatgtttgcacttgagatttagctttcctaagactatttttaaaggctgtaatgctttctttatcttcttttaggtgttcagttccaagttgttttatttaacagctttattgagatataatttacgtactataacattacctatttaaactgtacatatcagtggattttagtatattcacagagttgtacaatcatcatcataatctaattttagaacattttatcatcccaaggagaagccccatattcattagcagtcactccccattcccacccctttccctggccctaggcaaccacttaacttacatttctttttttttatttttttattttattttattattattattattatactttaagttttagggtacatgtgcacaatgtgcaggttagttacatatgtatacatgtgccatgctggtgtgctgcacccattaactcgtcatttagcattaggtatatctcctaatgctatccctcccccctccccccaccccacaacagtccgcagagtgtgatgttccccttcctgtgtccatgtgttctcattgtgcaattcccacctatgagtgagaacatgtggtgtttggttttttgtccttgcgatagtttactgagaatgatgatttccaatttcatccatgtccctacaaaggacatgaactcatcattttttatggctgcatagtattccatggtgtacatgtgccacattttcttaatccagtctatcattgttggacatttgggttggttccaagtctttgctattgtgaatagtgctgcaataaacatatgtgtgcatgtgtctttatagcagcatgatttatagtcctttgggtatatacccagtaatgggatggctgggtcaaatggtatttctagttttcgatccctgaggaatcgccacactgacttccacaatggttgaactagtttacatttcatataaatgtaatcatacaatatattgtcttttgtgactggcttagcctaagattttcaaggttcatccatgttgcatcatatatcagtacttcattcctttttttttttttttttttttttgagagagagagagtctcactctgttgcccaggctggagtgcagtggcatgatcttggctcactgcaacctccaccttccaggttcaggcagttctactgcctcagcctcccatagctggggttacaagcatgtgccaccatgcctggctaatttttgtattttttagtagagatggggtttcattcaccatgttggccaggctggtcttgaactcctgacctcaagtgatccacccaccttggcctcccaaagtgctgggattacaggtgtgagccaccatacccggcctcatttctttctattgctgaacaatattccattgtatggatatgccacattttggttgttcattcatcagtcatatccaattttctctgttatgaacttctgtgtgtaaattttcacgtggacaaaggttttcatttatcttgggtatatacctaggaatggaattgctaggtcatatggtaactctgtttaactttttttttaaaagaataaaagatataattatataattaacataccataacactcacccttttaaagtatacatttcactgatttttagtatgttcacaaggagttgtataaccatcaccgcaataaattttagaatattttcatcacctcaaaaagaaatccatacccattagcattcactccttatttcccctcaatatatgttcctcacctctcatcctaggcaataaccaatcctctgtctctgcagatttgcctattctgggcatttcatataaatggaattatacaatatgtggtcttttgtgactggcttctttcacatagcataatgtcaaagttcatctatattgtagcatgtatcagtactgaattctgttttattgccaaacaatcttccattgtatggaaataccatgtttttatttatccattcatcccttgatggacatttgggttgttttcattttgggttattatgaataatgctgctatgaacatttgtgtatgtttttctgtagacaagttttcatttctcttgagtgtatacctatgagtggaattgctggatcatatggtcactccatgtttaaccttttgaagaactaccatcacactgtttttcaaagcaacgacatcattttttgttctcaccagcaatatataagggttccagtatctccacattttcacttgttacttatttatttttcaaactcctgggtgccatcagatttgcttgttattatgcctttttaattatagctatcctagtgggtacgaagtggtatctcattgtggtttttatttatatttcactgatggctaatgatgttgaacatcatttcatgttatataacttttggaagaatgtcctttcatatcacatttaggctttgacccattttgagttaatttttgcatatgatgtgaagagtggtccagtttcttttgcatctgtatatgagttatcccagcatcgtttgttgaaaagactatcctttcccccattgaattgtcttggcatacttgtcaagaagcaactggtctctattcctttgatctatatgccttacgccttatgtcttcattactgtagctttgtggtaagttttgaaattgggaagtgtgagtcctccaacttcgttcttgttcaagattgtattggctattctgggcccctttcatttccatatgaacattaggttcaacttgtcaatttctgcaaaaaagccagctgggattttatagagatttcgctgaatctgtagacccacttgggaagtattgccatcttaacaatattaagtctttcaatgtatgaacatcagatgtctttctttttctttttcaaattttttcaaattttttatttttatctttattttattttattttttgagacaatctcactctgttgcccaggctggagtgcagtggtgtgatctcggctcactgcaacctctgcttcccaggttcaagctattctcctgccttagcctcccaagtaagtagctgagactacagacacatgccagcacacctggctgatttttgtatttttagtagagacgggacttcaccatgttggccaggctggtctcaaactcctaacctcaagtgatccacccgccttggccttccaaagtgctgggattacaggcatgagccaccgtgcccggcctcttttttttttttttagagacaagatcttgctctgtttcccaggttggaaagcaatggctgcagcctaaacctcccaggctcaagcaatcttcctacctcagcctcccaagtagctgggactataggcatgtaccaccactcttggttgatttttaatttttttttgtagagacgggtctcactttcttgcccaggctggtcttgaatgcctggcctcaagtgatcttcctgcctttacctcccaaagtgctggtttataggcatgagcgactgtgcttggagtatctttctttttatttaattcttttttaatattttttgataatttttttttaattttcagagtataagttttacacttcttttgttaaatttattcctaagtattttatcctttccaatgctattgtaaatgcaattgttttcttaatttcattttcaatttgtttattgagttttgtagatcttgtatctgcaaacttgcagaacttattagttctaatagctttttaaatagatgctttaggatttctgtgtacaagatcatgtcacctgtgaatagagatacttttacttctttctttctagtctggatgcctttacttctttttcttgcctgcttgtcctgactagaagcgccagtataatggtgaataaaagtggtgagaatgaatgttgttattttgttcctgatcttaagggaaaagcattcagtctttgttcttcataggtgccctaccaggttgaggaagttcccttgtacacctagtttgttaagtgtttttatcatgaatgggtatttgtcaaatgcttttttgtcatctattgatgtgatcacatgatcacattatttttgttctttagtctattgatatggtatactgcattaattgatttttgaatgttaaaccaaccttgtattcctaggataaatctcacttgtttttgtttgtttagtgactttcctggactgattctgtaaactggattccctgtagtttgccatcacagaagtgtcttctctgttaatttagtggttacttgatgactggtctcagttacttaaatgccttgaacctatacatcttccaccatttgccaagagttttgtgtctgtgtttgggcatatgccttcaacactcaggcacttttacaactctgccttagccttcactgcttaaacagagtctcaaagtcagccagagatgcaaaatttatggctttttaggtctttcctgagcatgtagacagccctatacattcagacaactttctagaccttcagaaatatatctgaactttttaatccccactccctcccgtggatacctcatttcccagaccttttaagctcttagctaggcttttgtttaaccatgattattaagtttggtgtttatctttaccagatgtttttctgtgcatatgtgtatgtgtgcatatagtaatatagtttttatatacctttaaatattttggcattgcctaatttatttatttccttttaactatacaagtaatacatgaatagattctcatataaaaatacaaacaatacagatgaagataaaatctaccttgatttaccacccagtcctaatccagaggtgaacactttcatctgactggtgggtatcattcaagattttttcacgtacacatatattttttattggtgttgctgtgtttttaaagataaatgtcatcatgctacacatattgtttttcaacttgcttttatctcttcgtgatacaacttagattttttgttttgttttgttttaagagatggagtcttgctctgtcatccaggctggagtacagtggcacgatctcggctcactgcaacctccgcctcctgggttcaagtaattctcctgcctcagcctcctaagtaggtgggactacaggcacatgctgccatgcatgactaattttttgtattttagtagagatggggtttcaccttgttgcccaggctggtctcgaactcctgagctcaagcaatctgcctgcctcggcctcccaaagtgctaggattacaggcgtgagccaccacgccaggcctgagatcttttttgtatcccgtgtatataagtctacttcatttaaaaaactgttacataggattccacggtatacagtctaccttgtttattcctattttggttgacatttcagttttccaatttctggctattggaaattgatgcctcactagatagccttgtacatgataaacatgtgagagtattctctgttatgtacctgaaagaggaattgctagattgaagggtatacacgtttgagtaaatactattaaatattgcacaccaaaatgtctgcctctttatccactctacctacaaaatatgatgatgtttctctatactactgacaatattggatattattgacctttttagtcttgcctctcttgaatattgcatgttattggctatttctctttccatttctatgaattgcctgttcataccatttgcttattttttcttctttcatgttgtatttttcttattgatttataggagttgtttatatattctggatattaagccttagttacatatattgcatatgttttcctcagtctcattttttaactttattgatctttttcatttgtgccttgtgtgtgtttttcttcttacatattttttctatttttgaatatgtaaaattggctacttaaggagcaatagctttttttctttttcagccttattgaggtataatagacaaaaaaaattgtaaatgtttaaagtagacagtgcgatactttgatatatgcataaattgtgaaatgattaccacagtcaagctaattagcatatcaatcacctcatgtagttatatttttcaatatgttatttcttgaagtaaaatttatatacaattggcctggcacagtgactcatgcctgtaatcccaacacttggggaggtcgagaagggcagatcacttgaggccaggagtttgagaccagtctggccaacatggcaaaccctgtgtctactaacattccaaaaattagccaagcgtggtggcgcacgcctgtagtcccagctactctggtggctgaggcacgagatttgcttgaacctgcaaggtggaggttgcagtgagccaagatcacgccactgcactccaggctgggtgacagagtgagactctttctcaaaagcaaacaaaaaaaatttatatacagtaaaatgcgcataccttaaatgcttagtttgttgagttttgctagttatatacattcatatatctaccaccaaaaatatcatataaaacaattccatctttccagaaacttcccttgtgcccctttccagtcaatccatccttcccccattccacttccagcaaccactttctgacttctgtcaccatagattaattttgcatgttcttagacttcattacagtgggatctcaaaatggttgtgtgtgtgtgtgtgtgtgtgtgtgtgtgtgtgtgtgcctggattcttttgctcaacatagtgttttttgagatttgttcatgttcttgctttgattagtgattttcctttgtattgctgagtagtattcaattctatgattataccactatttgtttttctattctcgtattgttgagaatttaggttatctcaaatttttagctattatgaataaagctaccctgaacatttgtatacaggtctttttgtgaacatatgtttccatttcacttggataaatacctaggaatagaagagggcaagcgtatgtttaactttatgagaaagtgcctaacagttctctaacatggtttgtatcattttacaccccagcagtgtatgagagttccagttttttacgtttttttgtatgctctggtacagttgatataacatggaaattatctctgaaggtttcttgaagatttgattttctatatcttgagccaattctggtcatttatattttcttagaaaattgttcattttggccagtcacagaggctcacacctataatctcagcattttgggaggcctaggtaggaggatcgcttgagcccgggagttggagaccagcctgagcaatatagtaagatcactgtctctacaaaaaataaaaaattagccaggcatggtggcacatgcctgtagtcctggctactcgggggactgaggtggaggatcgattgagccctgaagaccaaggctgtagtgagccaagatcgcaccacagcactccagcctgggtgacagagtgagaccctgtcctaaaaaaaaaaaagaagaagaagaagaaaaagaaagaaaattattcattttttctgattgccgaatttattaatataatattgcaaatagatttactttatagttttaatctcctctttatctgtagttatgtctcactttcatttcaattgtttatatatcttctgttttttctatcacatttgacagattaactctacctttttccaatttttactattactctattactgagttcttcctaagttgttttattttgttttatgttctttttattgcttcttgagttgaaagctgagtttacttcttttcttctcctttttaaaaaagcttttcaagcatatacagaagaggtcaggatggtataatgaatgcctcccccaatatacctgtcatgaagtttcagcaatgactaatttatgaccagtcttgttttgtctatataatacccactttctccctctgatattatttgaaacaaatcacggacatattgttttatttttttcagtttgtatctgtagaaattaagaactcttaaaatataatcacctaggtcaggttcagtgactcatgcctgtaatttcagcactttgggaggtcaaagcaggaagattgcttgagaccaggaatttgacagcagcctgagcaacatagcgagaccccaccatctctacaaaaataaaaaataaaatagccaggtgtggtggcatatacctgtagtcctagctgaggcaggaggatggctggagcccaggagtttgagactgtggtgagctgtgattgagccactgcactccagcctaggccatagagtgggaccgtctctaaaaaaaaaaaaagaaaaaaaaatatatatatacacctaaaaattaaattaacaataatactaatgccttaaaattacatatctagtcagtgttcaaatttttaattgtcttatagattttatttatttggatcaggatacaaacaaggtccacacattgttattgctcaataggccttttaaatgtcttttttttttttttttttttttaagacggagtgtcactctgttgcccaggctggagtgcagtggcatgatcttggctaactgcagcctctgcctcccagattcaagtgattttcctgcctcagcctcccaagtagctgggattacaggcacacgccaccacgtccagctaatttttgcatttttagtagagatggggtttcaccatgttggccaggctgatcttgaactcctgatctcaggtgatttgaccacctcaacctcccaaagtgctgggattacaggcatgagccactgcacccagccaaggcctaaatgtcctttaatctctaggtacctcctccatctttctttacccctcaagtccctggaatttgtttattgaagaaatcaagttgtcttgtagaatttcccatagtgtgaattttgccaattgcatgcctatatagtttcacatgtttcacttttattctctatttcctataaattggtaattcgatctagaggcttaatcacattcaagatcaatttttttcttttatttgcacatacataactatgtctcatttattttcagttgttcttatctaaaaagatatatttaaagctatacatctcctctaactaccacttcaatctaatcttataattttgagaaatagtactcttattgttcatgtctaaataggatatttactctttcattttctctcaaacctaaaagttatttagaaggtgcttctgtctttccttttattgtcaatttctaatgtattgcattatgttcaacaaatgtatgtgatttgtgttttttgaaatttggcctatacttatttggtctttattaatattctgtttatatttttaaaaagtgtattttctcttgggtgtatagttctatatatacctattagatgagcttgttacttgtattattcagatcctcatgttctttttttttacttaatatgttattttctcacagtatgaccaagaatttgtccatttctccttgtatttcttagtttatacattttatactttggagctatgttgccaactgcataaaatgtcatgacatacgtcttcttagaggattatatctattttgtctaattagtatttcttcacctactttctctttgttagcccttacctggtatgttttccatccctatcttacagaaactttgtagcttgacttcattaattaatttatccattcatttatacccaatctgatggtctctctttttaatttttttttcttttattaaactgcttagggatgatgttctcttttaacaggtagttttaccctctgtattcgtgtgtgtgtttggacttatttctgtcatatcactgactattagtctatggtcctactcctgctcctgtaccacaaccagataccttgaccattgtcccagggcttccttctgttttccgaatccactaccttcaagtctgtagtactcctgcagttgctgccaactttttatatcagttctctcctgcatattttttcttatgttggtctgattcatctgctttcagtctctcaaggattttgtggtttctgatccaccagtgatggattcacaggaagttggtggctttcccacttggcagcctattcaaagacttttaggggctctaaaggaattttactcaattgcattagagggttttacatacacattctgggttgcccatcttagcttcagagcttcaatttcctcatttgtaaaataggatttgaatatattctccaatagagttgtgggaattaagtgaactcatattcgtaaaacatttaatgcaattcttagtaaatagtagtctcttcataattaccaattccatcatctgtgtttttacttgctctgagtgtggctaatgaggaatataggggctctactgatatttatatacaatctcagctgaactaagatccctatgagcttgctaaggtgcttgtcaacatttgaggtagatttcgagggtggaagaaacttttagggatatggcttatacctgtggaattaacttttctttggctaccaaactgccattgtcaaaggcaagtcctccactgttagagggaatcattttctacttatcaagaactaagaaagttgctaaaccctctggaatattttcagaaggtggatatggcccggcagaatattgttacatgttgcattactgtggattgggggaaaggagatgtacccaagtgtcagatttgactcgtgaggcaaagaagtttatgacagaatcatagttgagtcctacatcaagtggcagatgccaagagttgaagggaagctagtgagaaaacaggagataggtatataggaagcagacagcagatggaaagattttggacatgtcagatttggagtacatattagaaaaatccaggaagaaatcagaaagtcaggacaagagcttagaagcaacatctgggctagagataaatatttggaatccatgggtaggagagttgtgcagagaaagactggacaatcaaagagccactagtaaatattaaataatattagtaaatactaaatatgagcgaggggcactcatatttaagggccaagggtaaatgagtcaataagagaagctgaagagacactggaggatcatagtatctagataaccaagggtttttataaacaaaaaggactgtcacctgtgtcatatgcttcagtgtgattactgagaagaggtaaatagatttgtccgttgaggttttgggtgatctttgtcagagcagtgtcggtcgagtggtaaggaattaggacaggttgtatcaaactaaggggtgaatttagccaccattctaaatgtggtgtttatcctttccattaatttctttattcttatatcctttaatgatatgtagtgacattttgcatgtttctaaacttaatgtaaggggtttcatggtatatgtgtcttctgaaactgattttttccctcaacattatgttcttgagatcaattcatcttgataatatagctctgttctaacaggttttgttaactagaggcttgagttttcttggtatcaaattgtatcagtaagaagaaagttacctctgccaatatttattcctttatttaattctcttatgtttcttagcaatgagaaaaatgtcagcagatataccctggactagtaaagttgctttcctcaggggaatctagtttctgatttaaatcagaatggttttaatgttttattatttggaatgataattgctattggtgttggtaaatggtatttaattctcttagttctaaagtcttttttaagtgcaaattgtctgtttcattcagcaactctattcattaaagtcctgttctaagtgttctgcatgttctttttggcttctgggtccctttaggtgtattgttattttccttggtctgctctctgggactgaagtctaatgctggagtatctgaagtcatagcagcccagtgagtgggaaaagcacagtggtttctgcccatgagctagcaggcgtattgccagtcagcttgtcaaacccatgaggaggcatcaggaggaggcctctctgtactcttgtttccttgtgctttcttagtctcaaggtagagaggacccaacccatctcattgttttcttagcattttcagatggggaaacctggcacactcacataagcagtattgactttccccctaggagttcagagtggtatgggcgaagcctttgccacagaccatgtttccatccttgcactttggctctgctacaccacactcttagcccagggcttttctctgttccagagatgaaaaattctacatcaccccttactctcaggtctcagacccatcctgcaacctacttttttggctggccccagcacctacttggcttaagaacagtcaatgaatcaggtttgggaatagaggcgatttggaatattttcaacttactatcttcccaaaattcatgtaccttttaaaaatagatgctaccaaactcccatgaaggaatgatgagattattcattttcctaaattctctactaagtattattaccaatttgataagtgaaaaatggcatgtcactttcatttctgtagttattagtgaagttgaacatacttttatatttataggccatttatattcctgattaaattacctattcaaagtatttctctttagtcagtgtgagtgctgtacattttctgttaagtttatccctactttttgttgtgattttgaatataaaacatatttaggccactgccagatagattataaatagattacagatggataataggtagattattcaattgaagtataatatacatattacacataaatatatattacatatacatattatgcatatatgtatattgcatatacatatatgtgtattacatacatattatgtaatataatgatatcaagtcatcattatacagttcaacgaatgttcacaatatgaaatacatacatgtaaatagcacccaggtgaagaaacaatattctaagcatcccagaagtgtcacttgtgctctcttctagtcactgtcttccccaaagagtaaccactgtccagacttttagtcctagattagttttgtagtatggactccttcatgtctgacttctttcactcaatgtaagatctccagagaaaatacaagatgcctagataaatttgaatttcagataaatgacatcattttgtatggaatatacctatattagaaatgattcatcatctatctgaaattcagatttaactggatgttctatattttttttcttttaccaaatctgataaccctaactcaacattatgcttgtgaggttcatccatagtattgcatgtagttgtagtttgtttatttttcattacaatatagtattccactgatgaatgtaccacaatttatcctctttactgttggatgggcatttgggtaatttccagtttggagttgctttgaataatgctatgaatattcttgtacaggtattttggtgaatatacgtacctaaattcctttaatcctgaatcctcctgtaactactgtcctatctccttccctttagactcaagcttctcaaaaaagcttacactgcttagcaatacatgtgattaactcttagtttcacttctttggtgagacatagcatacatacagaacattgcataagttatgtcatgtatctagtttaataaatgattataaagtaagcatctatataactaccactcaggttgaaaacaaaacacttccagcacccatgcatacccctccgagatcatgatccccttccttctctctccaggtatccattcttctgacttttgtgatgtcaattcccttgcctttttttttttttttttttgagacagggtctcgctctgttgcccaggctgagtgcagtggcacaatcacagctcactacagcctcaacctcctggactcaagcaatcctccctccttagcctcctgagtagctgggaccacaggcacatgccacaattcccagctaatttttaattttttctagagttgggatctccctatgttgcccaggttggtctttaattcctgggctcaagcagtcctcctgccttagcctcccaaagtgttggaattacaggcgtaagccaccacacctggccccccttgcttgcttgcttttcttttctttctttctttcttttttttttttttgagatggagtctcactccattgcccaggctggagtgcagtggcgtgatgttgggtcactgcaacctctgcctcctgggttcaagtgattctcctgcctcagcctcccaagtagctgggtttacaggcatgtgccaccacacccagctaatttttctatttttagtagcgatggggtttcaccatgttgaccaggctggtcttgaactcctgacctcaggtgatctgcctgcctcggcctcccaaagtgcagggattaccggcatacaccaccatgcccggcctccccttgctttcttgatagcaatgccacctgtgtatatatctctaaatagcataatatagttttgtctacttttaagctttatgtaagtggaattatactgtttataatctgttgtgccttcattcttccatttaaaatgatatttgagagattcatctactacattacatacagctgtagttcatttcttttcatttttgtatagtaatctatcatttgtctgtaccactattctttctacttttgatggatattccatttttttccagtttttggctattgtcaacaacgcccatatgaaccttcttgtttgtgtatcccaatgcatatgtataagaattttctaggatatgtacctagaagtagtatcactgggttatagagtacatatataccaaactatctttcaaagtttgtttcaatgtatgagagtcctaattgctctatatccactgttttgtgagaattttaaatttttgccaatatagtagatgtggagtgatactttattatggttttaagtttcatttcctcaattactaatggggttgatcaccttttcatatgtttatcgaccatgtgtattttcagttaaatgcctgttcacgtcttgctcatttttctattaaatgtctttttcctactgattaaaagtaattcttaatatactatagattctagttattggtcagttatatttattgcaaatctccccaccctgtgtgttttgcacatatcttctccctcctctctggcttgtgtttttactttctttttaattttgtgtcttaagaaatcctttaggccgggtgtggtggctcgcgcctgtaatcccagcactttgggagggcgaagcaggcggatcacaaggtcaggagatggagaccctcctggccaacacggtgaaaccccgtctctactaaaaatacaaaaattagtctggcgtggtggcgggcgcctgtagtcccagctactcgggaggctgaggcaggagaatcacttgaacccgggaggcagaggttgcattgagccgggattgcaccactgcattccagcctgggcaacagggcgggactccgtctcaaaaaaaagaaagaaagaaagaaatcctttagtacctcaagatcttaacgatattttttctatattatctaataaaggctttacagttttgcctttcacacttaagcctttaatccacctagaactgttttttttatacatgatatgatgcagggtccagttttgtttttccatataaatacccatttgtcctagtactgcttattaaaaagtccgttctttccctactgataagcagtgccatttctttcatatattaagtgcccaaatatcccttagtctgtttctgagtattctattaaatcaaaattaaatctgagtgtttttccctgtagaagtcttatacatcttttgtactattcttacgtaacttgtattttgacagtattgcaagtgatatttttaaaactttttattgaagtataatgtggaaatagaaaagtagacctaccataaatgtatagcttgctgcattttcactaactgaacaaacccatgtaaccaacataaatagaatctttaaaaattatattttctaactttgttttttgtgtgtggaaaataaaatgtgttctttaatattgattttgtatcctgcaacctcattcactctctcagcagtctgtctttacccaccttgccaaaaccactatgtaagagatatccagggatatcttaattaccagaactaattttttttcagtgcccatcttacccaacctctctgtggcattaacacttgaaaatactctttttgaaactcttaatttggcttgtaaagcctcactgtcctagttcttttcctagctcaaactgttacttttcaatcacttttgctttttcttcttgctgatccattaatctaattgcacccagcatgatctccccaattaggaatgagtacccattacctgctgttagttcttccttagcaccatggtagagatgcacccacttccagtctgttcctgccacctctacaaagtccatgccctcacctgcacatctgaactgtagccttctaactttttgactcctagaaggcattctattctaaataccatagctaggttaatcttaaaataccctttgatcaaagggatacatgtaccgctatgtttattgcagcattattcacaatagcaaaaatttggaatcaacctaagtgttcaacagatgaatggataaagaaaatgtggcatatatacacagtggaatactattgggccataaaaaagaatgaaatcctgtcatttgcagcaacatagatggatatggaggccattatgttaagtgaaataagccaggcacaaaaagacaaatattgcatattctcattcatatgtgggagctaaaaacaagggtataatggacatagagagtagaatgatagttaccagaggccaagaagggtgtgggagtggaggccgaggggaagaagagagaggttgattaatgggtataaacatacagttagatggaataagttctaatgtttgatagcagagtagggtgatgagtgaacagcattgtactatacatttcaaaataactagaagggaggaattgaaatgttcccaacacatagaaattataagtgctcaaggtgatggatgccctaaataccctgacttgatcattacaatttctatgcatgtaacaaaatatcacctatatccataaatatgtacaaatattgtgtatcaataaaaatacataaataaatgaattacatatgtagctttaaaaataccaccttttacatggcatctcacgtaaatagaactttgaagtagctgcttacaagatgaagtctaaaaaacatagccaaatcttccagaccctttataccctggtcccaagcctacctcctcgaccatctttcacagcttccctacccacactccatgccagctgtcaggtccccacaacatgcccagctaattctggtctttgcacactttcatcacagccatctcctcttctcccagaatgtagtgtgtgccccccaacacacaatcaaaccatctacaacatagccacgttttaagactcaacttaagtgttggggttttcgacattgccttttttaatcatgttatcttctaatgtatttttttctcctctgagatttctctagtaccacaggactacattgtcattttctggtgcctctgtatttctagcttcatctcccaccattttcccacaaactacaaggttccagccatagcagtctactcattgtttttccaaacagttctgttgtttcagatctctgtgccattactcctgtgtgttttctgctggattttctccccactgcctcagaaacatggttctgtcaagtactcctgctcctcctgttttaacttctccctctcaactgactttctgccctcagcatagaagcatactaatatttccccaacttaaaataaacaaaatatttcatcctcctcttactactgctctcctcccttttcctttcattctacatttttgtcacccctccatcctcctcccattgaaactatcccttttgaagtcaactcatgacctgaacaactgaatccattaggctcttttcagtcctccactgacttggtaattctgcaggtctgacatcctgccccttcttctggacaatctcattcctcttgactctgtgatgctaccctctcctgattttcctctcacttttctgaagactctttcacaggcttctcctcttccactcacccctatctgaaacataacccaggctttgtcctgggatattttctttctcttcccactgttcatgcccatcaccctgtcaccctccccccccaaagtggtttcacccacttagatgcttataattcctacctgtatgctgccaatcctaaacctctatctcgagcccctatctcataagtcatatttaagtatgtaaatatagttgactgtggggagtcttatggatgtcccacatgtatctcccattccacatgtccaaaactgagcccctcattcctccctgttgctgttttttttaatttattttatttatttatttatttttgagacagagtctcactctgtcgcccaggctgaagtgcagtggcgcaatctcggctcattgcaagctctgcctcccgggttcacaccattctcctgcctcagcctcctgagtacctgggactacaggcgcccaccaccacgcccggctaattttttgtatttttagtagagatggggtttcaccgtgttagccaggatgatctcgatctcctgacctcgtgatccacccacctcggcctcccaaagtgctgggattacaggcgtgagccaccgtgactggctccctgttgctttaaatgggtccctccatcaccggcagtgaataatatcaatatccacccagtcacccaagacagaaaccagggcattgttctatgctcttttttttttttttttaatctggctcctttccccaatctcattagtcactgagacctgtcagtcc

SEQ ID NO: 477 - DNA, 4688 bp, Homo sapiens
  source 1..4688: mol_type = other DNA
gggcggagcagctgaaaatccggcgcgcgcagtctccagccccaatttctacgcgcaccggaagacggaggtcctctttccttgcctaacgcagccatggtaagccgtttagttagcgagctcttaggacgtatccgcctccatcctcccccggccggggctgcccgaggtttcgggattcctactggggatggccgggcagaggcgaagggatcacggcctccgtggtaggccgggacgggctccagggcgaagggcgaacgctggcctagggttggggaggcgcagatctggtgctgctgttgggaaggcctcggtttctgacccggccatacgtcctgatcccgggagaagctgcttttcctcccgggccggagccgcggctgggccaggagctcagactgcgagcccgaggttggtgggcgctgggggtgcccggcggagaaaggttttctttgtcattgcctttttggcacggcctgactttaccatacgtggccggtaagcatctggacacagcattaaaaaggcttccttactctttttaaagtaaaattggtgtcagcttttggctttagtgtacgaaggagcagcacatgtgtttgtgcggatgtcagaatcttgttccatacgtgtcaaaaacagacggtaataaattgtgaaaactttagaaacacaggtagactcctggctcatttctgttgctgtgcgtttcactagtatggtgttcttgaaagaccctaacctctaagcagatacagtttcaaacagtaacatggaaacactttagcaaggttctgaaagatagtaatcagtaaacgttctgaaacatagtaaccaagaatattctctgttacaataagaaggcttgttgcagcttatggatctcacggtgtttgttaaataactgtgtttgtttctgttttatcggaacactatactttaatattgtccacattttgctgaagatgaaactaaactaagagtttagtttcacactaggttttataagctgttctgaaacctgattaacagcattgcaatctaaaactttcaggctcgtggtcccaagaagcatctgaagcgggtggcagctccaaagcattggatgctggataaattgaccggtgtgtttgtaagtatcttatataaatatttccgtggccactgtttttaagtgtctcccaggactcatttggggaccaggctaggggaggaatatctattcttggcttcctctgcccttgaaggagctatactatctagctgtcctccacttccaatcgatttaatatttttgtgcctcatttattccacataccacatagtacatttacatggactcaggattcatgttcttaatgatcctggtcctctgacagggaagatgctataaaactttaaggtatgaaatagttttggatgctttttacacctcctgtgtaaaagtccaagttgggtgtaatatggacggtcttggtgttcagttagtggatctggtggactaggaggtaggtttgagtgctttagtgaatcccaacagtgattatcatttttaacgttacaggctcctcgtccatccaccggtccccacaagttgagagagtgtctccccctcatcattttcctgaggaacagacttaagtatgccctgacaggagatgaagtaaagaagatttgcatgcagcggttcattaaaatcgatggcaaggtccgaactgatataacctaccctgctggattcatgggtaagaagttttaaatactctggagacgcatattgatggcagccctatggtatccaaatactgtcttgatcatttttctaacctttgtaatctgtcaagtctcagaaacaaagcctgaccttccctctgttttttacttaaataaaaaacatgcaaataatcatgaaacgcttttcaaaactaaatttcgattcacttttaaattttacatgcagtcatggggttttgaaatattgaagatctggccgtgatctttaatcttcagaatccttgttggattagaactgggaggcacatgggggttctttttgtttcgtagagagctatggttgttgctcggcatgaggtagtggggatcactgtatgtagtaaccggttactgcttgatttcagatgtcatcagcattgacaagacgggagagaatttccgtctgatctatgacaccaagggtcgctttgctgtacatcgtattacacctgaggaggccaaggtgagtgtggcaagcaagctgggtctttactcagtatagttactttgttctaagggcctgcattgagtacgagtgctgcttgcaatgaggtgggtattgattagttaaaatctcatacctggaaatatctagctaacaattcgatgagattctgtcttacatgtaactttttgtcatgttattaaaagtctggctgatagctgtagggcattgatggatacctaaaattggcccccatttgaagttaacttcctcagcagattttctttttttgtggtagaaatgaattccagttgaaccgcgacttcctggtgtctcttaagagtcaaggagaatgatttctgggaacttgtttattgggtacctgacgtaggagccctttgccatgtctccatttgtgggagtagctttactttggggaggggaaggtgtcgatggaggaaacagacagtccttgaggcactagtttgaggtttaaaaaaagattacagtctttgattatttaatccagtttgttttgatggttttacacaaaagtttagggctgtttggattattggctgtaaatgaaggttaatttaattgactgatgtggctcctaatttccttttgcacagccttgttaacagcagactggagggcacgtccagtgggatctgtgattatttgatttacttcaaggatatcagggagtagagatccaaaattgaaatgctatgtgaagtatttgttgattggatgaactggtaatgtaattgctgtttgtgagacaaaactcagtcgtgatgtacagggagccattaagataaagttgagttgaagggaagaattcccagggccccataaggcttaaagagcctgggaaactggagtggcatttacattggaggagtggagggcaatggtggatgttaggaggacgagcctagagaagggctttatgcaacatacacttgagggtggaaagaacgatcagcgtcacaattaatctgcagcagttagggaacccatggttcctgtatagggttaaaaagtacatgtgagatggattgaatgtggctaacccttgtatttttctagtacaagttgtgcaaagtgagaaagatctttgtgggcacaaaaggaatccctcatctggtgactcatgatgcccgcaccatccgctaccccgatcccctcatcaaggtgaatgataccattcagattgatttggagactggcaagattactgatttcatcaagttcgacactggtaagcatcctctgtgctacctgggcaccctctttaaggcctagatcattatgaattgcacagggtctgggtatctttattaaaaaccatctgctccaatcgcccaggtgtgtttatagccagaggcacaaatgctcagaatactcatttcttttctttaaattgtttgttttttatagaggagggtcttactgtgttgcccagactgttctcgaactgattataggtgtgagccaccaagcctggccacaaaatttcttacgagagtcccgggagtcctagcataggcagcagttccatatgaggaaattcaaatggggggaaaggaggaataaaatttgtttggacccatctctgagctgcttgtcatttgttatattgagttgaagcagattatttcttcctgcctaggtaacctgtgtatggtgactggaggtgctaacctaggaagaattggtgtgatcaccaacagagagaggcaccctggatcttttgacgtggttcacgtgaaagatgccaatggcaacagctttgccactcgactttccaacatttttgttattggcaaggtaagtctgggttttccttctctctagtctgaggaaatatgtaaatgcaggtggctgctgggattgtagcatccaggctcctggctggctctgctgaacctagtgcaaagcctcttctggataggactcacgcagagctgggctgagtcataatgattagccttaggtactactaaactttgactcacttgaataaatggtaggtgcctgctatgcacaataaacttctaagacattaattctgaagggcatacggtgagtttcataggacagccccagaaacccaagcagtgggtgcttttggtaaccagcatctgtgtcttgcaactgcctagctgatgccaagcactctcacaaacaggcttcagttctgttaagtgaggtgacaaatgtagcatgtgccaagccactatgagttggtgtgtggtgggttttgattctgcttgttttctcttccagggcaacaaaccatggatttctcttccccgaggaaagggtatccgcctcaccattgctgaagagagagacaaaagactggcggccaaacagagcagtgggtgaaatgggtccctgggtgacatgtcagatctttgtacgtaattaaaaatattgtggcaggattaatagc

SEQ ID NO: 478 - DNA, 32744 bp, Homo sapiens
  source 1..32744: mol_type = other DNA
aggtagccgaattcagtccgccagtgtcccataatcctcttctctcggttcctctttcctcgctcaagatggcgctgctcgcgatgcattcttggcgctgggcggccgcggcggctgctttcgaaaagcgccggcactccgcgattctgatccggcctttagtctctgttagcggctcaggtccgcagtggaggccacatcaactcggcgccttgggaaccgctcgagcctaccaggtgagatgccactgacatggaagaatagggtgaagggcaaggggacctgtagggaaaaggttgccctcctgacctcggggcagagagagcaccaagaagaaagtcatggctaactgggagcagcagtaagtgaaggaaattaacgtcagtaatttgaggaaagggcgaagaagaaaacctttgagttcagcaaagggaaacggggcaggaggttctgggcagaggacacctggagcgctggaggctctcggagtcatagtttttctctcatattaagagttggggtagacaccattcccagcctgcttgcctttctaaagacgaggaagactggattattttccccaattagtaatggaatttgggacagtttatctgtggttcagattttactcagttggaattagcaattcggagagcactgtaatgacagcaagctatctataaacaggtggcgccagttaactcccttgctgacaggcgtgcttcttgataggccaaaaccgtaactatctttccaaaacatagaccgccctaaattcttgtataaatatgactgtcctagatctgaaaaatacagtgatgttctctgtgcacaggtcattttggaagccataggctacttatccttaacttatgaatgtagctatggttgtagtgcctcctaaaatttgagtccattattacctctcactcaggaacggttttttaaaaaattatttgtacttaactgtactaaagtatatctttttattttctgtgtattgacaagaggtttaattgccaccacgtatttatcactatcactttaaaatattgtcagttttgtatgagaaacaacctcttaaattttgattcttcatctacaaatatttaacgtctaccttgtacatagccctgtgctagatgatagggtactaagagagacatacagttatgccttcaaggattgtacagtttagttaaggagattggatctatgcattacaaaaataactgaaaaacacagtggtgggttaattagcaaatgaatagtatgtacaataaaggctataggcatccagaggaaatagtgataattaaggaccaggttataaagagtatttcatgctggtgatagaactggggagaatgttctgaacagggagaatagggaatgacactaagcatgtggaaggctgatggaatgacatttataattcattcagtaattattgaacacctctacaggagcaaacaaaatataagtcctgtctttaaagagcttaaaatctagtgggaaatatgtaaattaatcggcaattaaaatatagtggagctgtgtaataatgggaaaggtacaaggtatgggacagtatatgtgaggggtattaagtctaattgtaaggtagtgaagattgccttaagtaactgatatctaaggcaagagctgaaaaattagaagttagccagttaaagaaggaatcgcatgtgcaaaggcccacaagtcagagagaacatggaccttttctagaactgcacgtagtttagactgtagtgagtcattcaagataggaaatagcagattaggctaacgaagcgaatctagatgatttcattaaggtttttaaagtattttatggttgaaagtttctaacacatgatctcttgggaatggtttttgttctgtagttctccaataaggcagatgaagttaagataaaatttgtaaatgttatcttagataaaattagatatcttaagataaaatttcttaagctggaagaatgagggggaagagggaaaaggagaagttattaggaatctcagaggaggcaatggcaatacaaatttagctttctctctttccatgaacgctatctccacaacttccttcttccactctgtcctttacatcctaccatttcctttagttaccatttcctcagtgtgcaaaacaagggaaagatgttacctttgttttctgtttcttaaaggcatggaactcttgccatcctttttttaaaacagggtgagaaaggaatgattacaaagttttcaaagtagaagctgaggtaacctgaggtacctgcaaatttgtgacttgtgattaagattacaaaataattactgaattcatacttttaggacgatcattagtatatagcataatattttagagctgaaaggaaccttagagcagtgttatgaaataatgttagtgggttggattagcacttttttagatgaaattcagtagaatataaagaaaatagcagtgctttttacatcttaagtgaagtattgtttcatgaacttttatgtgtatatacacacacacatatatattttatatatatatatacacacacacacacgcacacacacacacacacagtcccacatgtatgtgattactggaattcattgtaagtatttctcacccagtatatgccctagacctgggttgtggaatatggtagttcttttggataggtactgttttgttttcatttgttggtctgacctcatggaccaagaatgggagctttaatttctcccagtagcaagttccaccttcctactcttccaccattggctgctaagagttagcagagtagataaaaattaaaatactttactcctggctttcatattaactgaagtgggaatataataacaacactagggaaataatcctcctattctatattttagaggttctagttcatatttaaatttaacaatataagatgcctatgaagaaactacagtgattattcaacagtcgtcccaaaatatactaaaagaatagaaaacagaacttattcatcctggctaacatggtgaaacctcgtctgtactaaaaatacaaaaaaaattagccgggcatggtggcgggctcctgtagtcccagctattcgggaggctgaggcaggagaatggcgtgaacccgggaggcggagcttgcagtgagctaagatcgcgccagtgcactccagcctgggcgacagagcaagactccgtctcaaaaacaagcaaacaaacaaacaacaacaacaaaaacagaacttacaagagaaataagggtgtctttaagtggattatagatcatggaactgaaaagggtgagaggtgattcagtgacatttaaagtacctgaagcggcctggcccagtggctcatgcctgtaatcctaacactttaggaggccaaggcaggtggatcacctgaggtcaagagctcgagaccagcctgaccaatatggtgaaaccccgtccatactaaaaatacaaaaagcagctgggcatggtcacgtgcacctgtgactacagctactcaggagactgagacaggagaattgcttgaaccctggaggcggaggttgcagtgagccgagatcgcgccactgtactccagcctgggcgacagagcgagacttcctctcaaaaaaaagaaaaaaaaaaaaggacctgaaggggttatttgtagttcagtgatgcctaaacttaactggaacattaggttatgatacaaagatgtggacttcatttgcaggaagagggatttaatgtgcatatgagaaataatttcttagactaatagtctatcttagtctgtttgggctggtataacaaaataccataaactacatgacttataagcaagagcaatttatttctcacagttcaaggtgctgacagatttagtgtctggtgaggtcttgaggttcataggcggtgccttttagctgtgtcctcatgtggtagaagagacaaggcagctctttggcccctcttataagggaactaatcctgtttatgagagctctactctccaagtcctaatcacctcccaatgactccaccttttaataccatcacattggtgattaagtttcaatataggaattttagggggacacaaatgttaaaagcatagtccttttattaggagaccaataaagacttttaaaattattaaacaataatttgctgtcattagaaaaatacgagctgttaggaagcagccagcttggttttgaaaagagcaagacataccaaaccaattattcatatgagtgagtgacagtctatcttgatttcaacacggcttttaattgtcccctacattgttctcacacagtaagcttggaaggaatgatattgaatactattaagaggtcttgaggtaggagtaagccttactgtaaagaaaatacagatgacttaaaagatttttatttctaaatgttaaaaataatgaaataactggtgtgcaaagggcataacttggtattgtgggatgaacactggaccaggacacttgaccgcctgagctctatttgtactgttaattatcttggacacataacttgttcttttggacatcagatcctgtaaactagtaatatttgactaccagatctctaaggtttcttgcaactctcttgtttctttactgtaatcctttaggaccagccctttttatatagtacctctactttgtgatcctagtttactactggtgtagtattcaggagcaacatagggtaagtttatgttcacatgaatttttaatgggacaaatttgtattgttcttgtcatatttgtatatctaagagtaggaatagaaaaatgtaatttaattatgagcttagtatttggtagtgttgggaggatggaagtagtgtggaggaaaaagtaagctaggttccgaaatcatctgggatggtagaaatagattctaaggggtggtgaagaataacagtaatgctataaaagttgtaaataaagatataccttacatgggctgtatatggtaaggaatggaaagtggcactgggacttgagaagaggaattcaggggattcttttttcagatatagttgaataaataacattctctaagtcattgacacattggttttaactagttattaagattattaggaagaggaagaaaatttcatgtttctaaactttcttttagaacacgaggccctttgagaatctgatcaaagccatagaccttctccctagaaaaatatacatacgtatgtgcttcattttgcatgcaatttcaggggaatcagaaacctatcccctcttccagtcagtaatccctgattaatacaatattgctggctggtgggtttctaatggtgttcctgagtagccagtggcaagataaagagcacttgtcactgggcagcggggtagaaatagagtggaaacttacatcaaaattttgattaaatgataaatgcataattgatcatttaattattgttatacaattgttataaaattaatatcatttattgctgtattgttgtcagtgttatcttaaagattttgctttttcaaagaaaagtatgttctttcccatattgtaaaataaggtatataataagagataaaattgcccattctgtatacgattcttatgctttacattgtccccattttaattatacaaaaccacatctaataaaaacgtcaagacagatatctacaatcccacatgttaaataatttttcctttttcctttgaatctctgttctttcatgtacataatttttacattattgggataattttaaattctgtttttacttgtgagcattttttttcttggtgctcagtcttgaccaaaattaggtcttttaattacttaagattttagtaatgttaataggtatatatagttacctgcaaaatgtgatatttttgttgttttgattttctccttcctttcctgaaatccatctccctgaagtcctcatctgtgctctcttgactcccttgtaggatttgccactagtgagtaaagatacttttcaagtctttatttaatgtcatttggtcttcacagtaatccggttaggtagatgaacatttctttgtagtagcaatggcctcttctgtccttttcagtcccttaacttctgccctagttttagacccttattactttatgcatgggttttgtccctgctttcagggacttgccctttcaatccatcctatacagcacatctagattattcttcctaaggcatgacttttatcccatcacttccctgcataaacttcagtgggctttatatcttagccttaaaaatttccacctaactagattgctagccatattgtaaactgtttctctacaaataccctgtccctccagtcaccctatattgttccctgttccttggaccatgtgcttttttgtgtctgttcttttttttatgccacaccctatgtctgaaatgccctctctctaactggtgcctatttttcaaatgttagttcaaaggtcagtccgttccctgaaaccattccttataagctaataagactttgatttctccctcctctgaactcctacaacactttttcctacaagtagttatgtatcttgtggaggagataagattttatgtgcctaaaatgctaatatattccaatcatctttttgtttttatcttccacagagctaggcacggtatgttacatgtaataggtaatcagaaaatatatgtaaaatgaatgattaaactctataaccaaaccaaagcaaaaatctaacataataattaataatatttgctccactgctatacatttggaattgaaagctaactttcttcagggcaacctcataagtttgtccgttgcatttctgtcattaggcatatggtaccgtggtggagtagcatcactgattgttgtcagttttagttcaataaccaaagcacacttactttttatcctaaaatttttgagttactttatttgtgagcatcatttgctaagataaagtgacttacaggataacattctttgaggaataagatataaaaatttgctgtttgtagaaattttaactgcacactgtattttgggatgttcattagtcctctgattaagttttctttacaatatctagagagggatggatattaaagtagggaaaccgcatcctaagggtatagttccttaggtgctgatgttttgggagagcaacttttaaacttctgcttttcaaagcatattagaaaaagacaaggtgaagcttcgattttggtttacttataaaattgtttttactgatcttgagtaacttatactataatattgtaatatattcatatttttgagtgcatgaatgtttgctaagtatgaactctttcttcaactactctgactgtagtgacttaataactgtgcatgtacatgtgtgcttgcctgctacgtttgccataacaccacagattgggtggcttatacaacagaaatgtattttctcacagttctggaacccatgaagtccaagatgaaggtgtcagtagagttgatttcttctgaggtctctctccttggcatgtagatggccatcttatacctctgtcttcacactgtcttttccactgtttgtgtctgtgtcctgatatcctcttcttagaagtatactggtcatattggattaaggcccaccttaatgacctcattgaactttaattacctctttaagggccctgtttccaaatatagtcacattctgaagtattagaggttaggacttcaacatataaatttgtgggggtggggagtacacagttcagaccataacaatgtgtgtatgtgtttgtatgtgtgtgtatgtatatgcaaatacatagaaaattggaaagatatactccagtctggtaaaagtggttacctcgggggttgggggggggtttgggatgctaaaaaacaaacaaaaaaaatttaatttgctattatggatacacagacatagtttgatatactgtacttgtttttacaatgagaaaaatatttcatgtttaagcttttcaattgatgaactgacctttttgagtaggttatattatgttcatttatttgaagtccaatttgttttgtctgctagtagtaatgcattttatcatctctgtaacttttattttatttgtttattttttattttttatttttttgcgatggagttgtgctctgtcacccaggttggaatgcagtggcacaatcttggctcactgccacctctgcctcccaggttcaagcgattctcctgcctcagcctcccaagtagctgggattacaggcgcacaccaccacacctggctaatttttgtatttttagtagagatagggtttcgccatgttggccaggctagtctcgaactcctgacctcaggtgatccgcccacctcggccttccaaagtgctgggattacaggcctgagccaccacgcctggccttgtaacttttattttaagttcaggagtacatgtgcaggtttgttacataggtaaacttatgtcatggaggtttgttgtacaaattattttatcacccaggtattaagcctagtagccattagttattttttctgatcctctcccttcttccaccttccaccctctgataggccccagtgtgtgttgtttccttgtatgtgtctatgtgttctcatcatttagctcctacttgtaagtgagaacatgtagtacttagttttctgttcctgtgttaatttgctaaggataatggcctccagctccagccatgtcactgcaaaggacgtgattttgttcttttttatggctgcatagtattccatgatatatttgtaccacattttctttatctagtctgtcattgataggcatttaggttgattccatgtgtttgctattgtgaatggtactgcaatgaacatacgcatgcatgtgtctttataatagaatgatttatattccttggggtacatacccagtaataggattgctgggtcaaatggtaattctgtttttcattctttgaggaattgccacactgctctccacagtagttgaactaatttacactcccaccaacagtgcatataagtgttcctttttcttcataacctcaccagcatctgttattttttgactttttaatactagccattctgactggtgttaggtggtgttttgttgtgattttgatttgcatttctctaatgattagtgatgttgagcatttttttttttgtgtgcttgttggctgcatgtatgtcttctttggaaaagtgtttttttcatatactttgtccactttatgtttttttttcttgtaaatttgtttaagttccttatagatgctggatattattagagctttgttggacgcataatttgcaaaaattttctcccattctataggttgtctgcttactctgttgacagtttcttttgctatgcagaagttctttagtttaattagacctcatttgtcaatttttacttttgttgcagttgcttttgttgtttttgtcatgaaatcttttcccgtgtctctgtcctgaatggtattacttaggttgtcttccatggtttttatacttttggattttacatgtaagtctttaatccatcttgagttaatttttgtttatggtataaggaaggctccagtttcaatcttcggcctgtggctagccagttatcccagcaccatttattgaataaggactcctttccccattgcttgtttttgtcaggtttgttgaagatgatatggttgtaggtgttaggccttatttctggagtctctattctgttccattggtctgtgtgtctgtttttgtaccagtaccatgcggttttggttactgtagccttgtagtatagtttgaaatcaggtaatgtgatacctccagcttcattcttttttcttaggattgccttggctatttggattcttttttgtttccatttggattttaaaatagttgtctctagttctgtgaacaatgtcaattaccattgacatttaataggagtagcattgaatctataaattgctttgggcagtatgaccattctgactatattgattcttcctatccatgagcatgaaatgtttttccatttgtttgtgtcatctctgatttctttgattagcggtttgtagttctccttgtagagatctttcacctccttatagttagctgtattcctaggtattttattttctctgtggcaattgtaaatgaaagtttgttcctcattggtgcttggcttgatggttgtcggtgtataggaatgctagtgatttttgtttttatttttttatctttttattttaatttttatttttttagagccggccttgactcactgctagtgatttttgcacattgattttgtgtcctgagactttgctgaagttgtttatcagattaaaaagcttttgggctgacactatggagttttctagatacaggatcatgccatctgccaacagggatagtttgacttcttctcttcctatttggatgccctgtatttctttctcttacctgattgccctggccagaacttccaatactgtgttgaataggagtggtgagagagggcatccttgtcttgtgctggttgtcaggggaatgcttccagcttttcctcattcagtatgatgttgtgatgttggctgtgggtttgtcacatacggctcttcatattttgaggtatgttccttcaatatctagtttattgagagtttttaacatgaatagatgttgaattttattgaaagccttttctgtatctattgagataatcatgtggtttttgtctttacttctgtttatgtgatgaatcacatttattgatttgggtgtgttgaaccaaccttgagtcctggggataaagcctacttgattgtggtggataagctttttgatgtgctgatggatttggtttgccagtattttgttgaggatttttgcgttagtgttcattaaggatattggcctgaagttttttttggtgttgtgtctctgccaagttttggtatgaggatgatgctggtctcagaatgagttagggaggagttccttctcaattttttggaatagtttcagtatgaatggtaccagctctttgtacatttggtagaattcagctgtgaatctgtctcgtcgtgggctttttgtggttggtaggctgtttattactgcctcaagtaaagaactcattattggtctgttcagggattcaatttcttcctggttcatggagatcctcccatactctgagcgatcactcctgcttgtgggacatagagaagacaccaatatctgagatggccagcaccccatcccagaataaaaaagtctttaatgcatttataaagcattcctggaagtatttgctgcttttaaatgtaaccagtttttggttgttacttcattgcggaattgggagattctttggaaattgagtcctagtgtttcctattcatttcagtggtttctcctcttgctgtgcatatttgattctgcatatttgattctgcctaataaagagctatttatacttaggtttctttttttcaaaatcaagtttttatattaaaaaaaattacaaaaacagtacaaacccactactgaaagattagaaaatacagaaaagccaaaaaaaaaaaaagcagctatgctaataggtcagtataacctatacttttaataataccagctaatatttttatagtgttttagtttacaaaatgctttaaaattttactttttcttgcttctacctatttatttagtggttttcaccaggattagaaaaaaggctccctattgattagagctttactctctaatatagtagatactagccatatgtagctatttaaattgcaattaaaattaaattaaagatttagtaacttagtcatactagacataattcaagtgctcaatagccacatgtggctaagtagctattatatttcaccacacagaatatttctgtcatcactgaaagttttcttgtacatggccattctagaaagtaattttaagtagggagtgacattatcaaatttgttttagggctgtgattctgggtgcagtttgagggaaagattagaaataggcaaggattggagatagggacattaattaagagaatattgaagtaatataggagagaagtgataagtgcctgcattgcctgtcatgaggtagcattgtcaagatttgtcaccaagtattcttgtatcatggaaagaagacagggctttgaagcaggagagtgttaccttatcttagttattttatctcagtctcagtgtttttagactataaatgggtatttgaataaaaattttcttacccatctgatatggtttggctgtgtccccacctaaatctcatcttgaattataactcccacaattcccacatgttgtgggaggtgattgaattttggggacaagtctttttttgtgctgttctcgtgatagtgaataagtcttacgagatctgatggttttataagggagagtatccctacacaagctctctttgcctaccatcatcaatgtgagacgtgtcttgctcctccttgccttctgccatgattgtgaagcctcctccaccatatagaactgtaagtccattaaacctctttttcttcccagtctcgggtatgtctttatcagcagtgtgaaaatggactaatacagtaaattggtactggtagagtggggcactgctgaaaagataactgaaaatttggaagtgactttggcactgggtaccaggcagaggttggaacagtttggagggctcagaagaagacaggaaaatgtgggaaggtttggaactccctcgagacttgttgaatgactttgaccaaaatgctgataatgataatggacaatgaaatgcaggctgaggtgatctcagacggaaatgaggaacttattggggactggagcagagatgactcttggtatgttttagcaaagagactggtggcattttgcccctgccctagagaatcgtggatctttgaacttgagagagatgatttagggcatctagcagaagaaatttctaagcagcaaagcattcaagaggtgatttgggtgctgttaaaagcattcagttttaaaaaggaaacagagccctttgtgcttccataatccattgctttgataaatagagtaaatctatttaaataaacctattgtaaaactctttgaaacaaattcttaaatgttactagcttagagtatggtcatatatgtaaaaacagtaaaatcaaactgtattctgtttctagagtttatcaccacctaatacagctctatgtttacaaaaagaacatgctaccagtcttttaacaaacacttattgggcacccgccatttggcagacattctactaggcaccggggctatagccgtgaataagaaacagccttgccctccaggaattcacagtttgaaggagaaaacaggtaggcaaaccaatactttaaggtgtggtaaatgcttttgtagagcgacgtgcaggattttatatgagcccggagatggggaaccaccttcagtccaaggaggtcaagaaatactttgcaggtgaacaatttatagatgaatattgaagtcttgtgggtagatgttggactggtggatgaatggggaaaggctaatttaaaaacaccttggggggagattctttgaaagtatgcaaacatcatatttctttctaaactttcagtagctaattttagcatgcatcagtggatcttgtctgcaattattactatggtgtttgcctaattacagttggccctccatatccatgggttccgcatctgtggattcaatcaactgcaggttaaaatatttggagaaaaaatgatggtagcatctactgaatatttacagacttttttcccttgtcattatttctaaaacaatacagtataacaactatttatatagcatttacattgtattaggtactacaagtaatatagagatgatttaaggtatacaggaggatgtgcataagttatacataaatactacaccattttatataagggccttaagtatctgtggattgtggtatctataggggttcctggaaccagtctcccacagatactgtgggacaactgtctgtttttctgtttccctcattccttctacatttgttaattggaatttttctgtaaggaagagatgtcccttctctctcatttaatcattaatttatttataccaggatggacccacagatgttaattatattctatgagttaaaatccattacattaattatatattttgttgctctgtttttccaggtttgggctattgggagatccttttaggttggctcctgtttcgtttggacatgccctcatctttttacaagcatttctttactttctggcatcacacaatgctccaggttcatcttatattttccctgcactggccctgaaatcagccccctttctggagggcggtttgtcagaatgaatcaaaaaccttaaaaaaaatttcaccctctttgacccaacaattctacttctaagaaactgtcttaaggaaacaatcaggaaagtgcacaaatgtttataagttaatatacagatactctttactgtgttatttgtagtgctcaaagttgaaaacagcttttgtatctgacactgggattggttaaataaattatggttcagccatcagttcaccaatcttggaactgatgtttttcaacaatatttaatgatggggaaaatgcatatgatctaatattcagtgtaaaaagcagtctaaaaaattcagtaggccaaatgattatattaaaaaaaaacataagcaagaaacagcgatttaaaaagaagcacacccaaatataaaaacattgtttatctctggatggtaggataatgggtgactgttatgttctgtcatcttctctatattttccaaattttctacaatgaacccaactttcatttttgtgatgctgaaatacgttacagtaaatatgtagtttgagcccaattattgtctattctttgctgtggcctttaagtttctcagcgaagcagctgccagaacctgagctgctttctgtctccaaagcttggtttagaattaaaagatgctgaattgatatcttttttagagaaaaatgaaattaaaaaatgccaacatattgacaagaggtgactttagctcatctctcatgtgctccactttcatcccgaagacatgagagttaagggtttttgtctttgtttttaaccttatgagattatgtcctggtgatagaacttctacttcattccacaactctcatgggtaaaattaagaagaatagagagatttggtggtataaaaggatgagagaaacatttggtcttggtttgtattctcttctaattttatttttgactctgagtgtcttttcatgtccttttcacatcctgcctttaaattaaagagcatatcagaacaaggtcagaaagtgaaggtgggaggaaaccttcactcccaatcctgtcctagccttttatcctggttgtctataaaggagagcagagaccttccagatggaaaatccattcttatcctgggagtagataaatggtcatatcacttcttttcattgttttaaggtttaattttatcatatttaattgttaccccattaatggtttattttagtgtatggtattaagtaaagatctcttttttcccatactgattttaatatgaagaatttgtcaaacagtaactttatatttggatttgtttcaatatttggtacttgatctcattaatttccctatccatatgtcagtaccacactgtttcctttattagaaacagggtttcactgtattgcccacgatggacttgaacccctgaactcaaagtatcctcctgcctcagcctccccagtagttgaactacaggcatgcaccaccacactcagcttcacacaccatttattttacaatataatgtaatatctgatagaataagtttctccttcccaacacacttacattactcctcgtctccaaaattttcttggcttgtctcactagtttattcttccagaggagctattaaaatagttttgtcaagatctcctttaaaaatcctgtagagatttctattggatttcattaaatctattaatttggggagcatcaatatcatcatattatataatctagtatttttctccatttaaattttcttttatgtactttggtaaagttttgtagctttggtcatatgtgtcttaaacattctatacaaattgattgctaatatgtgtatgtacagttgatattgtgacagtctaatccatattatattttctataaactaagggcatcttcacaatgcattaaaatacgcagaacttttgtactagcctgtatgattatacacttacagattaaaagcttatatgtagaaatctgcctagataacatctatgagaatcatttgaggaggaaaggaattaagttaaatcaatgtttatatgagcatttctctgagaagcattatgaagtttggcatggcagatataaagaatccaaagacatgtgacctgccttcattgagtatatagaataattcaataaaatgtaatgtgagtttaaacctaaataaaaataaagaagacttcaagaacagttcagaaccatataagagattacatgattgaccagtgagttttgtaaacaggtactactctcagatgagagagttacttcaggcttggagaagagagtgatgtggaaaggatttaggaaggtggtaaattttgactgacatcttgagagatgattagagaaagaagaagggagaagacattctaggcaagataactcatgtcagcaaatgtgcaaagtgtgtttgaaggttagtgaatacatcagttcgaataaagtgttcatgaaatagagatgggagagatatgactgaaaaggtcaattggtgtcagatcaacatagaacttaaataccattccaagggtgtttggagttattagggagctattagataattttgagcagagggaataagggtttgaagtgttttaggaagattaatcagtggtatacagcagtggttcacaaatgtgaacctgagattaggtgctgagctagctgcatcagaattaccttaaggtcttaaaaatagtttcagatccctgtatcacatccctgaagatccctttttttttttttttttttgaggcagagtctcgttctgtcgccctgctgacgtgcagtggctctatctcggctcactgcaatctctgcctcccgggttcaagcgattcccctgcctcagcctcccgagtagctgggactacaggtgcataccaccacgcccagctaattttttgtattttggaagagacagggtttcaccatgttggccaggatggtgctgatctcctgacctcatgatccacccacctctgttcccaaagtgctgggattacaggcgtgagccactgcgcctggcctcatatccctgaaaattcttgttcagcaagtctgggataatgttcaagagtctatattttttaaaagcttctggtggattctgatgtatattcaggcttgggaactactattgtaaaagatgtatgaaaaaggaatcccagttaaaaagctattctgtatgtcaagttacttgttaatatctgtgaagtgatatagaaggtgtttcttcattccctccaatattagtatctggtttgggaaaatctttatgaagagcttttattgggagttaattaaaaagaaaaaaattttaaagcagtcaaaactaaaacaaaacccattaaatacagattgaacaatacagttgccaggcttgattttgtatgtgtgtgtgtacatacgtatatgtataaatatgcatgtgtgtatacacacataaatatgtacctaacagcttcataatacatactttttttcttctgttggaacacgtgtgtgtgtgtgtgtgtgtgtgtgtgtgtgtgtatgagggttgcaatttctccacatccttgtcaacacttgttaacatctatctttttaaattttagttatactggtggatgcgaagtgatgttttattgtggttttgatttgcattctcctaatgactaatggtattgagcattttttgtgtgtgtgtaagcaaacatttagaagatgtttttatttttttctttccaacttttaggttcaagggatacatgagcaggtttgttacatggataaactgcatgccataggggattagtgtaaagataattttgtcacccaggtaattagcataatacccaatacatagttgttccatgctctccctcctcccattgtctaccctcaaataggctctggtgtctattgttcccttctgagtgtccatgtgtactcaatgttcagctctcacttagaaatgagaatatgcaatatttggttttctctttacgtctgttagcttaggataatggcctccagctccatgttgctgcaaaggacatgatatcatttttttatggctatgtggtattccatagtgtgtatgtaccacattttctttattcagtccaccattgatgggcatctaggttgattacatatctttgctattgtgaatagtgctgccacaaacatatgcaggcatgtgtctttatggtagaaggatttatattcctttgggtgtatacccagtaatgagattgctggatcgaatggtaattctgttttaagttctttgagaaatctccagaatgctttccacaatggctgaactaatttacattcccacctactgtatataaatggtcctttttctccaaaaccttgctaacatctgtcattttttgactttttagtaatagccatcccaactggtatgagatggtatctcattgtgggtttgatttgcatttctctaatgataaatgatgttgagtattcgttaatatgcttgttagccatgtgtttgttttcatttgagaagtgtctgttcatgtcctttgcgcatttttaatggggttggttggtttatgcttgttggtttatgttccttatagatactggatattagacctttgtcggatacatagtttgcaaatattaccccccattctgtaggttgtctatttactcagttggttgtttcttttgctgtacagcagctctttagtgtaattaggtcccatttgtcaatttttgtttttgttaaaattgcttttggtgtcttcctcctgaagtctttgccaggtcccatatccagatggtatttcctaggttgtcttccagagtttatagttttgggttttacgtttaagtctttaattgatgttgaatttatatttgtcaatggttaaagataggggcccattttcatcttctgcatatggctggccagttaccccagcagcatttattgaatagaaaatcctttccccattgcttgttactgttggctttgttgaacatcagatggctgttggtgtgcagctttatttctgggtcctctaacctgttccaatggtcagtctgtctgtttttataccagtaccatgcttttttagttactatagccttgtagtatagtttgaagtcaagtattgtgatgcctccatgcctccagcttttttgttgttgttgttgttgttttgtttttgtttctgtttttgcttttgcttaggattgttttggctatttgagctactttttggttccgaattaattttagaatgtttttttcagattctttgaaaaacgttggtagtttgaataggaatagcattgaatctaaattgctttgggcagtatggcgattttaacaattttgattcttcatatccatgagcatgggatatttttccatttgtttgtgccatctctgatttcttttagcagtgttgaaatcctcattgtagagacctttcacatccctagttagctgtattcttaggcattatattctttttgttgctattgtgaatgggattctattcttgatttgactctcagcttggacatcattagtgtgtataaatgctgctgatttttgtacattgattttgtatcctgaaactttgctgaaattgtttatcacatataggagtctttgaacaaggactatgaggttttctaggtgatatctagatgatatgatagtatcatatcatctgtgaagagagataaattgatttcctctcttcctatttggatgcctttttttttttctcttgcctgattgctctggctagaaaatccaggactatgttgagtaggactggtgagagtgacatcttcatcttgttctggttctcaagaggtatgtttccaggttttgccaactcagtatgctgttggctgtgggtttgtcttagatggctctcattactttgagatattttccttcaatgcctagtttgttgatggttttttaacatgaagggatgttgaactctgtcaaaattcttttgtgtgtttattgagatgatcatgtggtttttctttttagttctgtttctggtgatgaatcacatttattgatttttatatgttgaaccaaacttacatctcagggataaagcctgcttggtcatggtggattagctttttgttgtgctgctggatttggtttgctagtatttcattgatgatttttaaatctatgttggtcggggatattggcctgaagttttcttttttgttgttgttgtatctctgccaggttttggtatcagattggtgctggcctcatagaatgtgttagggaccagttgctcctcttctattttttgaattgtttgaatgggattggtaccagctcttctttatacatctggtagaatttggctgtgaatctgtctgttccagggcttttcctggttggtaggctttttattactgtgtcagttttggaactcatttatctgtttagggcttcaattacttactggttcaatcttgggaggttgtatgtttctaggaatttatccatgtcttctgggttttctagttcgtgtgcatagaggtgtctgtaatagtctctgagggttttttttttttaatatctgcggggtcgacagtaatgtcccctttgtcatttctgattgtgtttatttggatcttctcccttttttctttattagtctagatagtggtccatcaatcttatttattcttttgaagaaccatcttttgtttttgttgatctttggtatgagttttctcatctccattttattcagtttagctcgattttggttatttctcttctgctagcattgatgttagtttgctcttgtttttctggttcctttagatgtgatgttaggttgttaacttgagatatttctaactttttgatgtgggcatttagcactctaagttttcatcataacactgcgttagttgtgtctcagagattctggtatgttgtatctttatttgcattagtttaaaagaatttcctgatttctgccttaatttcattatttaccaagaagtcattcaggagcagattgtttaatttccatgtacttttatagtattgagtgattttcttagcattgatttttatttttatttttctgtggtctgagagtgtggttggtacaatttcagcttttttgaatttgttgagaattgctttatggtaaagcatatggtctattttagagtatgtgccatatgcacatgagaagaatgtatattctattgttcttgcatggagtgttctgtagatggctgttaggtctatttgatcaagtgcgaggttaagtcccgaatatcttcgttagtattctgcctcaatagtctgcccaatactgccagtggggtgttgaagcatcccactattattgtgtggttatctacatctctttgtaagtctctaggaacttcttttattaatctgggtgctctagtgtcaggtgcatatatatttaggatggttatatcttgttgaattgaaccctctatcattatgtaatgcccttctttgtcctttttgattgttgttggtttaaagtcagttttgtctgaaataagaatggcaagccctgctcttttcgttttttgtttacttcatctttctccatccctttactttgagcctgtgggtgtccttgaatgtgacatgagtccactgaagatggcatacagtttggtcttgtttctttatgcaacttgccactgtttgccttataagtgtagcatttaactcatttacatttaaggtgaatattaattaaggtgcatatttgatcctgtcatcgtgttgttagctgatttttatgtaggcttgattatgtatttgctttatagtgttgatggtctatgtatttgagtgtgttttgtggtttttggtaatggtcttttgtttccgtgtttagcactcctttaagggcctcttgttaaggcaggcctggtggtaatgaattcccttaacatttgcttgtctgaaaaggattttgtttctcctttgcttacgaagcttagtttggctggatattaaattattggctagaatttcttttctttaaagatgctgaatatagttccacagtctcttctggcttttagggtttctgctgaaatgtccactgttagcctaatggagttccctttgtagatgacctgccccatctctctagctgctttaatatgttttatttcatttcgaccttgggggatctgatgactatgtgtcttgaggatggttgttttgtactgtatctcacactgacaggaattctcgcagaatttcctgaacttgtatgtcagcctctcgtgaggttggggagatttttgcatacagtatcctcaaatatattttctaagttgctttctctccctgtctttcagggatgtcaattagtcatagatttggtctgtttacttaataccatatttctcccagattttgttcatgaaaaaattatttcttatttttgtgtaactgagttaatttgaagaacctgtttttgagctttgagattctttcctcagcttgattcattctgctgttaatactcccccttgtgtttcgaaatcttgtagagaatttttcagctatttagctcattttggttctttcttaacatggctattttgtctttcatctcttaaatcattttattgtatacctgggattcctcagaatgggtttcaacgttttcctgaatctaggtgatcttcatcgtggtcccaattctgaattctatgtctgtaatttcagccatttcctcctggttaagaaccattgctagggagctagtgtggtagttaggaggtaaggagataactctggcctttagagttgccagagttgttgtgctggttctttctcatctgtgtgggctgatgttcctttaactgtggtgtaattgactttgtttctggacgttttcaaagggctgaggcttgccgcagggtctttattcgtggctgaattcttgttcttggtttcatagcagagtattttagcaaggtatttttggtgttgaagtttggactttaatccagatgatacttaaagtataatggctggtaggtaggcttttgctcagctgtgcagttcctctgtatttccttgcatttacagccatgctccctctcagtgctttgagagtgtgggctcctctcccactggagtgctggctgtagatcttggtttggcactcctgagctgtgctccacaagtctggggtgagctcaggctttttgttccctcttcagctggagtcaacagggttggcgaccttggcagtgacaatggcagagggcctttcgcttgttccttggggctctgccccaggcaaatgcagagctgctgtcagtcagaacgatcagcctaatgtggagtggctgtgttgcgggcccaagccagagttccctgcctggtgctgggcagaggaggtcagaggctcacagagaagtcattgtggcctcttcttcataggagagctgtggcatgctggatgtgtgagtgaagcactcaggatctttgttccttccccagtccgagggcagcaaggccggtagtactgtagtagcagtggcagaggctgaggggctgtcagtggccactgataaactccaccccagagaaacacagagccactaacaatgggaatgttcagccaagtgtggggaagctacgcgcagccccaagcccggggccctgcctggtgaagaggaggggtggggactcacaggtaagagaaattgggctcctctgtatggtggctgcagtgtcacggaggtatcagtgaagtgaccaggctcttttttccttctccagctcaaaagcagtaagggtggtactactgtagctgtaatggcagaagggatatgggttgactctgggatttcttcctcagagagatgcagagctgctcaggtggtgtcagggtggttgtgctgtgggcccaggtcagagggccctacccagtgaggagtagtaggggcagggacctgtgtggagaacagactggccacttttacataaggcagctatgctatgctggaggttcataatagtccttaagctctttgctctctcctgagcttgagggcattggggtgggagctgtagcagcagcaaaaatggcggtctgtgtgtagtctttctatgtgtttgcactttgagactgaaggggatttgtttcagcctaattttgttgtaaatgttgttcacgggttctgttgttggttattctgttgttagtgtgagaatttgggaagttaaaaaaattatatatacgtccactgccctgccatctcccccatcatatgctttttaaaccatttattaaagtatatatgcaggaaatgcacatataagtatacagcttgatgatttttttacaaaccgaacagacccatgtaaacctgtgccaagaatgccatcatgtttgaaacacaattaagttggatataaaactctaggctcaacattctttcctttcaatgctttgaaaatcctactccattttctttttgcatctagtattactcttaagaagtctgatgtccatctgatttctttttacttcatgttatttgtaatttttaaaataacttttctattttttctatgtccccatttgtctatgtgactcttagttatttgttttttttgagattcatttagaatatattattttacttacatgtttttaaattttactgtcaatatgtctaggaggtagttttttcttattctcttggcactctgtggactctttcagtatgaaatattttatctttaatttttgtacaatgaatctctttatttttgtaaatatttttatctccattttgattttttcttttcctttgcttcagtaaatagttgttaatatgtacacttttgtgttgctttatttatattattacttttcatacctaatatttccattctcttttcaaggtactgattctcccttgtatctcttttcccagggtctttcttcctaggctaagtttaactctttttgttgcttgcccatctgttatcccttgacccaggcatatgcctttatatgctttcaacagaggaccctatggaaagccacttcagccccaagagtgttctgataggtacaagataagcccctgagccagtccttcagggagctgccagacaagtcaaaaagtataaccataattcttcaaaaacaagtccatatttccttctctggtaccagcaagctataccaagaatgcaagctgccatccccattggggaatggaaggatggtatgtgagtgagcacaaatgtcataacactctcttctgatacttatttagcaacttcttttttcattatacactcccctggttgttgttagtttttcattagattccagagttctggaaaagttgattgagatctgacagtttttgctagctaaattgttgccttagtggagggatgaatttttatagccccatactcttgtcatttttggtgatatcactcctgtatttttaaaatcagaattacattgattcttggaccaagaaacaaacaaaatcctgtatgccttaatagcaacagaaaagttaacctagacatttcaaggttatcagtcagtaatatgacaattagtaaattccctagattcagtgacattgctaatattgtcagtactgtagtgttaggaatgggttatctccattccaccacttacaggctgtatgaacttgaacaaataagcctctctaagcctcagtttctaatctgtaaaatgggaaaataataatagtattagctaccttgtagggttgcagtgagaatgaaatgagataatgtagtattgggcattagaatagccaaataataagtgctcagtgagtggtagccactgttgttcattactaaaaatgattatgtgatagctgttactaatttgcattgttgtataatgtaaaaataccttagcaagccaaaatcaaaacaaaaatacgaaaagtggtaaaatactaactaccctggccttcagcgaaccctctatactgttctggactaagcatctttaggggtaaactaatagtgaaagggtttccttgtgggtggatgatggtgggaaggtagtcaaaatatatatatatatattatatatatttattatactttaagttctgggatacacgtgcagaacgtgcaggtttgttacataggtatacatgtgccatggtgatttgctgcatccatcaacccgtcatctacattagatatttctgctaatgctatctcttcccttgctccccaaccccaaatgggccccagtgtgagatgttcccctccccgtgcccgtatgttctcattgttcaactcccacttaagggtgagaacatgcggtgcttggttttctgttcctgtgttagtttgctgagaatgatggtttccagcttcatccatgtccctgcaaaggacattaactcatccttttttgtggctgcatagtattccatggtgtgtatgtgctacattttgtttatccagtgtatcattggtgggcaattgggttggttccaagtctttgctattgtgaatagtgctgcaataaacatacgtgtgcatgtgtctttatagtagcatgatttataatcctttgggtatatactcagtaatgggattgctgggttaaatggtatttctagttatagatccttgaggaattgccacactatcttccacaatggttgaactaatttacactcccaccaacagtgtaaaagcattccagtttctctacatcctctccagcatctgttctttcctgactttttaatgatcgccattctaactggcgtgggatggtatctcattgtggttttgatttgcatttctctaatgagcagtgatgatgagctttttttcagatgtttattggctgcataaatgtcttcgtttgaaaagtgtcttttcatatccttcgctcactttttgatggggttatttggtttttttcttgtaaatttgattaagttccttgtagattctggatattagccctttgtcagatggatagattgcaaaaattttcttctgttctttaggttgcctgttcactgatagtttattttgcagtgtagaagctctttagtttaattagatcccatttgtcaattttggcttttgttgcctttgcttttggtgttttagtcatgaagtctttgcccatgcctatgtcctgaatggtattgcctaggttttcttgtagggatttcatggttttaggtcttatgtttaagtctttaatccattttgagttaatttttgtataaggtgtaaggaggtggtccagtttcagttttctgcttatggctagccagtttttccaacaccatttgttaaatagggaatcctttccctattgcttgtttttgtcaggtttgtcaaagatcagatggttgtagatgtgtggtgttacttctgaggcccctgttctgttccattggtctatatatctgttttggtaccagtatcatgctgttttggttaccatagccttgtagtatagtttgaagtcaggtggtgtgatgcctccagcttttttctttttctttaggattctcttggctatatgggctcttttttggttccatatgaaatttaaagtagttcttttgaattctgtgaagaaagtcagtggtaacttgatgggaatagcattgaatctatcaattactttgggcagtatagccattttcacgatattgattcttcctatccatgagcatggaatatttctccatttgtttgtgtcctctcttatttccttgagcagtggtttgtagttcttcttgaagaggtccttcacatcccttgtaagttgtattcctaggtattttattccctttgtagcaattgtgaatgggagttcactcatgatttcgctctctgtttgtctgttattggtgtataagaatgcttgtgatttttgcacattgaatgattgcacaggaatggttgtgatttttgcacttccattttgtatcctgtgactttgctgaagttgcttatcagcttaaggagtttttgggctgagaccatggggttttctaaagatacagtcatgtcatttgcaaacagagacaatttgactacctctcttcctatttgaataccctttgtttctttctcttgcctgattgccctggccagaacttgcaatactatgttgaataggagtggtgaaagagggcatccatgtccttgtgccagttttcaaagggaatgcttccagtttttgcccatttagtatgatattggctgtgggtttgtcataaatagttcttattattttgagatgcgttccatcaatacctagtttattgagagcttttggcatgaaggggtgttgaattttatcgaaggtgttttctgcatctattgagataatcatgtggtttttttcattggttctgtttgtgtgatggattacatttactgatttgcgtatattgaaccagccttgcatcccaggggtgaagccaacttgattgtggtggataagttttttaatgtgctgctggattcagtttgccagtattttatggaggattttcgcatccttgttcatcagggatattggcctgaaattttctttttttgttgtgtctctgccaggttttgttatcaggatattgccaaccacataagatgagttagagaggagtccctttttttccattgtttggaatagttttagaagcagtggtaccagttcctctttgtacctcgggtagaattcagctgtgaatctgtctggtcctggactttttttggttggtaggctattaattcctgcctcaatttcagaacttgttattggtctattcagggattcaacttcttcctggtttagtcttgggagggtgcatgtgtccaggattttatccatttcttctagattttctggtttatttgcatagagttgtttatagtattctctgatggtagtttgtatttctgtggaatcagtggtgatatcccctttatcattttttattgtgtctatttaattcttctctcttttcttctttattagtgtggctagtcatctatctattttgttaatcttttaaaaatccagctcctggattcattgattttttttttgaagcatttttcctgtctctatctccttcagttctgctctgatcttaattatttcttgtcttctgctagcttttgaatttgtttgctcttgcttctttagttcttttaattgtcatgttagggtgttgattttagatctttcccgctttctcatgtgggcatttagtgctataaatttcactctaaacactgctttagctgtgtcccagcaattctggtacgttgtgtcattgttctcatttgtttcaaagaacttacttatttcaagcagccaaaacttatgcctgcatctgtcagttttagagtgtaaactatagcataaggatcttgtatttaaaattttgttgtgtacaacatggaagatacaatcctttttgtatggcagcagtgagtgcattttgaaaagtttggtgggataatttaaagtttatttacccttgaaatgttctagactgacttgaaggatctaggtgcttcttttcaagccagccagctttaaaaaaaagttagctcttaaaatgcttctagcagagctgtcagttttctttctggcattttgtgaaaacaagtattctagctattgtatgaattttagtcacctcatggaattttttaagtgtagttgaaaagaaaagtgggtacttttagaaaaaaaactgacaggttttcagggctcatgtagacctgaagaaaaatgagagggagcaaaattaaggcattttttgtgtgtgtatctttttggggggggattgggtagagtggctttaccatattttttgaaaaagtccctttttttcatttgaggagctaattcaattggtttgggcaaaagcagcattatcagaaatacacagttggattctgtatcatgcctctgtttagtaagaccacggggagataatggaataggaattagaaacctcaggcttgagtgcccgtagcagtattaaactaagaatttaaaaacaggcagaacaaaaagaaatcagtgaacacctgaaaagggagacacaaaaatggagtagcaaggagataaagagaagacatccatgctgaggggagcagtagattgctatcagaaattgtcccaaataactgtgtttccctacctctgaagtagaaattagcttttagcatgctagaaagagactagatatagataggccaaaaggaatttaaaatttacaaagccaaatacctttttcaaagtaccttttctatctagtttgttaagcaggaattcattagatatcatttgtcagccctagagttgggtttgtgttatatcaatgttctcttagcctacactttctgttataagcagattatgtctgatatatcctacttatggacggcttgtatcagactttgctggaatgcttataaagaaaaccagggggtttgggatatgacctgcatattgagccatacagaatggtccaagtaaatgaaaatgctatcttatatgagtttcaaataattttcgaggtaatttaatcaccagtggcaatctgacacatgcataaaaagtaacaaacgtaaaggagcattatagaaaaacataatgaaattgtccagctatggaatcgaaagttaagaaatgtgcttgagggttctcttccaagtccccattagtaaatataagagcaagcaatttcggtattaaattactgaaagttgaaactgtaaagaagcagaaaatattccaattctactttctcaacttcttttattacattatctcatcattccagctgttgtgtggaatgtgtgataatttctccattctgtccacaaacacaatagggttaggaatattagaagtactcagagattcgtaccaattttctaaagatcttgggttctaataagccagctcaatgaaattattgtgtctaaaatgtgtctttggtatattcactcttaatatgataaagaaattcctctttgtacattcgtccccaaatttcatgatttaaaaggaattggttctggagttttttcttaacttttaatattcagccattggttttaattgccctgattttggcaaatgctttgcaattctttgttactcttagtagcaagcagcttggaatctcacatcacttagctaaaacttatgaagcagtgtgcaattttcttgatgacaaaaatgttatgataaatgaacctatttgaatgggaacaatgaaacttcatagaagttgcttaaacaaacataaaaaaacttttgtcaggaccttttcttctgtcttttaaataggccttgctgttggtgttacgtacccagagatgtgaacatttggtagataaaggaaaaactattagaggtagaggggaatcccatacatattttttgtttgtgtgttgcttttttgtggtggtgctggtggagattttttggtcgttgtactttcttttgttttactctgtcattctcaaaatccttggaggttgaggggtgttagaaattatttagagcaggggtcagcaatcaatggctcttgggccaaatccagcatgccacctatttttgcaaggctcctgtgctaagaatacttgaaaacattttttaatggttggaaaaacaatcaagaagaatattttgtgatagatgacaattacatgaaattcagatttcattgttcatacataaagttttattggagcacagccacacttgttcacttgcttatcatgtatggttgctttcatgctacaatgacagagttgaattgttgtgacagaaacgatatgcctgtaaaccctaaaatatttactgtctggaaaagcgagctcaagaaaacaatctcatttaccatagcatcaaaaagaataaaatacttaggaataaatttaaccaaggaggtgaaagatctatatactcaaaactatgaagcactgatgaaaaaaattgaagaggacacaaataaatggaaagattttaatatctttggatttatggaaagatattttaatattataaaaatttcca

SEQ ID NO: 479 - DNA, 30838 bp, Homo sapiens
  source 1..30838: mol_type = other DNA
cgtctggtgtgggcgggagtgagccaaagtgtgctaaaggaaaccaacagcggcctaggggtgaaaggacagccagggttagatgttctgaggaggcgggagcaaccgagagagcacgtgagcatctgtcctttctacccgttcctctttatctttagtgttcagtagcagcggggatagcccggggcccggtgtatggccacggagttacagtgtccggactccatgccctgtcacaaccagcaagtaaactctgcctcaaccccaagtcccgagcagctgcgacctggcgatctgatcctggaccacgcagggggaaacagagcctccagggccaaggtgattctcctcacggggtacgcccattctagcctgccggccgagctggactctggggcctgcggcggctccagcctcaactcagagggcaacagtggtagtggtgacagtagcagctatgacgcaccagctggcaactccttcctagaggactgcgaactctcccggcagatcggggcgcagcttaagctgctgcctatgaatgatcagatacgggagctacagaccatcatccgtgacaagtaagccaagagcggaaggggaaagggaagtggagggtcttgcaggctgtgggcggggattggaagtaaaagggctaagagacagtgttcttggccttggcaaactttggagattggggtaagaccttttatttggtgtgtgtgtgtgtgtgtgtgtgtgtgtgtgtgtgtgtgtgtcgtgtaactcgaacgccaaccttctctttccaagttccggtgtctaacatcactttgggtggggaggaagactttaggtagcctctgggctctttgtctctcccaggaaagacaactccttggccattccaggcaggtaaactcccctatactatgtgggcagtgcttgtccacatggtaaacctataacccagaaatggttactatccaaggttatgcactaccaccaatcacctcaggttcataaatagaaataaagcaatttcaaggaaattctattcaggccctgaccctttagtatttgctactgcaaacaaggtcttttagtcttggagttcaggtttacttgatcacatgaaagcttatcgtccaactcttatcatttttcactgtaaactcacagaacatagttaatggatcaaagggagcctaaaggagcctttggcccttcctaatcccacaaaccaatgtagccagaacttcatgttaaaatgtaattttgaaatttctaaacctacgttgtaaatgggttttctccagggaaatatgtaccatgatgaactacagctattttctttattggcagcactttaaatgagcagcatatcaaaacaccccttttttagtggcaggggttggggggacatgccttgatcttttaaaaatggctactgaatgacagatgccactccctaaaccagactctagaaaccttgtcttacactattgtaataatactgtttctctgcttgcagtttttcctctcttccacatgcacccatacattactgtacaatcaatcttcataacatacatctttgattcagtaattgccctactcagcaaccttctttggcttctcagagcctaccaaataaagtccaggatccttagcttgattgatatttttgagacaggatctttctctgtcacccaggctggagtgcagtggtgagatcacagcttactgtaccctcatacttctgggctcaagtaatcctcctgccttagcctcctgagtagctgggactacagggacatggcactgccccccggctaattttttatttttttgtagagatggaggtcttgctatattgtccacgatggtcttgaactcctggcctcaagcaatcctcgtgcctcggcctcctaaaatgttgggattacaggtgtgagccaccatgcctggcccccttagcttgggatgaaggcccttcttcatagttcctaggaacaattctgaaacatatctgtttctgctctcatctggaattccctgtgtctcctttatgtacgttcaggatacttattcttcagggtgaaacacagcattaaataattgtccacctctgccaagaagcttccctttaatcattattcctggcttatcttccctggtctttttaatgcaagattcaccttctttttcgtatattgttatttttgtatagatcttatcctgcctatgacatcttgaaggcagaaatcttttacatttttgaatgccggccatgccttgcaaataatagatgctcaattactagagtttttttgtagctcttaaaattatatttatgaaactatactattttactctttttaatgaatcaatattgaaaactactgtggttatgttatctaatagacaaaatagtgatcctaaaaaataggaggcataggtttgctgtagttgtggtagggtaggggcagccaaaataaatcttacatatacaacaaagaaaaatagatgatgattcttgtttctatagagcagaagttactacgcttgggtcttcgactccctcgtaccagtagatgggttcagggctttaacaaaccctcataaattaactgggaaattttactcatatgaagatttttaatagttgtttttaaataacatctttattgagatataattcacagaccatacagttcaagaatttaaagtgtataattcagtggttttaagtatgttcacagctgtgcattcatcaccacagttttagaacatttgtcatcaccccagcaagaaacctcatgcccattaaacagtcactccccattttcacccaacccacccaaagccctagacaatcattaatctactttctatttctaatggtttgcccattctgcacattacatataaaaaatgtctattctggacatttcattatcatacaatatgtggtcattttgtgactcatttcatttagcatgttttcaaggttcatccgtgtgggatctttcctttttatgattaaatgatactccattatatgaatataccacaatttgtttatccatcagttggtgaacatttgggtggtttaccactctttggctattatgaataatgctgctatgaacattcacatatgtgcctttttttttagagggtgaggattccttagttttttagatttcacaaagtgtcatgataatgtaaaggtgaagtgcccttgctatagcgcttggagagggaatggcatttagcattcacatatgacaaaataatacctgattatatgtcattagtcagaaaaacctgggttatgtagtaaacctgggtgtaagtggaatccttttttttttttcctctaagtttggaaggagacagcaggatccagagaagtgatttaggcaatatgtttagcatctctgtgcttcacctttatcatttgtaaaatgaagatgttggtaaatatcacatggagcccctgggaggctaaaacaagatactgttcatgaatattcattatgaactgtgaagagctgttcacatttaaggaatttcaagcctcatgtttggatttgtgcatgcttctaattgcattcataagtgctgtcttcttgatttgtcagaagacagtaaaatgaatttaactctatgtggaattcacttttttatcttgaaaatgaatactgggatattgtagataatttttatcttgttttgatatagtatggaaagacccaccacaatttttagtaatgtattgctgcttatttaggctggggacattgtttttagttttgtttttgttaaccaaattagaggctttatattccctttatctttaaaaaattgtcatcctctctcacaagacctgttttagcccctctaggaggctggtttaaggtgcctatggtaagaggagctatatttacataggtctagttatggaaggtgccatcagttatcataccctgttctctttggggcttattctcttctctattttgatgtgacagcataaatgtgcactgtggaactgtccgataatagaagccactggagtacatattttttcttttattgtttctggtccttagcatctatatagtgaagggattgctttgtgaattgactttggtatggggaaatcgggattgagccagcaggactgcatgttgttgtatatatgtgaaacaggcaagattgagaacattgtctgtattgatttaaaatgtctttttagattttgaaatgtgcaatatttgaaacataatatgttggttgtattattgaatttcaaggaaataaatttctctctttgaaagtgcagtaaacactgagtagattatttgctcagccatacgtatgtgggttgctggtgaacttgggataagaaaaaatttcttcatttatgtcgttttgttgttgttgcaatggattaaaccacacatccttctcttctgcctcctttatatactaaactcagcaaaatctgagtaatgtgcttttcctgtgaatatagttcatgacctcatatttaaaggcaatgcagtgtatttaaaagatcatcctccctgtccagttttttgttttttattttttgtttcctgaaacattaaagctgttgtgtgagctgttgaatgcttcctgtgtatttgtcctaggtggggctttggcatggcctcagcaagctgcttgtttaaaagtttagcaatgttagagtatgtcagtatgtgacataggacaaaaaaaggagcacattcagccttgtgactctctttagtcacctggaggggagaaaattatccttagggtgaatgaacatcctgtgtaaccctaatgtgagtgcaatctaatgtgatttgagttatgtgactaagtaatgtattgtccttaaccaaagctgtgtgcatcagaattgcctgtggagtctctctctctttttttaaaatacaagttcctgactcccatccttagcagttgtttgtatagtcttgagtaaaacctgaccacaggtaattgtgctgtgtttagactgggccattgcccctgggagaatggccagtctcccttgtgtgctgatttgctagcctgctgattcgggctatagatatggtgatccagggattccacacactaaacagaactaggctagagagcctgacctagcattacatcaacactggaggaatctcccaacatttccttccagcttgcacaaaaccaaaatgcccaccgcagaaaaaaactgtgacgtgcaaattgtttaaaacatggacatattttcggtttttgtgtgtttcccgtgtgagtcctctgacttttagagcaggaaggaggaagtcaccactaagctatacggacctctgttataacatttactgggcatatcctggtatacctaactagactggactccaaggaggcagaaagggggtctgacctggcacagtccctgacacaaaggataattaatgtagcaattgtaatcagataaaatgatagtttcccttgtttttctgtcccatttttttgcaataatttcaacatttgttttatttttttaaagctttcaggtttcacttatttatttttttccataagttattggggtacaggtggtatttgattacatgagtaagttctttagtggtgatttatgagattttggtgcacccatcacccaagcagtatacactgcatcatatttgtagtcttttatcccttgaccccctcccaccctttcctcccaagttgctaaagtccattatattattcttatatctttgcatcctcatagcttagctgccacatactagtgagaacatatgatgtttagttttccattcatgagttacatcacttagaatagtaatctctaatctcatccaggtcactgcaaatgctgttaattcatttttttaatggctgactagtattccatcatatatatatatttgatatgtattccatcatatatatatatttgttggccatttgtatatcttcttttgagaattgtctattcatgtccttagcccactttttgatgggattgtttgtttttttttttcttgctgatttgtttgagttcctcgtagattctggatattagtcctttgtcagatgtatagattgtgaagattttctcccactatatgggttgtctgtttactctgctgactgtttcttttgctgtgcaaaagctctttagtttaattaagtcccagctatttatctttgtttttattgcatttgcttttgtgttcctggtcatgaaatctttggctaagccaatgtatgtaagccaaagttatcttctagaatttttatagtttcaggtcttagatttcagcccttaatccatcttgagttgatttttgtataaggtgagagatgaggatccagtttcattctcctacatgtggttagccaattatcccagcaacattagttgaaaagggtgtcctttccccacttcatatttttgtttgctttgtcgaagatcagttggctataagtatttgggtttatttctgagttctctgttctgttccattggtctttgtgcctatttttgtaccagtgccatgctgttttgatgactgtggccttatagtatagtttgaaatcaggtagtgtgacacttccaggtttgttctttctgcttagtcttgctttggctgtgtggggtcttttgtggttccatatgaattttagaattgttttttctaattctgtgaagaatgatggtggtattttgatgggaattgcattgaatttgtagattgcttttggcagtatgatcattttcacaatattgactctacccatccatgagcatgggatgtgtttccattcatttgtgtcatctattatttctttcagcagtgttttgaagttttacttgtagaggtctttcaactccttaggtaaattcctaaggattttattttttttggcagctattgtagagggttgagttcttgatttgattctcagcttgggtactgtttgtgtatagaagagctactgatttgtgtacattaatcttgtatccagaaactgctgaattcttttatcagttctaggagctttctggaggagcctttagggttttcaaggtaaaagatcatatcctcagcaaacagtgacagtctgacttccactttatcaatttggatgccccttatttctttctcttgtctgattgctctggctaggacctccagtactatgttgaagaggaatggtgagggtggcatccttgtcttgttccagttcttagagtgaatgctttgaacttttccccatttagtattatgttgtctgtgggtttgtcatagatggcttttattacattaagttgtgtcctttctatgctgattttgctgagagttttaatcatggaggtatgctgcattttgttgaatgctttttctgcatctattgagatgatcctgtgatgtttgtttttaattctgtttatgtggtgtgtcacatttattgacttgcatacattaaaccatccctgcatccctgatatgaaacccacttgatcatggtggattatctttttgatgtgctgttggaattggttagctagtattttgttaaggattttagcatctatgttcatcaaggatatcagtctgtagttttcttttttggtcatatccttccctggttttgctatcagggtgatgctggcttcatagaatgaattagggagcattccctctttctctgtcttgtggaatagtgtcaaaaggaatgttttcaattcttctttgaatgtctcatagaagtcttctgtgaatctatctgatcctggactttttttttgttggtaatttttaaattaccatttcagtcttgctggttgttattggtctgttcagggtatcaaatttttcctgatttaagcaaggagggttgtatttttttcaggaatttatccatctcttctgggttttctagtttatgtgtgtaagggtgttcatagtagccttgaatgatcttttgtatttctctggtgtcagttgtaatatctcctgtttcatttcttagtgaggtcatttggattttctctcttcttggttaatcttgctaatagtctattaatttaatttatcttttcaaagaaccagctttttgtttcatttatcttatatttttttttttgcttcaatttcacttagttctgctctgatcttggttatttcctttcttctgctggatttgggtttggtttgttcttgtttctctagttccttgaggtgtgaccttagaatgtcagtttgtgttctttcagtctttttgatgtaggtgtttagggctgtgaacttccctcttagcactgcctttgctgtatgccagaggttttgggaggttgtgtcattatttgggaggtatgtgtcattcagtttgaagaatttttaaatttccatcttgattttgtttttgacccagtgatcattcaggaacaggttatttaatttcatgtatttgcatgattttgaaggttacttttggagttgatttccagttttattccactgcggtctgagagagtgcttgatataatttcagttttcttaaatttattcaggcttgttttatggcctatcatatggtatgtcttggagaaagttccatgcactgttgaatagaatatgtattctgcagttgttggacgaaatgttctgtatgtatctgttaagtcaatttgttccgaggtatagtttaaatccattgtttctttgttgaccttctgtcttgatgacctgtctagtgctgtcagtggagtactgaagtcccccactgttattgtgttgttgtctaactcatttcttaggtctgttagtaattgttttataaatttgggaggtcctatgttaggtgcatatatgtttaagattgtgatagttttccattggacaaggcttttcaccattatataatgtccctctttgtctttgttaactgctgttgctttcaagtttgtttcttctgatataacaacagctactccagctcggttttggtgtccatttgcatgaagtgtctctttccacttctttaccttacgtttgtgtgagtcctcatgtgttaggtgagtctcctgaaggcagcagataattggttggtgagttcttatccattctgcggttttgtatcttttaagtggagcatttaggccatttacattcaatgttagtattgaaatgtgaggttctgttgcattgattgtgctctttgttgtctatgtactgtttttttttgtttttagttttggccttttacctgtatttttgttatataggtcctgcatgatttatgctttaaagagtttctgttttgatgtgtttccaggatttgtttcaagaattagagctccttttagtggtttttgtagtggtggcttgataatggtgaattctcttagcctttgtctgaaaaaggctatatttttccttcatgtatgatgcttagttttgctgcacacaaaattcttggctgattttttgtttgtttgtttgtttgtttgaggaggctgaagatagatagctcatagcttgtagggtttctgctgacaaatctgctgttaatctgataggttttcataggttatctggtgtttttgtctcacagctcttaagattctttccttcatcttaactttggatagcccgacgaaaatgtgcctaggctatgacctttttgtgatgaattttccaggcattctttgtgcttctcatatttggatgtctatgtctctatcaaggctggggaaattttcctcaattattcccccaaatgtgttttccaagcttttagaattctcttcttcctcaggaacacggattattcctaggtttagttgtttaacataatcctagaattcttggaggctttgttcatattttcttattcttttttctttgtctttgttggattgggttaattcaaataccttgtcttcaagctgtcaatttctgtcttctacttgttcaattcggttgctgagactgtccagaacatttcccatatctaaaagtatgtccaaagtttcctaaatttttgattgttttttctttgagctatctgtttccttgaatatttctccattcagttcttgtatcgtttttggatttccttgcattgggctttgcctttctctggtgcctccctgattagcttaataactaacctcctgaattcctcttcaggtaaatcagggatttcttcttggtttggatccattgctggtgaactagtgtgatttttgggggctgttaaagagccttgttatgtaatattaccagggtttgttttctgtttcattctcatttgggtatgctctgtcagagggaagatctagggccaaaggctgttgttcagattcttttgtcccacggggtgtttccttgatgtagtactctcctccgtttcctatggatgtggcttcctgtgagctgaactgctgtgattgttgtctctcttctggatccagctacccagagagtctgttcagctctgggctggtactgggtgttgtctgcatggagttctgtgatgtgaaccgcctatgggtctgtcagccatggataccagtgcctgttccagtggaggtggcaggggggggtgcagtggactccattatggtttttagctttggtggtttaatgttctatttttttgctggttggcctcctgccaggaggtggcactttccagagagcatcacctgtagtagtatggagagggactggtggtgggtggggccctagaaatcctaagattatatgccctttgtcttctgctaccagggtgagtagggaaggaacattaggtgggggcagggctaggtgtgtctgagctcaggctgtccttgggccggtcttgctgtggctgccgtaggggatggggtcgagatgcccaggtcactggagttgtgtacctaggaggattatggctgcctctgctgagttctgcaggttgtcagggaagtgggggaaagccaggagtcacaggcctcacccagctcccatgtaaaccgaagtgctggtctcactcccaccatgccccctccaacagccccaagtctgtttccaggcagtgggcacgactggcttgaaaaattgcccagactacctgcctccaagttgagaaagaaaaacttctttccctgcctgtggagtctgcacactggatttgtgccctccccctagttctggccaggaggcttcttgccccattgaaattgttaaaaaggtcagctagagatttccttctccctgtggagatttaccccctgctcctctggcctccctcctgatggatccctgttttgtcaggcaggaatgggctgcttggggacccagcaagcttccagggcctttctgctgctttctctacccctgtatttcactcggctctctaaattgactcagctccaggtaaggtcatacatttctcccacaaacagaccttcagattcttcagtgggggtgtgtgtttgggaggggagggtctccctttctcacttccacagttggggcactcacagtatttggggtatctcccaggtcctgcaggagcaatctgcttccttaagagggtctgtgggtcctctcctctgtcctattttgaatgttcacattgaatgcagctttgaggtgcaggtaaatagttattgacactctgtgagtttattaagaaggcgctaaagtgctgtggccttgatgccttgcacctggcaaaaaaaaaaaatagtaacataatattattttttttaaactttttgcttttggttaaatttgctccaaattcttcactgggggtttgtttttgtgaaggtaaaggaaggagaaggaaaaccattcataaatcatctgtatactacgacaaactttgggactatattttagtgatcacataataataaagtagttatggatgtaaagctcatgttttcactaaacattaaatgaaacattcctttggttaaaacctgccggaaaagctttttttgttgtactttcctttaacttgttgctcaaaaccaaaaaaagcacattagagctgagtttgagtccatttaattcttcctcctcaacttagattgcctggcaaagtacaggatgctcagttaaatctgaattcaaataaacaatgaataattttttatgttaagtatgtcctaaatatttcatgggatttctgaaatacaaatttacttggggggggggtgggtcctgattttgatttacttaatctggcaaacctatgcccaactacaacacccaacctgcccctcgccccatatgctacaaacaaactttgtatataatcctcccagagagagtgatatatttaaatttttgaaatgacaattaattcagtgctactagcattttatttaaattaagttgtttttaggtgataagtcacaagattttgctttagtcattgttggaaagggtatattcttgtatgtggtaaccttagtacgtattttacaagccacgttataaaaacttttccctcttcagaaggaatattttaatgatgttttatttgcctcccaaactctttcattgttttgtgtttccattgtatatacatatcaatcggagtcacagggagagaagtatcataacaggacatctaaaaaattggctaccttttagtagtaagcattcccttattagggcaaaatataagtcattgcttttctcagagacttggaattggagagctccaggctgtgaggaacctgactttacttttggaagcctcactgttctcattgctaaagtggtagtgataataaaatctacttcttaaattgtatgaagattagatgagataatataccaaaagtggttactactgggcaccaaggaagcttttaatagatggtggcctctggaaaagaaggtagtaatatgtgtataacattaggtacctcctgtaatttatggacctttttttaagaagagttatatacttaagtctttgtaatttaggatatatatatgtcacacacacacacatacgtatgtatatgtagttgttaaattgatttttgtaaaaaaaagatgagggttgttaagtgtattctgaatagagagaagaaacagaatgagtgataaaatgtcaatatctgctgtgagaattgaagttgtaattatcccaggggagaatccctccatttagaagttgtagtaatagtaatagtactagtagtagtgaggcttagtaagaagatgggagaagctccccatgttaacattttaatattataaaaattttcctctttttcatatttctatatcttgtggataggtaactattagtttattgaaagaaagatcagtgagactcttaaaaggtttcatgttgttttgggtctactatgagatgtagatatttttaaatatatacaattgctacagccccaggaaatgttaaagtgctttatagacagtctcacttaatatttaggaaagagtcaggtttaacaagtccacattaaattgaggatttgcaaaaaattctttgaaataaaacagagacacaacataccaaaatctctgagatgcagcaaaagcagcattaagaggagtttatagtgctaaacacctcaaaaagttaaaaagatctcattaacaatctaatgtcacacctagaggaactagaaaaacaagaaaaaactaaccccaaagctagcagaagaaaatacataattaaagtcggagtggaagtgaatgaaattgatacacaaaaattcatacagaggatcaacaaagtcaaaagttacttctttgaaaggataaacaaaatcgatagaccattagctagattaacaaaggaaaaaaagggagaagatccaaataagcgcaatctgaaaaggcaaaggtgacattacaaataatcccatgtaaatacaaaagatcctcagagactattatgaacaactctagatgcagaaactagaagatctagaggaaatggatacattcctcgaaacaaacattctcctaaaattgaattaggaagcaattgaaaccctgaacagaccaacattaagttccaaaattgaataagtagtgaaaaacctaccaacctaaagaagacctggaccagatagagtcacaattgaattctaccagacatacaagaagagcttataccaattctactgaaactattccaaaaaaatcaaggaggaaggactcctacctaactcattctatgaatccgatgaatccagcatcaccctgataacaaaacctggcaaagacacaatgaaaaaagaaaacttcaagccacttatgatgaacatagatgcaaaagtcctcaacaaaatactagcgaaacaaattcaacagcacatcaaaaagttaatttgccatgatcaagtaggtgccattactgggatgcaaggataattcaacatatgcaaatcactaaatgtgattcaacacataaaaagaattttaaaatatatgatcatctcaacagctgcagaaaaagcttttgataaagtataccatccatttatcataaaaccactcaaaaaatcatttcttagttatcaaaggaaaatacctgaaaataataacagccatatatctataacaaacccacagccaacactgtactgaatgggcaaaaactggaagcatttcccttgaaaactggaacaagacaaggatactcactctcaccactcctattcaacacagtactggaagtgctagcaagagctatcaggcaagagaaataaataaaaggcaaccagataggaaaagaagtcgtcaaactatctctcttcatggaaaatatgattctatacatagaaaaccctgtagattccaccaaaaggctcctggaactgataaatgacttcagtagtgtttcagaatacaaaatcagtgtaccaaaatcagtagtatttatatacaccaatgatattcaagctgagagccaaatcaagaacacaatcatatttacagggctgggcatggtggctcgccaaagcaggaggatcacttgagctgaggagttcaagaccagcctgggcaatatagtgagatcccatatctataaagtaaataaatgaaaaaaagttccatttacaatagctgcaaaaaaatacctaggaatacatctaatcaagggggcaaaagatctctacaaagagatctgcaaaacacagctaaaagaaataataaatgacacagtagaaaaacatttcatgtgcatggattggacgaatcaattttggtaaaatggatacactgcccaaagcaatctatagatccaatgctattcctctcaaactaccaacattattttgctcagaattggaaaaaaaaaaaactattctgaaattcgtatggtgccccaaaagagccagaatagccaaagcaatcctaagcaaaaagaacaaagctggaggcatcacattacctgacttcaaactatactacaaggccacagtaaccaaaacagcatggttctggtgaaaaaacagacacacagactgatagaacagagtagagaacccagaaataaagccacagacttacagctatttaatcttcaacaatgccaacaaaaataaggaatagggaaaggattacctattcaataaatagtttggggatagctggctatccatatgcagaagaatgaaactggacccccacttttcaccatgtagaaaacttaagatggattaaatatttacatgtaagacctcaaactacaagaatcatagaagaaaacctggtaattacccttcttaccattggccttgggaatttatgacaaagtcctcaaaagcaattgcagcaaaaacaaaaattgacaagtgagacctaattaaactaaagagcttctgcacagcaaaagaaactatcaacagagtaagcagacaacctacagaatgggagaaactattcacaaactctgaatctgacaaaggtgtaatatccagaaatctgtaaggaacttaaacacattgaacgagcaaaaaacaaagaacccccttaaaaaggtgcaaaagacataaacagacacttttcaaaagaagacatacaaacagccaacaaacatatgaaaaaatgcttatcatcactaatcatcagataaatgcaaatcaaaaccacaatgaaataccatctcacacccgttagaatggtgattattaaaaagtcaaaaaacaacagatcttggcaaggctgtgtagaaaaggagatgcttatacacttttggtgagaatgtaaattagttcagtcagtgtggaaagctgtttcaagatttctcaaattattagaaaccatttgacccaagaatcccattacggggtatatattcaaatgaaaacaaattgttctaccaaaaaaccacacgcacttgtatgttcatcacaacagtatttacaacagcaacgacatggaatccatgtaggtgcccatcaacagtggattggataaagaaagtgtggtaaatatatatgatggaatcctgtgtagccatacaaaagaatgaaatcatgtcctttgcagtaacatggatgcagctggaggccattatcctaagtgaattaatgcaggaacagaaaatcaaatactgcatgttctcacttataaatgggagctaaacactgggtactcatggacatgaagatggcaacagtagacactggggactactaaatgggggaaggatggagggggacaagagttgggaaactaactgttgtgtactatactaagtacctgggtgataggatcatttgtaccccaaacctcagcatcatgcaatagacccaggtaaaaaacctgcacatgtaccccctgaatgtaaaataaaagttgaaaaaaagtaaattaaaaaatgaggatttggcttccagtatgaatcccattcttttgttgtttcagtgtgaagataactttttaaaatgactgcctttggcgtttgtcttatgctacaggtgtgtgacacatttgtttatgtgaggaggtgtcaagaaaagtgggttctcagatatggttaaatctgcatcgctaaacctgcttggggtttgtacaatttaaaatatgctcagcttaacaattagatatctatactttggattacaagtgcctggatatcattatctgtttaaatatttgatatttggttttttagatgtatttaaaaatattccagggatgtgtgcatgtgtgttttttacattgtgataattttacattagactttatttggaactattatcagatagaagataattaatgtgtctttcaaagctttttttccagtaggagagattacggttatgatttaaaatgaagtgtgtggaatgaagaagatctggagtctggttcatattaaaacatccctgttaacaaataattcagcctagcgttgtgtctaaaatagagcctcagagaatacatgcagcttcattgatacaagtaaatacctgctttatgaagctctagtcttaacaatgttaaagatttaaatatgatattgaaggccattgtggaattaaaaaaaaaaaacgaggtcaacttattgtattctagatatactttaatttctaaatggatttaaaatgaatagtatggatctgaagtccgtctatacagcaggaaataggtaagtaattacagcttgcagtagagttacttggagtggtaaatgattttattggaggtcaaatagctgtcaagagataacagctcatattaggttctcacagtgtgtaccttttttggaatatagagaaagcaggtgcttattgtgcaaaagttatcagctgaggctgatttttttgtgggggagggtgtgaaaggtggtaaaatgtttgattccaaagtaaaataacagatttgggcgactctgattacttaacctaatatactgtttatctgtaataaagtgatatctaactgttcagaaattaaaactgacatttcaggtgtctcctataatatataacaccgcatatgtctttaagtcaaatccagacttctttcttgttgaaaaactatgttctagctgcctaggtaagttagtatagacctagcaaacagagcagtaggtttcagtattttttgcagttcactgagtgaagattaattatataaatgaaaggtgctggtgtaattgtatagtcttatttgaaaaccacagtacgtgaaattgagcctgttttaaaggggctctgtgtgtgtgtaggtatgtgtggatagagttttctgagtttaaggaatttttgtaaataaacaacacagacctatattcttgctgttgctaaattgtggtttatattttagagagctaatatctgtagtatgatagaactgtggttaagaaacctaatgccatttgtgtcagggctatttcattgctttttccatctcagggaaatcaaatgcaacttgaggcaaaagagtggaaattaatgatatactgagataatatgtgtttgcatatatcattttgaggctgttttggagaatactttaggtggtccatagataggcagatgggggtttttaagtacataagctgtaaatcaatccattcagtcagatcatttaacttatatggaagaaagatgaggaacaatactacatttttatgtgcagaaataacatcagttatttaacattccctttttggctcgttaacagcttgtgggtagacgtagccctggattattattacttggttacctcaggatattgaccagaggaaatggacaggaaaatggcagaaagatctagggaatgaagtactcatttgaaaaaacagtcaaaaggaacaaattatcaattatttgagaatgagttcttggaaattagtttatatgtttttgaaagcagtagcaaaagcagaggatttatttattggtaccattctagttccaaaaaggattacaaagtagatgggttacttatcttggtaatatgggttttagatcaaggtgagttgagggggagaatggggagaaactgcttctcttactgcaaagtttcctctcaactttagctctggacttgctctcaccctccaggggtaacttgttcatctcccggttgactaatatgtacttgggcagctcagtgggggactgcatgatcttttcagttccagtctctaatgttggtatcaagcattttcattattgatcaagttatctcatttaggtgcctgtatcctagtaaaaagtatcttgcctcagtaatagtctgtacatgtaagcatttaagcttttagtatgttataggtcttaatatcagtgttactgtacatattaaataacattttgccttaaagctctaatttagactaaaacttgtattatctttttttaggacagccagtagaggtgacttcatgttttctgcggatcgtttggtaggtgggggcttttcattttcatttcattgttttgcctagtgatataaccatggtagaccaagggatatttttgttctagagcattctggggctgaaagagattgtactaagtaaccatcatcttgctaggctaatgaagtgttgtttcactgttgcattaaagatctacttcaatacttttcaccacaaagcattgcccatgaactaattccctgtatttctgagataacactacctctcaaatggatcttggtaacttgagtttcagcaattcttaagtgcctcctcttagggcagtgaagtacattaaaagaaaaccaaaaatgtaaggagacctcatagttacacttgtggtatccaacgaatgtacaaaaatatatatttcttgtagtttacggcggcagcagggggaggcttattttgcctcttctttcctgtactagccttcacatgtgaaatagtacatttgactgtctatggtttcctcaggcacttcctattaagaattgaccaagctcaattctgtttagctagtgtgatctgagaggatctcagtccaaattggtttgtcttcagggtaagcactgtgttttcttcttgtgttaatatctaagcatgcttagtgcttgaagtgaggttgacatgttttctgctgtggctattagtttcaatccacagcagaaaatacattacattcaggaaagtttagtgtatatttatatttatatatagtttaatgtatatttatattcagtgtatattcatgaagtttagtgtatatttcatgaatgtatttcactaaaattgcgtgaatcaggtattgtgctaggctgtgtccagagagatgagatacaatagtgaagaatgtaggcatggtctctaatctcttggtgtttatgatctaaatactagatttacaaactaagtgcaaatttagtttgggaaagaaaggaatgaacagggcttcttagccccaaagttataatcagattaaggtagatgattaaaaggaatgtgaaaaaaaggcatgaaacttttcatttaggttttgcctgaggatttattccaaaagagcatagacaactcctgttctgcttttcatcgtaagtattcttggttcagagaccaattttatttaaaattatttgagttttcattggcagtaataacccttagatagtaacaagataaatgtggttgacattcctggagcaatagttacgtcattctgtcttttatgcttttatcaaaccaaaagaacaggcttgaagaacttgtatcttaatggctgctgttttggtgtttactggtagaaaacggttcctctttcttttgctgttcttatgctctttttctatagaaagtaggagttaagttcacggttattgtaagatgcttccctgaaagggcaagcataatcttagcccagtgagatagtaaggacctatggcataattcacctgaggggataatgatttggatctctctctgttctctgcaggtggctttcaaggtcctgatatggggtgagaaagggtctgttgtggttgtggtagagactggagctatttaggtttaacttcttgaggatttctagtacactatctcctgcagcacatgtcattaatatatattatcatatatatattaatttcatcctgaatttgtcagggttggcttccttggccctcagatccttgggttctttatattttagtcactcttctgattttatgcactcctgtaagagttgggcacactaatttctgtcccagtgttggaggggatggggataggaggtaagactcattagaggactgttactaggaggaaaagatctaggctcttcaaagaaaataatcctcttttacccttgtaatttgctcataaaaaaaaatctccacagaagatggtggctggaagtgagtatgcacacatgtgcagtattcatgaggtgcctgggccctctgtctgatgctgcaggctgacaaaatcctggcttatttagaattgattgttttaatggcagcagggtgttattatatgttgtgataacagagcatagggcctggtgctgctccctgctgttgcagattctcaatcagtaatgtaatgttgattggataaaatgtgcattgcagactcagcattacttttactgtagttggctttggttgttcatggaattaccatatcttgtttttggaggctcttgtagtagttctgagtgatgctttcctttgtaccacacattatgattgatatgagccttttctttagctgagaagccccagtgcattttactggatcctccttcaagctcagtaaattggttcagccaatgcactcatttatttcctctaaagaagtttcaggctttatttacattatagtgggcctttgttaaaaataatctgacttaatgatttccaaggtactgaataaagcagagaaattcccagtgagcactatttccagaataataagaagtatattacttccaagagtgcttgccatgactgttgtcacttgctggagttttgtgtccctcatagtctggactgacagaatgagaatcagaaggaatattggagccttttggtgacaatcatggcctatctgaggttggatacctagcagcaagtagtatggcatttggatctatccctgtatctaacacatgatagggggccccttactgcctccacaagtgaaacctttgcctagtgtgttcatgactctgcctactgttcagctcctgaagctaacagctaacaggagattcccagcaggttctcaacttcttcttcctttgactctctagatcagacttgttgtggaagagggattgaatcagctgccatataaagaatgcatggtgaccactccaacaggtaactagggctgttattctcaaattttcctcataaaaattctgagctagaatggggaaagatgtaagtaaagcagtctaagtaaaataaatatgcaaaatgaagggctaggtggagctattcttttaaaatcttaaaaataaaactcaggcatttaggaaagaaatctgtgtagatgactttttgttaagggcttgcttgtcaattcaagttaaaggttaacaaatactcttcagcatgcacgtgttgcctctaatgatggcccattgagaccatagttaagaattgctggcagcttatcttcatctctatgggaaagctgctggtgagcacaaatgggcaagtctgttttggcactgaaattacatgttaaaaaaggatagaaagtaaaaaagaaaactaaaaatgataagaattggagaaggtgctttgttctatcctttaatagaaagtagccaaagatccctgtttcagggatttgaaattatgatttggttcagtaaataacgtaaaactgttctattcaaagggtttactttatgaaacttggggactgagtttgtagcatcataattgacacaaattcaggatgagaccaagagttgagcatgtcttaataactatttcagccactttcttctgcttttaaggcagaatggaggctcataaagaagaacagaggctcataaagaagaatggaatgaggaagctttctgctgtggctcacagtggggtcccagtttgaattgatggggtatatagcattctcagagtgcagtgattctctttgaattcagtttgaggaatgtgtatgtgaatatcgtgttataataagtcctattcccattcaatgaagtctgcctctcccaattatccccacaggtttcttatgaagaattaagaaataactgaaaaatcatgactcatctcattatttccacagggaatctcaggcattatacagtgtgtctgaacaagggttgctttgtgcccatctactttaaaccgtagacactttataaaatatgtaggttactccagtgatgaaagataaattctttggttttatttcctaacagggtacaagtatgaaggagtgaaatttgagaagggaaattgtggggtcagcataatgagaagcggtaggttcacgtgtgtgtgatttttgtctctttgtatgcatagaaatggttgctgttttccagaagagaggcaggcttgtctgtcataattgcagcctgcctttagttaaatctcactacctgtgttatctagcctcatggtgctgtggagtcatggcctgtgtgaggctaggtttggctaattttaactacagagcgtattccctaatagagtgctcccatgggcaagccagctttcaaagagattcagaggaggatgggaggataggaggatgtggtgatgctatcttggggagaacaggtcagtttgaagactgagggaatatggtataaattcgggcttggagaactttgaatacctgactggagaaaatatttcttctgtttttatttctgttgttgggctaaatgacttgtttgatatttttacttttttttttttttagacagggtctcactctattgtccaggctggagtatggtggcgtgatcatagctcgctgtaacctcaaactcctgagttcaagtaatcctcccacctcagcctcctgagcagctagtactacaggcacatgccactatacctagcaaattaaaaaacaatttttttttttttttggtagagatgaggtcttgctatgttgcccaggctggtctaaaactcctggcctccagtgatgctcctgcctcagcctccgaaagtgctgggattatgggcatgagccaccatacccaacctaatactttaaaactttatatatgatgagtacgtgaccacataggcaaaagtgcttgactgtcattaattctaggtatttccatctgctggtcttatgaatgttgtatttgtgtttgagtccaactgattacccttctaaaccaacctttgtatagcaaaatcacttgcctgtgattagaacctttacctgttacatggggttttttccattcagccaacttaattgtttcacgtaagatttatgttttttttgcataagtggtagaagctccacttgtttgcactgaatacatatagtttaatttttaacatataaacattcacttttctcttctggttatgaagttatgtttgtgaacaattaaatgcctcaagtaaactaggaactttaagctccttttttctaggaggaagctcttaagcactgatagcatttcaggacatttcaggacaatgatgttcaacttttaaaaactggtaaagacaatggacttttaaggtgcagtttcttctgtttcagttcagcttcttctctaaaggcacaagcatggtccttgtacccttagtatgtactagatgacttgtggtgatgtacagcattgcttataaccttaatagccatttgttgattttcatatatattagaaagaaacttgttttatgtttacactagtgatatagtttcctcttaaaataaatttaagtgaaaacaataaatttaagaaaaatgttaagtaaatgccagtattggtagaattctgatatggcctaaaatcttgaagatggcatgagaatgactgccttttggcaaacacttctttaaaggaattcagactcaaaaatagctctgtgttcagaaatcaacggtggtagtgctagttattattacctgggagagggggaacaatatacaactttttcactgcttgcagcaaaatctttgctgttgagaagtcattgttgagctaagtgatgtcccctgatgctaccttgacctaaaaggagactttctgatctacatcctttattcttccataaatcttttgcattttctcatacaaaagtcacaaatttaggtggtttaaaggcttctttaaaataatagagataaaaatattcctgatattaaaaaagctcagggagctgctcaacaaaatgctttatttcctataatcacggaagcatgacagctctaaaacttgtaagctagcaataaaactagcttattctagtttcattaaccagcccttaacctggtttcattaacctccactaagtatgaaatatgagcatatcagaaataaaagctgtcagcttcaaaataattattttcatcttccttcctttttgtattaataacagtgacaaactatactttggcctgttcttggactttctctctctttcccctaatcttttttctttcttttttcttcttcaaggtgaggcaatggaacaaggtttacgagactgctgtcgatccatacgaattggaaagatcctgattcagagtgatgaggagacacaaagagccaaagtatattatgccaaattccccccagacatttaccggagaaaagtccttctgatgtatccaattctcagtgagtggcttccatttgtttgtaacctttggttagggtttaaattcaacttagtgcctgcctcctaggtacccttatataaaaggcaaaaagagtttctaaatgtttttttctcagttgggaaaactgccccaggcagttcactggagagtttttattgcataataagagaatatacagtagtcagaccttattagccccaacaaacttccgtcttgaacacattgaaacaaaggatttaatgaggcaaaatatatggaatacagaaaatatattgaaacatatctcctctttagcctaatgagtacagcagtgattttcctcaataatttattctctctggaggtaacattttttcctgctattctgttctgtttcttaagcttactcagaccacacttggcatggtctttaagggaggtgagagggaatatgttaaatttgatacctcatatactaaatgaatttagggcttggtatttgataactgaaaagtgtatgtgtcatgttcattattgaagatagcattaataaagaacaagtaccttcatatgaagtggtttcttatgttagattgctatattgctcttacttcaaagacattttgtggccgcgtgctgtggctcacacctgtaatcccagcaatttgggaggtcgaggtggaaggatcgcttgagcccaggagtttatgaccagcctgggcaacatatggagaacccatttctgcaataaatagaaaaagtagctgggtgtggtggcacgtgcctatagtcccagctacttgggaggctgaggtgggaggatggcttgagcctgggaggtcaaggctgcagtgggccgagatcatgccactgcactccagcctgagtgacagagtgattccctgtcccccctcccccaaaaaaagaaaaaagacatttaaaaatgaatgttaaggttgctaattcatttggttatcttttgatttcaggcactggaaatactgtaattgaagctgtaaaggttcttatagaacatggagttcaacccagtgttatcatcctactcagtctgttctccactcctcatggtgagttcagcatgaggcagtaactagggctccatatagtcctgaggtgggtaagtatgcattttctagcttctaatcctgaggaaaagtttatctgctttcacattaaatctgaatctaatttgggtaattataacttgtgtttgtcatctgtaagcttagtgataacattttataccattctaatgttcaaatgcaaatggagaagtatgaactaaccccatttaaaagaattgcaattgttttcctggtttggcctgcaaatgactcaaaggttcctatttcccttggctcgccacttgagcctgagaactgctcacaaacagcaagaaacataaggttctagctagccctgtagtcttactgaagtaatctttgcagtgtgaagtgaagagcagaagtttttaaagttagacttctgctcaaagggcagagagaactgtgtgttctccattcctgaaggaggtgtacctaacttaagatcttagtgtttttcgccatacattgcagaacaattgggaatatattttaagaaaataagtataggtgcatgtagaaatttagcttctaggatgtttattgtagagttatttggtataagaaaaaatgtgaaagtatacaaatgactcacaataaggaaatggttaaataaataatatatattcaaaggatatactattatgtaactgttaaatcatgtttttggaaaatattgaatggcatccaaaaatgtacatggtaaatgtaaaaaagcagtataaaaataacagcattagaatagggtaaagtgttaccaccaagcttggagatgaccagtacaaattatgactattttaattacaaaaatcagagttggatttaatatggaacctaataaatctttccttagcatgagaggctagacagacacacagtgttgtttcaattttggtttcaaaatgcatacacaatattaatagtggttattttaggctggtgggattctaagtgcttttcattttatttttaagctttaaattggtatttttcaaatgttctacaatgaatttgtatttgcttcataatttttaaaaagggcaatatatggcttctctagtcaggtgttttctcatttccaaaatttctaagtcttagccagttctgaagaggctacagtatatctagttgggaaagctggtttcagtaggttattgacaggagttatggcctgtttgattactttgctgtttcataactaaatattacttgtagttcaaatgttggtggtaacaaaaggcgatttgcttaagttatcatttatatatataaaacacaggtggcattgaaaatattgagagaatccaataattattaaaatttttacctttgggaatagaaaagcactctttttagttctaatagtatacatgagaatggtgtactattctttgaaatttatagctgaaaaattttattctgtggcaactttgctatggatttttagtttgacagggtaattaaaatagtcataatttgtattggtcatctcttaagcttggtgataacattttatgtgattctagtgctgttatttatacattttttacatttttacatttaccatgtacatttttgatgccattcaatattttccaaaaatatgatttaacagttatatattacatcctttgaatatatgttatttatttaaccatttccttattgtgagttatttacatactttcacattttttcttatgccaaatcactctacaatgaatatcctagtccttgttacttttccctacctattcccctccccataagctagagtcctaacttctaaaaagctggcgtgctctgacacaccagctttttctgtgaaaagcaagtacactgtgaaacactacacttgtttcacagtgtttcagttgagaaaccatcatcttacgtgtgttcctctttaatttttttttaatagagatggggtgttgccgtgtggcccaggctggtctcaaattcctggccttgagtgatcctcctgcctcagccttctaaagctctgagattacaggcttgagccactgtgcttggcctgtgatcctcattttaaaaaggactgtattcactctattacagtcacctttaaaattaaacaaaataaaaaatactctttagggggaaagtttctataactgaacaattatatttttcaacttgagtataaaataataattctaagaatgtattagtgagatggagggggcataatctgactactgtcaaagcttttcagactttatacaaaggaagagattaaccaagtctgattaggtatccaaagatcattgctctctgtcttctctcaattttagacctagtggcaataactacaaaattcctgaattacaactggtgttaccaaaacatcctaccataataacttttgtttttttgaaggtgccaaatcaatcattcaggagtttccagagatcacaattttaactactgaagttcatcctgttgcacctacacattttggacagaaatactttggaacagactaagttatttaagtaaaataattatcttatgtaatattacaatcatgttttgattttctatttgttttactgattcacttgagggtggcagagaaaaatgtgttaaaatgctttttagttttggaagtgggtatatttgaggttatatctcatttagttatttgtttactgttggcaccgaattcaacaatgaagtatatgcaactcttacaaaacataaattttaataatattctaatgcaaattactgaaccctcagtgcattaaaattatttcctaatttatgagcctcttagtttggaggttgcttgaagccacaaataaaactcaaatgagagtcagttctttgtcccactgtagtttgcattttgtttagtttggttttagctctactaaggtttcacatatgtggctattgccacattcctctactgttttctttctgatactggacatgctagtaacttggagaggagaataaaagaatgtctcctggaattttacattcccattaatgtcctcattcagttggcagacctaggatgtatggttaactctcaggccattatgtttttcatggctcatttcccaaactgcattgttggtaggtgccttgctaagctgtaatgcagtgaagaagatggtggggcatttttagtaattggaactgtaacattaatttacaagattgaaccggggatgtctggatgctgacaagggagagccaagtactgttaatgccatcaatcctctaggaaggaattggtggtttttctgaagtgtgggggaaagggtggtttcttgctggatttcatggccagtaagtaaatttaaatgcttcatttttaatttggatgtttctgctagagacctttgatttggaaattagttattttgcatgtttgtcaactgtatatgtatgaaaatagaaaaaaaccatgctttttgtaaaaacccctaagatttgtatatgttcatctttaggcttctgaaagggagagaaatcatattggaaatcagtgttggtgttctgaaatctgcttgtaaaactctcatctcattttacattgatattaaaacattttaacagtgttggctagctgattacttgattaattatactcccatggccccataggaagctgttgtgggcctctgttcaaaagcacagaaaagagcagaaggaaatgtcttagaaagaatcaaagctgatgaaatcagcaaagattgggggaaaggaaggaagcctggtgtagattggattatatttttcctttggggactagaatactagaagaacttcagtatatttttccctttatttttgaatactgtcatataataaattgagattaataaattactcatattacagttcttccatggcaa

SEQ ID NO: 480 - DNA, 9934 bp, Homo sapiens
  source 1..9934: mol_type = other DNA
ggagcctgagcgaggagcccgcgagctctcctctctcctctgtctccgcggatgacgagtggctggataacatggagtcgggcaagatggcgcctcccaagaacgctccgagagatgccttggtaagtgcgaaggataagccgcggatcgcgaagccaggtgcagccagggacctgcgaggcggggccacgctgagggcctgagggtcggctcgcacgctcgtttcagtctagtcagggccgtcaggaggagagggtgatggggatgcgccctggcccccgggcccctatctcgccgcttgggccaagtcttgccagagggtcgcggtccagtggagcttgcggaacggctgcccagctttgtgtcctgggcttcgggcccctgcctccccctcgtctctagctatctgccagccctgactccgcgtccagggttctgatgctaccttaacccgccgccacagccaaaaatgacaaccagctggagctacttacctctgctggagaagccaaattctgtcttctctttgccccacaccccgcccccaaccccgccaaaaaataaaaataaaagttttctgcaaaagcgtactatgcgatttcgtgtgatcactgactcacttgggagggcaagggtgagtaggactttggagcccaaagaaggggaaccttgtatcataaatataaatactacccttcagtgcagccttgatttccagtaccaaattctgcatctggtgtttttatttgaatccacaggtgatggcacagatcctgaaggatatgggaatcacagagtatgaaccaagggttataaatcaaatgttggaatttgctttccgtaagttaatgaaacaccaaaaacttgcctaacttgtgaacttgaaaagatatttttattgtaagaacattttcttttattttcttttttgagacagggactcgctgttgcccaggctagaaggcagtggcgcgatcttggctcactgcggcctccgcctcctgggttcaagcgattcttgtgcctcagcctcccgagctgggactacaggcacttgccaccacgcccggctaagtgttgtattattagtagaaagggagtttcgccatattgcccaggctggcctcgaactactgactcaagtgatccccccatctcggcctcccaaagtgttgggattacaggcgtgagccaccgcacccagccttgtaagaacattttcaaccaaattatgttaacagtatcatagaattcagcctaaagaacgaaaggagctcaagctaggggacagtagtattcacactgtgatatctgtttaaaactgatcatatagacaggacaattacttattaaaatcagcatttaggctgagcacagtagcttacacctgtaatctcagcacttcgggaggctgtcgcggggaggccaggagtttcctgggcaacatagcgagaccctgtctctacaaaaacccacaaaatttataaaccgtctacaaattagtggaaagttttattaagacaagtagccataaatattaagctgtcttcatatgtttaagaaaagattgttttgttcttataggttatgtgactacaattctggatgatgcaaaaatttattcgagccatgctaagaaacctaatgttgatgcagatgatgtgagactggcaatccagtgtcgtgctgaccaatcttttacctctcctcccccaagagatgtgagcaaactttgatttgaagttatttttacttacaatttttaaaactgtagttctaataaggattttttttttaagtttttactggatatcgcaaggcagaaaaatcaaacccctttgccactgattaagccatatgcaggacctagactgccacctgatagatactgcttaacagctccaaactataggctgaagtccttaattaaaaaggtaagaaattttagtcaacttttctttttttaaaaggtggaatatgataggggactttgtgaaaagcaaattcctgtagctagtatagtagattaaaggttaagataacttactagaatttttttaattttaaaaaattttcgagctagatggaactttagtgttcatctaactcaacagtcatttttcacatcaggaagcagggcctgaactcatttatgaagttagtagcaaagctaggactgattccaagcctcataactcccagtctttccactatatcatagttttttagtgaggcctaataacagaggaaatgataccatcaggaattaggccagctttctaaaatatgacataaagctctcccaccactgaaaaagttctccccataataggctgccttttctgaagttccactataagagttttattcttttttgggttaagaaattgaccagttaagattaaaaatcacaaagtagttacagtcttatttgaatggggataaccgctatcttaaactttaatactgcataagattttatacgtattcatatctatttttatatagatagagatgtatatatgtttatacaaaccccagattaaatgttggatttagaacactgagagaacaaaaacaggactttcttgccatggattatccataatcatttacatcagcaatcctaatttcattcctggtaaatttaggtgtcacatcttaacattaatttgttttttaaatcccctagggacctaaccaagggagactagttccacgattaagtgttggtgctgttagtagcaaacctactactcctactataggtaagtgagaggagacaatggcatttctggctggtaaagcagtgcctcagcacttggttttgaactataatgcaagtcaaaaagtgaatcagaaattcttgtgtatgtgttactattaataattttactcatcctctagtaaagctataaacatacatgttactggatttcaaaatgagaaagccacaaggaacgtctgatctcaaatgaatataaaattggacattgcccccattgttgttggtataaactctgataccaaaaacaggagtttactcttagctgtgtactttacgccttctataaggtgccacacacacttatggcagtagactacttattagaaatttaaatttccaaatacattgatgagaatacagtagaaagaagattaaggtgtacaaaaatcttaaggatttcaaagaaaaaaattgtttttaatactaacctttttaaaacatagtactgattgttttagattggtcagtgggagccccttcaagctgtttcctgtgtccttttgacgtatctgcatcattctgtgatcatttcttgctttctgatgcaacaagatgttccaaactcatctttatatttttctgcctaggtcctagaatcatccacttgtccaaagagctctagttccttttagtggagaatggtatttagaaaccattatttgtttctttttaatattgttgtttagataataaggaaaacaaataatggacttagatttcctgttttttttttcctacattcctgctgggtttcttgcatagtctagtattcaaagtattttcagaaaagtcccttttcaccagtattaatttattggctcttattgcttataacttgagtcctatagctgtcatatagctcaggtataaacagcatttgatttttgaggtgtgtaaaccctctcttcatattctcaggatgtaaatttgcatttcagcattgtaaaaccagtttgggtatagtattagttgtacatgtctaattacctacctgtgacctttgtggacagaaatctgcattataatctttgtaaattttcatcatatactgtttgtctgtgggttcacattacttaaatgaataccagcttttttaaacccctaggctggtaatcagtttcgtgtgttaggcaggttaaccaattttagttatcagttgtgatttttattcctagctagacatttgttgtacatactgttcagagattgttaaaatctagagtcagggcactaccaaaaaacgcctgatagttttaaagatgcaagtttttttttgtttttattttttattttttgagacagactctcactctgttacccaggccaggctggagtgcaatggcacaatcttggctcactgcaacctctgcctcctgggttcaagcaattctcctgcctcagcctcccgagtagctgggattacaggtgtgcgtcaccacaccaggctaatttttgtttttttgtgttttttttttttttcagtaaagacgggatttcaccatgttggccaggctggtcttgaactcctgacctcaagtgatctgcctgcctcggcctcccaaagtgctaggattacaggtgtgagccaccacgccaggcataaagatgcaagttttaaaatttaaaaaaattaaaatgagttggccaggtgcggtggctcacacctgtaatcctagcactttgggaggccaaggtgggcctatcacttgaggtcaggagttcaagagcagcctggccaacatggtgaaaccccgtctctactaaaaatacaaaaattagccaggcatggtggcgggtgcctgtaatcccagctactcgggaggctgaggcacgagaattgcttgaacccaagaggcggaggtcacagtgagccaagatcatgccactgcattccagcttggacgacagagtaagactctgtctcaaaaaaaaaaaaaaattaaaatgatttatatagacttaagacctgagtatttactctgttcaattgggggaagctccatctacagtctaatgtgttcagttttaaagcctgaactccatacctactaaaatgtattaacaatccttaggccaagaaaacatccacctactgtgagttttcttttttctttataaaataaaatacttacattgcttcattacgcttcaccaaattctttgaactgatccttaacacatgggaaaacttacctagggatggagatattttagaggaaggtctcaccttctgtgtttgggagagaaagcagtaaaacccggatttctcagtacctttgggctttattcccttagactttcttcacctttgtctctagaaatgatgataattgcagtgtcctcagcaactctatctctgggtagactgctggttccagggggaagggatgtattggaaagcctgcatccccaaatgaaaaattggaaatggatacatttccataaatgtattttttaagagagcaatgatgtcagtatatatattaagtcttcgagtcttacaaaatacatttattaagcaaacatttgttgagtacctattaggagcaaggtaaaagagccatgtgctcacaaggatgaaaaatgttagtcaaggcttgtaatctagtcaatgagataagataataatgactcctatgacgttaagggaacttcagaggcaggatataagacgtttaactgagaaaattaaggaaagttttataaaacggggtagtatttgagctgtaccttggaataatgggtagaatttagatgactgggggtttagactaggttatctccaagatatttttctgcttaaaaagtatctgaacacagaaagggaataaattttctgggcccacctggagacctcaaggggtgtatttgatctctgctttagtttcatgggcatagatgacatcttctgattctcagcaggtgaccaagattaaaagtgccaactaaggtaataaatagaaaacctgggtctttattctggtaggttaaactctcatctttatgtcttcatccagctatacctcagtgcttactgtgtactagaggctgtttgaagagttttacagggattatttttacttaattttcacaataattatatgaaatgggtgatatatcccccattttacagaggagaaaactgaggcacaaaaatttaaataaacttgcccaaggacactcagctagtaggtgagagcctgtattcaaactcaagcaggtaggctacagagcctacattctttaccactattctatactgaattttgtaacatctaaacaagcttgtaaatttttttaaggttgttttgctcttatttctaatgactttttcctcaccttttattagtttcctttgctttgaagatagtttgcggtaagctgagtgtagaatataaatctgtataagtcacctaacaaacatggtctgtttattgtaactacagcaaccccacaaacggtgtctgtcccaaataaagttgcaactccaatgtcagtgacaagccaaagatttacggtgcagattccaccttctcagtccacacctgtcaaaccaggtaatgtgattgggagtgggggacagaatttgtgaataatttgaaattgtaggaccgtttgtattcctatagcaagaggtaaattgttttaatacccaacaggaaggtggcagtaatgctgcaaatgagggttcttcagagggacctatgagccctctaaaattctgtgaaattttacataaagtagtctccccccttatccttgagggattgttccaagacccccagttaaatttacaacctttaaagttaaatttataaactttctaaattataaggtttaatttataaattaggcacggcaagaaattaacaataattaattaacaattacaacaacatactgtaataaaatatatgtgagtgtgatctctcaaagtatcttactgtactgtactcatctatttttggatcgcagttgaccacaagtagctgaaactgcagataaggggggactactatatatgtaacgttttggggaggagggaaagagtattcagtgtgttcatcagattttcaaagaacaccgtcagctaaacagttagggtccacaaatctaagtcgtcttcaaggaaaagcagttaaggtaaaagctcaagaaagcgacaaaacttagtgatgaatatgtgtatgcaatccagaacataaatgtaaattcaaatgaaattgtacctttacttcataggatacacacacacacacacacacacacacacacacacacacagattggaataagaattctgtcatagcacagtttactaatgtgtatgtctagatttcatatcttctgaaacctaaccacacacaataagcaactaacgtaaaatactggcctattagggaagtgattcctgaccttgaacataggcctttgtttaatatgttgcatgatgaatccagtgcagtttcccatgactaaattgaaattctaggttgttaaaatacaacagaacttcttcaaccttgtactagatatgtttaatctttatctatacatagatcagaacatcacattatatcccgtacatatacacaattattggcagggtacaatggctcacacctgtaatcccagcactttgggagaccgaggcgggaggatcacttgaggccaggagttcgagaccagcctggccaacgtggtgaaaccccgtctctactgaaaatacaaaaattagccaggtttggtggtacacgcctataatcccggctacttgggaacctgaggcacgagaatcacttgaactcaggaggcggaggttgcagtgagccaagatcacgccagcttggacgacagagcgagacactgtctcaaaaaaatagtaatttaaaaataaatacacaattattatttgccaattaaaaataaagattttttaaaatttaattcaactcattgcagtataagtacctatgtttcttctatgatatagttgcacttcatgctattgaaattggtattagaattacattcagctttgttgtatactttttatcatatgtttcagattctgggtaattcatagcttggttttgggggggctttcttctctgtttacagttcctgcaacaactgcagttcaaaatgttctgattaatccttcaatgattgggcccaaaaatattcttattaccaccaacatggtttcgtcacagaacacagccaatgaagcaaacccactgaagagaaaacatgaagatgatgatgacaatgatattatgtaaggaatatagtctagtctagatgcatttcaaaaggaaagttggttttgagcccagtatactgaactagaatattctagatcttgttttaccttaaaagactgaaatgtagctgcagtatttttcgtcagttaaaactgttagatctctttagtaaacatacaaatgtgtttttcagtaggcttcaattacaaacagttaagtacttgtttcttaatagtttcattaatgttgagtcctaatatggcaattctgtttttgagacacttttctgccttctatcactgatagtagcatttaagtttcagattctacagcctagtcagcagatttatctttgacagcataatttctgatctacatttaaatactactttattttataaggtaatatagttacttactgtcactagctaatttttttttttttaccaaatctctcaatataggaaacattttttggaaaggatggatttagaggagagattctaaatccattttggatgtatttgtttctttgacttccttaacttccaaactcaactccctttctagatcccattcattttctgcacctcccccataggcttgtttctctccattgctattaaatgtagaaggccatacctggaattttaaaaatattattcctggtaatacagctcagtgtcattttcctatttttaaaacatgctctacatgcctaatgttttgtgattcactttaacctgatggtttgcatttgctgtttttcactcttatgtcagagcagttgggttttaccccttagtttttatgcctgttaagctttactgtgcttttgacaggtagttttgggtcagttatattcagttttagtattgtattccaagttgataactcttccatgtttcacatttctaaatttaacagagatgctgtagcttaaaacatgttttgataagtaattacactggacctaggcaaaaccactgaagaacaagtgttcctttttaccacatacatattatgttttgatcactgctgcttgagccccgctattggtataattcagatcattttagcttgttgctgaggatgtcacatataagacaggatcaaacctgaaagacactaatggttcatcctctataaggccaacaaagaaaacaaattaatgtgatgtaacttgcatttatgtgcactctgcataggtttcccaataatactgtaatgttgctgaacacctttccctgttttccatttatacacatattaaagtcatattgggaaagatggcaaagcttttgagaatataaacacacctgttttgtttttcttaagttcaacatacttttgtagaatttgtaaaataaatgttcgtatcataattgagaatttatagccaaggatcctcaaaacagaagtttcatcttaggatagtgtttgatatatctaagaaagtccagtaacagagaagaaatgtctcaaatgtctcgtatcagttttagtgtttttcagtattagggaaaggtaatataaaaacaggtaaaatgtataaaaatagacctgatcaacatcataggagataaatattcattatatagcataggatattattacttgaatgttctcagggaggcagcaagtcagaaggcctaggttctagtcctagctccatcatttaccaactgtgtgaccttacttcacctcttagccttgttctcctcactagcagtaggaaagtaacacctaccctgcctacctcacagggctgttgtgagggttcaattggtatatgtgaaaattctttcagaattgtaaaatgctatatgactgtaaggaattattgcatttgttccaaggttaataaaaatttgagctt

SEQ ID NO: 481 - DNA, 22658 bp, Homo sapiens
  source 1..22658: mol_type = other DNA
agagcagcggccgggaaggggcggtgcgggaggcggggtgtggggcggtagtgtgggccctgttcctgcccgcgcggtgttccgcattctgcaagcctccggagcgcacgtcggcagtcggctccctcgttgaccgaatcaccgacctctctccccagctgtatttccaaaatgtcgctttctaacaagctgacgctggacaagctggacgttaaagggaagcgggtcgttatgaggtaattctgcacgtttgcccgcgtgctctctgtgctctgtcgcaaacctctttggccggagccgacttgttctctcgtctgctctaagttcttttagcttttggctgggccccaggggtcctaggcttggagggcgaggctgctcacgggtttggtggtttctagccgcattttccccagcccagaaagcacccgaagtcacccttcggggatggatcccactgaggaagggctgagattgccgctgggacccattttgtcctttttcctattggtgaaatgcagttccgttgcctccagctcccagtcggcgagatgggacttaatgcttatcctgcaaatctctaggcttcaaggaagggaccttgaaaggtcattttactttcccttcccccacgctcctagaccgtcgcagccaaatgagaaacggcccacatctcacaggttcctgcacaaaaggatatttttccaagaggatgttgatttaacttcaggagtagacccccccgccccccgccactaaagaattggggtgggagggtagggcggggcgaactggaggaggccctgcagagcttacgtaacaggcgtctgctgccctgcagcgcggtatcgttggactcttgggcacaggatttgcatcaggattgtgacatactaggtaatggtagagcagggtgtggctgctcatacttgctggcctccaatctcatccccacgtgtggctagaaaagtagaattttaaaattgggggaagtttcctcgtgcactttgggtctcttactctgcgcatgtggatctctagtcacttgccaacacggtttctctcttatctgccagaattgttggtagagtgggcagcttttacatttatcctttttgtcacgtgtgatatatttgtgcataccaggagcaaggtgcaggaggatgagtcggtatgtaactgatggacttgactgttcatataccttaacaggatccaagagtggtgtttttgaggggtcataaaggtttctgttgatagcattttgcaaccttgacctttttgggaagtggttgattgatgggtaggtatttatttggctggtgtaatctagccccttttccaatttgggctggttcaaatgagggcttgtgttggatattaacagacacgtaagtcagtaggagatctccctttactctaactttaaacatatgaggacacgtttgagttagggaactgtatgggtaccctaaaaggacatgtagctctcctcttctctctaatttcactttggtcaatatttttgcaggtaaccgctgccctgctgtggagatagaagaacccaataatttatgtccatgaaaaatacctggtttccacatttccccaaatgacataggcctttgtaatctggacaaagtaggagtcacagccatgttagtactagaggagtgccctttctggccctcatacaatcctaaaaaaaggggatagaccctgtaaaaaacaggacaggtggacattggcatgcaactagcttttaggttttaattagttccttgcatctcccctgtgttcgacgctgattcttccagatgcatggaccaactaacagacaaggagtgggacattatgctgataaccttcctgtaattgcagtcttgggctttatttcctctctctctagggaaactggcttgaggaagctagctgggggcgggattggaggagctgcttaacttttctccctctggacctaataaagtttcatttagcacacgctaacccaaagccttgaaatgattggctagtcctgttttgctgatggaaaatgacctgttcagggttactgaactaccaagttggtggcagagctaggagtagaatttaggtctccttggctatcaactagatcctctgaatattcgagacaatgaccaaggatacgttgaaatagaactttctcccgtaacctggataccttctacttatttaggctgaggacaggaagttacatggttccctgattattaatgtatttcttttgaacagagagtcacattgtaggcctacttttttggaggtgcttaggcagccatgtggtgtcagctcaattcctttttgtttcaacgtggtggttgctggcggtgtttccggaatggggcttcctgagtagtggctgcctcatttgtcgtctttgtcctgcagaagtgaactatggtatttgctgactcttctggtccactggtttggattgccaagggaaattgatttgttgaggtaacatgggatagccagaaacctctgacttgttaattaccaggttccatcttagttttttaggactccgcagttgactttacagcctctttgaatacacttctgcttatttttgtggtaatttcctttctttctctcataggttgccagtcatcctttgcctgcttgtaaagcacttcctttttgcttgctcctgcctttttttttaaaccttactggttttctccaacttgtaacttgtaaagaaactgctttgatgtagtgggaagagaaacaggaaaaaattgagagcagagaaaaagtcactaagacacccacaatatcccagttttccatctggggcagtgaagcattgatggacatggttcctttgagagtttttaatggaactggacctgggacctgagatttcaggtgatagagacttgatattcttattccagctaaatcagtatattttttaatgttttattttgaaataaagattcatgggaggttacaaagttagagaggtcttgtgttcaacccattttcccccaatggatgcatcttacctaattatagaacaatatcaaaagtaggaaattgacattggtataaagtgtgtatggttctatgccattttattacgtgcgtagatttgtgtaaccgccaccacaatcaagatacagaactattagatcaccaccaagatctccttcatgctacctctttataataataaccaccccccttcctgactcctggtaactactgatctgtccactgtttctaaaattttgtcacttcaaaaatactatacagattgaatcacatggtatataaccttttgggattaacttttttcacttagcataatgtcctcaaaatttatccacattgtcacatgtatcaaaagttcatacctgtgtattgctgagtagtattccatggtgtggttgtattatagtttgtttaactatcattgaaggatattagggttgtttctgatttggggctattacaaatacagctgctgtgaacatttgtatacaagtcttggtatggacatacgctgtcatttttcatgggtaaacacctaggagtggaattgctgggccacgtccttttgaggtatccccagactgttttccaaggtggctgcagcatttcacatttctaccagcagtatttgagtaatcagtttctctgcttcattaccagctattttagttatttttcgttctgatggatatgtagtaataactgactttgtgcctgaagcaaagctcaggggtgttataaggaaacgaaaaaaaaaaaaaagaaaattgtgcatattttatgtaaaatggaacaagtagaatctgtaggcaagagcagttcctgtgttggagtcctctgaggagaagctaaaagcagagctgttgtgagtgtaggagataaggggaggtaatccagagggcattgaggagagagtatcaaccaagtctaattcattagtaagctgacaccatggcagcttggatagatgagacagtttcttaggtgtctctgtccaaagatattcctccctgtaagggttgggggtagagagtagcactgcaagaagtggcttgtgcccatccttttgccattagtccttttgagcataggccttctgggaggttgcatgggggaaaatgacccatggtaatgggatattctctcttctttggaatgtactttaaggctggcaggctccttgttcaggatatttaaagaagacagagaatcaagtggcctgaaacaaagtagagtgtatttctttcatcagaggcttactgcctttaattttgaagactttaaaacatgttttactatagaattatttttcctcagcctacctttggaaaggctgttcttcagtgaggtagattggagttcaggcctagtggatataggaaattggtggtcttctcagtatgtctgtaggagtttgtaattgccttagccttagagaggaaggggtatttaaaaaggcagaggaaaaagatggaggcttataatcaaggatagcagcagtcttcttgattaggtcatacttcactgtagtccctttgcaagtgatgttagctgtttttagtagtggttgatttacttgtcaaatcacagaattacattttggagaaacatataacaacaacacttttatggcatttactgtgtgtcaggtacacttctaagcactttacaaattgctgacttactaattctctcagtaactacgaggtagatactgtcatcccgatgagaaaaaaatcacttaaaaataatcatggcaggcacaactcttaaaccttaaaaatagctgccatacattattgttttcattcacattgaagtaggctgaggttccaaggagttcagaataattggttcttaagaatgataacatagtaatctgttgggtaagagatactgcagtacattattttcttgtgtcgtcttgattacttcccttctaatttgcctgtttgtcaggtgggctggggcacatgtcccaccctctcttctcaggctttttgaaagaggctgtcttatgttgtgtgtattgcttgaaggacccctagtcttaaggccccaggctttctccaaaaagaatgattttctcttagtgtgttttatttttattttaatttttttctcgagtcatgttagtttcacgaggacccagaaatagtatcaagggaattaggatcaagatgcattccttattattcctcacccctctagctgctacccggatactattgtgccaggcccagacagatatctttttaggtggaactagctttagcttcccagatcttcagggctagttcctgtgatttaagttaggttttttttttaaaattctttttaaagtatgaatacatacctaaaagggcacaaatcacaagttcaaagaattaccacaaaatgagcacatttgtatggtcactgaggttaagagatagaacattaccagaaccccaaagcctctggtgtcgttatcccagtcaccactcccgccatcctccccatgactaaccactattttgacttttaatgccactgattatttttaagatgagatttgaatttctgacttatttaactggttcattaaaaatgcatctcctagtctttgatggaacagtaagttgatcatggtcttgcatctttcttttttagagtcgacttcaatgttcctatgaagaacaaccagataacaaacaaccagaggtaaggtccctgctaatccttgggctgggtttaagatgtgtgtaggtacacaggatgaaatgtttttcctttcatattgtattatggaactgtagcaacttaaaacaaatgattttggctttctatcaacccactctctgatctgctttcttatttatgagaatatacaaatataagcaaaatcttaagaaagtgattccccttcccttgttttttgaaaattagaagaatttggagttcattttctttttttgagatagggtctcactctgtcacccagactggagtgtagtggtgtgatcacggttcactgcagccttaaccttctgggctcaagcagtcctctggcctcagcttcccgaggagctggaacaacaggtgcacaccactacacctggttaaattaaaaaaaaatttttttttgtagagatggggtctcactatgttgcctaggctgttctcaaactcctggactcaagtgatcctcctgccttggcttcctaaagtgctgggaccacaggtgtaagcccccatacctggcagagttattcatttttaaagaatataaaagttggctgggtgcggtggctcacatctgtaatcccagcactttggaaggccgaggcaggaggattgcttgaggccagtagttcgagaacagcctggccaatatagtaagacaccatctctataaaacacacacaaaaaatataaaaatttaaggttacttggcttctcttgcaaaatgaagaactatgtaagagaaggattttaaaagtaccagtagttactaaggttatatgtagttttacaagcccccattcaaatggctcagataagtcaatttttgagaattttcatttgtttttgcttccaaaaaaacaaacaggaaagacttcagaagtacgttttcagtcagtttagctgctccagtgtcttggatcctagattcagaaacaaattttaagtgagagtactgctcttgcttttgactagattataaaaggtctttatttttgtctttactttctttttaatttttttaatttttaatttttgtagattttatatatatatatatatgggttacatgagatattttgataaaagcatgcaatacataatcacatcaggttaaatggggtatccatcaagaaggtttttatttaatttttttttttttttgagacagggcctcgttctgtcgcccaggctggagtgcagtggcacgatcttggctcactgcaatctctgcctcctgggctcaagcgatcctcccatctcagcctcccagggagctgagaccacaggcgtgggccaccacacctggctactttttcatattttttttgtagagacagcgttttgcccttttgcccaagctggccttgagctcctggaccccgcccaccttggcctcccaaagtgctgggaatacaggcatgagtcactgtgctccgcctattttaaattttaaatgaagggtttgtgttggcaaggtgctttctaatgatctagaccagtggtatctaatagaaatacaatgtgagccaaattgtgttaattaaattaaagggacatttaacttttttggtactaagtcttcaagatctggcatgtgtttttatactacagcacatctcaatttgatctagttatatatctggtactcaacagacacacatgactaaatgactgtcgtaatggacagtgcaggtctagcccagaacattttcaggtattggtcctagaatagagcctgtcattttgccaagcacatccctgctgtaccatagtggcagggtctttgtataaggcagatctgatcccgcttgatcttcattattgtgcaacacacagaaacgattggaaatatgcctatcaagttattttaagagtaaagaaacatgtttggaaatcttttcatttccggaaatccatggagttgattaacaaaatgaagcattagaaataataaaacttgctgataagggatagtcctgaaaactaattggttccattgcacaaactttgtacctgatacagatttttaaatttgatataaaggagttcttatatctgctaaatattaataacataagatattttaaaagtataacttttttaatcattccattctttgctcagatgtcatcatatcagactttccctggccatcctgtctaaaaatctcctctaccattgttccccggtcatttttgtcctcaaaagtaggggaacaaaaatggggaacaatggtttgttttttttctgtatctcaccatctgatatattacatgtacgcacacacacatacatgtttattgtctctctccattagaatttcacttccatgagaacagagagtttttaaaaaagttttctgtttcattctcagaacctggaatgatgcctggcacaaaagaagcattcaataaatatttgatgaataaataaatgcttttcttgatcaattttaatttcttataaactggcaaaatggcaagttagtagcaggtttataacaaaacttttaaatgtttaaagggagttaattttttgattaatttataatgtaatgaatgtgatacattatggaaaccaagctctagacagtgcaattattttttcctacataaaaaagtgacttaggatctattaataggtgcagaaaagttactacatgttttttatttttccccaaatttcctttgatggtttcaagatttgagaattttatgtattttccatagtcatataagaagtgttttcaggggtccccaagatcacccacatatctcatgatgatttgctaggactcagagttgttctcatggctaaagtttattacagtgaaagaatgcatgacaagattaggaagaggaaaagacatgggggagtctagagaaatccatgggcttccagtttcctgtgaggggacacatcaagtgttttcctttcttcagcagtgaaaaatgcagtaattgtctgcagtgtttctgcctggagaagcatgctagagactcagatcccaagatttttgttgggaactggtaacatagggatcctctgcctagcaactaccaaaattacaaacttctgctgggtgtggtggctcacgcctgtattcccagcagtttgggaggctgaggcctgcagataacttgagcccaggagttcaagaccagcctggacaacatggtaaaacccctacaaaaaatacaaaaattagctgggcatggtggtgcattcctgtagttccagctacttgggaggctgaggtaggaagatgacctaagcccctggggaggttgaagctgcagtgagctgagattgtgcctctccactccagcctgttgggtgacagagtgagaccctgtctcaacaaaaaaaggaaaagaaaaaaaaaattctagacttctagagtggggcaggtgttcagcataaatcaccatgtttgtatagacggtctaggaagagtgaatagcccttgttggtcttgtcagttaactttgaaagccaagttcccagataccagccaggatctaatcttgcagacaggtccttctgtagatagtagcctcaggcctgctgtgttaactcttgtctgtgaaaggggcagatacataatgagattgtacaatcctaggtggagggttggcattgcatttaacttcttaaggaccaccattgaattactgatagtagatttgaaggaacttggagaagaaaaggagctttatgctttatgaggttatcaataagctagttcccactaatttctaggagtaacttcattctgtttgttgtctctctttggttgcaggattaaggctgctgtcccaagcatcaaattctgcttggacaatggagccaagtcggtagtccttatgagccacctaggccggcctgatggtgtgcccatgcctgacaagtactccttagagccagttgctgtagaactcaaatctctgctgggcaagtaagtgccaggctctggtgctggtagactttgtggcgggggaagttgtcaagcacgttgttactggtttttaactttcatactgctcaagtgtcttcatctcttcctcttctcagggatgttctgttcttgaaggactgtgtaggcccagaagtggagaaagcctgtgccaacccagctgctgggtctgtcatcctgctggagaacctccgctttcatgtggaggaagaagggaagggaaaagatgcttctgggaacaaggtaggacctgtgattttgacattattgggggtgagggcctgagtctgtaagagactgtggttgaagaatagagaaagctcatttattttaacttagacaccttttattgaagcatacaatgccgacacagcttgatgggttatctcaaagtaaacacacttgtgtaaccaccacccaggtcaaggaatagaatattaccagcatcccagaagccctccttcatgttcaggtggtgtttaaatatgtttgaaaaatatgtgaacacctttgaggtgaaagagtattcagtgaatatgatggtcatgatgatgtcaccttggatttaaggcattttcttaagatgtgtaaagtatgttcctttaaatctctctttaagatagaggtacaggtatcgacttatttcataaagaaactaagtctcaaaaaaaaaaaaacttaagtttctgaaaggcagtcatacgattaaagttagaggcagtggtgctgttggtctttagagctcagcccattcaatcagcaaactttttctataaatggccagatagttaatattttaggctttctgtgttgtgcagtcacttccatctgcatatagtctctgttggaactactcacctctgccgatgttgtgcaaaagcagccatagataactcaccaaacagattactgtgaactgacaaccagaattcaaatattcaatgataaaactggctctttgcagatgattttgaatttgcccattgactagaaaggaagctgaaggcattttttagtactttccactattctggtctttagtatctcggagaacaagatgctctgagtctagtgtctcagtctcctttggcttctcacatttattaaggtcattgggagtgcctgctttcaagcagtttctttttttagcaccaaagatgctggtcttgccttatcctgcttttggcatggtcttgctgcagtattaggagtcaaatgctgacctaaaatttggtgtccttttaatctggaactcatgatgcatgaactctagggcttagaagtggcaggaggcaaagggcatattgaagcaaaactttttatttaggaaatgatgagctgactatgtagtctatgacttttttagtaaactgacttgacattcactatctaatggcttttaatacctgaaatttcaggagtcagtcccaagttcaaaatggattaaaaaaacagtgaggctgggtgcggtgcctcatgcctgtaatcccagcgctttgggaggccgaggtgggtggatcacaaggtcaggagttcgagacctgcctggccaacatggtgaaaccctgtttctactaaaaatacaaaaaagtcgggcatggtggcaagtgcctgtaattccagctactccggaggctgaggcaggagaattgcttgaacccaggatgtggaggttgcagtgagccaagtttgcagcactgcattccagcctgggcaacagagcaagactctgtctcaaaaaaaccacaaaaacaaagtgaggatatgaggacataaacattttccctttatccaaagtgcccacattgatcttttaagggccttctctttcttctagttatttgcagatcagtaaatgagaaatgggttctgattgatattatttccatggcaccttttttcatgaagagctttcaatttaccctgtttttccttaaatatctttttaaagagacagggtcttgttctgttgcccatggtggagtgcagtggcatgacattaattattgcagcctcaaacttgagggctgaagtgatcctcctgcctcatccttgtagggagctaggactacaggcacataccaccatgtccaactgacctttacttttttttttttttcctggtagagacggggtcttgctatgttgcccaggctcatctcgaactcctgggcttaagtgatcctcccatattggcctcccaaagtgttgggattataggtgtgagctactgcccctggcctccttaaatagttcgtaaatggaggggttattatgcctttttgatagaagggaaaatttcagagcaacttcccaaaggtgacacaatgaattagtgtcagagctggacatagaactcaggtctccttacatttgagcattgttatcattactacatgtgtcatcttccaatcactagtggcagatgttattgtagtctacagagcttatgggagtgccacaatcttcaattttagcattagtgcctctgcaattctttggatctttagggaaaagccccattttttatggcagtccccttcacctccttgatacataggagcataggagtgggcagtgacttaaaatgaacatctgctttgtgctatgtactcttctgtgtcctgtcccctttcatctggcttgcttcctgtgcctctttgcttaatctcctgccagagactctctggtttgcttatcctcccatcttgctttctgtcccctttggggtatgccttgatggcaagctgacattttaaagctctatgtttaacttctacattttcttcctctctttttgtagaagtatatttcttgttttctcagatgcctagcttccagagaaggtcataaaatacctttttgtcaatgtgaagtgtttctgaggttcttttctgttgtcatgtttccatctgccttctctgtcccagcttgcccttgttgcttttatgaggaatatgtgtgagagccccttgcacttcgcagaaaggccttggtagccagcagcttgagtcaagtatgatactatcacaaggagaatgtttaaaatgaggaactaagtcaaggagagggaaggataatcagaaccttgagctgaaggctggggagaggctagtggggtgtggttaacttcatgtgattagaggtaaagccatcgttcaggaatattaggtttgcaatttgagggaagttaagggagagcagaaacatgcagaaatgaccaaagtatctggaatatttggaagaaagaacacatcctactgctggttgtaaaaaatcgctgtcccacctactcagggtctttagagatgttcaagaggactcttggtgtatgaaatgcttttatagttgtctttggagccatcacattttctgtttttgtttttctctataggttaaagccgagccagccaaaatagaagctttccgagcttcactttccaagctaggggatgtctatgtcaatgatgcttttggcactgctcacagagcccacaggtaccaagaaccttgtagactaccacactgagaacagtattcctatttacttgagtagcccaagctctgggttgtttttggagagttttgtattatactgtaatcctttcagcttctctaattggaactgccactatggctcttgttgagtagctctcatccaaagaggaaataaaggtaaaaaaatgttggtaattgtagggctttttgtggagtttcaggaagaggttgctctttctcaccttagatattttgtacagagttatccttttatgaacgttataagatcagactctcatgctgtcagtaggaagcaaattgaggaatcctcttctgctatcatcaaccggccaattacttactgtgatttgccctttggcctgcctgaagagtgttaactgggtatcttaaattctacctaagttcattacttttttactctttccctttgaccttgcactattagttaaaaatcttatcttgtacctaagtgttttttgttgcaatgtagggatgaaaaccatgatttcttgcagtccagaagtagaaatattttagtgataaggagctggcctctaggactaggaggaatgatagggattgactagaatctgaatgtctttgatcttttctagctccatggtaggagtcaatctgccacagaaggctggtgggtttttgatgaagaaggagctgaactactttgcaaaggccttggagagcccagagcgacccttcctggccatcctgggcgggtatgaagaactctttaagatcatgctttaagtattgtttgcctggtagtaggccataacttgggtggtttattgtcatatagctcagtcacactgggtaactgaggagaatttaataaaggaactacaggctgggcatggtggctcacacctgtaatcccagcacattgggagggcccaggcaggaagattgcttgagcccaggagtttgagatgggcccagacaacaaagtgagatctcatgtctacaaaaaaaaattagctgggcggtggtggtatgcacctgtggtcccagttaccagagaggctgaggtgggaggatcacttgagcctgggaggtagaggctgcagtgcactgtgatcacgccactgcactccagcctgggtgacagagcaagaccgtttctaaataaataaataaataaataaataaacaaacaaacgaacgaactacatacagaggtgtgggtagggttcagggaaaccacaaagggacagtacagtaatttggggctaccaacaggcatcaccatttctatgcctgaagggacaaagggaggggaatggttatcagaattcagagaggaaagttggtgtggagagagctatctgatgggaactgtagcctttggtcaaaggacacaagatctggtagggagggggagccagggcaataaatattctgatctcctttcagtctcctgctgctgcaccccctcccaccctcaatttggctgaaacccaaatggaagccagagcgcaagaaagctccttgatgtagtccatgcaggtcctcctcctgtgatgcaacagggtagagaaggatagaagatggctctgcagggaagaatgggaaagatccaccataggtgctcatttagcaattttgaagtgcttgagccttataacctggcagggtataactatataacctggcagggtataaccatataatctggcagggtataaccatataatctggcagggtataaccatataacctggcagggtataactatgaaaacctcttcatatgtgtttaatatataatttagacctcatttctccagattacatacctattttatcttttctcctatagggaaaggcagcaagtagataatgattttccaatgggttagttaaaaatagaaatttcagaattgagggttgagaggaggataaattttaggtgagagagctagcactgcttggataagacaatttcctgtgacttggtgtggtgatctaggtagcagtctctttatggctggaggcccattacccttctatgagcagggttttttcccccaggggagtgaacatactatctcctgatgaaaattgactctggagttgggtgtcaatttcaggtagcatagttgcttatactgtttggctctgtgtctccacccaaatctcatctcgaattatccccacgtgttgtgggagggacctggtgattggatcaagggggcggttcaccccatactgttcttgtgatagtgttgtttggcagttccaccctcgctcgcctctctcttgccaccatgtaagatgtgacttgcttcccctttgccttccgccacgattgtaaatttcctgaggcctctccagccatgcggaactgtgagtcaatttaacctttctttataaattaccaagtctcaggtagtcctttatagcattgtgaaaatgggctaatacagttgctttctaggctttatgagcccagtttcagagtcttaaaaataactcaggtagatacaggttgttgtgtcttgttcttggaaaaaggtatctattcctgggctttgttcttcaactttctgtagacctggaatatgggagtgagtgccacctagtgctaccttatggttaggtttttaggttcagactgaaatagctgttacggggaattggatgtgagatttttttgccacctttcttgtagtgtagtttccctaggccattaacagtttttgggaaaacttttatattttattaaacaaactttattgtaagaaacactcatatgtatggaagttgagagaatagtgtagtaaactcccaggtatccattaccctgtttcaacaattaattgacagttttgctaatcttgtttcttttatgtcctaactctgttttgtcaggaatgtacacacacacacacacacatatatatacacacacacacgtatatattcctgacaaagtgaatacaagtgaaataaatatgtgtatatatgtgtgtgtgtgtgtgtacatatatagatattttagatatatagacatatctatatatctagatctagatctatatatagatttttttttttctgatacagggtctcactctgctgcccaggctgaagtgcagtggcatgatcacagctcactgcagctttgaccttccaggctcaagcgatcctcccacctcagcctccctagtacctgggactacaggcatgcatcaccatgcctggctaatttttgaatctttttgtagagacagggtctcactgtgttgcccaggctggtctcgaactctggggctcaggcgatctgcctgccttggtctcccaaagtgttgagattacaggcgtgagcttgtgccctgctgtcaggaatgtttttaagttagccttagacatcatatactttcacttacataggttgagtatcttttatctgaaatgcttgggaccataaatgttttggatttcagatttatttttggattttggaatatttgcatggtacttaccagttgagcatcctaatctgaaaatatgaaatctgaaatgttccaatgatatttcctttgagctcaaacagttttgatcttggaggattttagatttttggattagggatactcaacctgtaatactcctgtatacatcttgtaactgctaagcagatttcttttaaataatcaccatattatacctaacaaatttagcagttttgttactatcatccaatacccaatctgtattcagatgttcttgatcatctcagaagtgtctttttacagttggtttgtttgaataaggattcaaatgaagtccatgcattgcctttggctgttaggtatctcttgtaataatctcctatttattactttcattctgttgatttgttgaagaaacaggcatttgagctgtaagctattctttagaagaaattgaactcctttctaactgctttcttccctttgtgtgtgtatgtgtgtgtgtgtgtgtgtgtgtatttaaaacaatctatctttacccttggtggtaaccaatctttacaactgaaataaatagtaaatagtttcttgccatctgttcacccacatcactgttgtttcatacctccttttcacaaatcctagcatagggtttctcactggataggcattatcttgtttattgaatgaagaaggaaacagacacaaggtggtttgtccacgtaagtgggatttagttatatgggaatgtttatggaaggcaggctattactttgtttctctttagtttggatcttttttgtctcatagggagatgcaagatacatgtgtatttatcttatttccatgtactagaaaataagatcccaaagggtagggatctttctgttgcctttgccctgtgatgtttctcaaagacctagaatagtgcttggcacagagtaggtgcccagtaaatgtgttgaattgggtgacccaataaaaataaatgccataaagaaaatgtcccaggctgggcatggtggcttaggcatgtaaccctagtgctttggaaggccaaggcaggaggatcacttgagcttaggagtttgaaactagcctgggcaacatagtgagaccttgtctctacaaaaaaatttaaaaagaaaaattatccaggggtagtgttgtacgcctgtggtcgcagctacttgagaggctgaggcaagaggattgcttgagcctaggagttccaggttacagtgagctatgattgtaccactgcactccagcctcggcaacagagtgagactttgtgttgaaaagagagagagaaaaaaatgtcccagcaactgagcatagggtatgactttaggaatatatatttttgttcagtatatatttatttagtatacagtccagtcaatccctgctctaaggttaggataattctgagtggctctgggatcccacaattagcaatcgtgcttagatacaattagcaatcttgatgctctgaatttgtgtgtgtgtgtgtgtgtgtgtgtgtgtgtgtgtgtgtgtgttggggaatgtgcaaaatagatgtggaacccatagtttccttagacaagagtaggtcttctgagccctgcttaaaaaaagaatatggatttaaatctgttgtccatcagcttctaggtagaattaaaaaaaaatgtattgatggtaagtggggtgaggaatttttaaaaagatacactgatgtctggagccataccttaaaaggatttcttagaaatggattgagtttttgggttggagaaacatagggcaaagttaggcagtacttttgtcactttgagactttctctgttcctgtgccttgaaatagaaactcagtttctatgtaataccacttctctagtccattcttctttaagtgatgattcttgctttctcttgtagagctaaagttgcagacaagatccagctcatcaataatatgctggacaaagtcaatgagatgattattggtggtggaatggcttttaccttccttaaggtgctcaacaacatggaggtaggaaacaaatgccaagtggatgtgaaatagctctccatgataatagcaggttgtataaatgtaaaaagaaaacagtcttttgacatgagccctgaaaattcccatttttatttattttggcaagtctttcgtctttgcattgttcctttatattgtattgtgtctggttcctgtctgctttgtgaggcagtcttgttcttagtatagatgctgacctccatcattttggctcccctgtgtagattggcacttctctgtttgatgaagagggagccaagattgtcaaagacctaatgtccaaagctgagaagaatggtgtgaagattaccttgcctgttgactttgtcactgctgacaagtttgatgagaatgccaagactggccaagccactgtggcttctggcatacctgctggctggatggtgagtcacttgagtgggttggtagtgtgagtgaacagaaactctgtggtgtcatttattcattgattcagccaatcaacaagcattttaaaacaatctctataggagatctgtcagagagggctctgcatgttgcagtgagtccctcatggaagaatccatgggagaaaagcagtgctattggattactggccttcagtaatgcagtaatgtgttgcaaaactttgttgttgttgtttttttttttttttttgagacagagtctcgctgtgtcaccaggctggagtgcagtggcatgatctcggctcactgcaacctctgcctcccaggttcaagtgattctcctgcctaaccctccccagtagctgggactacaggtgtgcaccaccatgcccagctaatttttgtatttttcatagagacggggtttcaccatgttggtcaggatgatctcaatctcttgacctcatgatccacctgctgcggcctcccaaagtgctgggattacaggcgtgagccactgtgcccggcccatttttagttttatctgttttttcttcatctgtttaatgtgtattaagtacttactgcgtactggagatagtgtcatgtactttcatggtttgggttgttttggattatgttgctatctagaaagctatataagaaaactttctcatatgaaaaaattaagtatactgattacaagcagggagaaatgtaagtgtatattaaagactaatatagttgattttagggtgctccaaatatcattttgattgctgtataaaattgtatcatgtttttacatgctagtttgcttatttttcttttcaggcattcacgtattatttagttcagtgtttctcaaagtatgttcctaagaccagcagtatcagtatcatttttggaacttgttaaaaatgcaagttcttgggtcccaccccagacctaccgaatcaggaactgagggtggggccaaacagtctgtttgaataagccctcctggtgattctcatgcatggcaaagtttgagtactactgatctagtttactgtcattcccaacactattgacatctgttgttttgtgggggactgttgaattgtaaggttgtttaaagcatccttggccactagatgccagtagcaccctcccaagttgcaacaacaatatttctagacattgccacatgcctatctattatgaaggggcagaactgacctggttgagaaccattgatctagttttcactaacataaatagtgtggctaagaatgtctttattaaataacttttgaggttttccgttagacttgatcttccatacagtagaatttttgagtataaagggcatgaacaggtttataaagactgaagggtactatttgtttctagaagaaactttggtgtgcagccctgagttctggtcttggtggaggtggtgtttaagtagcttttcttgatagctcatcttctctttcacctctacccctcagggcttggactgtggtcctgaaagcagcaagaagtatgctgaggctgtcactcgggctaagcagattgtgtggaatggtcctgtgggggtatttgaatgggaagcttttgcccggggaaccaaagctctcatggatgaggtggtgaaagccacttctaggggctgcatcaccatcataggtaagcggtcctatacaaagctaatacccatataagctggcagaattctgatcagaggaaggtggaatggagaacttcttctatgtctctttattctgggtaaatgttaagaggtaaacaggtaggtaatttacagaggagcctcttggtaagatagagttgggggtttatcagctaccttttgggttggggagcacactgccttacagttttggtgccaatcccttttttttcttttctctcttttccctttttacctggctttcattcaacaggtggtggagacactgccacttgctgtgccaaatggaacacggaggataaagtcagccatgtgagcactgggggtggtgccagtttggagctcctggaaggtgagggtcttctgttttttggcttgtttgggataagggtggactgtgcagtgagaggtgggtagaatggagtggagaaagttagaaggtagtgttgtcattagcagtcattactacctgggcagtacagaggaacttcagataaagctcctggcatccactgaggcggggagggacagatagaaacttggtctgagagttatggtctagtagacctggaatccacaatgtaaaagttggccagctcctggccatatatcctaaaaaagagctggcatgttattgggaagataaagtgggggaaatctggcttactgggccctatagtaatgctgtctatgtatgtgtgctctctcaaaaacaggtaaagtccttcctggggtggatgctctcagcaatatttagtactttcctgccttttagttcctgtgcacagcccctaagtcaacttagcattttctgcatctccacttggcattagctaaaaccttccatgtcaagattcagctagtggccaagagatgcagtgccaggaacccttaaacagttgcacagcatctcagctcatcttcactgcaccctggatttgcatacattcttcaagatcccatttgaattttttagtgactaaaccattgtgcattctagagtgcatatatttatattttgcctgttaaaaagaaagtgagcagtgttagcttagttctcttttgatgtaggttattatgattagctttgtcactgtttcactactcagcatggaaacaagatgaaattccatttgtaggtagtgagacaaaattgatgatccattaagtaaacaataaaagtgtccattgaaaccgtgatttttttttttttcctgtcatactttgttaggaagggtgagaatagaatcttgaggaacggatcagatgtctatattgctgaatgcaagaagtggggcagcagcagtggagagatgggacaattagataaatgtccattctttatcaagggcctactttatggcagacattgtgctagtgcttttattctaacttttatttttatcagttacacatgatcataatttaaaaagtcaaggcttataacaaaaaagccccagcccattcctcccattcaagattcccactccccagaggtgaccactttcaactcttgagtttttcaggtatatacctccatgtttctaagtaatatgcttatattgttcacttcttttttttttattttttaaagaaatctatttcataccatggaggaaggctctgttccacatatatttccacttcttcattctctcggtatagttttgtcacaattatagattagatcaaaagtctacataactaatacagctgagctatgtagtatgctatgattaaatttacttatgtaa

SEQ ID NO: 482 - DNA, 29371 bp, Homo sapiens
  source 1..29371: mol_type = other DNA
gacgcagagtagattgtgattggctcgggctgcggaacctcggaaacccgaatgtgaggaccttaagggatccacagctgccgccccccgcagccatccagagcgcggtcacagtccgactggcggcacggaggcggcggcggcggcggcggcggcagcggcggcggcagcggcggcggcagctgtagctgcagcagcaggtaaggagactcctgacgagaaactagagggacgtggatccaccgcgttcagtgtttcttgtctgaggggaggagaggctcacacccagcgtgtagcgtagggcgaagggaacaatggaagtggcgtccagtccctgagctttcctcccgcctcgggcggagttttcctcttcagccgcagccgggggctggaggaattgagggaagtaagggttttcccccttagccaacctcctctttccctaggccagagccccagggagctagagccgtcgttgagaccgtcggtggtttagggtgacggtaaaatggcggaaaacaaaacggtgaagtgaagaatgcagcgtccccctggcagtttctctcagctctccctccaccccatattcttttcactggcgccccagtcgcctcgcccccgccccctgaccgagctaatagtaacctttggaatgcgcgagggatggcggcgtgtgcgaggaagtggcaccgaatcggcattttaggggattgggagccgtcagagcctgggagttggggggagggggggggcgtgtgcgacaactgtcgcctacactaaaacaccaccattttggttcccaaccgtctcccacgtagcggggcagaggaagctggaggaggctgaggggctgggcagcacggcgtgggtagcagcggtggcgaccgctgcaccaagtgagaggagggaggaggggaaagggtattcttgtctcatcggtctcttcctttctgctgcgaaggttctcttgttaggtttaagatctagtcagatgggtaatacctcagagggcacgtgtgtgcattctgctcgaaatgattgaaacttggcatggtcgtgggaaaaggagacttatgcgggaagagggctgcgtccaaagctgcaatactgctacttgccagggctcctttgtctcccatctctgcaaatactactttcgcattctcttgttctgccgccttaccatttctcatctatccgtcaccctattgacatcactaagaagctaggtcctgaatgagctatgttagaagagacagattttctttttgtgatttctactccccatgcattaatggaaagatgtttacttgagacgtacttggtgggttatctccattcaataaggatgtgagatacacttagagaagaccaagaagcctagctatctctaatggttattaaatacttaacacactgctgttttcatacctcatttattattgattttattgaaacttcctatgtggggaaagatactccggtttatttatttggtattcacacagtgtaatacttttataatagttgcactatgtgttgtaatttttacacttcattgagtgctagtgcagacttttcagtatggatttggcaaggataaagcttgcccttgattctctttcactttctaaaataaggtgttgtttgtgatttttaagatgtgctttagagaagattttggtttaatcaagtggtagcattctaagtataataacgttgctaatgtagtgagtagttgtttttgttggaatccgttgggttgcttttaacattactacagatttgagcatatgaacccttcccagcctcactatgcaagttcaggtgtaaagaaaaatattaagttgtgtaagaaacttagtttaaaatattttaaagtatctgattttgaatgtatttttataataggtaaagagagcgttttcccaaagaaaataacatagcacagaaggaaaaataaaaagaaattgctgcagattttactttatgtgagaaaatctacaatttcttcgagacactcatataaaggtgactaacaaattacttattgttttatcttatttaacagttaaataaaattaagtttttaaaaacattttcagacatttgtagttgttctattagttatgtggtaaagaaagtaattactctaattaaaatccaaatagtacactgttttaaatgttaagaacatgtccctttcagatttattttgttaacacacaggtagtttattgtgaactctcttggccttggacctcattttgcataatagcaaagcagaaaacaatggcatttgaaaaaagatacacaactaagaatttctaaaattgtgaagtttgctcatacataaagtaattctgtctgaatcgtttgttatacagaaatgtcacctacttctgtagcatatttatgtatatacctgaaatggtgataggggttcctctgagactctcctgcctcctgaataccaatttagccatcctcctttatttaagaatatattaagttgtattacgtgtcacctttctgaaactttcattaaggttgcagctttatctgttgtgcaatatggtacaatttattaagcagtcctacgtgaaaaggagataagtgccttataaaattgacaggtttttgttgatttacttagaatcttatgtttgaagagaaaatgcacatatatgtgtctaagaaatacattgagtgacagcatctgactttatgttccatactatcaaatggtcgtaaatataggataagtcatttgaaatgaaatagattgagcccttgctttcaaaaccaccttgaagctagcataattttattaatcactaataaaaagtcagttgtacaattacaagtaaatgaaatgctgagataaataatttgctaaatgtttgtatgtgatcgatcttatttttaccatatttaggaagcagtcatgtttcatgagtcctcaaaactgagacaagagaatgtagtagagtgaggccagaagtccttactggttcaaagaactccggggaaactgggatagaacattttacattataagtagaaccctgggagccagaggtgaatacaagtttatctgcagagctccgctgcagggctgatctgggtctggaagaaatggatgagagccagtggatgaaattcactaatactagacatctgagtcctctagtaatgtataaatatcctaactattgtttgttgtcatctcgttcttcttttataacctatgttttaactggaacttttagcactgcagttttgttgttttgctttcttctaccacttccctatggctcatcagcttgactgtgcctttgtctccattatttttggtttacttccacttggcacttcttttatttatggttgtcacataaagcatctaaccatggtttttctttgttttgctttcttttgtaataagctttccacacttggttgaaaggcatattgtcaattgcatttttttctcaaaacaactaactttggactaaatatattaaactattttaaaagccatttcttttgcagatattggtgaatgaactttgctaagtatggattcaggcggtggaagtcttggattgcacacgccagactctagaatggcccataccatgattatgcaagattttggtaaagcattttctttgttgtatttttttcttttttagaagtaaggggataataaaaatcaaaaataagttgaggaaggggagaattacaatgaaaacttgttcttttactaggaaaatatatttgtagagcttattctcataaagctgtgtgtcagtggtctacttaacatcacttttacaatttaggggaaggttgtgttagggacacttgaaatatggtggtaatatgttactggaaatgaaaaactcaatttacataaataactgcataattatatcacattctgttctgatagtatatatcagctctcacgtgtaggaaatgttaaactgactttctaaaacacattttaagttgcattgttaataaaattggaaaaagaagtgcttacatcaactaaaaaaaagatgcttatatagtgatatgcagaatcatgcactaggtgattattattgtgatgctatttcctcagaaagttgttaccattagaatacatttttctttctcttttttttttttaaaaaaaaaaaagaggccgggcttcgtggctcatgcctgtaatcccagcactttgggaggcaaaggcgggcggatcacgaggtcaagagattgaaatcattctggccagcatggtgaaaccccgtctctactaaaagtacaaaagattagctgagcgtggtggagcacgcctgtagtcccagctactcaggaggctgaggcaggagaattgcttgagcccatgaggcggaggttgcaacgagctgagctgagatggtgccactgcactccagcctggtgacagaatgagactcagtctcaaaaaaaaaaaaaaaaaaaaaaaaagactccttactcttgtggccaggtttgtaagtagcctcttgacagtagtcattttgatgaggatgccaagactccattgacattcaacaaataaactgaatttggccagggatgatctgaattacagaggagatagagctatttgaagtataaaaggcagggatgagatcaaaagaattgaagataagattggagtgaaagcagaaaagacaaatggtgaactgcgataaaagaacagggaacgaggtaatatggaattgttgaagctgaaattagtgatgagggaatagaactgtgatactttgctaagttaagaaaatgctactattgttcgttgataatatggttgaatgtatcatttggtcccctgtagtaaatcccacagtaacggaagtcagtaaagccgtattctagtcatggcagtgctgttaactagctgtgtaaacttggataaattactgaattcccttttataatgattgcactagataacatttaaggtcctctccagttatagaattctttgacgtttctttctgatgaataaagttgagtagtacaatattggatgtgagttaattgatgaaatataaagaaatcgtggatgtattcttctgaaagctaagtgaattgtgttgactatggatgatttagaaatgactttgggtgaaaaaaactcatcaataaattctagaggaaggataatagggccaaagagtaagagattaaagatattcccatgaattctttagtagagagttgatagtttttagaataatggaacactggaatttcagtatggtaaataaattttggttgaaatgtcaactttaattttttaccttttaaaataagatatttttaaaatggaagtattatagtagtttctccatttaatacaaaatattacctctcctatagcatttgataaagtgccaaaactcacttcattcctgaagaggttggctattagctagtaaagtgtgattcctttcaaaagatgaaaaaaaaatctgattggtgctggtgaatatttacataatgttccttttaaccttcctttccattgtttatcctcaatgtctttagaattaattactcctttattacatctactactttttttcttttagttgttaggggaatagaatatgcatattgaaatatttaacatatatgttttttcttctttactttttattcagatacattcacataccattccattcatccatttttataaagtatacaattcaatggtttttagcatattcacaaaattgtataaccatcactagtacctagttttagaacattttcatatcctaaaaaaagacacctcatacccattagcagtcattccccattctgcctctccccaccagccctaggcagccactaatctttgtctgtggatttaattattctgaacattttatataagtggaatcatatatggtcgttgtgtctggcttctttcacttagcatgtttttaagtgtcatccatgttatagcatgtatcagtacatacttcattcgttttcactgccaatgatattccattgtatgagtacaccacatttggtttatttgtttatcagttgatagatatttgggttgttgaaatatttttaatccactagaaatattatgtgtttgacaaaataagctttgcatcttagattgaagtatgagtgcctttggaggcgtgtgacagtatgccaaggcatacctgaaaccacagaataaatagcagagcctcttggaatttttttttcatttgaattgaggagaatatatatacacacatatacctatacacaattatagctgcataaatatgtagaaagtaagattttcgttcactatcccctccctttttagaaataataaaattgaaaggtttgtgaactacttctaatttttaattagtattttcatattatcatttaaagccctctctaaaatgaatttaattgagtaaactgatttgtatcagaaaaatgtttaaaggcacttattgttgtttttgttgttatatacctgtttatgatttaactggtagtattttgagttagtggttttttcaaatgatgcattctttttaaatttcatttttatgctctcttaaatcaaggtatataaatcaatggcagttaaattacttttgcatttttggtgagactgtttttctgaatttgctattagatcaagagtaactaatatgggtaatgctcactcatttgtgcctagggataatgttgacttgaaatatgttaagtttccatttgtccttggtaaattctgaactcgtaaaaggcagtaactcactctatttttgatatgcagttcccagcacaatttcatttataggcattttcatttttgtatgatattttgtgaaatgcaaaggttgtcaaacagacctaaacctaaaaagacctttattaggggacttctggaaattttagccctgataacttagatttcttctgaaagcagcccccccatgcttattttacctccctgttaaaatttctaaattctaaaatttcattagaaattagatacattctctttaaattctgttagcgtcaaaacttagatatttgcagccccataaattattgacatttgtgaaacttagagtttaacatacacagagctaaccaaataagaacactgtggcacaagatctccaaattctgtaaggttcttggttgatacaatacagaaaatctgaaacattaatttaatgcataattcattggaccaatttattttgaagaatatttgagacttagaaatttacaactttgttcaataaccttgctggtgtctcagtataatagctgtccttgaagtatgagattgaatttaatagttgtttaagattttaatgctacaaaaagtctgtgttgttttaggatataaatagcaaaacacccttagatagtggcccaagacagacctgacacgtaacagattttatgctgtcattctggtgatgttccaagtattcatatttaaatggaataactttaataaaatgggaaatactggaaatcaggacatgtttcttactgttgcctgattatttaattttatactttttaaatgattttttcttattgtttataattttctaagctagtaagatgaattattaacgcaatttaatgctgtttacgaaatgatttaaaatttaaatgagctaccacgtgataggccattttactgtttatctcaagctgttcctctagctgtgcctcacttagttaatcttacacctctctttaaaaaacagtatctagggtaaatatactctaacctcttcccaggcaagtagaaaaaaggcagtctggagtcaaacagtgagttcagtttccagctaggaccttgtggcaaccttatataacatctgtaaaccatagttcctccttatttaaaatgaggataatcgcactcaccttatacagttgttctgaggattaaatgagatgatacttgtattagcaggttgcttgttggatagtcagtgcttaataaatatagctaatctatagctaagtgactttgtttagaaagtcagtggaatctaacagatgaactggtaagaagaacaagcaaaatttaataagagatatcttggatcttggtctaagtaatctgctgctaccctgtgagggacttaccaattcttggtctaggatccttgagagcatttggttcaggataaacaaacatatttggatttatttatttagttttttagatctgatctattttgacttgtaagttcctgctagaggctaagtgaactagcactgttccttcagtctatcctcttagaatccacccaaccaggttgatctgaaaccaagtccccactagcattattctacccttctttccttccctatggtctactttcaagaaccagactaatcttcagcagtgttctaaaataaatggaatttcccatattttaaatctttggtttgtgaaaagatttttgtgaattagtaattttattgtttagatatatagaattccagtacagttaattttacaggattaatattttaattttttccttgctaaaaaaccacatttctagtctgattaaatgctaaatttgaacccccacctcctccccatttctgaaatgcccagtggagtaacaactgaattaaaaatacttgttttatacatactcccttcgtgtaccagacttccaggattgtggctgtgtccttttggggtaatttagtggtttgggtgagagtttgagcggtgagaaggatttaaaagggttgaaagtaaagtatcccaaaaacgctgttgaaagctcagctttcccttttcaccttgttctttgatgtgttagtgtccattggtctccatcctaacttggtaactaacttccataatgaattgattaaaaataatgaacactatgtgacaaataacactctttcaggtactactttatagaaagtgatcaaaaggttttgtactggatgatttcttgtagataatttattataaccagatccacaagccctcttaatttgtttttgtaccacctcagggagcagaacttagcagaattcctcatgaagggattttacacttgtacaatatttacagggcaggtaggagttggtgtttaccatgccgctcaagaaaaacattaaagctttattcctacagatttactattatcaaaccaaatattagtctaagatgagtacagagtttttccccctaaatcaggtgttgaaagatgccttccaattttggatacagtaattattataagttaaagaagttcagacactttcatgttcatgatgtatattttataatagaatattttattaactcacttaacatattagtatccttttacgtttttgtgcctttttattttaattttttgaaacaattatagactcacaagcaatagagcaaaggagtacatacagtccatgtaccctttacttaccttcctgtgatggtggcatcttacataactgtagtataatacaaaaaccaggaaattgacattcacacattactgttaactagactacagacctaattcagttttcaccatttttaacatatattcgtgtgtgtgtatgtgaatgtatatattctatgcagttttatcccacatatagatttgtgtaaataccaccacaatgaagatgcagagctgttctatcactatatatatgctatccctgtgtgttcacagacacacacacacacacacacacacacacacacacacagacacccttggcaaccaataatctgttctccatctctatagttttattgttttgagataatataaattactccatttatacattatacagtatcataacctttggtgattgtctttttttccctcagcaaaattttctggaggaaattcaggttgttgaatatatcaacagtgtgttcatttttattgctgggtagtattccatagtagggatgtgccagagttggtggaaccaaccattcacctgctaaaggacacttgggttgtgtctaattttttgctactatgagtaatagctactatgagctgttaggaatatttctgtacagtgtttggtataaacatatattttcatttttctggggaaaaatgcccgagattgcaatggttggattgtatagtaagtgcatatttagttttgtaagaaatcgccaaactacgggtggatcacgaggtcaggagatcgagaccatcctggcgaacacggtgaaaccccatctctactaaaaatacaaaaaattaggccgggcgcggtggctcacgcctgtaatcccagcactttgggaggccgaggcgggtggatcatgaggtcaggagatcgagaccatcctggctaacaaggtgaaaccccgtctctactaaaaaaaatacaaaaaattagccgggcgcggtggcgggcgcctgtagtcccagctactcgggaggctgaggcaggagaatggcgtgaacccgggaagcggagcttgcagtgagccgagattgcgccactgcagtccgcagtccggcctgggcgacagagcgagactccgtctcaaaaaaaaaaaaaaaaaaaaaaaaaaaaaaaaaaaaaaattagccgggcgcagtggcgggcgcctgtagtcccagctactcaggaggctgaggcagaagaatggcgtgaacccgggaggtggagtttgcagtgagccgagatcgcgccaccgcactccagcccgggcgatagagcgagactccgtctcaaaaaaaaaaaaaaaaaagaaaaagaaaaaaagaaatcgccaaactattttcgagagtggctgctactattttacgtttgcaccaataacgtttgagaaatccagtttctccacatcctcaccagcctatggtgctatcactgttttttgtgttaactgttttaattggaatgtagtgatatctcattatggcttttatgttttacttgaaaataaagtatattattttaaggtcttcatgtagattttactaacatcgttttcacccaactctaacccaattcctggttgttggtgattttaattgcagttaaattgtcaatgattttaaaaaatgatttatttggccaagattacttaatatttaagaaatatttatagcatttgatttattaaatacagtactctaaattaataaaataactttaccttttttggataattgtttgtattatagtggctggaatggctggtactgcacatatcgatggagaccatattgttgtttcagttcctgaagctgttttagtttctgatgttgtcacagatgatgggataactcttgatcatggccttgcagctgaagttgtccatggacctgatatcatcacagagactgatgtagtaacagaaggtgtgattgttcctgaagcggtacttgaagctgatgttgccattgaagaggatttagaggaagatgatggtgatcacatcttgacttctgaactaattacagaaaccgttagggtaccagagcaggttttcgtggctgaccttgttactggtcctaatggacacttagaacatgtggtccaagattgtgtttcaggagtcgactctcccacaatggtatcagaggaggttcttgtaactaattcagatacagaaactgtgattcaagcagctggaggtgttcctggttctacagttactataaaaaccgaagatgatgatgatgatgatgtcaagagcacttctgaagactacttaatgatatcttgtaagtgaaacataaagcccataattactcaggagattgatttatataatctggaaaagttttctgggatgagggatatattcaataaaagttataggggaatctttttgaaaaataattttttgaagcagtgtcattaagatgctgttttgagtttactgatgtttttaatttattcaatgaaaattcatacctgaaatgaagtaaaataatgcagtttattagtatcttaaaatagaggtatagatttggcaacaacaagaacattaactgatacaaaattttaatgataaatatatatatttcaacatgggaactttcttatgtagccactgcttttttttaatatgacaggcactgaaattgtcaattaagtttttcttaggaacttaagcagaatatgttaagaaatgtattgatttttaaattaaatacttgaaaagtaaatcataaactcagataatgtcctacagttctccctgtgtttatattgcttatgcctaaatatgtgtgtgtatattttatgcaaagctatttaacatgtttattttagactgctttgcaagattcttaaaacattctatccgaagcgggaagatagaaatattttgttctcattttaaatgatgggtttatgagagcagcaacaaaaataaaaaatatcttgataagttattgatggagcttaaagaagtaggtatattagttattaaatttgaagggatcatgctacaagtagttaagattagacaattttttttgacttatccagggaagatttttattctttttaaaatacaaaaatggttgactgggaagtttatcaccaggtagagtgtgtgtgtgtatgtgtgtataaagtgatcgtatgtatatgtgtattagtgaatttaaaactgaaaataaactaaatttatttaatttgtgaatttaattgtaaagtttagcataacttttttcttctataagcacttttgaaggtgaatttttacattgtttttaagaaaataatgtaagccactaaaagactgcaaatattgttacctatttttaaatagatatagattactaaagcaactccatatttacatcttaacgtggcattttttaaaagatctatagtatggttatcatgtaaaatgatgtggcaaaagttggtagtctacactaaaattcagtatgtcttcaaaagagtattcattaatttaaactgatattaaagtagtgcaaaatttagatgtcatgtattgtgaacagtcataccttgtgttatcttctatgatttaattctgcaaaagttttttaaaaaagtttctggaatattctaagttagaataattattttgataactacctcatatatcaaatacaaggactcctttgaggaatataattttattttttgttgatttgtttggtttcaacttttattttaggatttgtacgggtatgaatgatcccatctcctaggtactgagcatagtacccaacagttagttttttggtcctcgccccactccctccctcccacctctagtaatccccaatgtctgttgttgccatctttatgtccatgaggaccccatgtttagacttctcttataagtgagaacatgcagtatttggttttctgttcttgcattaatttgcttagaataatgacccacagcagcatccatattactacaaaggacgtgatttcttcttttcttacggctgtgtagtattctgtggtgtatatgtaccacatttcctttatccagtccactgttgatgggcacctaggttgattccctgtctttgctattgtaaataatgctgtgatgaacacacaactgtgtgtgtcttcatggtagaatgattgttttccattggatgtatacccagagtgggactgctgagttgaatggtagttctgttttaaattctctgataaatttccaaactgctttccacagtggctgaactaatttacatcccaccaacagtgtttaagtgtccccttttctccacagcctcaccaacatctgttgtttttttgacattttagtaatggccattctggccataataaaaaaatagtagatgttggcatggatgcagtgaaaagggaacacttttacactgttggtgggaatgtaaactagtacaaccactatggaaaacagtgtggagatcccttaaggaactaaaactagatctactgtttgatccagcaatcccactactaggtatctacccagaggaaaataagtcattatacaaaaaagatactttcacatgcatgttcatagcagcacaatttgcaattgcaaaaaaatatggaaccagccggaatgcccatcaatcaacgagtggataaagaaaatgtggtacactatggaatactactcagccataaaaaggaatgaaataatggcattgcagcaacctagatggaattggagactgttattctaagtgaagtaactcaggaacagaaaaccaaatatatgttttctctcatatatgggagctaagctatgaggatgcaaagcataagaatgatacattagactttggggactcgggagaaagggttgtgggtggtgaaggatacaagagtaaacattgggtacagtgtacgctgctcaggttatgggtgcactaaaatctcataaatcaccgctaaagaacttattcatgtaaccaaacactacctattccccaaaaagctattgaaataaaaacattttaaaaaatagcttgtcagtatgaacaagcaaaataataataataataataataatgataatggtcattctcactggtgtgaggtgatgtctctgtggttttgatttgcatttctctgatgattagtgatgtggaacatttttttcctatgtttgttgaccacttgtatgttttcttttgagaagtgtctgttcatgccttttccccgtttttattggagttacttgttttctgcttgctgatttaagttctttgtagattctggatattatacctttgtccgatgcatagtttgtgaatatttttctcccattctgtaggttgtctgtttactccgttgatagtttcttttgctgtgcagaagctctttagtttaattagttctgacttgtcaatttttgcttttgttgcaattggttttggggacttagtcataaattctttcccgaggccaatgtccagaatagtgtttactaggttttcttctaggattcttatgtctagaggttttatctttaaactttggtccatcttggctaaattttgtatggtgaaacataggggtccagtttcattcttctggatatggcttcccagctatcccagcaccatttattgaatagggagtcctttcccattgcttacttctgttgattttgccaaagattagatggttgtagttatgtggctttgtttatgggttctcttttctgttcctttggtctatgtgtttgtttttgtactagtaacatgctgtttatgttactgtagccttgtagtgtagtttcaagttggataattgatgtctctggctttgttctttttgcttagggttattttggctatttctttcttggttccttatgaattttagtgtagttttttccaattctgtgaaaatgacgttagtagtttgataggaatagcattgaatctgtagattgctttgggcagtatgtccattttaatgatattgattcttccaatccttgagcatggaatgtttttccatttgtttgtgtcatctgtgatttcatttattagtgttttatagtactcctcgtagaggtttttcacctccttggttaaatatattcctgggtatttttttgaggctgttgtacatgtaattgcattcttgatttggctctcagcttggatgttgttggtgtgtagaaatgctactgatttttgtacattgattttgtatcctgaagccttaataaaattgtttatcagttctaatagcctttggcagagtccttagggttttctaagtatagaatcatatcatcagcaaagagagatagtttgacttattttactgtttggatgtcttttatttctttctcttgcctgattgctctggttaggatttccagtactatgctgaataggagtgatgagagtaggcatccttgtcttattccagttctcaagaagaatgcttccagtttttgctcattcagttcgatattggctttgggtttgtcataaatggctgttattattttgagatatgttcctttgatgcctagtttcttgagggtttttatcatgaagggctaatacattctgattttatcaaaagcttttcccatatctactgcaatgatcacatggtttttgcttgtaattctgtttatgtggtgaatcacatttattgatatgcatatgttgaaccaccctttcatccttggaatgaaacctagttgatcatggtgttttaactttttgatgtgctgttgaatttagtttactagtattttcttgaggattcttgcttaaggaacataattttgtataaagcaaaatatcttgttaacatcatgatgggagatctcattcaaacctccctaatttcaggggtaaaaaaagttaacacctttataattttaaaaactataatgacttttttgagatataatttacacatccttttatttacccatctgaagtgtgcaaataagtggtttttcatatattcacagggttgtacaaccatcaccacaatcaattttagaactttttcatcaccacaaaaagaaaccctataccctttagctgttagccccccccccatccactctgaggcaaccatgcctgtatagatttgcctatcctggatatttcatataaatggagttatacaatatgtggcattttatgtctggctttttttacttcacataatgttttcaagggtcattcatgtcatagcatatatcagtacatttgacccttgaacaatgcaggggttaagggtgctgaaccccgccccccctgctgacatacacacagttgaaaagccatatgtaactttcagcttaccaaaaacataactactaacagcctactgttgaccagaagtcttaccaataacagtcaattaacatgttttgtatgttatatgtatcatattctgtattcttacaataaagtaaactggaggaaagaaaatgttaaaatcataaggaaaataaaatatatttactattcattaagtggaagtgggtcatcataaaggtcctcatccttattgtcctcacattgagtaggctgaagaaggagaggaagaagggttggtcatgctgtctcagaggtagcagagcagaagaaaattcatggataagtggacctgcacaattcaaacctatgttattcaagggtcaactgtacttcattcagtattactaataacattccattatatgggtattatcacattttgtttatccattcatccatcagttaatggacatttaggttgtttccactttttggctattatgaataatgctccatgaacatttatgtacaagtttttatgtgagtgtatatttttagttttcttgggtatatacctgggagtggcataactctgaaatctaaaggtgactatcttgttgttcactttttcactctattgtgaaatacagattctttgtatattgcctaatcccatcactgtggtatatcagtatactgtatagtttttataccatactcaccatataattttggtagatgtaagtaacatgcaacaggtaaaataaaaagcctacctaacttttaaaaaggaatgttatattgtacatttgactaaaatgaaattttaattaaattgtgtgagtgggccataaaataatattgaatgttaccaaactttacagtgttggcaaacaatgcacttcactttcttatattatatttagtgccagaagaattctgtggtggttattttattacttattgctggattgagaaacaacactattggacttgaatattgcataccttacaacaagcaaaacatttaagcttgaatttaaggtattttgagtattatctgcatttagaagggcctttggagatttatttctaaagtcagttgattgcctattaagtctttgttaatttcgtactttccataacgaaggatatagaataaatcttggtcaagttgatggtttacctcttaaaactgcgtgccaatatctttaataattttatcattttctgtgaacttaaaatacagaataagttcagttagtacatttcaaaattgctcattctgaggaatctaagtaaaaattaatggatgcattaaatttaaaagtatgaaccttaagaaaaggtagaaatggaatcagagagaatagtattagtaatttcatacttattgctaaaattatggtacaaaactattaagaagtggtgaaaaaaatgtgactttcatttcatgaactttaattttgtgaattatagttttaactcagcttatcccagaaggaactgtgatcgctttaaactattcatgtataataaagtagaatttataaaatgagagtatttttattattttattaatttaccataagttatttcagcctaaaagtttgtattttggacactttttgaagtttttttatattctgtttttaattaatgagaatatagtttttttctaaaaacttactcatgattttttctatgtcatttttattcaacattattttataagagaagctattaagccagtaatatcaaatacttaatctttttttattttaatttgtaccattgtcaaaaatgttgccaaaagtttagtaatataattaggagctctgatggaatgaaaatatgtagactttattttgatcatttggatgctatctttcatagacagtaagctattaaaatttggaagtaggatagaatcatttgtatttaatcacaaagttaaagtagctctgcaatgtaaaaataatttttaatatgtgttgttttccactattttgaaaggcctaaggaatatttttcaagttgtatgtatcaagtttgaaactaaagtaaggaaaatctagactttgacccatttagatcttgctaaaattgtttttaggagtgctgaattaatagctttttaatgtcactttattctgtttttaatggttctagaattgttagatgtatgtaggggcttcaaaatttgatgtttcatatttagtactgttacatatatataataaggaggagtagattttcaatttagattacatttgtgtttttataggaacagcattaaaagaataaattataggcatataatatttaggaggcatatattgtttgaatattatttatggtcagaggacagagtttattaatctattcattgcatagttcatgcatagtattcatgtgaacttaaatgttatcctaaaagactatacagtggagaatcaaaaattttaagtgtatttaaaatgtaagcaataggtccaaatactgttgccttatctttatatatgattttcttttaataaggaaaaagagggggaaatacccatttatttcccttacatataattttgaaataaagcatacattgcaaaatctagatatatacaaaattcatggcttgaagttgtcttccattgaccctgcagaaattagagtatttactaagattttatttccatgatgtatgaaaacctgtttttatagtcacttaggtgttctctgtgtttctttttttaatcctagatcttgtatgctaatttgttttagaaacaaccactatttaatttgggaactgtagtttatgtgaactcattttatgagtaatatatgttttatgttcttaatttttctgttattaaatttagtgttaggatttaccttaaaatattgaaagtgatagaatttgaagccgttttaattaaagctatatggttaagtattttgtatctattaattgaaatctgtaaatagatttttatataattgcgattatgtaatataactgatcttgtgtactgtttttccatgaaccttgatgcttttttaaattttaaaaataattttattgttgcagatttatgttgcacaggtacaggtttattacatggatgtaatattgtgtagtggtggggtttgggcttctagtgtacctatcacctgaatagtgaacattgtatccaatagataaattttcaaacctcataatctcctctccccccacctttttgaagtccctaatgtctattattcatgaatcataacacttttaatggcttcataataggttattaagtgaatacagtgggtaggtggttaacattatttcacgttacacttcagcttaacacccactaaatagtggtaatttttcttgttttgttgttttttgtcaatggtattttttgactgaaataattttgtttatattttatagtggatgatgttggagaaaaattagagcatatggggaatacaccattaaaaattggcagtgatggttcacaagaagatgctaaagaagatgggtttggttctgaagttataaaagtgtatatatttaaagcggaggctgaagatgatgttgaaataggtacaaacactaattttaatttattgctccaataggagttataatttattatattttctggggactagtctaaaaatgttctcaaagcatgggtttttttaatacgttttctttgggaatagtctacttttaaaaattgtatatgaatataaagcaggaatgcagaatatgtcattctttgattctttcaagcatgagtagaatactgcagcagaaaatatcaaaacaaatgattggagaggatttggtttagattaagaaactataatgagtgtttacaagcatggattctagaggcaggctgcttgggttttaaataggtcctgtcacttagctgagtgacctttgataaattacttaacccccttctgtctgtttcctcatccataaaattctcataataataaaagctacctatagggctgttgtgagggttaaaggggtaaatatgtataaaagacttatatactgcttggcatataagcttgatgtaaggattaacaattgtcatttctcagtgatagctgaaaatttaaagtataatttatatgaaaatgttcttggcactttgaaatttattttggaatttattttttttctaagaaatatttctatatattcttcttattaatttaggtggttattccatgatacttctctattttaatgcgtgttttaatttttaaggtggaacagaaattgtcacagagagtgagtacaccagtggacattcagtagctggagtgcttgaccagagccgaatgcagcgggagaagatggtttacatggcagttaaagattcttctcaagaagaagatgatatcagtaagaaaataagggcactgtagtgacttatcagtagccatcatgcattatttttaaaaaatctcagagatacaagcactgtataggaacaaagttcaataaaataagcctgatcctttgaccctttgctgtaaataatttaaaagtgaagggtccttttgaccattcatttgtacatgtattgttcaaatcaccaaacattaaataatatatcttagtatactatactagaaatacagagatgaacaacatacagctcctgacatcagtgaagctcaaaaatatgtaattactgagtacctactttctgtgcgttactgaatatgttgcaagatactatctcatttaattcttacaactcatatctgaggtaggtggtatttttcctgtcttatggaaggaaaaaaaaagattcagggaaaataatttatccaagatcattccaatattaagtgtgaagggcaggattttaatggttatctaactccactgccaatgttctttccacatggcagtgggcactgttggcttctctctggatttagcaattgaagggctgatggtttgttctcctgtcactaaagggttatcttatgtaagtattcttccaagccaagctgccaggagtttgatttcctatgctgttgatggtctccaagcagttgctgcttaaggttttgtggggctaagtaccacaggacgatcaaacctcctcaggtttcctttcctgccataccgcaggtttccttatgaagacattttgctctctgcctactttctcctcacctcagtataggaatgcagccctttcctaaggctattcctgtcttcttactatgctgagaaaaacacaatattgccttgccctagaaggctaagagcctccatttcactgcattaacttgacaatattgggctttacctgtgctgcactctgatacctactccaagtttccttccctagaagttgtagggtgctgaattccacccccaaacagctgaaaatatcaaaacaaatgagtggagaagattctgatggataggaaaagagtttaatcaaataatttctatttgatctctaaattctttatttttttatttattggtaaggaaaggggcacagtaggaaatggaagattgaggtttaagttaacttatgccagaattctatgggaatgtgggaaacttagaccagtgtctctttttggttaatagagagaagacaaacttgggagaagagggatacttttttcccatgtttttccccacatttcttctgtagtcatccaggatcccagtatgtgaatcaaaggaaaagcaaaaattcaagacaattttctatttaacaagttaaatgtaaacagattattttatataaagtatattgtggctctctaggtttaaatattttttttttcttaccgcaatattgttttgttcaatgaagctcatttaatgctttctctcctcagtagaatctcttaaaatctggcctattgaagagtgtccacatattcttgatcactagcattatatacatatataatttttatttttattttaaatttttttcaattacaagtatttttggtgatttttattacatgtatagtactgcatttcatttataatacagtatacgagatagtatggaccactttctagtattatttctatgagaaatattttctgagtcccaaaagactgtcaggcaaataaatgtataatgcctgatagaatgtaagatcattcagtatatttcaagcgcacatgtttttataaaatttttaaaagccatttccatagaacttggttctaagaggagaataagagttttggtaaatgattgtctcctagtggcactagcctccaaaagtgcctaatataaattgaaattaaatttataaatttttaaattaaccaaactgaaatttgaaagttgaaagatttacattgtttggaatttttacccacttattaaatatttggggttataaacaagcaattatttctaaaatttaggttgcgctgaaatagcagatgaagtttacatggaagtcattgtaggggaagaggaaggaacttctctccctgagattcagcttgaggactctgatgttaataaaacagttgtccctgttgtctgggctgcggcatatggtaggatactggcattttttcacctgataagtacataatatgtatttactcagcctttaggccattaaataagctttgtgaatgccaccatgaattggctaatataataaaatgttttacactgtggactgattcatctctagttactttagatgatttttctaccacataccttgtactatttaaaatgaaccttgcttaatgcattatgtttttcagtatgatctattttaaatcctacctgtataagtgagtgccataaaaaattttatttttctaaaataggaatatcctttgaaaatcgatccttcctcttttggaaaaacttatttcatttattaactctacagatgataaagttttggggttttgaaaaagaaacagaaacccaggtatgctcttttagaaagcatataatgaaaggtaaatttatcaacttatttttccctttcagtcttattttatttcattcctatgtaacgtacaagatggtccaggtatactctttactttgaaaaattttgatgttcaaatgcattaatttatctaaacttggttcttccaaaggttcattcattcagttatttattgagcatcttcaaagttaggggtacactgcagaaatatctacccagttttcatttaaaaagtaaaattgttctagatgttaacaattccaaggatgctgaacagcagcccttattttcagtatgtgacattatctaacctataggagtggaagaacacaacaattttttttaacccaaggaatggtgggcaaagtaagattttgtagattaagatgtgatccactagtagtcattataattagcatatcagtttgtaattggtctttttttttttttttttttttttaggagatgaaagaagagtttcccgaaggtatgaagattgtcaagcatcaggtaagagagcattgtatatgagatgtgagttaaagttctggctttattttattttactgcttggtaagtaacaagtttgtgtctacagacacatttgttggactcttacttgcttagtcatacctaatctagttagttaggagtttcttctttgaggaattaatttatgtgtggacataatgtgtgttaatctgtaaatgcagttccatttagatttccctcaaactttaagcatcaggcagtttatcaaatggaccataacaggttgctatggaaaaaatgaaataagaaattatttggacagaaaagtaaaaattattcatgatatcaaccccttgttaatgttctttttggggcagaactgttttcttaatttctatggcaaccagtgcatttatatataactgttatataaaacccatgtgtcagcttaattttttttagttttaatacactctatatggtgttgttctctagttgatcttcttgttaagttttcttaagcaaggagatattttcttatgataatgtgtcattgttctgtttctacccttgggaagtatttgactctctaaacttaggtgttgatttcgagaaattgatgagaagtatagatcacagcatgtaagttaacctgacagttttgtaggtctacattttttagctaaattgcataaaaccacaatggatttttgataactaggattttattaagtactttttaatgtatgcactgatcacactgaaattgcaataaattgcctaccatatgttaacccgtaaaatcaatcttaatatgtagtactctttatatcaagtacactattctgaagcatatctgcaagagatctgtttcgttttttatgcattacacttagtcaccataactataatggttcagtaatatgtctacatttctttttcaattaatttcatcagccttcattggtaaaaaaaaattggtctgatgccaagattttgtttcaaattcagtttcttttctttcttttttttctttttctttctttctttcttttttctttttttttttcaagagacagggtcttcttgctctgttaccgagactggtgtgcagtagcacaatcatagctcactgcaaccttgaactcctgggctcaagcaatcctcccatctcaggctcctgagtagctgggactacaggtgcatgccaccatgcctgaccaatttgttttttgtagagacaggatcttattatgttgcctagggtggactgaaactcctgacctcaagcagtcctgcctcagcctcccaaagtgctgggattacaggtgtgggccatcatgcccaccccaaatccactttcttatattacattcatcttatcagtttattcctgataaaatagagatattttaaatttaattgatgatcaaattgagatattttaaagttaatttcacatgatatcctattcaaagtatttacaaatacatgtctttacttgtgagtgagagagaacaagagtgagagagagaaagagaatcataagatggatatactttgtgaaatttactaccagagtggtaacttggtgtcatgtcatctgtagtaactcattcaacagaaccaaaaaagtataaatgtatgtgatttaatgatgtttcaatttttttttccaggaaatactttggactcagcattagaaagcagaagtagtacagcagcacagtaccttcaaatttgtgacggcattaatacaaataaagtacttaaacaaaaagccaaaaagaggagaaggggagaaaccaggcagtggcaaacaggtaaatactttgctttatgaatattataattatttgagatgtggaagtattttttgtcaccaaagaaaaatatcgatggtttacttggcagttctactctccatgtacctgtttgtgtatgctatagataattgtttttttttttttttactttgtgtgactggtacttaataaaactatgcttgtttgctctttattccaaagatacttttacagagaattttcaggttggtttaacaataaagggtacctgtttttggtattcaaagtatatatgatattgcattttggcatgtgagtggttcatagtagagtgctgctcattactttttagtgagctactttgccataaattgcttttattatgtattttttatattacaggatttcattcaactagtattgttttcacatagtgaatgccaactagttttggcacctttgttataaaatcctttaaaacagtctgaccaaatgtcacaactttctcttttctttatctagctgttataataggtcctgatggacagcccctcacagtgtacccttgccatatttgcacaaaaaagtttaaatccaggggattcttaaaaagacacatgaagaatcatcctgatcatttaatgagaaaaaaatatcagtgtacagattgtgactttacaactaacaagaaagtgagtttccataaccacttagaaagccataagctcataaacaaagtcgacaaaacccatgaatttacagaatacacacgaagatacagagaggctagtccactgagttccaataaacttattttaagagacaaggagccgaagatgcacaagtgcaaatactgtgactatgaaactgcagaacaaggactgttaaacaggcatttgttggccgttcacagcaagaattttcctcatgtttgtgttgagtgtgggaagggttttcgacatccttctgaactcaagaaacatatgagaacccatactggtgagaagccatatcagtgtcagtattgtattttcaggtgtgcagatcaatcaaatctgaaaactcacattaagtctaaacatggtaacaatttgccatataaatgtgagcattgtccccaagcatttggtgatgagagggagcttcaacgccatctggatttgtttcaaggacataagacacaccagtgtcctcattgtgaccataagagcaccaattcaagtgaccttaagcggcacatcatatctgtccatactaaggattttcctcacaaatgtgaggtctgtgataaaggttttcatcgtccttctgagctcaaaaagcatagtgatatccataagggtaggaagattcatcagtgcaggcactgtgactttaaaacatccgatccatttattcttagtggccatatcctttcagttcatactaaagatcagccattgaaatgtaaaaggtgcaagagaggattcagacaacaaaatgagctaaaaaaacatatgaagacccatactggaaggaagatttaccaatgtgagtattgtgaatacagcactacagatgcatctggctttaaacgacatgtgatatcaatacatacaaaagactatccacacaggtgtgaattctgcaagaagggattccgaagaccatcagaaaaaaatcagcatattatgaggcaccacaaagaggctcttatgtaataagatcaatataaagaaagaagctatttaggagatatgatatgctacttgggagaaaactctcactaactgtctcaccgggtttcaaagcttgatactaaaccatgactttacattctttgtattaaagatcttaaaatatttgaattcacaggggatcccatagccctttgaaaattacttaaagaatttaagaagcactatagaatggttacagaaaaacttcttaagtatctgtgtaatagtattatatgcatacttaaactacagaggggaaaagcaaagacaaatactttatttggctgattatgttagatacaaatgtttctgagaagagaatacataattgagtttagtgatgctttgctatagcaagcaaacccacttttatgcaattttagaaatggggcagggaaacaaaatgtggtcattcatcagtcacttagtcattgagccttttatattgtacctggaaattaaattccagcaatgacaaaagttttgtgtattcattaaaagaaaactaactggaaaacaggttagattaattcagtactattaaaaaagaattcagagctgttaatattttatcacaggataggatacttaaaatatagcattctgtgctgagatctaaggtgaagtctataaagattaaagttcccttttttctgatgttcaagttgattgttgttcagtatggcatatatgacaaaagtatatttgagtcaaatgtggctttctaaaatggatgcaacattagcgttgcaaacaaaatcagcactatatttcttaatgatctaaagattaatttgagagaacacagttttcttaaatattataatgtctagagtttttttaggacagtcttagcaagtatgattgttctagtcttacttgctctaatgtttaaaggtgcaattttatgccattattgaaattgatttttaaaatctatataccatatgattaacatgcattttcaatatgaggcagtgtttatgcagtatttaacagagcaatctgctgccaatagagtttggaggtggatatttagtttacagtgtataaacttaaaatatgcatccctttaacaacgctttgtgttagcatgctgcaaatcaaaatggcacttaatattaaaagctggtttagggaaattttatgaaaatcctgttcataaatgtaatgcatatgatatgtacttttaagttttagttgcttcatgtttacattcagctgttcaacataattaaaatgtaattttacttcatgctatattgtggctttgtgtttcaaataatgttcacctttctgtttttgcaccagataagaatcagttccttgagaataaattttttatctttcttaacttcagaatattaaatttggaatatctactaaaattgtgtgttatgtggctgtaaatgatgtacacgctgtaaaataagatcgctactgttatgtgggattattatttctaaatgttactcattgaaatgagcatacaataaaaagcatttattgcacttaa

SEQ ID NO: 483 - DNA, 5264 bp, Homo sapiens
  source 1..5264: mol_type = other DNA
agtcctctcagccgcccgagggcgctgcgctgagccttacactctatgattgctcctaccgactcccatgaggaagtgcgatcgggaacctcctatatacttccgtttgcctcgcggtttctttctttccgcgccgatagcgctcacgcaagcatggtaggacttgctggtgggggccgagtaacatccagcttaatctttcccccccttcgtcgcccgtgctatgccgggatgggtccaggctcctgtgtggactcgatatatcagagcaacccaatcttgccgggatcaaccctaaagggaccgggctacggggccaggaattgaagtgatgggttcaaagaggtagagttagccgggggtggagttaatgaggtctcttccctctttggggctcgacggagggaggaagctctgcttgaagcacatggggctggcccaccctgtagtcagaggtagcaagtaatgaggagtcctcctggagtgcctcagctttagctgggtaaggtagggcgttgtgccattgtggtcaaataacattgcacgttctgaactgtttctttactaggttaacgtccctaaaacccgccggactttctgtaagaagtgtggcaagcaccaaccccataaagtgacacagtacaagaagggcaaggattctctgtacgcccagggtaagatggattccgcataatttggtgttaatgtgacatttgtgttgtagaataacatacgagtccgggtctctctccctccacgcctggcttgagcgttaatatttctgctgcgaaattaagataaaacctgtaagacttacttgctgatcttcagtattttataacaaataccaattcgttttcccaggaaagcggcgttatgacaggaagcagagtggctatggtgggcaaactaagccgattttccggaaaaaggtgagtggtagttactatttgacgtttcccagttaattgccgtaaggatatgcacttgtctctagtccacacacttcatgatataggtatagcgttagtttagcgaagttttcactgcactgatatatctagtaggtgatggagctgggaatgcaactcatgtctgactagtccacaatactgcactatttcagtgtttacgattttttatcctttcccttctgaagaggcaaaaaattgaggaatgtgccctgctttcctaagaactgaagtgtgagtacactggtaaatcctttcatttgccttgttccttatctgtcaatatgtctgaatcctcgcttgttggttgcactaagaattgttctgttgtttctcatcacagaaatctgcagtcaactacctgttctcgtgaagtcttaaaactcttatagaatagccatttaggcctttctgctagcctcctgaattctgtattctcaggctgagcgagtttctgtttactctcaaaccttaggtgatttggctaactcttaaagtaattagcacgatgattggaacggagcattctctccaacacagcatttcttttggcactttgcttcttgtgcagtttagctccagaaagtattaaggaatgactttagtgctcatttggatgcagtaagtggtttgatctcagggtggcaaaaagaatgctttttttataccttttcacattcggataacttgtttagaagacagaggttctaactaggttttggcctattaagaactgcaaactagcagcagcagaactctggctaaaggggcaagcttattaggaaattgagtatttaaaagttgagctaccatatgatccaacaatcccactgctgggtatatacccagaagaaaatcggtatatcaaagagatatctgcactcctatgtttgttgtagcactgtttataatagctaagatttagaagcaaccttagtgtccatcgggatgaatggataaagaaaatgtacctatacgcggccaggcacggtggcttgtgcctagcactttggaaagccgaggcgggtggatcacctgaggtcaggagttcgagaccagcctggccaagatagtgaaaccccgtctctagtaaaaatacaaaaattagccgggcttgtggtgtgggcctgtaatctcagccacccgggaggctgaggcaggagaatcgctggaacctgggaggcagaggctgcagtgagccgagatcacgccactgtactccagcctgggcgacagagcaagactccatctcaaaaaaaaaaaaaaaaaaaagggaaaaagaaaatgcacctatacacagtggtactattcagccataaaaagaatgagatccagtcatttacaacaacatgggtggaactggagatcgttatgttaagtgaaataggcacacaaagacaagcatcacatgttcttgtttgtgggatctaaaaatcaaaacaagtggacttgtcatatagagagtagaaggatggttaccagaagctgagaacttctggtggcgggaggtggggatggttaatgggtacaaaaagaaaaaagaatgaattagaccaactatttgatagcacgacagcgtgactaaagtcaataacttagttacatattttaaaataacttagagtgtaattggattgtttgtacctcaaagaaaaaatgcaataaaactttacagtggagaaacctaacaagcactacctcagccaggtaatcaaggttaacatcaacagtcacgagtcatgttgatatatacccttgataaggtgtgatgaaaatgacacttaaacctaaaaatccataaccctatctaatgagaaaaataacaaatcccaagaggggcattttacaaaatacttgaccagtagtgcggaaattgtcaaggtcatcaaaaaagtctgagaaattgccacagccaaaggagtctagagacatgatgactaaatgttaggtggtgtcctgcgtggggtcctagaacagaaaaaggacattagaaaaacataaggaaataaaaaaaaagtatggacttgagttaataaggcatcagtgttggtttgttaatgagtcatactaatgtaagatgagaaactggtaaggtttataagaactctgtagcatgtttgcaattttttggtaaatagaaaacttgtaaacaatagttctgttgtttaggtaaaaggagcaatcaaggccgtgcgtggtggctcgcgcctgtaatcccagcactttgggaggccaaggcgggtgtatcacctgaggtcaggggatcaagaccagcctgtccaacatgatgaaacccccatctctagtaaaaataagaaaaaattagctgggcgtggtggtgggcgcctgttatcccagctactcaggaggctgaagcaggagaattgtttgaacccaggagaaggagctgagatcacgtcattgcactccagcctgggcaacaagagcaaaactccatctcaaaaaaaaaaaaaaagaacaataaaaaaagttgaggattagtggggagtgtagtttgagttaaataattcagttgaatggacataaattctagacataattgtaggtagtcttagaatttattgatcttttatagagatggggttctcactatgttgcccaggctggtctcaaaatcctgggctcaagtgatcctgcctcagcctcacaaactgttgggattaaagaactatgcagagctgctgaatggccacaagttcagggtggcaagatgagttgcccatttgataggaagctctaggatgtttgatctgaatggggtttggattcaaacttgatgacaactgggtgacatgccatctttgctattaccacattttctctttatatatatatatttatatattatatattatatatatttttatgttttttatatatatttatatatataatatatatatatatattttttttttttttttgagatggagtctctgtttccctggctggagtgcagtggtgcgatctctgctcactgcaacttccgcccacctcccgggttcaagtgattcttctgcctcagcctcctaagcagctgggattatagacacgtgccaccatgcccggctgatttttttgtatttttagtagagatggggtttcaccatgttggtcaggctggtcttgaactcctgacctcatgatctgcctgcctcggcctcccaaagtgctaggattacaggcatgagccactgtgcccagccttctctttattttttttagtccacaagttctacacattttctcttaaattcactgatttttagattattttctccctatggcttaagagtatactgagtactatttaaagcaaagcattgcaaaagaatagttgccccactattcatttgcaatgctttgctttaaatagtacttaaagtagtcatttttgaagaaagtgatcttctgtagttatttattaaggctttaatttaattttttttcaggctaaaactacaaagaagattgtgctaaggcttgagtgcgttgagcccaactgcagatctaagagaatgctggctattaaaagatgcaagcattttgaactgggaggagataagaagagaaaggtatataattatgggtggaaggtgcaatctttttcatagctttattatttgaaaaggtgaacatctattcattgtggcatagagctcaggggtaatcctctaaaaatattagatctatagctaaagatatgtgaggtcttttgctacaaggaggaaaggaagaatgaggcagcttaacagcatggtgagtattttaggaacagataatgttcttaatggggcagtagttcatggcaaaatacaaaacaacttttttctgttctgttacagggccaagtgatccagttctaagtgtcatcttttattatgaagacaataaaatcttgagtttatgttcacttcatttgtttgctgttcatcttttgggagggaataagctagagccatcaatacaattccgcttgtggggaaatttatgcctcttactggtactacttgttttgcattgaagctgactggttgagttcacatcatatgttgcaattttctaatttggcacttcaatcactaggggccttatgaggcagtttgtcattatgcaatggttattggttatcatgtgagtagacacatttcaggctaatagggagaagtcagtaacacattcatagtgaatatgagatgtctttgctaagagttaagtgtcagatctttgttataacagttaatttaataaagaattttggcattgttcttc

SEQ ID NO: 484 - DNA, 10222 bp, Homo sapiens
  source 1..10222: mol_type = other DNA
aaacaataacgtcattatttaataagtcatcggtgattggtccgcccctgaggttaatcttaaaagcccaggttacccgcggaaatttatgctgtccggtcaccgtgacaatgcagctgaggaacccagaactacatctgggctgcgcgcttgcgcttcgcttcctggccctcgtttcctgggacatccctggggctagagcactggacaatggattggcaaggacgcctaccatgggctggctgcactgggagcgcttcatgtgcaaccttgactgccaggaagagccagattcctgcatcaggtatcagatattgggtactcccttccctttgcttttccatgtgtttgggtgtgtttggggaactggagagtctcaacgggaacagttgagcccgagggagagctcccccacccgactctgctgctgcttttttatccccagcaaactgtcccgaatcaggactagccctaaactttctctgtgtgacctttcctgggatgggagtccggccagcggcccctgtttctttctctctctctctctctctcgttctccttctctttctctttctcttctttcctctctctttctctctctccctgcccggttctcttttttcactgctccttgcagagcagggccaccccataggcagtgtgcccaaagtagccctgcccggttctattcagacccttcttgtgaacttctgctcttcctctgccgggtgctaaccgttagaacatctagggtgggtaggaggaatggggaactaagattcgtgccattttttctccttttggggtcgtggatttctcggcagtatctcgagggagttagagagaccataaggtcgctgagatctctcccacctcgcccatgagcgtggcatcaggctggaaggttgacatggaggaactttatacatttacacctttgcgtgagggttgaggctggattagataggtattgaacatatctgaccctcacaatccttatctgtaaattgggattacaaccttttaatttcagggagctgacaaaaaaaatctgaaaaatagttcttatctcacacaggtgagttttcaaggagataacctatttaaagtacatagcacagcgcttgaccattcaactgcgcttacagagcaaatgttcaatgggaaaatgaatgtaaatctacaaatctgaatgaatatgtgtatttttctggagagaggatatttacctttcttcaaattctcaaagggctctgtgatttaaaaaaggttaggaatcactgatagatgttggtaaaaggtggcagtcacagtacatttctgtgtccataagttattcctatgaatatctttatagataaagtcaggatgttggtcagacatcacagaagaaattggccttgtaagtttcatgtgaccctgtggtacagtatgtgtggcaattttgcccatcacggatttttttttattggtatttgcatctgattataaaactaatgcatgatcattgcaaaaaatgtagataaagaagagcaaaatgaaaataaagatttccccccaccgttccaccacccagaaataatcatggtttaaatgttaatatacaaccttacaattgttttctatataaatgaaaacatagatttctttatttcattattttccataaaaaatggatcatgtttatgtcatgtttggctaatggcaagaccctggcacccagtctgggctcaaattctgcctcattgttacttagccctgtgacattgggtaaattacactttttttttttttttttttttgagacggggtctcgctctgtcgcccaggctggagtgcagtggcacgatctcggctcactgcaagctccgcctcctgggttcacgccattcttctgcctcagcctcccgagtagctgggactacaggcgcctgccaccacgcctggctctttttttttttttttttttttttagtacagacggggtttcaccatgttagccagggtggtctcaatctcctgacctcgtgattcgcccgcctcagcctcccaaagtgctggtgtgagccaccgtgcccagccttacttttttttttgagagggggtctcactctgtcacccaggttggagtgcagtggcgcgatctctgctcagtgcaaactccacctcccgggtttaagcagttctcctgtcgtagtctcctgagtagctgggattacaggcacaccaccacggccagctaatttttgtattttcagtagagacgggtttcaccatgttgcccaagctggtctcgaactcctggcctcaagtgatctgcccgccttggcctcccagagtgctgggattacaggtgtgagccaccgcacccggcctcttttttcttttttagtctatcataccttgcaaatacagtggttcttcctatgtgttggttttgatatttatgtaatcaaacacatcagtttttcctttctgatttctgactttggggtcatgctgagaaagtcctttcctacctgaagataatacagtatatacgtttcttactagtatttttgtggatttttaaaatatttaaatctttagtccatctgaactttgttcttctatcagaaatgccacatttaataaataataagtcccatggtatcagatggctggaaggacctctttcgaaactttgtttaattccattaatctgtgtattcttattctaatgctaatagttccacactagcttcctttatcttttttttctttttttttttttttttgagctggagtttcgctcttgttgcccaggctggagtacaatgtcacgatctcggttcaccgcaacctccgcctcccaggttcaagcaattctcctgcctcatcctcgcgagtagctggaattacaggcatgcgccaccacgcctagctattttgtatttttagtagagatggggtttctccatgttggtcaggctggtctcaaactcccagcctcaggtgatctgcctgcctcggcctcccaaaatgctgttattacaggcgtgagccaccacgcccagccttcatcttttaatgaatgtacatgtatgtaatcttttaggtgaactttttgtaatgttgtgccaagttccttaaaaagcccttttggaagctgggcaggtggcccacgcctgtaatcccagcattttgggagtctgaggcaggtggatcacttgaggccaggagttcaagactagcctagccaaaatgcaaaaccctgtctctactaaagatacaaaaattagccggatgcgatggcacatgcctgtaatctcagctactcgggaggctgaggtagaagaatcgcttgaaccggggaggcagaggttgcagtgagccaagatggcgccactgcactccagcctgggtgacagagggagactccatctcaaaaaaaaaaaaaaaaaaaaagataaaaaggaaacctaagtactcttgggctttgttaaggattttgttaaatatacaaaggattgcagggaaaattaacttatttttaatattgagtatgcttatccaagagcaaaataatatttctccatttattcaaatcatttaggagcatcatagttttaacatatgggccttgcacgtatcttaaatttatctctaggcattttaggttgttcagttgttcttgtgaatgggatctttttctccaaataggattattgttgatatctgttgattatgttaactttgtagtttctgactttactgaactgtcttcttagatctaatactcttttcaatttcatcatatatttctcattcctattttgtttggggtttttagggcgggaatattaacgggataagagagacaaaagaaaatctggaaaaacaattcattttaccttacattgcttgtgattactaccacactattactgggttggaaaaaattgtgaaatcccaaggtgcctaataaatgggaggtacctaagtgttcatttaatgaattgtaatgattattggaatttctctttcagtgagaagctcttcatggagatggcagagctcatggtctcagaaggctggaaggatgcaggttatgagtacctctgcattgatgactgttggatggctccccaaagagattcagaaggcagacttcaggcagaccctcagcgctttcctcatgggattcgccagctagctaattatgtgagtttatagataatgttcttgttcattcagaggactgtaagcacttctgtacagaagcttgtttagaaacagccctcatggccgggcgtggtggctcacgcctgtaatcccaacactttgggaggccgaggcgggtggatcacctgaggtcaagagttcaagaccagcctggccaacatggtgaaaccccaactctattaaaagtacaaaaaattagctgggcatggtggtgaacgcctgtaaccccagctacttgggaggctgaggcaggagaatcgcttgaacccaggaggtggaagtttcagtgagctgagatcacgccattgcactctagcctgggcaacaaaagagaaactccatctcaaaaaaaaaaacaaggaaaaaaagaaacagccctcatgacacttagaaagtagaatagctggctgttatctgaacattgaattgtaaggcttatcaggtggactttgcattccatcagcagacaatttttttttttttttttttttgagatggagtctcattctgtctcccaggctggagggcagtggtgcgatctcggctcactgcaagctccacctcctgggttcatgccattctcctgcctcagcctcccaagtagctgggaccacaggcacccgccaccatgcccagttaattttttgtatttttagtagagacggggtttcaccatgttagccaagatggtctcgatctcctgacctcgtgatccgcccacctcggcctcccaaagtgctgggattacaggcatgagccaccgcgcctagcctacaaatgttttgtaatagctcttgaggcccatcttggagttctccttttgctaaaaccactgaactctctaggaggaaaaaggaacttggttcttgacatatgtgtgcatgtatttccatataacctttaggaagctattgcaatggtactataaactagaattttagaagatagaaggaaaatattctggagatcattgaagagaaatggagtccaacactagttaaagatgatgaagacagatttttttttttgacggagtctcgctctgtcgcccaggctggagtgcagtggcacaatctcagctcactgcaaccctccacctcttgggttcaagtgattctcctgcctcagcctcccaagtagctgggactacaggcgcacaccaccacgcccggctaatttttgtatttttagtagagacaaggtttcaccatattcgccaggctggtctcgaactcctgaccttgtaatccgcccaccttggcctcccaaagtgctgggattacaggcatgagccaccacgcccggccgatgaagacagattttattcagtactaccacagtagaggaaagagccaagttcaattccaaatacaacaaagacaggtggagatttatagccaatgagcagattgagggggtcagtggatggaatatttaagaagacatcaagggtagggagcttcttgctaaagcttcatgtacttaaacaagaagggtgggggatgagggaaattgatcagatatcaatggtggcagtattgacttagcaggattcttgctaagaggtcttgctaggacagacataggaagccaaggtggaggtctagtcgaaaagaaggctcatcagagaagtctaactaaagtttggtcaagaagagtctttgtcaaggtaaatctatcatttccctcaaaaggtaattttcaggatcccatcaggaagattagcatggctgctagctttctcctcagttctgggctatagctcacatgcctagtttgaactagctcagcagaactgggggatttattctttgtcttccaacaaactcatctggatgattttgggggtttgtggggaaaagcccccaatacctggtgaagtaaccttgtctcttcccccagcctggaatggttctctctttctgctacctcacgattgtgcttctacaatggtgactcttttcctccctctcatttcaggttcacagcaaaggactgaagctagggatttatgcagatgttggaaataaaacctgcgcaggcttccctgggagttttggatactacgacattgatgcccagacctttgctgactggggagtagatctgctaaaatttgatggttgttactgtgacagtttggaaaatttggcagatggtaatgtttcattccagagatttagccacaaaggaaagaactttgaggccatggtagctgagccaaagaaccaatcttcagaattttaaataccctgtcacaatactggaaataattattctccatgtgccagagctcccatctcttctctttcagttcattaattaattaattaattcatgtaaaatccatgcatacctaaccatagctaatattgtgcacttataattcaagagggctctaagagttaattagtaattgtaactctctataacatcatttaggggagtccaggttgtcaatcggtcacagagaaagaagcatcttcattcctgcctttcctcaatatacacaccatctctgcactacttcctcagaacaatcccagcagtctgggaggtactttacacaatttaagcacagagcaactgcctgtccctgctgctagtttaaacatgaaccttccaggtagcctcttcttaaaatatacagccccagctgggcatgatggctcatgcctgtaatcctagcactttgggaggctgaggcgggtggattacttgaggtcaggagttcgagaccaccctggccaacatggtgaaaccccatctctagtaaaaatacaaaaattagctgactttggtggcacatgcctgtaatcccagctacttgggaagctgagacagaagagtcacttgaacctgggaaacagaggttgcagtgagccaagatcgcaccactgcactccaccctggatgacagactgaaccccatctcaaaaaattaaaataaaataaaataaaataactatatatatagccccagctggaaattcatttctttcccttattttacccattgttttctcatacaggttataagcacatgtccttggccctgaataggactggcagaagcattgtgtactcctgtgagtggcctctttatatgtggccctttcaaaaggtgagatagtgagcccagaatccaatagaactgtactgatagatagaacttgacaacaaaggaaaccaaggtctccttcaaagtccaacgttacttactatcatcctaccatctctcccaggttccaaccacttctcaccatccccactgctgtaattatagcctaagctaccatcacctggaaagtcatccttgtgtcttcccctttatttcaccattcatgtcctgtctatcaacagtccttccaccagtatctctaaaatatctcctgaatcagcccacttccttccatcttcactacatgcaccctggccttccaagctactatcggctctcaaccagactgctgggaccacctgatctctctgcttccactctgtctcaacccccatctattttccaagcagcactagagttatcatattaaaatgtaaatatcagttttttttttaaagaaaaaaaccctgagacttaacagagttataaaaaatataaatgtcatcatcagttccctgcttaaaacccttaactcgcttccaattgcacttggaatgaaaccaaactgcactgatccagcccttgcctgcctccccaaagtccaaggggtcatggctctttccctggctacactggttttctttctgtccctcaacactgcaagcctattgctgccccagggcctttacacttgctttttttctgcctagaacagttcttccccaaagatttttaaagggccgggctccttaacattgaagtcgcagaccaaacgccacatatgcagacagttcttctctaactactttaaaatagccctctgtccattcattcttcatcacattaacctgtttaattttcttctcagagctccacactatttggaagtatttgttgacttgttaccatgtctccccactagagtgtaagtttcatgagggcagggaccttgtctgactttgactgtatctctcgcatatggttaagtgttgaatagttatttatggaatgaatccctattattccctcattatctctgcaaaatagtcttttttctcaacatcttaaacctgatatcccacctgcctatctacaaactttttttttgcgacagagtctcactgtcacccaggctagagtgcagtggcgccatctcggctcactgcaacctccgcctcccgggtttaagcgattctcttgcctcagcctcccagtagctgggattataggcgtgcgctaccacatctggctaatttttgtatttttagtagagatggtttcaccatgttggccaggcttgtctcgaactcctgacctcagatgatccacctgcctcggcctcccaaagtgctgggattacaggcatgagccaccgtgcccagcctctacaaactttttattccattaacaaactatatgcctgggatttaagttttcttaatacttgatggagtcctatgtaattttgcagcttttaattttactaagaccattttagttctgattatagaagtaaattaactttaagggatttcaagttatatggcctacttctgaagcaaacttcttacagtgaaaattcattataagggtttagacctccttatggagacgttcaatctgtaaactcaagagaaggctacaagtgcctcctttaaactgttttcatctcacaaggatgttagtagaaagtaaacagaagagtcatatctgttttcacagcccaattatacagaaatccgacagtactgcaatcactggcgaaattttgctgacattgatgattcctggaaaagtataaagagtatcttggactggacatcttttaaccaggagagaattgttgatgttgctggaccagggggttggaatgacccagatatggtaaaaacttgagccctccttgttcaagaccctgcggtaggcttgtttcctattttgacattcaaggtaaatacaggtaaagttcctgggaggaggctttatgtgagagtacttagagcaggatgctgtggaaagtggtttctccatatgggtcatctaggtaactttaagaatgtttcctcctctcttgtttgaattatttcattctttttctcagttagtgattggcaactttggcctcagctggaatcagcaagtaactcagatggccctctgggctatcatggctgctcctttattcatgtctaatgacctccgacacatcagccctcaagccaaagctctccttcaggataaggacgtaattgccatcaatcaggaccccttgggcaagcaagggtaccagcttagacaggtaaataagagtatatattttaagatggctttatatacccaataccaactttgtcttgggcctaaatctatttttttcccttgctcttgatgttactatcagtaataaagcttcttgctagaaacattactttatttccaaaataatgctacaggatcattttaatttttcctacaagtgcttgatagttctgacattaagaatgaatgccaaactaacagggccacttatcactagttgctaagcaaccacactttcttggtttttcagggagacaactttgaagtgtgggaacgacctctctcaggcttagcctgggctgtagctatgataaaccggcaggagattggtggacctcgctcttataccatcgcagttgcttccctgggtaaaggagtggcctgtaatcctgcctgcttcatcacacagctcctccctgtgaaaaggaagctagggttctatgaatggacttcaaggttaagaagtcacataaatcccacaggcactgttttgcttcagctagaaaatacaatgcagatgtcattaaaagacttactttaaaatgtttattttattgc

SEQ ID NO: 485 - DNA, 12660 bp, Homo sapiens
  source 1..12660: mol_type = other DNA
aaaatcccagaatcccagggaccaaacagccaatcctttgctgggatttggcggcatctagtggcagactcgagaggtataaaccttactcacagaactttctggaaaattaacagtgcgtatttgcctgaagaaggtcagtgtgcttgcttggagatcaggacgcaaaggtaagagcgcctcagtcgccacagaaatccggagtccctaacggaggggaaggctgtcgtagatagatattctcacaggaaaattgtatttgtgccaagagaactgcacgcaaccttgaagggagggggtaggtgtggaggaggggagggaggacgatactagagaacttgaaagaagcctccctttggagttgctaatgcggcgatggaagggtttggctctgaatcattggagggctgtggtttacgataggattttggcacggaggaaaacgtaggaagtgtatttttaaagtaattaaatcagtacggaaagccaaaatatttctgacagtgcccctttatctgttattgtcgcctttccttaattatttattttccttttcattagaacattttcaaatataacacagaaatagataacaacctgcgcgcagtagcaaacccctccctgcaccgcccccaccatcacgcacgcgcgcgcgcccgccgtggctctcaccagtcccgacgccaggggcgcacgcctgcgcaaacacagcacctcccgagccacgagggccgctcacacagcaaccccagcaccacgcgagcctgcccgcgcactaacacactggccttaatgccttgcgcccgttgcactcacgaccctcacttgcaaacacagcagaacccccactgcgccttttttttccgtgttcggggagttgcgccacaggactgggggcgtggccccagatttgacctcgcgcttccccactcgcgggaaccttagctcatttccgcctatcctatttccgcaggccacgtagacacttcctctcccagtggggggggaaaaaaaccacaaacccataatgcctccctgcaggaaaaaaaaaaaaaaggaaaaggaaaaaaaaaaaccctctggtcagaggaactctgggtcgtgaaataggccacgtgaacattctgccctgtagacttatgacccaacggctgtcacgcttttggagggcgggctaaaaaaaaaaacctaagagggcgaacgtcattggccggaactcgtactaacggaggaagaggattggtttgctgtagaccttaacagtgaagaagcaggttgctagcacccgcctttactgcggcgaagtgtcattgctgacgtgggggtggttgtccaatcatttgattatggaacattctaaaacttagacaagacgattgtgattggctgaagggcatacgccctcctccagggtgacgtgtctgcctatggatatcagttgccagagaaacctggctttactatggcggttggaggaacggcagtgatcacacgtcggctgctgggaagatctggattctcgtttcaggtttcggggtgggggtggggagaaagggtcgatgatttccttttttcgtcgggtatagacgggattacctagtgccttcacaatcggtcagagctggattcagattcctgctcgccaacgcccagcttgggcaaggctcctgttctttctgtgtctcggtttccatgtttgtaaaatggtgataataatagtatctacctcagagacgtgtactgtataatagtgcgtataaggcacgtaatgtgaagcctggcccctgaagatattagctattgttatggagataaataatacgcgtaatagaatgagaaaaattataaattatataaattcgctaattgtagtgccctttctgccatcaacttctttcctagaataaattaaagataaaatagatataccaatttttaccaatgaaataatttgttatttgggaattgcctcaaaatagcagagattgtaattttcctatattgaaaagttaaataaaaggtggggggggggggagtgcaagaaagaaagagatggagaacgagagcgagctggagatgaaccacatgcgatgagtaggccttgtttggatcctgaatcgaacacaccaactgtaaaaatatgtttaagacgcatcgggaaaattgggacacggattcgatatttgatgttttttagggaattgatgtcagtttttttaggcgtcacagtagtattgtgattatgttttcaaattgtccttttttgtagagacatacgaaaatatttacggattaaataatgtctgggattggcttctaaatacattaatgactaggatttgcttcaaaataatctcagcggtagggggaaatggggaggggtatagatgaaacaaaattggccctaaattaataatatttttttgctgagtgataggcagtgggttgcgtatattaatctgctttccttggtatacgtttaaatttttctataataaaatacagaagtcagatattccggtgagcttgaaaaagtcgggggtgggggggagcagtgggtggggttatagatgaaacaagatggccttcagttggtaattgttgaaagctggatgatggattcgtgtaggtttataatactatttcttttttatttcatccatttgaaattatatttaaggaaagttaaaaaacaaatttgtcagaaattatacaaatgtacaataaattaaatttgaaaatgtggccacaagaaaggaaaaagaaacacttgtacattatttatcagctttggtgtcctttgtgtgtgatgaaattgcattggctgatgtagaagaaagccatatctcatatctttttattttatgttctttcttgtccttttgtttgaccttctaggtcaccatcagaaaagctaagtttgctgtatagtgaggatcaggagatctgatcctgattgcagaaccttccctgattacagaatcttgggtaagtgcctcccttctgtcctcagttctcaaacaggataataccacataaccttcctaactgtccaggaatattttgaaaattaataagctcctatctgggaaagtagtctaaattctgagaagggaagggtggagctaagtccattgatagttccagtatagaaagtgcataagcaacagagggctttgtaatcttacatcccttgataaaagatactacagtcaatctcctgtagtagttccacagttccatagattacatttttccttggagcatcctatatgcagcatagtttagtggttaagagcaaatacttcctgaatttaaatcctggctctgccacttaactatgtgatcttgggcaagatatttactcactttatacctaagttcctcgtatatgaaacagaggtgataataatagttcctacttcataggattgttgagaggattacatgtaaagtaccaggacagtgcatggcacatgtaagtatttgctttaataataattatggttctgttagtcctgataatctcatgttttatctacacatttacacctacttctaaaagcagtggatatatttctttttggaattgtgtaaaaaaaaaataataattaataccgttggtttctctcctcattttccagaagcagcagttaccactagaactgaattccgaaattatgacttctggcttgtcttaacaatctagaaaggtttcaaatatattgatcatatttatttatgagggaatttccaggagctataattttagctagcagttcaaaccaaatttataaataagcaaatcttttcactgaatattcagtctgctaacagcttttgtatcattcctcctttgtctcagacttaaaaaaaaaaaatctattacatgtaatggaaatgtttcaagatccagaagagaaaattgatatgaatgtaactgatatggtatatgtgcatttaaaggtttattccaacaaaatgttactcacactcttttctgacacatgcatacacaaaagatgttagcatttgcagtctgattcccaaatggcccattgcttgtgtggagagatgaagtaggatttgaaggtttttcagccttttgacagctacatatggagtcactgtaatttccttttttttctctcttctgaaaagtaggtttcggaggagggcactgccctcctggaagagatgcattagatcggtaggcacagaatacctttacatgagaccatttagagaatgattaggggccaaaggtaaggggtggactgttaagccaacagggactcagagaaagcaagggtcagggtgaccagaaatagagaaaaaaaagcctcacagaggaagaggacctggacctgagccacagaggatgggtagaacttagaaggagggaatgagcccagtctgaatgatatgtctacaaagtatacaatatgcaatgatgattaactgaaaaattgggctggccatttgtgagatccatgaataaaagtagatcagaaagtcagtgtgagttttaaatatatatattttattataaaacgttaatcacataatatgtgaaatcactattgataaccttttctattggtcctagtgttttgctatttaagataatactgcatcaaatattcttagtgtagccatccatttacaagtgttattttcaagagcaaaatttatgcctttaaactgtgataattaaattaatactggtgagaactatcagatataccactgtgacagaacagatggcctagagacagtgatacctttaaaagttaaataattgctgagcgcggtggcttacgcctgtaatcccagcactttgggaggccgcggtgtgtggatcacggggtcaggagttcaagaccagcctggccaagatggtgaaaccccatctctactaaaaatacaggtgggcgcctataatcccagctactcaggaggctgaggcagagaattgcttgaacccaggaggcggaggttgcagtgagccaagatcgcgccactgcactccagcctaggtgacagcgagactccgtctcaaaaaaagaaaaaaaaaaaaagttaaataatcaaaaatcattcagaagagagtaccttaaaagacccatatacctctgagaatttagaatgttacaaaaccgtatttcataccaatggggaaaggataaactcttcagtgacgaatattagaaaaagttagttatacatttgaggaaaactataaaagtaccaataatgagtaggaaatcacttctgcagtatttttggagcattttccttaagcatgacataaaagccaaaggtcacaagggaaaaaactgatagatttgtctgtgatattgagagatgtatgcacatatacatacaacagtcatagtaagacaccgttagacaaaagaaagtgatggtttggaaaaaaatttccaacataaaataaaactaatatttaattattagaaaataatagcaaacaacctggtagaagagagaacaaaaatattcatatacgataacgtgaccattgaatgtgtgaaggatgatatcacacaaattcaaatgaaattatcttactacatgttagattggcccaagaaaagtcgctctcctttttttttcaaaaagatgtttttccagtgttcttgaagtcatgaaaaaatgaacttttatatttttgttaggagtacaaattaaaacagttctttgtgaggtgaatttggctctatctcatcaaagttataaataagcaaatcctttcgctaaatagttcctcttggaatatatccttcagaggtacttaactaatgctctaatatttgtatacactgatgtgcattgcagtatttttgtaataatgaaatattgggaacaacctaaatgttcagagactggttatagtacataacattatagaatgtgttatgaatattaaaaagaagaggtaggtatgtactgacatggaaagatgcctatgagaagtgagcaaagcaaggtgcagagcagtatggatctcacctttgtcaaaacaaattaaataaatgcatgctatatattcacatacctatgtgtataatatacacattgagtctttaaagttacattttatgtgaatgtacatgaaaagatttgaaggcatacatgctcactcaggatactcctaggattggggtgggagagggggaggtgataagggaagaatgttcacatctttatataatttgttatctatagttataaaaaggaaatataaatggtaccacaagatctaattacttgaggtgaacgaagattgtcagttcatgacttgcaaactactagatggattaaggagttataaaagaaatctatcaaagtatttgttcttaatttttaaacttaaaaatgaaaggaaaaaaaattttttaaatgatccccagtactggtcagagcatgaggcatagtaaatatttttacacactgcttgtgggattagaaattggcacaacttgtgcagagggagtaatttggcagtgtattgagagtgttctatctcttgactcactaagcccgcttctgagagtcttaaaggaacaaaaggaagcgagagcaaaaaaatgtttacacaaaatgttttcattgattattaaagaatatattggtgggaggtgtgcactggatatttccagggaaggagtggctaagtaaattaaggtatgctcatttgacagaatatctattatatgactcaaaatggatgcatataataaccttaacatgggaagattattggttatcatagtaaattttttaaaaggaaaaatctaagatttgatagcccttatgagctcacctctgtttaaatgtattatttatacagagattaaactggtgtaaaattaaagatagaaaactaagacaaacataagtacaaatgtgttttctgaatttctggcttaccctagagctgacctgtagggaacaggtggcaaaatagttggtgactgttgtccctaatttgtgccctcattttctccatgtgttgagtcacagccccctccaccccaattcacaattatatacccaccagggaccaatgtgacttccagaatggtttttgtccagcttggctctacttaatgtgttttacacagtctggttggcactaggtcatgttgctttctttaggtggtattttcactatcatccctttgttttatggaacctctgcactatgagccccaagatgggctttctggatttactcatgcaggttcagtaaccctaatctgaaatgctccaaaatctgaaactttctgagtgccaacatgccactagtagatgattccacatctgacctcatgtgacaggtgcaaagaaatgtttaaaatactgtataaaattaccttcaagaccatgtgtataaggtgtatatgaaacataaatgaatttcctgtttagactggggtcccatccccaagatattctcacacatatgcaaatattccaatatctgaaacacttctcatcccaagcattttggataaggaatactcaacctgtattaacaattctctgaagtcttcagatactgtatctggtctgtcctggtcacaaagcaattcttttagaaacattattctggaagcatgatagcttacaatttaatgccatgatacagtggccactatcaccactgtctgatccttcacaggatgtgtctccgtgtccctctcagccagaaggtttctgattcccacagggatcagtctccatatttacaaattttgatgctttctgaagactgactttacccttgaatttctgctcaaagctttgtgctttttcagttagaggatattgtttgcttagtgaaagtactagcatccaggcctttcttcccaataactggctttcctggttcagggatctagtcttcaagcatgcatgcatgcatatttatttatttgtttgtttgtttgacagagtctcactgtcacccaggctggagtgcagtggcacgatctcctggctcactgcaacctccatctcccaggttcaagtgattctcctgcctcagcctcccaagtagctgggattataggtgtgcaccactaagcctggctaatttttgtgtttttagtagggacagggtttcaccatgttggccaggctggtcttgaactcctgacctcaagagatttggccacctcggccacccaaaatgctgggattacaggcgtgagccaccgtgcccggccttgttttcttttcttttctttttttttttttttttttttttttgcccacaggtgctactaacaaacatttcttatctctgattttcttctcagagcctccctgacacctgcctacagtgttaatggctacagaatggctgctgggctttttctgtgggtgaaagttgtagttactagagaaacctggtttaaggctagtctacaatcatccctttctcagaggttaccctgattttaacaggctgatatttatctgtctagatatttccatgcatatttatagacatctgtttaaaacacacacacaaatgacagcacactcttcctaaaaactatttcacactaatgcttatttctctacctgtactatctttttttttttggagatggagtctctgtcgcccaggctagagtgcagtggtacgatctcaatctcagctcactgcaacctctgcctctcgggttcaagcgattctcctgcctcagtctcctgagtagctgagactacaggcgtgcaccaccatgccctgctacttttttttttttttttttttgtatttttagtagagacagggtttcactacgttggccaggctggtctcaaactcctgatctcgtgatctgcctgccttggcctcccgaagtgctgggatcacaggtgtgacccactgcgcccggccttatctgtctctttaagatcctattgcatttgggatcctgtagtattatgccactgcctatttacctaataatatatattgaacatctttccatgtcagtacacagatctctgcttaattcatttgaatgttcttctgtagtattcatacataatttatgttatcattttcctgttgaagaataggtaggtgttttccagttcttcagtattgcaaacaccactacattgaacatctttgtatccatgtgcaaatattcccgcaacatactgtgctagctgttcagccacatcacctttatgaaattctcacaggaacctgtgaaggctataggtaatttgccacattccacagatgagaaaaaggctaagagagcttacatgtcttgcctgaggtctcacaactcataaatgacggagcctaattgaagtaaagatctgtctgacagcagaactcaagtattttctctgataccacgatttacaattgtggtatatgattcatatatgtgtttaaatgtaaacatataaaccacatgtttataaattactcattttttttctttttcttagatgatttcacaaaagttcatcttcattgcagatacctgcctttctttctaggttgtatctcccacttcacccttctagaccatcccagaagatctataagatttcatctgggaaatcactaggagttcttggaagggaaagaaggaagattgtgtaagtcaaaggaattgtttcctctgtcacaccataagaataatggaagactattttttgcatccttatcttactagcactccctgctgcactttacactgtagattatacctttttcttcttggaacgctcatcatctttggcatccaaaataacattcttctaattctgttatggctactcttaacatttttgtttcatttgtggtctctgtgcatcccttaaatgcctttcgtccttaggttttccagaattccatacttgaagttcttcctctcttctccctgatttcattggccctcgtagtgtccactaccagctatgtgatgttactctcagatctccatttctggcttttacttctcacccgagctttatttttttttttttgttttgggttgtggggtgggtacccagttagctggacaaaactgagctttacaattttatgtttaactgtacatctcacacacaataggcccaacacaacttttcctccaatccattttctccacctgtaaatggaggagtattatcatttggtgataatactaataacctaatcacccatacctgggagtcatcactgactcctccctcaccaatcttttttttaccttcttaaacaatcactgacagtggtgtcatgtaccatttcttgtgtctgctcccaaactattttgtgcctataactgtcattatactaaccttatcgttttataattgtcactttagatatttggatctctagcaactaccatagtacttgtcccaaagcagatatgcagtaatgtataatgacaaactgaatagattaatgaatggatgaattacctatgttctgtcattttatttctgattccaaactaaaccctaaattcagtgctttcattaagttcattaattacccaggcttgaaattgcagattcctccctcctttggttactatattcttcatgatttctgtattcttcagtttctcttgactctgtcatcatcctaattcaggcctttctggactaatacaagaacctttactgttactcattttgcccttagtcaattaaatataaccttccctattccatattgtcatttctcctgttcaaaagtcttaaatttcaactccactgtcttttatagtttttcatttaattccttctttcttgaaaattgctttcctatcttgtgagtggcatcaacagagtaatttatgggtagttgtgatgagtatttgggtgagatgagagtagtggctggtagtgaggatcagagagagggaaaggaggtaaaaaaataaaaaatcacttataaagggtcctgaaataggatttgaaatccagattttaagggagttagaatgtgttattctctgatgggcctttatgaaacatagttaaaggttgccatagaaaacaaccaagtaaaatattttatatattacagtggttggaataaaaacagggttgaatgagttccagaaagcagggttctcaacctcgtggacagcaatctgcagaagaagagaacttcaaaaaaccaactagaagcaacatgcagagaagtaaaatgagaggggcctcctcaggaaagaagacagctggtccacagcagaaaaatcttgaaccagctctcccaggaagatggggtggtcgctctgcagagaaccccccttcaggatccgtgaggaagaccagaaagaacaagcagaagactcctggaaacggagatggtggcagtaccagcgaagcacctcagccccctcggaagaaaagggcccgggcagaccccactgttgaaagtgaggaggcgtttaagaatagaatggaggttaaagtgaagattcctgaagaattaaaaccatggcttgttgaggactgggacttagttaccaggcagaagcagctgtttcaactccctgccaagaaaaatgtagatgcaattctggaggagtatgcaaattgcaagaaatcgcagggaaatgttgataataaggaatatgcggttaatgaagttgtggcaggaataaaagaatatttcaatgtgatgttgggcactcagctgctctacaaatttgagaggccccagtatgctgaaatcctcttggctcaccctgatgctccaatgtcccaggtttatggagcaccacacctactgagattatttgtaagaattggagcaatgttggcctatacgccccttgatgagaaaagccttgcattattgttgggctatttgcatgatttcctaaaatatctggcaaagaattctgcatctctctttactgccagtgattacaaagtggcttctgctgagtaccaccgcaaagccctgtgagcgtctacagacagctcaccatttttgtcctgtatctgtaaacactttttgttcttagtctttttcttgtaaaattgatgttctttaaaatcgttaatgtataacagggcttatgtttcagtttgttttccgttctgttttaaacagaaaataaaaggagtgtaagctccttttctcatttcaaagttgctaccagtgtatgcagtaattagaacaaagaagaaacattcagtagaacattttattgcctagttgacaacattgcttgaatgctggtggttcctatccctttgacactacacaattttctaatatgtgttaatgctatgtgacaaaacgccctgattcctagtgccaaaggttcaacttaatgtatatacctgaaaacccatgcatttgtgctctttttttttttttatggtgcttgaagtaaaacagcccatcctctgcaagtccatctatgttgttcttaggcattctatctttgctcaaattgttgaaggatggtgatttgtttcatggtttttgtatttgagtctaatgcacgttctaacatgatagaggcaatgcattattgtgtagccacggttttctggaaaagttgatattttaggaattgtatttcagatcttaaataaaatttgtttctaaatttcaaagca

SEQ ID NO: 486 - DNA, 8917 bp, Homo sapiens
  source 1..8917: mol_type = other DNA
gtcagaggttaacggaaaacggaagctggctggctgagaagaagcttccgttagtcctaccttgaagagaaaagagccagataaagagaaagattaaaagtatgagaaaatacagaagccactggtctcagggagacagagaaggataccaaagaagaagtaactattatgaggggccacacaccagccactcaaggtaaaactacgacatctaattaatttgccatttaaatcagaagtcattggcggctttgggatgagaggtttttaaggggtgttggggagcaaagccacattgccatgacagttatattgcttgagtttgaatctcaactagtttgtgaccgtaggcagattttacagtcttagctgtaaaatgaagatgataaaataatagcaattacctcagcattgttataataagtgaatatatgtaaaactgattagaaaagcaccttacatatagtcagcactcgacattttagttattgttagaataccttgcagaataaatagcccttaaaagatggtgaatagcactgtaaacttaatttttgttggtgtccgtgagacattttaaaatgccagaatggagaaaccagatgaacttttcctgttcaatgtggctgggttaaaatgaaatagtaattttaggcatactgccaaaacgtagtaattcagtgaggatgatccttccagaacgttccagaatgctaaattgttcactagtcacgcacgcctttccccaagctctgcccacttatcctataggctacggaatagtaggtctcctcgcatttctaattggtcttcagagggctttggctccgcctcctggggcaaaaaagtccctgtaattgaacactttcatttttgcttgtccccaggcttgtcgttagaaaagtaggggactttcctgttgagtatcatgtttacaaaagcaaagtggcttttaaattttaaactaagtatcaaacaagtagataaggtggatgggagggatcttcaggaactgaagggaagtggaacttaaggttggaacatcggtgtgcttttaacgacggaccgagctacttccgggagagaatgggagggtggaaaattttgtgcgtttggcgggtttcgctctcttcataagtattgatcattccgcagccctgcggaccggacacgtgaggaggtagtgacgccgacactgccagaacacactgctacaaggtcccagatggccacgtctctggtgagtgcctgggccgtggcaggacggctgggcgccggactccagtggctgagaggagggattccggggcggtctggctgctgctcacgtggataggtgacgaatcacgtcccggctctctgcactgcggggcggggcccacgctttgctgcccgccctgccggccccacccccagcctggttagcagtcgctttctgatcccggaaaggaccctgagctgggaaatagcgagaggcggggatgttggggtttgttgtttatggcttgcagtttctttctctcgattatcttcctctctaaaaatcactttcagtcacctgacaaagaaactggcgattcattgttcttaatttagtaatagactgggccccgtacatgaatgagaaggaaggtattccttaattctccggcacgaacgccaacagcgttgctttcttcggtgtcacagttcttaggcaaacagcagtgaatatttacgcaatgtgggaaagtttcctaagtggagctgccggtttttcaagtagttgaactactttcgtgtgtgtgtgtgtgtgtgtgtgtgtgtgtttcccattcatcaactttggagtttggctctaacacctcacttgaaaacagaaaacaatttcctagcttattcagtggcagtttttgccgctctctctccttttctaaggttcaggtggtgtcattttcattgccgtgaatgtttgtaaaatattgaaagtctaaagtgcttagttgccaagaaaagattataaatttatatgtggagactgaaaaagactcagattcattgagaagattatgtcctaaagacatgcacttaaaattagtgaaaaattttaaaattgcaaacttcagagtccggcctttaaaatgtctgaatttatatgaaagaatgtggactgtatatagagctacatagtggttgaaataaatcatcagcttctgtcagtggttttgtgtttgtgaggggttgaaaaggttggtaatctatacttctggaatttttcttgtaggattttaaaacttatgtagatcaggcatgtagagctgctgaggagtttgtcaatatttactatgagacaatggataaaagaagacgggtgagtgttatagactctactactctttatagactactactctttattaaataccaggttgtgtctggagccagcgtttcatctgacttgcataagtggtaactgtggatttactctttaaaagcaaattgctcagggaaggattggtatggcattagtgggaacatgggctctggaatcatatcccaggtttacttttacctagttctttgacctggagcaagttgccattttcccttaacctcattttattttcaggttggtaagtatgaattaattaaaataccgcacttaacattaggcccagcatattttcttaaatatgtttccttttcttagttccatcaattaaccaatatggttaaggtattattagtgctaatgaaggggtgggtcattacggggaatatttcctgattcgccccttttatttcatatatttatagataatttctgatcatggctcaaaagtatagcttacacccacaaaaagtatgcatgtagcatggataatattaagtcctcaacagaccgagatttcatcagctttttcattgcaacttatccctgcaccatatcttttacgtaattatgtcagtatgtggtcaagtgagtcttgcctaggtctcttaccagcatagaactgtgctttggagaactacttctgtcctgcagctgcaaaagttaataccctatctctaaaaacctattttttatataaaacccatttattaagcataggattttatatatatatatactttaagttctgggatacatgtgcagaatgtgcaggtttgttacataggtatacacgtgccaaggtggtttgctgcacccatcaacccgtcatctacattaggtatttctcctaatgctatccctcctctagccccccaccccctgacaggcccaggtgtgtgatgttcccttccctgtgtccatgtgttctcattattcaactcctacttatgagtgaaaacataactgtgtttggttttctgtccctgtgttagtttgctgagaatgatggtttccaacttcatccatgtccctgcaaagaacaggaactcatccttttttatggctgcatagtattccatggtgtatatgtgccacattttctttatccagtctaacattgatgggcatttgggttggttccaagtctttgctattgtgaatagtgccacaataaacatatgtgtgcatgtgtctttatagtagaatcatttataatactttgggtatatacccagtaatgggattgctgggtcaaatggtatttctggttctagttccttgaaaaatggccacactgtcttctataatggttgaactaatttacattcccacccacagtgtaaaagcattcctatttctccacatcctctccagcatctgttgtttcctgactttttaatgattgccattctgactggcgtgagatggtatctcattgtggttttgatttgcacttctctaatgaccagtgatgatgaggattttttcatatgtttgctggccacttcttcttttgagaagtgtctgttcatatcctttgcccactttttgatggggttgttttttcttgtaaatttgtttaagttcctgtagatttggaaattaatagattgcaaaaattttttcccattctgtaggctgcctgttcactctgatgatagtttcttttgctgtgcagaagctgtttagtttaattagatcccatttgtcaattttggtttttattgccattgcttttggtgttttagtcatgaactctttgcccatgcctgtgtcctgaatgatattgcctaggtttatggttttgggtgttacgtttaagtgtttaatccatcttgagttaatttttgtataaagtgtaaggaaggggtccagtttcagttttctgcatatgactagccagttttcccagcaccatttattaaatagggaatcctttccccattgcttgtttttgtcaggtgaaaaccaattttttaaggcaaaagataaaagaagtttcttgtactgatatttgatgtcagggaaaagggttgtgacaatggatgtttattgtgccttgccttgaatgtgtattgtaccttactgctttcaaaaaataaagtagaaaaaaaaagacaacattgtttattaccagtgtcaatatatgtgttgacctttttttttatttttatttatttatttttttttgagatggtgtctcactctgtcacccaggttggagtgcagtggcgcgatcttggctaactgcaacctctgcctcccgggttcaagcgattctcctgcctcagcctcccaagtagctgggattacaggcaactgccaccacgcccggctaatttttgtagttttagtagagatggggtttcaccatcttgaccaggctggtcttgaactccttacctcatgatccacccgcctcagcctcccaaagtgctggtattataggcgtgagccaccatgcctgcctggccttttaacccaagttacattatagaattaagctaatagtgtgtcttgtgaccccagagttttaactgtggaatttctgcctcatttgggccttaacttatttgacttatcgaagtctctgctttagcaagtactcatgattcttttgaactaagtacactaatagagtagtactatagccgagcatggtatgacatgcctgtaaccccagctacttgggaggctgaggcaagaggatttcttgaccccaagagtttgagaccagcctgaggcaacagagcaggaccctgtctcaatttttttaaaaaacagaataatttttaagaaaacataaacctcttctctaaaaagtgggagtagtgaactaattctttctaacacatgcaaatattaaatgtttcatatatatatatagccactagcattaaagggtacaggtagggcttgatcaaaaactttgttaattctcataattacaaaaggaagacacactaaaactggcttggggctgcatttgcttggaatttgtgatcatttaattcatttgaatacagaaagcagaacttaattgggtggaaggttttattgtgtctaaagtgaaatatgaaaaaatatattttactgcctagtttataaagagtaaggtgatatttatttaaggccaagattataagacagacgttttgttcacatgggtttccagtggagatggagcaaggggagtggagatgaaggtagaactacaaaaaatgtttatataccatctgtaatattttaatccatttctataaaatgtttatctagaaacagaattatttcccttttttaaatttgtctttctttttaggcactaaccaggctgtatctggacaaggccaccttaatatggaatggaaatgctgtttcagggctggatgccctaaataatttttttgacacattgccttctagtgagttccaggtcaatatgttagattgccaaccagttcatggtaagatcatgatctttcaagatgcttcctttgttttcctctagtaagcactgagcttttacaccaaaagcagcgagaaacttttagtggtagaactatttacttacttgagcaagttaaatattatgaaaaatgtaactgtccagtcaaactttggtcttccttcagattctttccactagtagcttttgatggattatgtgattttggcttattaaaagttgtatgaaaagttgagattaatgtgatttttgtaaatggcagggaaagattatctgatttctctaaatagttgcctgctggaccctgaaatgtctccagagtaaaattataccatatctctgattaatgtgttcagtatcttacaatctactaatatttcacagaaatttactctgttatgtgaaaggatgactttttacaagaaaatttgattccaggtagattgatacagtttaataaaacctctaggtggggtcctaagtgtcttaaattgtagttcagggtgatttttttcctttataattcctgaaaagaacaatagtttaagaagcaaagcatgaataagctctgttagaaacctgaaatattaattctgaaatatttatatatatatgaagcaaatggtcctatgctagatataagctcctcattttgaaactagagtatcccaaagttttctggactgaaaataattttaatatcttttactaagtacttagttttctgggtttgagtatgcatgcttaagattatgctcaagggacagaaagtgtatgaaaaaaattttaagcattagtccataaacaatgtattttaagcctgaaaatctgcttatttagagatagaaaatgatgtgttctcttttttttttaatgtggatgaagagcaagcaactcagtcccaaactacagttcttgttgtgaccagtggaactgtgaagtttgatggaaacaaacaacatttcttcaaccagaacttcctgctgactgctcagtccactcccaacaatactgtgtggaagattgcaagtgattgcttccgttttcaagattggtctagtagttaaaggggcaaaagtccattctcatttggtccattagttccagcaattgaaatttatgtgaattattttgattgtagaagcactataatatgtgctgaaactaaatttctttaatattttctattcctgtcagcaccttttctagcagctgccagtttggagcattgccctctaagagctttaaaactatttttttacatgccttatatacattccactaatgacattcttataataatattaaacacatgatcttggtactaacatactcactgtgaacccagcctattgcaaaaataaaatctttttataatattatctatgggatgtcagcacaatataacactctgggaagaagtggagttttttggttattaggttaattttctagtaaaacacgttgcctgttttcagttaacactggtaatgccattttaatatatggctttttcaaatcagttcagtgaaaatagtacagatttaggtttacataactactctgacatactggaattgcatatagagatgttcagtggtcgtttttcattttaagtaatttttgttttggcatttttttgtgtgaagtaaattaatcaactagagaggtgcaaaacgttctcagttgatatctgagtattgggtgcatttggtggcttaaaagcaaagcttcctaaaaagatttttcttggcagctccaggtctatacatttaggtaatgaatggtagtagaactaatagctttaacaggagaatagggaatgagaaatagaaatccaaggctgaagccaaaagtaaggagggtggccaaatggtaaactattggtacttgttttctacctcctaaaaatgtagcttatttttaggatttaaatcactaagtaaataagtatccttgccaagtgatcatgagtgtcatttttgttctaagactaatatttttagatctttttacttcacctcatacttatcaccaatgtatatctccatttattcaataacttactggggtaaaataacagcaataaacctaaccttttaacagggtctaacatgagagttggagtcaaagccattgttatcttttggtgacacccttaaattttaagtcttccagtcttccatgtgaactttaggcccaaagtttcttatgtatcacacatcccccaaataagtgattttttcccagtgctttgtactgtcaactgcattatctttaattatttaaaggtagaattatttaattttgtgatttgttcttccatatgacattgagcaaatagatctgtttcaaaatatgttcccgctatgtggataactcttctttttaaaaagaaaatagagaatagcaaatcttcatgataatcctcaaaagaacaaaatgcttaactttatctcttaatttctaaaggtaaataacctaggttcagcttttgcttaaacattaaatatcttttccattttttaatgtttgtaagctagatatgccagctttgtttctacattgcaaccaaaaactgtttcttttcacttaattataaaaccagtaattcatttactcttgcccaaaactatacactgtatttctgttatagtaacaaaatagagttatgtagaattgtatggaactcaaatttaaaccatgctttcttgtagtactgattgaaacttacacgttttattctactcatagtgagcttattcttattttggattgattttccaaaaccacagcttcagcagcaacaatcagaatgtccaaatgctgtcctttcccttacagagaagaacaatggtaactaaaagctgcatataactagcaataactacattgaacggtgtgcattgttcatgattgttgtgttttaagacttgtatataaactgctttttccaaactctgtataacttttaaatggctggaactactcgtataaggactagactgtatttttgacatgctcctatttttgtaacttgaaaaaataaaattttgccttgtgacagattttctcaa

SEQ ID NO: 487 - DNA, 32742 bp, Homo sapiens
  source 1..32742: mol_type = other DNA
ctctttctctgggctaatcgtttagaggacagtcgctcctgccaacctaatcccatgagcctgactaccttgccgggccacaggctcaaagaagcagtgtggctgccagcaccctcacggtaaggggcacggaggcaccaggcagtctggcaggatgagagacatcctgggggtggtctgagtttggatgtgggctgagaagacaaagcagggggctttcgggggacaagattttccaaacatcttattcttaggatcatcacttcctaatctgatgcaactgactcggcaggcattcgggagcctgtaagctccattttcctgttccaaattcttctgcacctgtaagtacccggcttactcatgctcatgctgtcttttggggagggggagaggaaagcagggcctagggaaggtcatctttatctgactcaggtgtgggcaggtccatggcgttagaagaatttctgacatccccacggctccccttcgcccgaaactgcttcttagtttggaaaatgaaaatgcctgttcgttctttcccaagctcaccaccccaccgcccccaccacagcataccagaaactccacctgtcctttggggtcttctgttcatcaatgttgtgcacacctgatttcttatgttggacttaatgggagaagtgcacccttggcatttgaatgtcttaaatgcaaccacagctattattgtgagcacagcccctgctggcttctccatcttttatgctgcaatttgctgaaacagtgaaagatgttttaagcggtagggtataaataaaaatctagaaactcctccatggtaaaaaggaagagcaatatggttaattctcaacgcagttagaaatgctgccacaatggggaggctccacgctatcccacgaatggtccctttcaatgctttcctattttaatggaaagagaggccaaaataactaagggctccccaggaaaggagcatttctgatgtttttactgctttcctgagagaggacattgtctctggccggcttgtcagtccctgaagcagctccaatggctgctcacaaagggagaatcagcccctcttgtccttctgtcggggactgctgaagtcccctcaaaatagcccaggatgacaaagccaggccctgctacctaccctcttcccctaacactgagaccaaatcattcttaggggtacataacttgtttggaggtgagcgggagaaatatcttggctaggaagccatctggaaaacctgccacgacccatactaaaaactgtgctcttctctgaactttcatatgaccctcagccatgaataagaataaaagaaggcaagcatattttgcccttttatttccacagagcacaatagaaggaacattgtccttagcaaaggcaaaggataagatgttcctttggccaaggctggctgccttcagtttctctgattgacaaaataaacagcttctaatttgtgttctaaaagggctggttctgaagaggatttgagaagaaaaatgttaatatcagtgctaaaaaaaaaatcaagacaggaattccaccttatgtctggtggagaccggatttgttttcaggctataggacaaaactagtctcgggaggaatttgtttctgacttcactaccgcctgtttgcttggtccttggtaattcatgaagtttcttagctctcctccttctaaggagctctgagaaaatgatacttggatcatagaggttcattgtctggaagacttttgatcaaagccctgagtgctggggtgggggcagattacggattctgattataacaaaaataatccaagtcctgtcttggcagaagcctgaattttatgtccaccttgtggcattccaggagcattaagaatgttccattggcctttccaatctctccatccgctcccaagggcttgaaaatttttaagtatataattcttttgactcagggctttggcatcagttaaaatgccaacctcttgggaggatcagcctcttaaatctcccatcgtgaaagcaggttctgatagagggacaaagagagaggaggaacatgaaatcattctaggtacaaacatgagcctcagaacaggagtctgcaagcaggaaccaggcaaggccaaagtgccaagaagctctgttggcagaaagggaagattctattcttgctaaaatggggtacaggcaacttattggggcagagactacggatttggggaataagacccacttaatgtaactggggtacaagaaggaggaataatctcatgtactaacacaggataagagataggggaactccctgcaaaggtaccctcaggctgaattacctgagtcactgaacaagggctccaaaaatgttatgaggcctcagtagatggaacaaacagatctaacaatctgctgccccctcaatcctggcatttcttcagcccagagagagtaggtcaaaggaggggaccacactaagatttagacttttgagacccccttcccaccctttgcttcctctgatacccgcattgaactcattcccaaggagattcatggtagatacagtgattcacttcatttaccaagagctataaggtatgaagaggagttgcccacctacagccacaggtcaagaatgcagcatccccaaagctctatgtgggctccttcctaaggcctagtggacacagtttggattaaaaccacttgggtgcaaattctggctctgctacttactagttgtgtggccttgggcaagtggtataacctatctaaacctcatctgtaaaatgggcacagtaataggagctatcatataatgttgtgaagactgaatgtgatgatgcatgtacagcccagtacagtgtccagtacaaaggaaatgcttaataaaaatcagcaatgattaacactcctggctctctgcttatgcttcattgcctgaggataggttatagcagcagatcatcccactcagtgcaagtctcacaactgcaggggtcaggggctcaccatctcctccagttaatgtcaccctctcaccttttcttctcagtcccactagagagcattcctaagcctttcctctcgctagttctgatctgctccatcccctgctaactaaataggtggattcactgctaaagattcgtgaaatcacttccttggctttccccagccacagactgagctttgctacccacctcctagaggcgaaatggaatcacttctgggagatcagggtccagaaggatccaactcctgaagcactaacaaagcaaaagaagccctacagaaaactttgggtctctggttcctgtacagctcactgcagctatggcatcactctgaagccacagtcactcccactgtgactctcagctcctcaggctgctggcccatagctgctctcctcctccaacagccccactctctacctccctcaggggactcccttgtctgggccccagggtactaaggcttccagaggctttccatagctttctctctctgtccctccccatcctctcctggggatacagagtccactctttcaaggtatgtggtgacaaggagctcagctttctgtgcaggcatgccctcagcatgttctctgcattccagtcccccttgcttctctgctcagcaagaaagaggagtgggaagcatccctagttaggcttatggtacttctagaatcagaagacaagcctatatcctgtcaaagtagactctgatgattctcaaagtaattcagcctgagagtttactaaaatgcatattccagcagttatctctataaagatacagagtgggtttgtgcttcagccctagaatctgcatgtttaaagagctctccttaagccacaccttaagaaacagtgcattctatcttggtgaatgggggtaaggggtggggaggaaagtcacacagctgggtcgcataatgaatcccagcctacatcctgactctccaggagcacatggaaatgccttcgaagtcctgacccagtcttgtccaagcagcagctctaaagatacttcacaaagaccctgagtagtttcacttatctaaactccagacctaaatcagcgatgctagcagtctgaggtgcaaaacgcacagcgattcttcatttagaaccattttgagctagttggggctatagaagaccttactggttaatagcacagtggagccacaccggcaggctttgcctcttataggctgtgtgaccttgaacaacttactcattctttctgtgatttgctctttgcctgtgaaatggagacagtaataatacctcatagtgctgttcatgtggaattatgaattacttcatgtaacctgtgtagaaccatgcctcccctcagcaaaatatctgctactcttgttactataaatattacacatatatataaacagggtttataatatttgtgaggaataaatgagatgatgagtgtaaaatgttcagaactattattggtgtggttccagggatttaacagagaaatcagtagaagtcctcaaggtgtcagagaccaaggccattctagataaatatttctggtaaagagattggtcaaaggtcatttggagactcagaaagaaagtggcagttagggttctcttacatccagaatgtaactaaaactctcatgcctaacttgttgctatagatttggggattatgggattttgttctgggacctgctaggtctaattaaagtgttaggactcctaggagaccagctgtggtttgcacagacaggagcttgaaaaatgctgtcatgaatgtgctcccagctctgcagcagtggagacgcagtcagtggcactgagtgctccaggggtcactgtagagttgtggtctttgtccttgctgccccaaacccacagctgttaatttattaggttttgttagaagatactcccacactaaagaactccagagctgaagtgactgtcctgtccttgcttcatggcccctgtgcaggcatgagttctgtgcacagagctcctccctccctccttccctccttcctccctttccttcctccctcactccctccttcttccccctccctccctccttcctcctcccccctccctccttccttcccttctttcctcccccctccctccttccctcccttctttcctccctttctccctctgtccctcccttccttctgtcactggcctgagtgcagccctggaacaaggaccatgatcatgaggggaaagggatgatgtttctgggaaggtccaaagaagagtgtcttctcactccgggctggtgtcccccaccacctccctcattaaatactggtattcacctggctctgtccctagcccttgccctggatgagtaaaatgggagaggagaaaccccatccagtcccctgaggtcaactaatatcccttgactgtggtggctttccagcccccatgtctcagctgggctcaaagccaagattcccagtttcttgctggacatgtccgctatccagcactccaaacccagcaagtccaaacagaccttgtcatctgtctcccctcactctccctctctactaacagtcttgtgttccctgcctcagttgacagtatcaccacggacccaagctggaacctcagggtccttgtcaccttttccctctccttgaccccatgacagccagccctgaggtttctacctgttgacatgtgccttgagtcatcccctcctctcggctctcactgccacggtcgtggttcagagcctgttccacttcttgcccagaccctggagatggtctcccaattggtccgcatgcagctggcctctcttccctccaatctttcaacaccctggtaaggactgtcttcctagtctgtcccgaatctgccttaataaaaagctccagtggctccctcttgctcacagaacaaaaccttcagcttggccaatagggctctgaatagctgaccccaaatactcgtccactcccctcctgctgctgccagtggtgcacccagctacaattgtcctgccctttgaaacatgcactaggccctgtcacacaaatactgctcactttgcctggaatgtcttcccctgcctccactgttcctcctgacataacctgccatccctcaagatgctgctcaagcctccttcattcgtggagacttcctcaacttccccagatacgttcctctaccacagcacctattggaccatgagggcttatgtgtgcctcggtccctcccactagatagggaagaccccaaagtttgcctagaaccatattgaattcctctttatattctcagtacccacaagcttggataaaataagatactggtttcctcatttgtaaactggaaataaaaataatagttgctaagtcctgtagttagaagaaataaatgagataatttatataatatgccgataatgacaatgaagatgatcatgataagaagaaaggctagttaacactcattcagggctttctaaaagtgtcactgtcctaagctcttttcatgattgagagtgagccaaatagatgagtcaatccctggaaagtgattgtgtatgtgtttgtgtatgtgtttgggtgtatatattcatgtacatgtatgataagcataatacaaatgacctatgtataacatataaacttcacaatgtgcctggtgtttattaggagctccagtttttcccttccttcccccatctccctgcccttcctcattacccttcctagtcatcctcccatcctctcctaccccaggcctgcgataagacagatgaattcagaaggggttcctgtgtcattgtcactgacaacagactgcttagtggaagagagagaagtgcttggaattgcctttggacttggtatctaagagttgtttccccattcaagttatcacttctttgaggatacgggctatgcactacccctgttttgtctcccataagcaccagcacagtggtgggcacatagcaggtactcaatcaactatgtgacgtcaggctcggcttgagggtcctggttttcagcactctcagcgttttcagcaatcactgaggcaggtcttggagccacagctgacaggttctcacgagctcacagacagcagcagctggagccacccgggagcagccctcttggcagtgctctgctggggatgggccaccaggccaggaggtcgaggacttgcttcctggacacaagtctgccactgactgtctgggttagcctgtgcaaatctctccacctccctgaaccacagggtcctcacctataaaatgcttctcctagaagcgtctgaggatgcatgacatggcagctgtgaaagctctttgccaaaaggctgtgcagaagtgaggtgttgctaatttcaagtgctgggacttcactcacttggaaacattcaggaagcaggggtggggaaagagagagcagggacttgcatatccaggacatatgggggcctatatttgttgtcctcctgcttaatagcattagtgattcaagctggtgctgcctgtggaacactctgtctttcgggatcctcagggacaggaggggtttcagagcagcgaggctgcagccagcacacaatacagtgaaaaatagagtgatagcaatgaggtgccacgctcacaggttcatacacatgcatgtacactcctgacggcccccaacgctgcctcacaacagcagctggggctaattacagccagacagcgccttctccagctcttctctcgaagctatcaaccctccccaccactaccactaccactcacccttggggattgcctgatctctcagaaggggtgctgctgatgccacagctaaatgcctagaaagaacccggcagggggtgtagtggtacaagggagtaggaagccgccatgtggctccccgtcttgcaagtgtgggtagagaggaggagatgaaatggaagagagctggctgagatacagatgcagctttgtgttaacagatgtgctctcctggcaagagcgagcctaggcacttagcccctcccttctccttcatctggatccacccagggatcccctcttaactcttctccctcttaaatccccagcttcctcttcaactcagcatctgccataaagctcaagaaatgttgaataaatgaatgggtgaataaacacataaaccctccccaaacccttagtactcccaaaccctgttcccacctcacaggctgtaatgactccatgagccctttcctctgcttttctttctatatactccctttggacagtgtcaactctcacctaatatgcttctaactcccaaatctctcctggtagcccagaccttgccagctgcctgaatgtttcccctgctcctcaaacctaatgtgccccacactagagtcttcagcaatgacttccccaggggttttctagcagtgagtcctggtctgtcaagggcgtatgagaaagaagggcctgctgtatgcgccccagcaggacaggggcaatgaacacattggcaaagtcatcagggcaaccttctgatcccagggtctgtcttcacaccaggataccaaggtttttcccatcaaccttttaactgtcagccctccctcccacccataaggaaagccaaattaagaatgaactgccaaattggagctaactgcctaatgtgggcttctaattggaaccaggcaaattgtttatataaagaaaaacccttgaaaaggagcccatgtgaactggtgagttatttcttcttcaacatgagctctctctcccaatcccactctcattgcttcagaatcctggtattcctcccaccttcatccctcagccagcacacacacacacacacacacacacacacacagccttcccctcattttccttctcatgaaccttcacttcatgttggagccctgtccccatgatcactgcaaacccccaggtaaatattgaaccaagattggtgaaaactggagatattattccaccaaagcagtgttagagggaaggcccccagaatgtttactgagagttcacaaattatttcctgatcttggcaaagatagaaaataaagcccccctttcctccaggtcttcctagatttggagagcagccaaaggaatggattacaaacacagtggcccttggttcctgacagcctcagggcctatgaaggcaaaatccaagtttcttcattccttttctcagggagtcctgagtatcatacacaagtacaaatgcaaggtgtcattataaccagccatgttatgaccacatctagggatttttagtttttaacacaaggtgaaagatgtctcaccaatttcagtttgacatacaagatgcaaagtaatttattcaaagcactcctgtgtttaatttcaaaacagtcatttattcactcagcaaatctatgttgagcatttcaaagagctgtaattcatggttcgtgctttcaaactcctccttctctagttaggaaatgaaaaccctatatacaagggttaactgacaacacaagaccatgccagcttccttttcatgcctggtgtggactatatggctctcatagttttggcagtactgaaaatttccactctattgcttctgtcactactgttgacctcttctccaatacaaggtggtaagtagatgtgtctctagggtgcctgggttcatatctgtgttccgccattcactagctatgtgaccttggccaagttattcagcctgtctgagtctggtgcctcctctgtaatgtgaagataataatagtaacctacctcacagcatcatagtgagaattaaatgagttaatacacacaaagcacttagaatgatacctgacacataatcattgctcaataaatgttagtaattattattttcctgatgtgcctactgttctttgttaataccagaggtcacaattcttattgggcttccaaaagaagcggtaaagtaccacattcattcatccactcaatcagcaaatatatgttgagcatctacaagtccctgagttaagccctgggatcatatagccaaagaagacatggcccttgcctttgggactaaacaattcactggaagaactcctggattaatagtgccctgatgcacttggaagaaccaaacacaaatcctccctggaagaacatgcccaccacccagttttcataggattaccaaggataaagtcaggttgaacatgaactcataatccaaaattacaaagaacacgatgaagccagaaacaatgaaaacagaatcaggtcttcaaagacctcaggtattgcaattaggtgatataaaatataaaataagttttacatgtattaaaaaacaaaagattttgaaaacattgccaaagaacaagatactaacaaaaaattactttttctagccaggcatggtggctcaacgcctgtaatcccagcactttgggaggccgagacaggtggaacacttgaggtcaggagttcaagaccagcctggccaacatggtgaaaccccatctctactaaaaatacaaaattagcagggcatggtggcatgggcccgtaatcccagctacttgggaggctgaggcaggagaatcacttgaacccaggaggcggaggttgcagtgagccgagattgcatgccactgtactccagcctgggcaagagagcaagcctctgtaaaaacaaaaaaaccaaaaaaacaaaacaaaaaaaaaaaaaaacactttttctctaagtatcatcgttttatagatggcaaagagaagtgaggtgactccttcaatgttgcatagctaataatgagggatttaaatcaggtttgcagtgtctactgttttttggcaaactcagtgactggagttgtattatttcttccctgagtcattcaacaagtgagatgattacaaagtactatgctaagtctataaaaaaaaaagatgaacaaaatagagtccttgccctcaagaagcttaaaattcagtagacaggcaagactacacacatataaaaataattattaatatcaggctgtgtggtagaaactactgtggtctggaacagtaggagatgagaattgagcaattcttgaagaacagggtggatctacagggaagacaagctttgaattggctagtggggtagaagagatggaacagcctgacaaaagccgtggagaaagtgaacctacagagcagttgaaggaggagcaagtgcatttggccagtgcgctggatacacgtaggggcagacctgtgccgtcgcatcggaccctgaagtcagaagagccctatgcttggtttaatgctctcctttgctgctatcttgaaatccttgattatattttaacacggggttccacattttcgttttgcaccaggaccctcagatgatgtggctggtattccataggggaatggggggaggtatggttgggaaggcagaccactcttgggaaggaaggatctggaattccactttgatatttgccctgcagacaatgaggaatgactgaaagtgtttgagcaggggagggatagggtgactgtggttttagaaagccacatcttggagagggggggagtgttcagatggcatcagagaaaggagagatgggaaatagtcagaaggctattgcaataaagcaacgggggcctggacagaaatagtggctgatgatatggagaagaggaaaaggtcatcattgattcagttattcgttctgcagatggttatggctactgagcacctataatgtgtgagtctttgtgctaggagctgggatacaggaatgtacaaggctctgtccctaacctcaagttacttacagttcagtgagggaggcagataagtaaacagactatggcagcctgatagccctgtgtgctaagggctaggatcagattacatttagattgttgcgggagcctagagaaagggtccagacagagaattctgagattcccaagaagtgatatctgagctgcatcctgaaggccacagacaaggcacagaaagtcactccaaaaagagggaacaggatgtacagaatcatggaacatctactgtgtgccaggtggggatcctagctctcagactggtagagaaagtagacaactaaccagagaagaacaagagaatgtatccagtgctatgttgtggacgctgtgggagtacagaggaggggcatctaacccagactggacaggcggggaaaactgttccttagaggtgtcttctgagctatgtgttgtagatgagatggtgttagctgggtgaagggagggaggaagggatgggcacagcagtgggaatgatgtgtgcaaatgcacagaggtaagagaccatgtgtggctctaagagaattgcaaatgactccctgtgattgaattctagaatgaacaagcaagagcatagtgttgggggtggttatgaccaaagagatagaccttaaatgccaagctaaggagtttggacttcatcctatagagcagtagttctcagccttgactgtatattagaagcacctggggaactttaaaaacaatacttatgactggatcccacccctagaaactgatttaattactctgcaggagaggcattagaacttttaaaagctccctccatttatttgaatgtgcagccaggattgagaaccatggctctagggtgccagttctcaaatttgagtgctcatcagaatcacctgtagggctgttaaacacagagtcaggtgagcactctcagagtttctgattcagtaggtactctaatgagtacgtactctaactttaagaagttgccagagatgctggtgttgctggccccaggacccacattttgagagcctcaagtctcaggtgttgtgaggctatttacaagtgttaagtggaggggatggaggtgtgaaatgatttgatttgcatgtttgaaagatcactcaggccactttggggagaatggtcacagaggactaaggagagaaggtgagaaaaccagaaggtattgtaggaatcaaggcaagagatgtctggaggtgggaggagtcctgaactaaagccctggcagtaggaatggagaaaagaggtgacatgcaaggaatgcttaggaaatatacttggcagggcttagtgactggctgaatgtagaggtgagaaataaagatgagtgaactacaactcttgggtttttgccctgggcaaccagtgactccagttttactaggcatggtagttactgtaacaaaaagttaaatgtgttaccaggcttagggtaggacatgggagaggggggcatttctgccctcaaatctcatagcaatagtcccagggaattcaacaggcatctctcattgtccactcaatccctattttcagcaccatgagtcctcaccttgaccctaatcaacttgggattctcctcaaagtacttagaaaggaaaaggaagacggtgactaccctgacatgatggccacccacccgagctccaggtatgaagcctgctcctctggaattactctaggtatgtttactttattctttcatcattttaacaaatatgtatagggctgctgcccacaggaacttaaaaatattcagacgccatgtctcacgcataggtaaggaattcatatctcttcttacataaccaacaaagcaaatgcagcttaagtacagcctgaaaaataattcattctacatagatttaaaatgtctaaaaatgagcagttttccagtgcgtcactggtcatgactatttgtaagtctcctccgtgggcaagcagactaccagcaatcaacaagaccagcaggaatgatggatgggataattgtccattagggtacagataacttttgtatcgtgggagggttcgacaagatagagacatgatagatggaagaagagttagctaatataataggagttgcagctccattctggtagtaactattctctggctgaatcgatgattaatcaaagacacattctcatttgaaacactttgctcaccggtgcaaaacccccgctttaggttaaatttaatagcatcattaaaaactgctgttcaagacattcaaattacttctctccagaagaaatcaagccacaatagagaatgcttttgtgaacccctggagagcaagggccatgcaggatgtgtgtgtgtgtgtgtgtgcgtttgtgtgtgtgtgtgtgtgcgcgcacgcacgcactaaacttataaatcctcaatgcctagcacaggagctgacacagagcactcaataaatgtttgttaaagtgaaatgaaatgaatacatttgtctattcattcatctgtttattccttcgacagacattcattaaatataggaattaaagagctcaggccctggaactagatgcttcaggcttcaaattccagctccaaccagctatatgatcttgagcaaatgacttagcctctctcagcctgatgcctgctctgtaacgtgggggaaataatagtacttgctcctgtagggctgtgtgaggattaaatgaattagtgagtgtttagcacaggccctggcccatagtaagtactcactatagggcaactattattgttgttgtatatgttaggctaggcctttctcaagtaactaggtcattagaagaagcacagaacctcttaagaaatgataaggcttttggccaaagctggttttcattaaagtggttatttatggttcccagcccagagccccactgccctaggcctgccattcctggcctggtgccctcctgtggcaacacaggctgtctctaggtgggttgtgctctctagagaagcctgagaaattgcggagtgggaaggtgaaggaagaaggtaagagctggccaggatccaattacccatcaacatgcaacccctgccacacccccatcattaactcccttggttgcctttctatgcttttgtatagctcttcctggcaacatttctacctactaattgctatttctaatgtttatcctcttggctcagttgaacaagattaaccttgattttaattttaattttcaggcgacatagtagagaatacttgacttgggagcaggaggcaagggaagcgatacaactcagtgattataagaggattctgacatagaaacaactggtcactgaagagctgtgtgacctagacattacctaatgtctctgagtctcagctgtagaaaagggaaagcgagaatactgttgtcaagactaaatgaaaaccacctagcatactgcctggttaacagtaaagcactcaataaatggtgactatgactattattttgaggtccttgatctggaaacagaagcccagagagattaacgggacaacactcatgttgttatttggtggcagagccttcttgatccttgttctcaccactaacccaggcctgcctctttcaaacattttacagaaccccatttacacatactctgatatactacttataattacatgcttggttttttgcctgaggtagatttaataaattcaagtgtattcgtcccatagctgtctgcctggaaggtcttatgaacaactccagggcaggagccataggttgcttatctaatatgtgctcaataaatgattggtgagtgaatgttaagcttgaagtcaattacctacctgagttatggatgtcccatacctcctgtgttacattacaagcagtgcagaaaagtagaatgggtgcaagggactcatgcaggcctgggtttgaactctacaactggtagctgggttcaaagcacctaggagtgctggaaaaatgcagttctggataaatagaggaggagaaacagtagcagtagtagtaatagtagtagcagcagcaacagcagcagtagtatcagcaaaaagtggagtaagaaaacttttctaaggatgaattttgtcctcaagagctgtgacgggcccacaatgtgctatgtggaggaagtgtagtgtaactgagtcagataaacctgggtttgaatcctagctctcaacttattaactgagtgtgaccttgcattatgtttcctgagcctcagtctcttcattgtaaaattaagataatgatagtacctacctcatagctttgtggtgaggatgaaataagatatggtatataaagcatatcatagcacaacacctcactcataataatgtctcaaaaaaagctatttgatgaattaatgaatgtgcatctttagcaaaatgccatgaaaaaactacagacatcctttagcatctgcctgagaggagaaggaggaagagacaattccaaataagaactgtctcaataattaaccacctgtttcttaccatgcaacacctaacgtcggaagaactggaaaaaattgtgtgatcagaacaaaccattcccagtgaatgcatagagagaagctgctatttcacatcatagctacacagttgctggacctgagagagtccctcagagtgtgaataagtgtttgaaaagacaagtacagggcctgacacatatggaatagttgatcaccttagttcctttcctacccttctcccaaatgggtagaaacaaacaaaccactaaccaacaaagcagcaacagaaaaactgagttaaagtggttgagaactgatcatggcagtgaccttactgaatggacccttcactcttggctctagtgtgacctgccagcctggagagcctctcaggctgagcaattaaccctagcagagaagtcatgatgccaccacatcttctcgttctccttctccttcttcttctctccttctccttctccttcttctccttctccttcctctttctttttctttttctttttttttttttgagaccgagtttcactcttgttgcccaggttggagtgcaatggcacaatcttggctcactgcaacctcaacctcccaggttcaagcaattctcctgtctcagactcccgagtagctgggattacaggcatgttccaccacccccggctaatttttgtatttttagtagggacagggtttcgccatgttggccaggctggtctccaacacctgacctcaggtgatccgcctgcctcggccacccaaagtgctgggattacaggcatgagacaccgcgcccggcctcctctgtcttctttatgagcgtgaagggtacaggacatgacggggtgggatcaactcacggcctaggctacaaaaactcttttctcctctttctgttctttgcccctcagcccccagttcttgtttggacatgcactgagaatagcatttaggattcctgcattctctatctcttttttaatgtttggattggctgttcgccaaggcaacagaatagcattttcaaggagcaggtgagtttggggaagatctcttttcttttccaatatattaactccatgtgaattaaagccatcagagaccctcttggaaagagcatataagttctcccagggcttccaaatgaaagtccctacaagagacccaacaaggttgtcatttttaagggaaaaatacccaggcatggtagctgctgcgaggaaatttgagaagtgacctgcaagttacatttgcgatgtgaaaaccactttgtgttctttgtaagcaactgtttgatgtgtggcattgcagtcatgggtgtgaaacatctggttttaaccagaatgtgggtgatttgccacaactggggagaacaggtaaatatggctttgcctcctggtctcgtatctggcccagacatgcaaattccagtctgcaaacttattcttctctgccaggattcaataggttaatgtcagcaattggcagaggtctgcctgtggttacactgagtggcacatggcaacaggtaaggacaacaaaaggctgccagaaaagggagcccagcttgtctgagggccaggtaatctgacttgccagtcaggggagggaacagttcctggttctgggccaatactggaggtacagagaacagaaccagaagaaacctggacagggaaaaagagacaacagctaccatttgttgagcacttactctgtgccaggcactatgccaagtctgggtgtgttctctgatttgatcccagccagagccccattttccagaaagggaatctgcagccataaggcaaaaatagatcaaaactgggaacttagaataaaacaaataccaaagcactcagaaggcaaagcagttagagctagttgccaagaaaacttcaggaacctgtgttccttatagccatggccattgggatttggccatttgcatctaagccactccatcccttcagttgactcccttattgggtcagcttttcctgtcacacctcaaggtggttggcaaaggcagagctggtttggcaaggaccgggaccagaagagggatgaacaggtgtctgcaacagattcctttgaagaatactttaatggccttatgccataaaactcaggctagcatgccagtggaagaagaggatcgatgagttgaaatagacaaattggcacatgaatttgagctttgtttacacttctataatcaatgttactcattgccttgtgtggaaataagatgttctaccatcagtaatacctgtcgataaatgcaaatatgctcgaatttcattagcagagacccctgcttaagcatactgacaattgcaatgaaagcacaagtcctactgaaactagcacacaatacaagtcgcaacacaactctgacccgtgacttatctacatagtcttccctcacagacattaggtctcatttgttcttgagccaaaattgtccttggctctgatcagcagttagtgaacaaatgacactgtatggcagcatcctgccactagggtgtacaactcccacaagtatgaaaagcaagcatctctcaccttcagactgctgtgcctacaagcagcaaagtccaagtgcatgaaaagagttaaatcctgcttggtcccttgaagggctagaaagcattttaaaggtgacatacatcagagtgatccattttcacgggctgggctgtgcaaaaaagtcagaggggctggatgagaaccttaaacaatgacaacacagttgcattcccagctgtgttaaatgaccagcatatcatgattgccttttcacgcaaatatcaatgacataatcctaacaggcttgcagctctctcgctggtgtaataaaacaatgacccaattattttcaagggctgaggcagtagatgcaatgactgggtatgttgtgcagggcgctgtgtgtgatggacggggcacagtagggcagcaaactgtgtgctgaggatcggaaacctgcctcccgagccaaaactcctgccattcatctggtcagaataaaaataaagccattcagtatgaaagttcccacttgttctcacgacggaggccagttgggaaaatgtggtgcagcactgactgaagcaaattctgtttaaaaaaccagccggtttgtgggtatttgtttatttataactgccccaccaccacctccccacaccctgcctcattctgcaaaggatttgagatgggattggaacactgaaagtttgtttaagtcctaaacaggtccagctactttttagaccgatgacaaaatgaaaccttctggatcaagccccttgctctgtggaacactgctttggtttacccagccagagctagtccttcttgtaccctgtggtgagaggcacctcttgcaccagaatacccttgtgcccagtgctatgcttgaccagggaaatacacatgagcccataagcctgaagcctgaaaatattaaggaatatggattcacttactccctcactcatttgctcattcaacgaatattccttggttagctattccagaacaagctctcttccaggcacaggggaagcaaaaatgaataagatccagtctctgcacttgagaagctcctcgtctagtaggaaggacagacaagtaaacaaacccctgttctgcaatgtggccagtgctgtagtagaatcgtgcctgggggtggcgtgggaggtgtagggtaacatgaggtgggggctgcaggtggcatagatgatttagtttgtggacttggactcagactgccttgagttcaacttttggttctgtctcttgctagctgtgtgaccttgggcacttttcttaacatcccagagcctcaattccttcatctgttaaatggagctaataatagagttgacgtcattgggttatgatgaggattaaatgagataatctgtgtagaacacttagaacagttcctggcacatagtaaatacccaataaaaacttagctttttatgctttttatttcttttgtttaatttcataagactgtgtctggcgatgagactccaaggactggtttctaaaacagaactgttttcaacaaactcttcccttttagcctgattttttttcctatggaatgacacagttctgccataatttttccctcagcaaccatatgtctggcaagaacctcaggaagaaaatattttccagatggttttgcttatgtcagcctactatgtgccaagcaccactctagaggagagggacacattgctgagtgacacagacaaggtccctgtcctcttggagcttacattccagtgggagagacataccataaatagacaaatataaatagacataattacccagagcagtaaatggggttaaggaagcattgctaataaaagaaatgtaagagaggaacaggaggcatctaactgtgggtggtcagagaaggctcttctcaggaggtaacgttaagctgagactgaaaggttaggaaggagccttccatgccaaaagcaagaggaagggcagtccaggcaggagcacgaacaaaggccctggggcgagaaaagaccgagaatgttgcagaaattgaaagaccagtgtggctgagacacagagccctaggagggaggtaaagccggcaggattagtacatgcattttgaagctgaggaaatggaaagcccagagagatgaatggacttacccacaatgccttgcacaaggtaggcgctccatatgttgtagaattcacagtcagtagggcggggctgaggccctttgccttccaaatcggactgagatttcccaccacaactaggaatcagctacccagggagactgaaacatacagtcgtttttgttggtgagtcataggcaatgcacattagagtgtggggtcgagtggccccagctgctgcctgtgtgtgtaaagggcgggggtgggctcaggccgcggctgaagctttttagcatgtttatgatgagctgaaagaactcactgcttaatttaaaatacggctcacacatacacatacaattcagcagctggaggagctgccaggaaatgagaataagtgtagaaaattggaggatcaggaatatcaggtattcggctccgtttcccagctcccatgcgctgtctctgatcccataaggtcccatcttccctaacaaactctgggaggtcaagacatggttggagaccgtggcagtttggggaagggaggcctggccagagcccttaatgctagctacactgattgccccacccggccttaagcttgccggccttcctctcgttcatgttccttgaaatctgacggctggaaaaactcatttggccctgatcactaactgcctatgctagctgctgcttttcctgattgtgtgtatcttgcctcctcaaccacacgggggccatcggcacacacttgaggaattgagttgttttcttttgtattcaccgcagctctcagcacagtagaatttacacagtgagagactcgagtgtgtttgctcatgggttgcaagatagtatcatttgaaaagcctttggggcagagtacctgctcttaattaaaaaaataagaacctcaacttgacaaaaatgtgttagaccatcaggcgtatctctggtttccttcacattgttcctctacacccagagtccccggcctgcatgccggatgaacctacagcctctcaatcaaaatgctccacaagtcatctctttgggttctttgctcagaatatcccttctgactgggatgccctctctcccaactctaccaatcataaccccatctcacccttcaaggccaaatgtaaatgccatctctggcatgaagcttttgcaggcacaattcattgctcttgcccctgaacatggcaccctgtgtctacctcttttatggtacaggctggtggactggaatgacctggtttcaaattccaactccatcacttcccaaggctacctccgttttctcttctagaaaaagggataacaacatcagcctcaatgggatgttggaagttgccagtaaaataatatctgcagcctgcatagcacaagacttggcctccagagctcagtaagtgttttttgtcatcatcatcatcttcatcacctctggggagcagaagaatgtaatagttccagaactggtttggtccattcttaaaaatgtgaccttgggccagtctcttccactctgaggctctgtttcctcatgtgtataaaatgaagtgataatagtttacccacctccatcacaaaacctgctgggaagatgcaaagacataataatgtaggcaaggtaaactgctaagcacagggcttatcgcataaaaaaaaaatgctcatttgcgtctgcacacccctacaacctagaaaactcctttaagggcacagacaatattttacttatctttgcatctcttgctgcctagcctagcccagaacctctgcagctggcagacccacaataaatcattgttgaattgaattgaaaacccaaaccagatgtgcctcctcccctgtcaaatgaagctttcaagctggcaggttgggcctgctgcctcttcactccccctccctccaagctgagcagccgccattgtctaggcctggctctggggaatgaggcagtgcctgccgagaggagggattcagagtgggtaaggatagatggcactaggtgggatgagtgcggtagggaagagcactctgtctgttcctgatgaccccaaacagactgcctttgaagggggctatcctgaagtctctgtcgaatgaaaagtagtgacagtccaaaagcccttcgccacccagcgcctagctgtggaggaaacccagctctcccccaaaaaccgaaaattggaagtaaatgaagatatcgggagaaagcttcctcttcctttagcaaagatagtgatacagacattcagagaggttcagctctgaaatcataaggccaggatttgaagctgagttcactggcaccatgggcatgctctaaccactgggccaccttgcctctaagctagtcttgctatagaaggacaggagtatgttttcacccttcccaccaaccccacaggacgcttagaagcagagcgtatggctttaatggtggaaaatactttaaaaagtacaaatctgttacaaaactacaaaaagaggcccatgtcttcagtgtttctgagccagagctatgcagacagggcacagggggtagcatgctaaccagcacagagtcaaggtaatgggccacacacctgaacatggccacttggattgtaactctagctctgtcacatgctagcctgagtgaccccgggcaagtgattcaacacccctgtgcctccattttcccacctgtcatatgatattaataatagtacctcctcacagggttgtctatgagaagtaaataatctaacatttttaaagcagttaccatgtgcccgggacatggtaaacattaaacaacggttcgttaaatcaaaataaatacatacctctgtccctttgtagccagactagtctagaggcactgttgccaaatggttagtgtgtgcccatggaaccagctgaactcggcttcaaatcctggtctcatgatttcagagctgagcctctatgaaactcagtttgaccatctctaccatgagaacaataacagtcccttacccacaggctgttgagagttttaaatgagatatctccaaagtccagaacacagtgccttgccacggcagagtgagtaagcacccaattaaggcagagtgttaatcatctgagtctgcttcccattttttttttttttttgcctcttctgggttaagttaacccacgatatatagttttggaagtcttgcagcagtaaagggaacaatttcatcattttgccaatgaaattcctaaacattttattcaagagccagaaaaggcaaacatttttggtcatttctaaatcaatgaagcatggacaatcagtttccccactcagcaaacctgactcccaaagctatagaagtcactttgcaggacaaaattgaaggaatgagtattttactgcaaacaaaagccatctttgtttgcggcccagctttgggagaaaagaaatacctcaacccaggagcttggaaaattcttgaaagttatctttttattccagcaaatccaacgtaattggcaagattcctgaccatgcaaacctgagtcagaatgagtcgcctttacccacccatctccccacagcacccagaacccagcagagtacactgggcatcaatacatattggttgtcgattcctccatgggagccccaaattccatttctacaatgtctgctacattgccaaaacaatccaaaagcagcactaaagaacattttgaaaatggggaaaaaagcatccatcactcaccactctaacacaactcttagttttgtgtggaaagttctcttccagtctttatccatgtgcagacatatttttatagcactgtagtcatagggaaaaactgcagcagcttcagccaagaatcagataccatacagctcatgtcactaaactttccaagtgagagctttttcttctctcattcactctattcattcattaattcagtcattcaacaaacatagatttaaccatggctctggtgctacggccctggggagtacagagatgactaaggcacaatcccagttctcaagatgcttccagtttaatgggggaaacagagaagacagcaggaaattataacacactgggataaacatgaatgctgtgaaagcacagaagaggagcatttaaagtgggcaggaaagggtgtggaggatggggaggcagagaatatatatatatatgctttcttctttcttcagaagaaagcaaggtgtcatcaggtggccaaaaatagtactgtgtgactgcatgggcaagtggtagtggatgcagtgagaaaggaaggacagggccaaatcattaagatcaaaggtttctgtttcattctgaagactgaggggaagctctggaaggactttaagcagagtagtagcactgtcagatgtgcattttagaaagattgtcccagcaacagaatggaaggtagattgtagggcatgagataggtaacaggggacccatttatcagcttgtcacaataattcatcaagataaggaaggtctaaacgaatgagatggcttctccacatacaaattgtgtcacgttagtgagtgacttaacctgtctgtgcctcagcttcctcctctgtaaagcaaaaataacaagagtattgcccttgcagggctgctggcaggattaaatgaaacactgcatgcaaagcacctggcacagtggctggtacctagaagacactcgatacatatcacttcccctttcccctcatcctttttcctccacttcaccctttcttaaaggctggcatggtatggagcatggaagtggccaaagcagactctaacccagacagtctgactccagagggcagtggagaaagtttgcaagtgctattgtcaggacagttacttagaaggattgtttagctgagttgagggccccgctgaggttggaaactatgactttctggtgggactaaccaacaaagtgatgggattttctccagcaatgttcctccatctgggcataagcacagaggaggaaactgtcagttaaatttatccagacttaggattttgcctcatggatgcagcagaaagacacagggcaagggaattggggatatacgcaagattctgaaagcaaacagacctgacttcaaatctcatctctgctgtgggactttgggtaagtcactcaacctctctgagcctcagtcacctcattaaaaggaaaaccacaatagtatcttcctcataaagttattgtgaggataacatgagattactgaaatgatgtcataagatgggtagtatatgcctggcacatacatattagttgttattcttatcatcatcatcatcatgttccaggatggagagggaaggtagtaaggtgaaaggggctgatgggatggaagaaatggatggagggggctcaaaaaactggagagcctcctgaggtaaaaagaagagcgttgaggccagccagcaaggtgtagatggtagggggttctgactgatgatgaagcatggtaaggctaggatgagagtgtgtcctgtacatggatcacggatgtccaactcacccagaatgatgtcaggacttggggtggagaagaagacaatgagccagatgtcgaactcttcgttgaatgtgggggtgggggggggttgaccaggaggggatggttataaagaagcgtcaacgaggagagaagtagccagatggcatgagaaggaggagttcttggctgaggacggaggactaacagcctggaagcaaacaggggaagctagagcacagaccccacctcccagccctagggtgcctgtagtgtgggagtgtggacagtgtccactagagggcgctggtggcaaagccgtgagatccgccgtggagactcaggtttcagcacttccaggcccggaggtagacaatagtgctctgtaaaatttatccagggtgtagggggaattgtttactgcaaggtgggggcttccagagggtactgagaagagtgagagagggcggtagtggggaggtggatgagtcggggtggcagggatgggagcactgagcagtatgaggatggtatgggagaggacagatgacgagcagggaggcttaacgtttgggctgtggccaagaactgggggatgtgaagcctggtgggattaactgtcctcggaattccaaacggagcttttttttccctttacatcttttgtttattataaaagtagcacatgctagtttcaaacaactctaattattgctcaagggaaaatctacctctcctattctactccccagtgttgacagtctgtctatccttccagtcttttcctgtatgtgtaacatataatacccttaacaaaaatcagatcctactatacttactcttctgcaacttgcttttatcacaatactatattggagatatcattgcacatcagtatttaaagatctagcttgtctttatttgtggctacatcgtcattgtcatcattatactagtagttggaatagtaatgtgtagcaattattaaatgctctgtgccaggtcctatctgaatatttcatatgaattatctcatttactcttcacaacttcatgaattgttacttttcccattttacagatgagaaacggcacagagaggttagaaacttggtcgaagtcacacagctcataaaagctagaggaggaagtcaaacctaggcagtctaaccaaggctcaaactcttaatcattagcatagtaatgcttagtatgtcattattgggatgtattataaatgatttaaccagtccttcaccgaggtcatttagttttttcaatttgctcctatttacaaataatgtttaaatgaacatccttatacatggagcattttgcaaaggtaaactcctaagacaggaattgctgactcaaataacatttccagttgccctccagatgtgcatcaagagtgaatgagtgtgctgtttcaccagattctcacaaaccctgggttttagtgaccttttaaatttttgccaatttgagaggtaaaagctgacatctgaatcatctcaatattgttttaatttgcatttcttaattattactgattggtgttccttttaatagggcataggccctttgcctttcctctgtgaattgcctgttcattattctttgagcatttttctagtgaattgttcattatcttctcattggtctacagaagctcgtttattccttccttcaacaagtatttattgagtacctactgtatgccaggcaccagtctagcactagaaatataatagtgagtaagcaaaacctgagctttcatgaagctaacatgtaagcagaggaaataatagaaaaacaagtagctaaatcatgtcattgtaaatcatggtaagtgctgtaaagaaaataatgcacttcttacactggagctggtggagtattctgaataataaaccattgtcttccttctatgttgtgactttatcctggtttatatgttgcctttccactttgcatgagatatctttcaccatactcaggttgttaaatttttgcatagtcaaatctatcattctttttcttcatagattctacagtttctcgttgctttgcaaagactccctacctcaatattctcttatgccttcttctaatcttttaatggtttctctttttaacatctaaatctgacctaattggattatattttggaataaggagtgagataaagattcagctttatattttggtggcaggccggttgtcacagtaaatggcaccatgtattaaatggtgcatccttttccccagaaatggtgaggctgaagcccagagaagggacgactcttgcccagggtcatgtagcaaattagtggtgaccaaactcttcccagatcttgaggctactgacttccatgccagtgatacaaaactgaactcatcacagctccattctctggtgcacttgaacagtcttccctgacccacgccaaggttcactgtcggaggccacagtatttttcctttccaataggccccctgacttctcttgctcagagatacaagtgcagtgacccatggcagctctgctgcttataaataggaagacacttgctgatcgctgctgaaatacctcacattaaggcagctttggacacagaagactggaggcagagagcagatagatttgccatttaggaaccaaaataggaagtgcctaattttaaataaagagatttggcattgttttcatccagttgctgatggagcagctgccatcgtggagcttttcaaggaggctgccttgaattgcgccaaaatgataagcttgtggcttggaggctgctgggacttgtcccaaggccccagctacgacatatctaggatccaaaaggttatcttgaaacgacaggtgactacatcaccaccaacgcagcttgacctgacatcccatttcacttaatgtttcccttctccctccatgcttcccaaagctgtggacattttgtctgtggaaagctgctacccccaggagacaagcatctgggagagcatctccacagaaaaagaaaagtaaagtgggagttgaagtcattcaggctacttgagacaacaatttttaaaagctcctattttccctcagttaccaggagattttcggtcaaagtgttcaaagaaaataggtggataattacctccattatttcacttggctttctatggatagacatcgtcaaagatattggcgagttcctcttgtcctactaatcttgatgggtattttgttgattcacttccaaactctgaagtaaatgtactgcttattataacgaaaaacaacctttaagatgccctctgtcctctacctctaggcagagtgagcagcagcttgtacagtgaaatttaaggtccttcttcccacactaataatgtcagatcgtcccaccaccaatacaggggaggaaaaaccctgagttccatttccaactctgccatgacttgctctgtgacccgaggcgagtcatcatccctgtcggtgactcagctggctacccataaaacgagaaagtcagtctgagtggtttccctaactgggttcctcatcaaaatcaccagtgatactgttaataatatgcagataattcaagtcctcatctcggacttactgaatcagactctgaggattaggagccacactgcatctgtatttcaacagcattcctggtaattccattgtacagccaggtttgggatctagtgaaccagatgacctcagggtcccttctgctcctgacaacaggtggttcaatacctccctctgtacttatgtaccatatctctaagtgaggtgctgccccctgcccttcttgctaagtgggagcccattctcttatcaggagccctgaaggctttagccattcctttgtcagatatttagcagttacctttgaggacaggacccagaaggaaggagtacacgtattattgatgggatcaggggagtgaaaaaaaaaaaacagcagcagcaacaacagaaaaatgggggagctggatctgcctgaaggccaagacagcctgagatcctaatgggggcatggagggcattgacagattatacgtacaatactcgagcctcattttccctggtatcctctctgtcttggccagacaaaacaatgcaaagaggtacagctaagctggaaaacagccctctttttaggtagtgaggtctttgggcccctacgattgataccagcaagtgagaatgtaaacacaactctcttcaccactgggaccatctgacgtcagtcccttggctccagcatgtctcaagataagaggactgtaggaagccctgggccttgacattaggacgctctagctttgaggcaaactctgaactatggtttctcttctgataactgggatcctgccttcttttggtgatcaaaagtccccgtctcaaaaaaaaaagtccccatctcctgccagttttatataccccgactatgctgacctacatgcctgactccagctgtgtgcttgcatccacattcattattcattatttataagcacctcagttaattaggccaaacggaagcaaaacacatggtcctggccctcacgaagccatcaggctagcacagtggtgttcaaccttatcagacttaacatcctctcttttataataaatctgcttttgcttcacccctttactatcctgaaattaaatttctaggtactataacctacctacacgcataagttcaaaaagatagctatatgtcctgccacataaagagaaaataaagcaatacataataaaacactatgtatttaactctgtaaatgctcacacaggactacattgaatgattaaatgaagtagtcagaagcttgtgcctttatatagaatccccatgaatgcaacagttatggacacaaactgatatgttatattgattaattccaaaagcaacatcacaattgttgacatgatttcctgaaatggtgaatgagtctgtgtgatcctctgtaaccatgtaatcttccatatctttacagaatagttgattaaaactgtggggtcggggcaggggaagcaaaaccctttatgcttaggtataaaacatttatagtaaaagtttagataattagaaaagcagttttcagctccatggaagtccagcagaacattcaaaaattattcgggatgctagactatttttcattttgcaagtctgtcgtgggcgttggagaacatctagcatccccatttccagtcctctgaataccctcttgcattttccaaaagtcccctagggggcagtattgtctcagttgagagccaccagtctagtcattcagtttctgtggaactgggattttgtctggttcttcccaggctcccaactccttcacccttgcctccaaggactagagtcccatccttgctactagcacctggcaggactcctaagcctcacctgctcctgctcagttcagctaggctgggcaggacttctgctttcaccaaagccaagtgcttctctaaattgatacctgttgttgccactctctttgggtgccccactaaactcagctgcagttgagtttcctgctccatcccaacagggtgcattttgcggcatatgccagctcttccactctgaacttccaatctccagccccctgacactatgatcacccacagacccaggccgttgatagtcagtagaacaggtccaactacagcaaggtttgaacttgtgcctcaccagaaccctgtggccttttgccttcagctagatccccttctgatattgaaacaggaaagaattatcttctgcaaatagaaagaaaatgagagtcagaccttctgttagggccctcttctaccagcctttaaatagttttcttgtcagcctcacacagatagccccaaaccatttgagaagccagcacagctccctgcaaagcactgtagcaaaaggactatgtactctggaatcagatggacctgagttcaagtccagggtctatctcatactgcttaaagacaaagaaattcacttagactctctgagctgcagtttgctcacctggaaaaatggcaacaataatgaatgtctggaaaatgcttagcacagtacctgccacatagtaatc

SEQ ID NO: 488 - DNA, 5155 bp, Homo sapiens
  source 1..5155: mol_type = other DNA
gccttctaagctcgttcttccgccagcttccctcctcttcctttctccgccatcgtggtgtgttcttgactccgctgctcgccatggtaagtccatcggcccccatcggccccggggtggcttcccaaaacccgaggccgctgccaggaaatgcctgggccgcgcggagcgttgaggggcgggagccttttaaaggctttttcaagaaaatatccagttcggccactgttgtctttcgtggcctggagggaagctagtgagccagcgagcaacctggagagggacgggctgcgctgcggccgcggattcaagggggctctttctttgcccggccgctgccgagtcgggcagggattccggtttcccttcgcttgtagcgaactcgttctggaggcggggggtgggaggtggcagccacccccgaaatcgtggcctgactgtgggctgcccgtggcatgcgcaacgtggagggtaatcaggagggtattgtgggctactggttttcgaaaagggtttagcttggcgtggagaagcgaaccgcatttttagatcccaggacttttgtttagaggacgtttattcagagacttgagcgtcaccccgtggaagcgcctagaacaaggggtgttttgcgaacctgtgtgtcattctggccttcttagtaaatggcagcagcgaaccagtcactctttactgggaaatgtaaaatgttgatttctagatatggaggcgataagtactggtattttattacttgtcaagtaatttattacttgacaaaatttacaactgctactgtggatgggggacggggtgtaatctttgccttctttgtattggctcccattattatgcaagggtatgttcgtccaggttggccaggcattaaacctgcatccgtgccaattttgcaagattattctgtagatttgggggagtattggggttggccttagatgaaagccaaaagatgcaactagaaattgagacagtcatccttggaaaagtgacatttcatttatttttaaatttaaaagtttatttttttagccagtgaaatttagcagtagagatagagttaggattaataccgaaatggtgagtaggttagatcttctgaatgtcagggactttccctaagtcttaattaccctcccaataacacttgaaaagtacgtacccctgttttacaaagtagagcactgagattcgttgacttgcaaatggtaggtaggtggttctgtttgactcaaagctgtgttcttcccaggaagccagattccctagccattcccagtgtggtcgtctgagtccttgggggaccacagggtaaattgaaaggtagcctctggctgtggagcagaaaggacctgggtttgaatcctggttctgcacattgatgctctgattttgtgcatgtttcttaaccggattccacttattttatctgaacgatggaaactgtggtatctgcccccagagaagttgtgagggtcagagacttgcttggcttgatggcttagcattgagaagattttggggctggggtatgtgttaagcactcaaatgttggtttgaaggagttcttgactttgaatcattcgggcaggctctaatattgtctaaattgattgcattttcttcccagtcttctcacaagactttcaggattaagcgattcctggccaagaaacaaaagcaaaatcgtcccattccccagtggattcggatgaaaactggaaataaaatcaggtaagacctccatcatactgcttgtattttgctaaatgtaagagccactgtgtctggccagggttactttttgagtataaatacatgattaaaattgcatgcaatccaatccaccctttgacagcattctcaaattcgtttttaaaaacgtacttcctttgtttctgcactgcatccagcccacatctgggcttatgggcagataattctccaatacttattaatttcctggtcatcttcagtctgagctaggtcataaggtggaaggctgtcttatacacatcctggtggggaagacccagtcagtatttttaggctttttgtttttgtttttgtttttgtttttgttttgagacggagtctcgctctgttacccgggctggagtgcagtggcacaatctcggctcactgcaacctctgcctcccaggttcaagtgattcttttgcctccgccttcagagtagctgggactacaggcgtgcgtcaccacgcccagctaagttttatatttttagtagagatggtatttcactatattggccaggctggtctcaaactcctgagctcaagtgatctgcccctctcggcttcccaaagtgctgggattacaggcataagccattgtgcccggcctttgtttttgttttttgagacaggatcttgttctgttttacatgctgcgttgacactatctccctgcaacctctccctacctaccagactcaagtgaccctcccacctcatctctctgagtagctgggactacaggcacacgccaccacacctggctaatttttaaattttttgtagagatggggtctctctgtgttgcccaagctggtcttgaactcctgagctcaagcaatcctcctgtctcaccctaccaaagtgcagagattacaggcgtgagccatcacacctagcccagtcttttagatgtttctcttttctaaaaagagactagaaaagattggaaaactgtcctctactgcagaagtagttgatctcaaaggaaaaacattactagaattgctatgaaggacctccaaggtcatctagactaactccagggaaagctaggcctgaaacagtctcctgcatggctttttcagcccatcgctctttggtcctgatgggccttgagacaggttttgaagggagcatcaagaatcagcaagagttgcccaaggttcagcagtcgctctctcacccaggctgagtgcagtggtgtaaccctcccacctcagcctcctcctgagtagctgggactacaggcgttcaccaccatgcctggctaatttgtgtacctgttgtagagatggggtttcgccatgttgcccaggctagtcaaagcactttctcttttttttttttttgagatggagttttgctctcattgcccaggctggagtgcaatggtgtgatcttggcttaccgcaacctctgcctcccaagttcaagcgattctcttgctcagcctcccaagtagctgggattacaggtgcctgccaccacacctggctaatttttgtatttttagtagagacggggtttcaccatcttggccaggctggtcttgaactcctgacctcgtgattcacgcgcctctgcctcccaacatgctgggattacaggcatgagccaccgcgcccagccagaacttgattcgacttgtatggcaaagctagtgggattggtttgctaagaagacttaaaggggtggcttcttagggctaaagttgagggcctatttccttggttcatttagctagttagatgtgaaaattgccacccattgtaatgttatgggctagttaattgcttaccatttgtttactggatactagacactgtcctttattatttgatacatctacttgaacgtgggtttctctgtgtcctgcctgatggtgggacctgcttgtgaagagtgaaagaagtatatataaaccaggcacagtgcttcatacttataatcccagcactttgggagaggccaacgcaggaggattgcttgaggccaggaatttgagaccagcctgggcaacatagggagaccacccccgtccatctctaccaaaaatataaattagctggacttggtggcacgtgcttgtagtcctaactatttagcaggctgaagtgggaggatcacttgagcccaggaattcacaggctgcagtgagctgtgatccggccgctgcattgtagcctgggcaacagtgtgaccctgtctcaaaaaaagaaaaatgtatgtaaaactcaacgcctagttcaataaataacctgctattaaactctgtggtctcctagaattgggaaggtattttgtacgtaagattatatacccttgacccagataattgacccaatggaatgattttcattgttttagctatcttccagcgttaaaaatgtttttgaaagcaggttgcaattacagtgcttcattttgtggaagtactgccattatcctgctgaaagaaaagccgtgttaatcatttttgattttgcctttatgagggtaaaatcatgacagattgacatggacaattctgggattgctgtttccctgcactagacgtgaatggaggagttgatcgattgtaaagatcatgcgaggccaggtgcagtggctcatgcctgtaatctcaactctttgggaggacgaggcgggtggatctcgaagtccagccagttcgagaccagcctggccaacatggtgaaaccctgcctctactaaaaatacaaaaatacaaaaattagctgggtggtgttgggggggcgggcgactctgtctcaaaaaaaatatcatgcgggagcttttatatgtttgtgacccattatgagggggttcagagtatgtctgtgtacctccaggtccattgaatcaaaagtgggtacaagtacacttggagagagtgggcttcgccactactctgatcctagttaagagcctagccttcaaattattttgagaggataaaacttgacttggctagtttttaaacacatagggaattattttttttactctccagaaagaactccaaacttgttagaggagagaaaagcagtaccctttgtattttgtggtacctaaaaggttatgtgaatgggaacagctacattgctgtcagactgcctttgtaacttgacatttttttctgtgtaggtacaactccaaaaggagacattggagaagaaccaagctgggtctataaggaattgcacatgagatggcacacatatttatgctgtctgaaggtcacgatcatgttaccatatcaagctgaaaatgtcaccactatctggagatttcgacgtgttttcctctctgaatctgttatgaacacgttggttggctggattcagtaataaatatgtaaggcctttcttttta

SEQ ID NO: 489 - DNA, 8813 bp, Homo sapiens
  source 1..8813: mol_type = other DNA
accttggccggaggccacacagacctggggaaatgttttgccaacgtactcgcaatagttcccatggtttcctttgctcccagcggttgcgcgggctgggtttttggagcaaaggcaacggatactgctgaggctcctgagaatgtcccgttttcgaggctgcagtagctccggtgtccggttctgcagtgccgagagggaggcctcgggctccgggcgggggaatgtgttgcagtttgtccaagagccccaagcccagcaaagccgcccgttccccgctggggcgcaactctcactggaactcttgttctctgactggggaatggaatgggctcagccaaggctcccgaaaccagccctgccgctcccagttgtggtcgcattctcaagagcggctgactgcgccgtggaccatcactttcgcttctgcctgctcttgcgcctattgcggcaactactcacgctcctacgggacgaggagagggaggtgaatccgtggcagaggtgagtgagatcatggctgcaccttcgctctaaggagcccacttgccttcagcgagtccgcttcatctttcagcccgcttctgaccatttgcatttcgctccttctaccttcaccgcgcccattttcatccttttctgcaatctatccacgacagctccttgttcgcccctctcctctctcacattctcactcatccttgggcccctttgtagggtgccccggtctccctccaccctctttcgcctctgatctcggagcagacacggctaagggtcacagacctacgtatagcatttatttgttttgtgttatcgttcgtgaacatatttttattctccactagactgagctcgtggaaaggaggacccctattttattcattacagaatttgcagtgcctggcacttaataggggctcaatctactgaaagtgttgtgtgttgagtgaatgatcggtttgagatcctaacaggctaactaagtggaaattccttgtagggagttggaaagggttgagattaagggtttaaattggaaaggagaaataccttcctctgagacaagataactggatgaatgtaggcaaagtgatgtgctaaactgcagatgtggctaccttcaggaaggtcttaagtggtctcaatcttgaccttgaagaatgagaggagagtgagatgagttttcctctaatgagagtgaatattggagtgggaagtagatggtttgagaaggaaaataattataattattgctgtgtaagtactcatatcaaatgtttattgaatgtgtcaggtactatactgagtgccttacatgcactacggttaaaaaatgagaaattttaaaacattacaggtattgaggggtaggttgaaattccaacaggtgggagatgtcttgatgagtctttttcttccactagtgggatgtaataaagcatagtgatgagaaggacagcctctggattgagactttctgagtttgaagccttgctttgctacttaatacctatgtgaccttggtaacctctccaagcttcattattttttcacctgtaaaagggggatacaaatagtactgacgtttttagggttattgtaatgatgtagtgccttgaacgtaataagcatttcacaggtgttggttattagagtttcatgcctgggagcagaggaagtaaaaacagtcctgagttaggttacagatacacattttttgcccatgtgggagaggtgagtgaaactactgcacctgtcctctgaggagcgctcctgcctttgggatggaaaggtcctcccagtttgtgtcaatcaaaaaacttcttattttagaatcctaaccaaaacatataagaacaacttgggtaaaatttgcatttgtgcacatagaagataaataatttatcttaaggcacagataaaaccaggtagcagcagggagtgttataattgtctgctattcaccatgttgatgagggaaggattcccaccctttgtgttatggagtagctgaacacaggacagatgagatcaacagcagtttattaatcacatatgttcacagctggaatgggagagaacacagcgtgccacgaagggccacaccgaggttgctgttggtaagacagtgaataatcaggggctgtgggaggtagactttgtggtatcaagaaattgaggtaatacctgctttcccttggaaggatatgattggcttgtttgaataattccacaagctgacaatgtactaaaatctgctacccagagataagctggaactgcgtctggtctctttgagaaggagggtcatttggctaggggaccttatttgcaggagcagaatggagaggagaattcgcagtaaggccattgggagccctcctggtttccccaattgtcaaggtagtacacaatattgggccttaattttgtgcctcacaccacaaagactgtgtgtctttatagtctggcaggcatccttggtccctatactcatattccaagaactgttagacgtatgtttactttttgattacctgctcttgaaatgggaaaccctctgagactaactctgtatacttataataccttttccctgaataaagaagtaaaaaatatttattcaaacaatgaaatcaaacatttattttataaggatttttatagacgtaagcagctaaactttgaggaaattgaacctctcttagtttatttttttcagcttatgagtaacagcaaaaattaaaacaataaatgacaaacattataatacaataaaaaattagtgtcctccaaagaacagataggtaaggtactcttttttaaaaaggaactaaagggagtctaacatacctaagaattaaaacatgttgctagtgcattttagcatgctaattgttttctttaaattgtattcatggggtgctaatttcctattaatagaggagttcagtgttaaaacagataatacatttatattttgatttttttcttcaacccaggagcagattgcattccagacaatagtattacacagcgatttttaaaaaatgcagatgccagtgtagttcggtttagttaattttcctgtatccaatactatgtgaaatattagtacttttttttttttgcttatttcttttctctttggtgttgctcataagtttcttcttccctctcctctatttctgtgtttaggttgagttgaggcaatgtgtttcacaggtaaacctgtaatttgtgacaaggtgataaaacattattatctgaagtgtattcttatagatacccttggtaaatgcttaaaggacctgaactcatagaattagagtcagaaggaaccctaaaaataattttctaggcaatacctaaattattgcagatgtgatcttcaaagggaaagattatataatatagaaagtccctttctaaagtattgtagaactttatttattgatttatttgctttctttctctttctttctgatgcggggtctcactctgtcacccaggctagagtgcagtggcacgatcatggctcactgcagccttgaccttcccagctcaagtgatcctcctgccccagcctctcgagtagctgggaatacaggtgcacaccactacacccagctaatttttaaattttttgtgcagaagggtctcactatgttgcccaggctggtcttgaattcctgggctcaagctgttcttgtgctttggcctcccaaagtgctgagattataagtatgagccaccacgccaagcctactgtagaactttaataatacttattttaagaattctctgcaacaaaacaaatacacacacacacacacacacacacacacacacacacacacacaattttttaccgtgacatagcctcaggtcctgagaacatgtgtcccccaaatctctttagattgtagcttcttaggatcttcttgctctgaggagacagaacagttgctgctctaccatttgttttttacatgcttagaataaaattatgatatcttcttcagactttttatatacagtttctttcatctttccttctgattctgttttctctatttttagcctgtgatttcttctgaaaatataaatcctccatgctgctttcagtttgagtagtgctttgtaatctgtaaagcattgtgcaaatgtaagttattttattattatgaaggtggcagacccttgaactgtatttatttattttttattttattttatttttaggcagtcttgctctgtcacccaggctggagtgcaatggcatgatcatggctcactgcagccttgacatcccaggctcaagtgatcctcccatctcagcctcctgagtaactgggactacaagaaagcaccaccatacctggctaatgttttaaattttttgtatagatggggtcttgctattttgcctaggctggtcttgaactctggggctcaagtgatcctcccaccttggcttcccaaagtgccgggattacagacatgaactgtattcttatgaaagaagtccaatgcttgtttttaatggttcttggacaattgtcattgttgctgaaaagttttaagtctgtgtttttatactctatggtccatatttcatcacttttctaattcttataaccattttctttaaattcagctctgctgaacatattgaagtaaagaatgaagagccaaagaaatgcactacttcagtttctacatcagaaagtatttttaagatacagacctttcttgagaagttagaaaaagtttataaatagttaaacattagactttacttttattcaaattgcctatcatctattccttttcagtatttcaaatgcaataaaattgataatcagaaatacttttttagaagttacttttttatttatatttttacagaaaaatagtagtctagtcattcaagtgaaaggtccaagaaaggaagaaagaaaaatttatcaaaaagaaaacacaagaagtattctgaagatagcgacagtgactctgattctgaaacagactccagtggtaagaaagccaacagcattctgcaagccttgcttcaaaactagttttatttcttaaaacttattttagaagaaggttcctgaaaacactaataatactgaagagtttttgaacgcttgctaaccttgtgccaggcattccccataagtgctttatattcattattaccatctaatccataaataactgttgggtacatcttatagatgaggaaatggagacagagcagattataagtactgtccccaaggtcatacagttgggattcaaacctaagcaatctgactccagattggttgtgcatagttgtacaaagcacatggcaccagaccaagtcaggggattgggctgtaccaaagtaagccttacagggctgcatcagcccagtggaagggctcatttgtgtaattctcgtgcccagtgggcactgctgtacagttttcaaaaaggcactccctttagactggctgccaatttatggaaggcaccccatctggggtagtgcatcacaaaaagccaccttttttacgccctctcctgtctaatgattgaccagagggtgctttctcttggttggcatattccacaaaggctctgcttcctctgatattgccccagtttcctggtccccaatgtcactttacttccttgccactggaaaaccaaactttcttaaagcacacatctaagcatgtcagtgccatactcaaaatccttcagtagttctccatagccctcagggtaaagttcagaccctgactgatccttctctaatcacatataccctgtcactttttgttgcaccatactctgtggcctgaaaactttttttctttcttcctttctttctttccttctttctttcttctcttctcttctctttcttttcttttctttcgtgcctgcctgcctgcctgccttcttctttctttctttttccttttctttcttttttttttcagggcctccctctgtcacccaggctgaagggcagtggctcgatctctgctcactgcaacctccacctccagggttccagtgattctcctgcctcagccttccgagtagctgtgaccacaggcacgcgcaaccatgcccagctattaaaaaaaaaaaaaattgtagagatgaggtcatgctgtgttgcctaggctagaactgctttctgtctcctcagtattccatgttctttctcttgactctattgcttggtagagaggccctctgcctacaataccagtctcttcttccaacaagcttggcttactcattgcaacaatggattttgtaatcaaataactactctcagagccacctttcttggtcaaccattcctcaacccccctcctcaaatcagttctgattttgagactcctctgtgtgtccagagcacctcaagcttccttatgtcactctggattgtatcaatctctttacctatttgtctcctccattagactgagctcctagaaagcattctccttccccactccaacacacacatagttttctttccctttttatcatggaaatcttcaaatgttcggaaaagtaaagggaatagtataattaatactatataccttagtactcaggtttaacatttgttagcattttgacatgtttgcttcaaatatggatttttcactaaggtattcaaagtaaattacaaatgtcatcacatttcactacaaaatatttctgtgtatctctttaaaatgatattttcctacttaaccataataccattaacttatgaaaaaattaacattaatttcttatatcatataatacctaatgtgactttaataatatatatatccccagtgcctagcacagttcttgacaaatagtaataaatgtttgaatgaataaatttctctgtaacaacaaatgagaaacagcaaaagcatatttatttactcaaaagtattgaggttttagaggtaactttttaaaaattataatgtgttttaatttgcagatgaagacacaaaaatgagagcaaagacagctaagaaaaaggaaaagaaatgcagatggccagattttttcctttaatttttattatggaaaaggtcaaatgtgtataaacatacatagaatggtataatgatccctcaggcacgtagcacccagcttgaacaattaacaacttgtgggaaattgccattgccccctaattaatttgaaaccaatcccaggtataatgtcatttataaacaattcagcatgtttctctaaaagactgttttctttattagtctgttttcacacaccataaagacatacttgagactgagtaatttataaagaaaagaggtattgattcatagttctgtatggcttgggaggcctcaggaaatttacaatcatggcggaagccaaaggggaagcaaggcacatctgacatgggagcagaagagagagtgagaagggggaagcaccagacactttacagataaccagttctcatgaaaactcactcagtatcatgacaacagcatgggggaaacccatccatccaattacctcccaccagacccctccctccacatgtggggattataatacaagatgagatttgggtggggacagagccaaaccatatcagatacacgttctttttctaaaaacataactacaataccattatcatgcctaaaaaaattaacaataactcctcaactctcatcacactccatttttaaatttttgttgttttctagcctagcagtttcacatgaggaagacagcataaagaaagccaaggtctgactgcttctttttgatgatcaattaatctagaatattaatcagggaactacctcctccctcttgcttctagcagcactaaacaaaaggttccctttttgtgtttttatcatcaggaaccagggtcctttcaaggaggttgaatgagacaaaatacatttgaatgcatgattgtcagcttctgagctggggaatatgcaacaatatgccttctgggctggggatgggtgagcaaagggagaactgcctcattctggctttggtagagtctcctcttgtgtttcatttgatgcagaggaactttgggccagaatgattcctatttccctatgtcctccacagaaagggaggatagtgaacagaatttgcaatatactagatagatgtttggctgccaccttcccataaagccctatgagtagcttcttcggaagattcctttagactacagggttgtgtctaagctcttcagcataaatggagatgggccctgtcttgaaacacactgttcttttactagggactttccccacccccattttgcatatgtatgtatgtgagccgtacagggcgtattggtgattgaggaatgtcagctcataaaatgaggcttccttgtaattctgtttaaatgacttttcctttgaaattcttatccataccttatttggcacacaaaacagatatacagttgacccttgaacaacacaggttagagctgcatatgtccacttatatgtggattttttttcaataaatagaattggccccccatatccacaggtttcacacctgcaaccaaatgcagatcaaaaatacagtattcgtgggatgcaaaacctgcagataggtaaggccaactttttgtatacttggattctgcaggttcaagtgtggggcttgagtatgcatggattttggtatctgcaggggtcctgggaaccaatgtttacaaggaattcacaactttttttaaataaaaaatgtgccttata

SEQ ID NO: 490 - DNA, 23641 bp, Homo sapiens
  source 1..23641: mol_type = other DNA
cggaaacagaaattgctttgcggcccgcacggaaattgctttccttcggcttccgttcttggtccatgtgagagaagctggctgctgaaatgactgcgaaccggcttgcagagaggtgaagggcaacgaggggaggggggattctgggtctcgttgggggccgggttccccagcttttgggaaatgggagccccccctttaacagatggcagtggttcccctgaagagctggccattcgttcctattttccgcgatccagcctttaaagcccttttaatttaatttcattcgcttactccgctcctcagctgtatagccgcatccctgttggtcctgatgctgtttctgcctccccagctcatttactgtgtttcacatttttcgtcacgtggcccctttttctgcctctgtcgcggcccgatttaatcctctgcgcaggcagtgcaggcgttataaactccccgaatcttggaaagctttgctgattggagtcatccaccacgttttggctcctgtgatgttttgtgccccccccaccccgcccccggaactaaatgtagtccgtttagtaatgttggctttgcaaatactaataatatatgctgttaggtaatggtacattttataatttgtttgtgggtaccaatctccttagttaagcacctactttactaagcaagccccagggaaagtggcttacccagctgctttcgacctgtttctccattcctgggaacaaggatcaagataacacttttgattaggctgcctatcaatgagtcaaatatatggaggatgcttagaaatattaatcgtgaaactgccttgcctccagggctagctagcaacagcgtctttggccatattattctagggtctgacatttttacagcttcccataggtcataggaaatgttgtgccaatccctgaaaagtgatagctcttttacatgcagttttgaagtcaggcatcactcttggaggtgatgcctgacttcagtctaaatttcacatcttgacaagtttccaaaggcattcacgctgctttatatatcttctgagggatagggctattctgtgctgaaattacaatgttttcgagattgttttaatagattagacattgcttcaaataataatatttctttttttaatttcgacttttattataattaagggatacatatgcaggtttgttacatgggtatattgcattcacatttctctgttgcctcttttaacagccttctggctttgagccaacaggaagaactagcggatttgccaaaagactacctcttgagtgagagtgaagatgaggtgggtgacaattgctaaactgccttcaaaattagggtagagagcacattcctggaatggaagggtgtgacaatgttctatgtatttgttcaggtctctcaaataaattgcaaatggttagtgtttcatatataagatactgtatcatattaagtgctatgaggatttggaaactaagttacaatcactaccctcaagttgcataagtataatttataagaccaaccaaaacaggcccgggtgatggctcatgcctgtaatcccagcactttgggaggccaaggcgggcagatcacaaggtcaggagattgagaccatcctggctaacacagtgaaaccccgtctctactaaaaatacaaaaaattagccaggcgtggtggcaggcgcctgtagtcccagctacttgggaggctgaggcaggagaatggcatgaacctgggaggcggagcttgcagtgagccaagataacaccactgcactccatcctgggcaacagagcgagacgccgtctcaaaaataaataaataaataacaagagattttacatgagactcaatttccatgttgtcttttccctccccctcatcctgattgtttttccttttctgtgtcttagggggacaatgatggagagagaaagcatcaaaagcttctggaagcaatcagttcccttgatggaaagaataggtaacgttcccgtcagttagggcaggttatatagtcaattccgtgagatttctctgcagctaatatttattgagtgcttcatgtaaagaccttaataccagtgcctagcatatagtaagcattatataattaactgttagctgttattagtcttagtgctattattgtaagcatttgcagtcttattccacactgaaaatcttttaaagcattgagtaggcattatttaaccccattagagaaataaatttacttacccccaaggtcacctggctcataagttacaggttcaggtgtgtttgaatctaagtccaatatgttttccactatgcttaccttgtaataaagagaagagatgagggttagacaaccaagtccaagttaggaacagatctccttgctgcatcatgacaaaacatgaccctagaagaaatacaagaaaccaaagccctgtttgaagagagaagtgtttgtctctcccaaccccaagcccccataaaatttattcattcctattatatcgttttgcctaatttcaggcggaaattggctgagaggtctgaggctagtctgaaggtgtcagagttcaatgtcagttctgaaggtaagttgaacaaaggaagatacccatgcatgaaacctgtggagttccaagggcattgtgttcacctcaccccccctaggaactgtttttgatgtggttaatgactcataccataaatacctgggagagtgggtgaagaagtgtagtcagatgcccttcagtttcttccatctctcaaagaaagcctagaaggctgtggtcaaggtatcctacagagtttgatgagatacttataggatagatggacatgaataaagacagctgcctcttagtaacttagtcataattcatatttgtacaatttcatttttatttcagttctcttaacaatgctttgagttaggagacaggcaaatattctcttcagccagagctcagagaggtcacattacttattcaagggcctttgcctagtacagtatttctcaacctttgcttttttattgctcccctgagaggagcctttcaagcctttttttttttttttttttttgagacagagtctcactctatcgcccaggctggagtgcagtggtgcgatcttggctcactgcaaactccgcctcccaggttcacgccattctccttcctcagcctcccgagtatctgggactacaggtgcccgccaccgcgcctggctagttttttgtatttttagtagagacggggtttcaccgtgttagccaggatggtctggatctcctgacctcgtgatccacccgccgcagcctctcaaagtgctgggattacaggcgtgagccaccgtgcgcggcctcaagacatttttttcctcattgtatccctccccctgtgccccttccccaggaaatcaagtcctaaggaataagagtttgttggacagagttgagccttggagggacacaaaacattgtaatatctaagatttttttcatactctcccagaaagaaccaattttcaccctggggtggcggggtggtaaaattgcccctgttcagaatacatgctctaataagcggcagccatgggattttatcctaatactgagtctagatgccaaatctttttcaccctgttcacaacttaggcagctagaatgggtcttgcatttgtagtaatcactggtgtagcctcctagggcaaataacaatgtattccaagcgtacttattcagtggatatttattgtgtttctactaggtagcagtatcaggaactgttgtagataccaaggttaaagtagcgaataagatgtgagctcatggggtttacattctaatgaagggagacaataagagaggatgatgcagtaaagcaactaagtggctactttagatcggttggtcatgaaaggcccctgaagaggcaaaattgaagccgagatctgaatgacaagtcaagtcaaccatgcaaagattggggaaagcatttcaggccaaggaacagctagcacaaaggctctaaggtagaaacatgcacaacatgttgaagaataggaaagaggcccctgtgacaaaagcattctagagggtgggggttgatatgaggttagagaggcagatggggattagatctcataggaccatgtcctttaggtagatgagattcaaagtataatggggagtcactggaggattttcagcagggtcatgacatgctgtggtttatattttcgaaagataattttgggctggatacagtggtttacacctgtaatctccagcactttgggaggccgaggtgggcggactgcttcagcccagccatttgaggctggcctgggcaacatggcaaaaccccatctctacaaaaaaaaaattaaaaaaattaaccacgcgtggtggcacgcgcctatagtgccagctacttgggaggattgcctgagcctgggaggcagagatggcaccactgctctccagcctaagtgacagagtgagaccctgtctcaaaacaaacaacaacaacagcaaaaagatcactttggctgtttttatttttggctgttatgtgaagaatgaattgcaatggggcaagagtagaagcaccaggagaaaagcaaatgagttttgaataaatattttcccctatcttctaccccctaacacgtttggggatgaatgtagaagagtgatagtgttggcatggctagaaataggcaattgaagtaagagaattattcttgcttctctgcacatttgccatctactggcattttctactgaggcttctccctacattatattgagatcttgtctcacttcttggtctgaccagaaagtttgacctttccacaggatcaggagaaaagctggtccttgcagatctgcttgagcctgttaaaacttcatcttctttggccactgtgaaaaagcaactgagtagagtcaaatcaaagaagacagtggagttacctctgaacaaagaagagattgaacgggtaagctacagagaaggtggtctattaagggaaagaaattgaattgacaagggaaaatagggtaatagaaagaagggaaagacctgaaaaatgggagaagggggagttgtgatttccccactatggataagattaaaaataatctaggagtgccaggcgcggtggctcacgtctgtaatcccagcactttgggaggctgaggtaggcggatcacctgaggtcaggagttcgagaccagcctgtccaacatggtgaaaccccgtctctactaaaaatacaaaattagccgggtgtggtgtaatcccagctacttgggaggctgaggcaggagaatcccttgaaccaggacgtggaggttgcagtgagctgagattgcaccattgctctccagcctgggcaacacgagtgaaactccatctaaataataataataatctaggagaaattgcagtcctgagaagcaagaggactagcatcctgattctttcatcctgattctagcatcctgattctttcttgggctaagaaatgttgcttcctaatttcttgttagtcctttgggtttgatgctttaatcttgtggctctttccgtttacatgccttgcctgcttcagatccacagagaagtagcattcaataaaaccgcacaagtcctctccaaatgggaccctgtcgtcctgaagaaccggcaggcagagcagctggtttttcccctggagaaagaggagccagccattgctcccattgaacatgtgctcagtggctggaaggtgagtacaacaaaatgaaactgaaaggtgagattttataagttggagatttcagagcctgcaattgatttgattggacatgttaagctaaaccccagcataagtcattttagcttagtgctcagaaagaaggggttgcccatcgtcattgtcagtcatgtgatagccagtcacaatagctctgtgatcactttttttttttttttcttgagacagggtcttgctctgtcgcccaggctggagtgcagtggcacgatctcagctcactgcaacctctgcctcctgggttcaagcaattctcctgcctcagcctcccaagtagctgggattactggcgtgcaccaacacgcccagctaatttttttttttttggatttttagtagagatggggtttcaccatgttggccaggctgatctcaaactcctgacctcaaatgatccgcccacctcagtctcccaaaagttttgtgattacgggcatgagccaatgcgcccggtctctgtgtcacttttcatctgcttgtagtatacagtacttgctatttccatgtttttgtgttaaaccatgtgattgcccgtatagcaggaacataataatgttttctttcttttaccccagtttttaaaaagcatttaaagccacattctgatcctagggaaatcaggaactcgataacattaatgatgccttagtgaggatatgtgaacaacagaagccaaactttgcttgtacaggaataccgcattaaaatataatgtgttgctggcaatgactagaacttcagcaggtaacttactatgactctgagctgcagggcaggggttgatgttttagagctgggtttcccaaacactgacccctaacaaagtttgtgtctgaagcaaaaggataattctaagtatgtttgtttggtgggtgtaatgttgccagttcttttttattatgaggttattctattttaatggtgttgaaatatcttttcttctatgaaatgatggtggtagtaaatgatgggattgggggtgaaatggtagttatgctcttggcaaaattagaagttggaaatcctatgttggtccctgaagtccggtttttagtccgaataactgctttagaacagctagcctacttttccaatacaccattggtatggagtctataatgggctgattagtcttaaatagatgccctctttgtgcttctcctctttactttccaaaaacccaagaatggtagtttcttaggcgttgggaagttgagctaattaaagctaatcaaagtaaacattgcttgccacaatagctagaaattgagcgagtagttgcttattatggggataagctgtttctgatgtttttgctgaagtcactaccattctctttctaggaggcttccttttctacatgaaaaagagatcaggtttaaagtgtggctgcaggatgaagggagactttagaaaaaaaaaatcagaggtaatacaatttgtaggattcaaaaataaaaaagcatagaagatatgtagtgaaaagtttgattccacccgtgccccatctgatcatttttacccccatactcacccagaagtaaccacttgcataagtttgctgttgttgttgtcttagagttttatttctatattcatgtttacctcctttttaaataaaaagaagggtagcatgctactacacactgtcctccaccttgctttttccaaatgacagtgtaatcttggagatagcaggaaaatgccaagtttgttattaaaaacgagatggggccgggtgtggtggctcacgcctgtaatcccagcactttgggaggccgaggcaggtggatcacctgaggtcaggagtttgagaccatcctggccaacatggcgaaaccccatctctactaaaaatacaaaaattagcggggcatggtggtgtgtgcctgtaatcccagctactaggggggctgaggcaggaggatcacttgaacctgggaggcggaggttgcagtgagccgagattgtgccactgcactccagcctgtgcaatagaatgagactctgtctcaaaatatatatataaataaataaaaaataaaaactagatggtagtggaggaggttacactaagaatagaacaacctcttcaagatagagtgaggctcagatgtcatacattgaatataccatgccgttcattcattctaagactgacttttgagaaattatgctagtagggcacagagaaataaggaagtgcttagttcagagggtgctttgtggctagcaactcctaggtctctccttacaacttagattgcaaagtaccaacaactagtatatgctgtattaggatttctagaaactgaatatcaagtctcagaccaggcacggtggctcacgcctataatccaagcactttgggaggctgaggcaggtggatcacctgaggtcaggagttcaagaccagcctggccaacatggtgaaacctcgtctttactaaaaatatgtaaattagccgggcatggtagcacatgcctgtagtctcagctgctgaggaggctgaggcaggggaatttcttgaatccaggaggcagaaggtacagtgagccgagatcacgccactgcactccagcctgaggaaaaaaaaaaaccctctactctttccccgccctcccccaaaaaaaagaaaagaaaatcgaaagtctgtactatagttttggtccagctccctaaaattttgtttagctgcaaataattaagtgggataatgcatgagaaggcatttgtaaactgcaaagtgctagaaatgctgtgaggtaacttctttcacccctctcctcactattctctgtctacagtggtatttcccaaggcattctccttgaaaccttagtctctcattatgccttcacaagaggaggagaggaggcattgctagaaaatgctgcatgcccctactggagatcggagagtcacaacatgctttagcattttaaagtctatgaaacaggccagacggatgtggtggctcacgcctgtaatcccagcactttggaaggctaaggcgggtggatcacctgaggttaggagtttgagaccagcctgaccaacgtggcaaaacatcgtctctactaaaaaatattaaaaaattagctggacgtggtggcttatgcctgtaatcccagctactcaagaggctgaggcaccagaatcgcttgaacccaggaggcggaggttgcagtaagccaaggttgggccactgtactccaacctgggcaacagagtgagactctgtctcaaaaataaaaaataaaaataaaggctatgggccgggcgtggtggctcacgcctgtaatcccagcactttgggaggctgaggtgggtggatcacaaggtcaggagatcgagaccatcctggctaacacggtgaaaccccgtctctactaaaaatataaaaaattagctgggcacggtggcgggcgcctatagtcccagctacttgggaggctgaggcaggagaatggcatgaacctgggaggcggagcttgcagtgaaccaagatcgtgccactgcactccagcctgggcgacagagcgagactctgtctcaaaaaaaaaaaaaaaaaaaggctatgaaacaatggtgaagacacctgttggatctaatttaacttagggtgtacaaactgattttattaaaatttcaaaaaaattgaattttaagcttttaacaggggaggcaaatcttgttatctgatgagaaatgtgtttggggaagagctggtctgtctccactgctgcctcctctctctcaccttcttcccctactgccctactgaaacttctctcaaaaggcattagtgaggggcctccgaattgccaaatcccaagccctcttagtctttagcatatttgacaccattggcacatttcattctaaaaatctctcccctctagcttctgtgatatactctgggtattttctctctctggctttccttagtcctttttattcttgctctgtaaattccatgacttttttttttttttttttttgagacggagtcttgctctgtcgcccaggctggagtgcagtggtgcaatctcggctcactgcaagctccacctcccgggttcacgccattctcctgcctcagcctcccaagtagctgggactacaggtgcccgccaccacgcccagctaattttttgtattttttagtagagacggggtttcaccgtgttagccaggatggtctcgatctcctgacctcgtgatccgcccacctcggcctcccagaatgctgggattacaggagtgaaaatttcataactttcgactatcactctcaaccccttctttgaagctccagtctcatattccatgtgactagcagggatcacctgggtcccccatatgcaccttaaacttagtccagtccaaagtaagcttcgcatttcctttccccagacttccaaaacctataccacccccttcattctgcaactcagttaacagcataactccctaccccagtcacttaggttggaaacctcagtcatttgattccttcttgaccccttcactgtctccctctccgccagcttatacagggggctagacctgcaaattctgtctctgtaatagcccttatgctcctattttctcttcattttcattttcactgccctaatcgaggccctcattgaacctttcctttggaactttacatatatcctctacacaatcagcaggattttcttgctgaaacacagttgatcattgctctcctgcttaaaatccttcaaaggctgttcacttacagaataaaataaaattacgtagcattttagctatgctggacaacacgttgttctattacataccactcctttccctgtgtctgtgttttttgcttatgctcatctgtttggattttttttcctcctgacagaattgtacttaggcctcaaagcctaattcaaaaggtcacttccttccctaagcctaacctacctcccaataatatttaatggtaatttcctctgtgattacccctatagaataacgtagcagttatgttatttaagggtaacataaagggtatttaacccattatgttatgctgtttgtgttgtatatgtctctgctctcaaaggctgtgagctctatgaggacaggaactatcttaatcaattgtgtattcctagcaccccatacaagtgcctggaatatagctacaatcaataaatgtttgtaaattgaattgaattgaagggacattacaacattgtagtataaatcactttgtagcctgagattgatcactactgcaaatactaaaagtggaagaacatatacctttactattcagtagaatagttttatggttaaatcaatagcatcgtgtaacatgtgatgatgtgcgtttatgcatttatccaaatatttgtaagtttaatactgaccacgatgtatatggctattgaagaaaaccacacataatatgtgtgtgaggtttgaaactagctctgttgcctagggctgtctttgtgccttgccagaatgtggaccgtggcatgatcggcctgaatatttagccatcctcatgatagcatgtggaataactggtttacagttcattcgtttcatacatactctgcctagcatgtaaaattaactggaaactgaggaattggagccaaagttagaaaatgaggagagttcaacttgaaccatcaggaaacaggctgattacatgaaggtctttttgtttgtttgtttttaacataataaatagagatggggtttcaccatgttgcccaggctggtctcaaacttgtgggctcaagcaatcctcctgcctcagcctcccgaagtgctgggattacaggcctgagccaccatgcccatcctatattttttttcaggcaatatccttttgtgctcaagaaattaagacacacaccccaccacaaactacatttgaagactctgccaaaaaaatgccatgttttttctcattttctttcatcagtaattaatgataccaagaacacttatatgcatggtttatagcagttggctatggtcaaaaaaagttgggcttcccctctgagacatttgcagatatatgtcctaggtataccatcagtggcaaataatgcttatcttaagatctaatctcacagggcatgctgggctcacgcctgtaatcccagcactttgggaggccaaggcaggaggatggcttgaggccaggagtttaagaccaacctgggcaacatggcaggaccctgtctctacaaaaaataaaaaaagttagccaggcatggtggcttacacttgtggtcccagctgcgcaggaggctgaggcagaaggatcacttgagcactagaggtggaggttgcagtgagctgagattggagtgccagtggactccagcctgggtgacagagcaagactctgtctcagaaaacaaaaaaaaaaaaaaaaaaaactaaccgccccttccctctagaaatattctaaaagaaggcttatgatatgaatttgagattcctaactataaagtaatagttatgtgcttcaaatgatacataacaatacagggactcaagggcaatgtgcctagattcttaagagaatggaaatcagtttaacatatattggtaatctgggccggcgcggtggctcacgcctgtaatcccagcactttgggaggccgaggcgggcggatcacgaggtcaggagatcgagaccatcccggctaacacggtgaaaccctgtctctactaaaaatacaaaaaattagctgggcgtggtggcaggcatctgtagtcccagctactcgggaggctggggcaggagaatggcgtgaactcaggaggcggagcttgcagtgagccgagatcacgccactgcacttcagcctgggcgacagagcaagactccatctcaaagaaaaaagaaaaaaaaaaacatatattggtaacctgaacacagtgatccccctcagcagtattagagagtagcctcagcgtctccctgctgaagttgtcttatataagaatcaaataaggctttatttatacttctgacaacaagactggaacccccttctcttgctgtaacagccaatcctatccacttatgattccaattatagtgtcataagttagagaatcataggaatgtaaagagagaaagctgtaagagcatggcttaagactcagaatgttttgttgcttctttaaggcaagaactcccctggagcaggaaattttcaacctcctccataagaacaagcagccagtgacagaccctttactgacccctgtggaaaaggcctctctccgagccatgagcctagaagaggtaagtgtgtcataggcccttcagcacacccaggcatgccacgcttctcctagcatttgtcctctggcccaggtgtcactgtaagtctcatttgttgtaggcaaagatgcgacgagcagagcttcagagggctcgggctctgcagtcctactatgaggccaaggctcgaagagagaagaaaatcaaaagtaaaaagtaaggaggcccctgtgaactggccttgggttccacagaagaaagtcatgtggttcatcatgaattctttggagagaacctttgatgcagcaactagagtcatgcagatgaggtcccaaacaggagtgactagccttttgttccccccaaaccaacctcatacagttttgccaaaaagatgactattcagttactttctctgccttccaaggcatcacagagtggttctgcagaatcagctctgaattccagagctgttaaggccaatagggcttccttcctgcctttttgcctctttgaaacttgttcggccgggtgtggtggctatgcttgtaatcccagcactttgggaggccgaggtggatggaccacttgagctcaggagttcaagaccagcctgggcaacatggcaaaactggctgggcacggtggctcacacctgtaatcccagcactttgggaggctcaggcaggtggatcacttgaggtaaggaattcaagaccagcctggccaacatggcgaaaccccatctctactaaaagtacaaaaattagccaggcatggtaatgtgcacctatagtcccagctacttaggaggctgaggcgggaggatcgcttgagcccagcgggtggaggctgcagtgagccaagatcatgtcactgcactccagcctgagtgacagagtgagaccctgtctaaaaaaaaaaatgaaacttgttctacccctcccttgagttatagaggcaaaggagactctttgagctgcagaggtccaccctgaggactgtgggtaccaagaatcttgccagtcctgtcaggtcccaaactgactccctatagccaactagctctatgatgcccattccagccccctgcctagggaacccattgggtagtatgggcacttgtgcctatgacatccgtgcttcagctaaattgctaaactcttccctcctacccctacaggtatcacaaagtcgtgaagaaaggaaaggccaagaaagccctaaaagagtttgagcagctgcggaaggttaatccagctgcagcactagaagaactggaaaaaattgaaaaggccagaatgatggtgagactacctcttgccccacccccacccctttgaaccagctttccttggaaggcactaaagatgtaaatctcactctgtcctttctttctaggaaagaatgagccttaagcaccaaaacagtgggaaatgggccaagtcaaaggcaattatggccaaatatgacctggaggtaagagacccttggggtgagagaagatctggaattggaggatgctagcagaagcagagttggggaagagccatgaggatggatggaaaaccaggaatctaaaaaggcatcagaaaaatctctaaggcagaaaggaaaatgaccaggaacaaggtggaaaaggagagatgaaagggaaacagcattgaaggcaagtccaaagggggagaggagctttttaaaatcttatttcaccgttgattccttgaggacaaagaatttgtcttccattttataccatagctattaacccagcattgtatatgcagtttaaacagtaggtaccagtaagaaatactcaccaagtcaaattgagaggaggcagctttatgaaatggaccaggaaaggtgttattgcggtcactaatgacagggctctcatgctgtgactctttcctccaggctcgccaagctatgcaggaacagttgtctaagaacaaagaactgacacagaaactccaggtagcctctgagagtgaggaagaggagggaggcacagaagatgtggaagaactccttgtccctgatgtagtgaatgaagtgcagatgaatgcagatgggccgaatccctggatgctcaggagctgcaccagtgacaccaaagaggctgcaacccaggaggaccctgagcaactgccagagcttgaggcccatggagtttctgaaagtgagggagaagaaagaccagtggcagaagaagaaattttgttgagagaatttgaggaaaggcgatcccttagaaaaagatctgagctcagccaagatgctgagccagcaggcagtcaagaaacaaaaggtgagctgtgatcaaatggaagagggaaattcctagtgctgtggacagactatgggagaaaaaaaaaatgtgtccacccacacacaaaactgcatagtgattaggcgctggggacttgcaagagtgcgtacactggatccctgaagagaaattagattcataactatttttcttcgaagacatttaataagcagtcatctgcatggccgtgcaacgtggttcaggcacattttctgttcttgggggcttacagccttcagaaacccataataactaaaccatactcgaagtcagggtatgagttagcgttcctggtacctacacaccagggagaagtacgtatggtagaatggcaaatctgaaagtccattcacacctgtagacacagataggtcaattttgagacattaggaaacattgtctagttgctggatttttttgttttgttggttaagtaggagtggcatttttagcacttcttaatgctagttgatgtgtgtatacatggggtgagactttacggaatgaatgactccacagggccacatggcaaattagaattgtgactccatactcaggctctatttgtatgttatattttctacctgttatcttgaagagatcttattgacaatgttagcacctgtgagattggtcagagagttcccattctggcaataaaccaggacactaaaaaacctgcctaggaaactagctacattgagaaatcacttggctatctggacaaattaccaggtctggtttggtttcacataggaatgcatttagatgatggcaaaaatctggttttacacggcaaaagaattatttttttctacttttttttgtttaagagacagggttttgctctgtcatccaggctggaatacagcagtgcaatcataccttactgcagcctaagacctcccaggctcaagcgatcctcttggctcagcctcccaactagctgggactacatgcacgtgccaccatgctgagctaagtttttgtagagactgaggtcttgctctgttgcccaggctggtcttgaattcctggcctcaagctatcctctcacctcagcctcccaaagtgttaggattacaagtgtgagccaccgcacccagcctccttttttttttcctttttttttttcaggtttccacatacaaaaatttattttaaaagagctatcatttagaatatattatagggacctttacttaatagttttggctggatatttttgggattaataattgcaagtagtcacttctgagagaattttggaaagcagcacagcgggctgagattgtgggggtgtacatatatgaccacaggaccctagtggctttctcttgagccccctcaacaactggccatctagctaaatgtgcagagcggctgactgtgatatgaaagaatgaaagatagatttgcatttccttggacagtaaataaattgaattttctcacaccttccaagagtgtcctaaaatactggaaagccacggaccccagtgaaaatgagcaaggaaacctgattcttgagaaataaacgtacatgtgtccaaaggccagatctaaggagctacaatggcttcatgccaaagctagacagcaggatcaacttgggaatggaggcaacttgagtcaatgaaaaagacagtttagaagcatgtcactgccaggtttccctccagactgttttgagacaggtctctgtcatacaggctggagtgcagtggtgcaacctcggctcactgcaagctccacctcccaggttcaagcaatcctcctgcctcagcctgcaagtagctgggattacaggcatatgccaccacgcccagctaatttttgtatttttagtagagacagggttttgccatgttggtcaggctggtctcaaactcctggcttcaagtgaatcacccatttcggcctcccagagtgctgggattacaggtgtgagccactgtgccaagccagcccctccagactcttgagactagtgttatttgctcagatgttgccagtgaaagtgtgagctacatccactggataaagcagctacttcatcccttgactcagccacagcagattatgaaatactgctttaagatatggagtagaaattcttgagtcaagatgaaaatcctggatagggtttttacaagcagtgaagcataaattacaatgaagttacattgagaagccacctgttaaagtggcttccttttttaaaatttggaacttggggcaatcttcccaagcagggtttactgcacgaggaacttaagccacagtcccagttatacagtggatcattggcaaagctgggaataggacccaggacgtctgcttccaatatgctactttttttttttttttgagacgtcttgccctgttgcccaggctagtatgcagtggcacagtcacagcttcctgcagccttgaccttctggctccagcaatcctcccagcttagcctcccaagtaggtgggactacagatccacaccgccatgcctggaaattttttgttgttgttggaggggtggaggtggtagagatgagttctcactatgttgttcaggctggtctcgaactcctgggctcaagctatcctgcccccttggcctcccaaagtgctggcatacaggcgtgagccaccatatccaacatctcacatgctactttttttttttttttttttttgagacggagtctcgctctgtcacctaggctggagtgcagtggcacaatctcggctcactgcaacctctgcctccctggttcaagtgattctcctgcctcagcctcctgagtagctggactacaggcacatgccaccatgcccagctaattttttgtatttttagtagagatggggtttcaccgtgttagccaggatggtctcgatctcctgacctcatgatctgcccgcctcggcctcccaaagtgctgggattacaggtgtgagccaccgcacctggccacatgctacttttaattaccaaactccgttgcctgctatgattagtgtactgtctaggagattcaatgtacagaatcttcttttccccgtttgtcctttttataatgtcttatgtggtacctagcacttggtgggtgctcaacaaatgcttaccgaccagacaacgtacaaacctcattttctgacagttttcattcttttttcccccagattctggcagccaggaggtgctgtctgaattgagagtactatctcagaaattgaaggaaaaccatcagtccaggaagcaaaaagcaagttcagaggggactattccccaggtccagagagaggaacctgccccagaagaagaggagcccctgttgctacagagaccagagagagtacagacgctggaagagctagaagagctgggaaaagaagaatgttttcaaaataaggagcttcccagacctgtgttagaagggcagcagtcagagaggaccccaaataatcgccctgatgcccctaaggagaagaaaaagaaggagcaaatgatcgacctacagaacctcctaaccacacaatctccctccgtgaagtctttggcagttcccacaatagaggagctggtgagcagagccagggtggtgggccattgttcagaaagtgtcgttcttgcgcaaggagtaatgaagctttgttttgctgggggcacatttcagtagtttagaggtccagaatagtatagggccaggctagtcccagtgacgttttaatagatgcagatatatgggtgctgccaagacccctatttccgaaagcctgatccacaaaaactcctctggggtgactctaaaactgctctcagaggtaagagggagtaactcagagttctgaccagatcccaggcaggacaacttgaaggtgagtcattgaactgttgcgaaagttttattcagtgggatctcagatggtctaagactccccagttaatctgaaacttaaagtgaagcgtcctggcacctgtcttttcagggatataagctggaggaagcctacagtctggccacttagagctcctgctgctaacacgggccattccttcctccaccctgcagcttccttactgaaaagtttaaaattgtgtcatatgataatgagctagggatatttaccctagagggaagaaaatttgagcatgattggctgtgcactggtttgtatcgcaagaccatcattgttcagcacttccccctagggggcgctaaaatgtcacgacccgaaattcaagcgttctcgccatgaaccacagctcataagccaagctgtagctctcgcttgtttcttcccaggaagatgaagaggagagaaaccataggcagatgataaaggaagcttttgctggggatgatgtcatcagagatttcttgaaagagaagagggaagctgtggaggcgagtaagccaaaggacgtggacctgacactacctggctggggcgagtggggtggtgtgggcctaaagcccagtgccaagaaaagacgccggtaagaatgccgaagaaagtctgtcaaaagggcaccgggttctcccctcgcccttcggtgtcctccctacccttttgactaagtccttaatgctcctagtcagatgtcctgttgttttgctttccaggtttctcattaaagcccctgagggtcctccaagaaaagataagaatttgccaaatgtgattatcaatgagaagcgcaacatccacgcagctgctcatcaggtgagagcttagagagctctttagctgcctgcttgttactgcctggctctcttgcttgagaggagtattctagtgatctgtagtcaagagagacgtgtgatcttgaccgcagaatcaaatctgttgttttcactgaatggctgttagatttatcatttcagatagactacgctgttttaattactggccaggaaaaaagtttagagtcaaggtaatgctcaaacagaggctataaggtttaagctgtagcttaagaaaaatgaagacaaaccggtacttgttcaggagaatgagaagattgtaagttgtgtcacatgataatgagctagggatgtttacaagagaagaaaatttgagcgtgattacggtgttcaagtatatcgaaggttattgtatgaagtcacataaagtagaagttagaggacatacagaattcaaggctgctctgggagtatgagaatgtgtaaaggggactcaagaacgagattggactagatgacctttatgttcccttcaattctgagatctgtccccagccagtatattgaaatgagttacatttttccctcggaaggaataaagaattaatggctacagaacagaggtaagaagatacacatttcaataacattctttttgatcttattttgtgaaccaatcactgcagaaactgaatcataactactgcagtcccaattaaacctatataactagaaaataggcagttacacgataagggaaggggggaaagggtgcttcagtgggccaggattccaggtgatgggtagagtatggagctcaataaagaccacccttcccttccaggggtctgtttgtttttttaatacagtcatggcaaactgacaaatagttttctaggaatctcccctgattttcatctttttaataagttactgcaggttccaacatgcagtagaataaagtgcttcaaggtgcctaggggggacttctgagactgaatactttgtccaggtgttctctttttctgttgccctggttgacaagcacagatgtagccgtcaacccaaataagacattcccttaacttaaagagaatctgtttcctttgctactaccaggaccacctgatagtacttagcttctcttgagtattccactgaatgtttccagagactactgatttttgtttgtttgttttgttttcagatggagtctcactctgtcacccaggctggaatgcagtggcacgatcccagctcactgcaacctccacctcccaagttcaagctattctcgtgtctcagcctcctgagtagctgggattacaggcatgcgccaccacacccagcttatttttgtattattagcagagacagggtttcaccatgttggccaggctggtcttgaactcctgacctcaagtgatctgcctgcctcggtctcccaaagtgctgggattacaggtgtgagccaccgtaccctgccaaagactactgatttttacatccccattttctgcttacgtgttttcctcctttggccactggggaagtgttgaaagattatttaatgtctgaaggtagcaatgtggtggaggagtaccaggcaaggaaacaggagctttgggttctgttctccaatgctgctcctcatttacttaggtccatcacttcccccctctaagccaaatcttcaggccaagggagatgaccattgtcaatatctagggccttccagctctacattctgtggtgccaaaagaagatgaagctaagtgggccgggcatggtggttcacacctgtaatcccagcactttgggaggccaaggcgggtggatcacaaggtcaggagatcgagaccatcctaacacagtgaaaccccatctctactaaaaaaaaaaatacaaaaaaaaattagccaggcatggtggcaggcccctgtagtcccagctactagggaggctgaggcaggagaatggtgtgaacctgggaggcggagcttgcagtgagccgagatcacgccactgcactccagcctgggagacagagcgagactccatctcaaaaaaaaaaaaaaaaaaaaaaaaaagatgaaactaagtgtaacggcctggtagagttcaggattcgggttccttaaaacatcaatcctggccaggcgcggtggctcacgcctgtaatcccagcactttgggaggctgaggcgggtggatcacgaggtcaggagatcaagacatcctggctaacacggtgaaaccccgtctctactaaaaatacaaaaaattagccgggcgtggtggtgggcacctgtagtcccagctactcgggaggctgaggcaggagaatggcgtgaacccaggaggcagagcttgcagtgagcggagatcgtgccactgcactccagcctgggcgacagagcgagactccgtctcaaaaaacaaaaaaaaaatatcaatcctaagagagggaaggaggagactgaaagcataaagagggtagaaaagtcataaaatccacagggatacacaatggtctggattcttgcagtcacagtgttacataggaaagctcactctgggacaacagccctggagctcctgtagctagatagggacagtgtcacttgtaatcccagctacttggtaggcagaggttgcagtgagcagagatcaccccactgcactccagcctgggccacagagtgagactctgtctcaaaaaaaagaaaaacaaagatgggcagtgtcagggtggtttttcagaccctgaattgttgaatagatgggggatccagagccaactcaggcccccctactcccaaatgtcatcaaacagattgaattcctaagggcagatgggagcaatgggacgccttgacctctcagtctcttcacttgcagtcatcatgtggaaccgtggcctgtaccaaaacagtacctgatgaaagctgccattacagtatacaactgcaccccaggcctgcctcataccaaatcattctccttcctttccaggtacgagtgcttccatatccatttacccaccattggcaatttgaaaggaccatccagacccccataggatccacatggaacacccagagggctttccaaaagctgactactcccaaggtcgtcaccaagccaggccatatcattaaccccataaaagcagaagacgtgggctaccggtcttcctcaaggtcggacctgtctgtcatacagaggaatccaaaacgaatcaccacacgtcacaaaaaacagctgaagaaatgctctgtagattgagttgctggaggagtgacagccaggagccctgacttcacttcctttggtccagttttactctgatacagggtggattccaaaactggctcagtacattgcatgtagttaagccacattttaaaaataaaggcattttttaatctatttacctgga

SEQ ID NO: 491 - DNA, 32742 bp, Homo sapiens
  source 1..32742: mol_type = other DNA
ttggtttcaatgcttccgggttggcgctgcagtggcgtttccgactgtgggagcctcagcttcccagtcgtccgatgagcccgagcaggtgagggggagctcctggacttccaggctggggagcggggctgggccgcgccaggccgcgcggggccgggctggcctggttcccggcctgggaggggcttaacggtcctctggtctctctctcccctcagctgagtcccttccctgtctttcactcttctggcatcggtggttttacttcttcgattgaaccctgcttcctcgacccccctgggaggccgccttcttcaggcgcctcccttctctccacgagctcgctctgacagctgaggaactggcaagatcctgctacccagagggtgaatgggtatctttcccggaataatcctaatttttctaagggtgaagtttgcaacggcggccgtgattgtaagcggagtaagcaaacacctccattgtattagtgtaagggatactgttgaaagatgctccccttcggtttctaccccctgtcactcctgaggtcaaggcattgaaggcatctattaaaatgcagttcagttacttgattggcatgacagctgttatcaacatgaattagtttctcagacaggataacagcagggacatttatggtttcctgtcagtgattccttgttgttgttgtttttccccccagcctagagatgcctagcgttatcatgaactcttccctcgtcttcattccctacatcatcgagttctttgtgtcttcattggggaagtctatctctaacctcagtgccaacaagcatctttgtctgctgtactttgcaccatcctaagctagtctccctgcctctcccgtttgtaatgtaatccactgtgtttgctgcagccctaataggctaaaatgtggtggatttcctcaagtcacttcgttgttaaacacacacacacaaaacatgcagccccctcctacaccccctacccccaccccttggtttcaagcctttcaacataacatgctccttatcacacttcttgtctgatactgtttcagtcaacaagggaattctctgttccagttaggttcctttcttcttggcacaaaccatactgatgcctgcttctacatgctgtgcttgttcccacatttgtgtttctgttcattctctcttccctgcccctctcccttacctgcacctaaccaggttgtacctaccgtctctcaaggttcaatttaggttctctcacctcggcaattttcaaattagtcaatcccatgctggttgtagtcttttctatgctcctcttgctcttaaagtttgtactacacagtttagtacttaatttttctctaacgcactactttgatttcttccaccagattataagctcttgaaaggcaagtactgtatttcgtacttttttctctgtcccatctcattggttattcagaaaagacaggttgagtggtaaatattgtcttggtgctagaacgaatatctgtgtttttcaaatatgattatacccaaagtgcattgcaggtttgggcatttagcatgccttcaataaatatctgcttggctctccattgttaccttctgaatctgagaatctctaatttctactctttcttaaaggagaaagcaggagaggcacccagagtttcctgaccagatcttgggagtagtatagggcaatgtaacttgtattgtaggacattcttactttcactcattagtctatcaaattctccgaagtcagatcttcagaataaatgttggcattttgaagacaattttcattggtttctttatacagtaaaaatatttagggtactatatttttattttaccttagatatgactacttttacgcatatttggggttagcccctacaagttaaaataatttttagagggcttggggtattttacataagtaattccttggaacaaaagcaagggaacagggttcgcaggcagagaatatctggggatcaagatagtgtcatacacagggtgtgtagcattggccaggtccagcaagttaccttccttgtttcctctgcaatcttttatatacaggctgcatacataggtaaaggatgtcacactgcaaaaccaactaagtattgaatggatatgtattcaattctatgcaagctataatgggggttataaaaagtactgtgagatatagtatcttcccttggggatcttacttagttaagagaggaaataacattggacatcttgaagttgaccctcatcctagtcattatttttatgcctgagattaagatatagaagggataaaagaaggttcaaaaaatattgcacacctgtagaataggtgtgacacaacacgcatgcatgtagacaactttatgtaaaagacttggaggtttcagctgacagtttaatgatttgatagtgtgatgtggctcccaaaaaagtgagtgcaattttaagctctagtaattgaagtataatgtgtcaaatgaagagaaagatcatggatatttagctcaagaaacatgagatgtaagagaacatcatagctgtctttaaatatttgaagggcttgcctagggaaaaaagaatgcatttgttgaatattacctccaaagactgggtacaaattagaggaagacagacttttggctcaatatgaggagggagtgtctaaaaacagatctaatcaaatatgatccaggatttcttcataagattttttcctaacattggagtgaaagagattttactatcagatgggggtagggaagtcgtgattgtggcaatggtgggttttgcctgtggtctccagatttttggatttcatgggccagtaaaatgtaaatgaaaatgtgggaagggtacacaaatacaggctagttagcctgtgctccaggcgtaagaagaatctgatctgttaataatagacagtccctaaattaaatacatttagctgaaaaaaaaaaaaaggactaagtgtccttatttttttcatttcgccccagaattgtgggaacttcattagggaaccactgggctaactggcctaagattcagcgactggtctttcatcttcctgccatgtcctccctgttccttgcctttcactgattcatcattgctccctgagcacattttccttattaaagggctggtagcagcttgtgaagttccgatagaggctttctctgtaatacaaagagttgaaaaaagttgtaaggagaaaaagttttggagagacaactttaagtaaaagtagctgtctgaaacctttaagactatttggggcaatcgataaatttgtgaatggagagttaattttttcctcacaaactcaaagaggggatatgccatggtcttgcttttccatctctactctcaccatatgtgtcatattttactatcaattctaattggaaaatgtgggcatagctagaaatggtgataaggtagtatttagtcttcaagactcctatttccagctgcagttgatacttgaagtggctattcctactttgctcattagaattcttttcaacaactttccctcaaaagggctatctatcccagactctatatgtgctatgcttgaaaggaagcctccataatgatttttgtggcctgtaactaaaacatttaatcagcgtgtttgctatcttctctggaaaattgtattttgcttagttacagagaattccttatgtggaaacaaagcaaaaccttcaaagggatactgtgactcatagctgctaaccccagactgggcaatgggagggaggggtgggcagcaagtaatatctgttaagatgtaaatttgggtacttaaatttttaaaaatgtaataatgatagttaactaacaattattgagctacatgccaggcacttttaaaggtgtttttcatatattatttaattttcacaacaaccctatgatatagtttttattattagttccattttacagttcagaaagtggaggcatagagagattaacttgcccaaggtcacagaactagtaagtggtggagtcaggaaatgaatctggagttagcatttaaattttaacagtctgacttcaggagtctgcattcctcaccataaaccacttggaagttgcttttgaaattcagaagtatacatactgtgaagctctgaaaaaggaatatttgaaagaaatctgagagtccatgctaagaacagatactactttcagatggaccaggatttagtaggcaatgcctagagcagttcttaagtgtggaagtatcagcgttatttgggatcttgcaaattctcagggccataccaccaatcagaaactctgggggagaggcccaacaatctatgttttaatagaccttctagatgattctaatacatgctaaaatttgcaaaacctagaggccagagctctggaaaaaataaaatccaagagagagcaagctgacagtggcagaaaaagagagtaaagctgaaaagattgatgatgacaggtctaacgggggtgggatagggaaggagaaaagggaggctgggagcagaatacgttgttaaagaactagaacataaaagaagaacagtatttatatgtgtgtgttttaaaaggccaagaggaaggaaaaggagatccactagatggatgtacgttaaatgtcagagggaagatagacatcatattgctatcattcctttgggcgctagaaggaaggtgaaaaagttcttagctcagcctgggcctagttggggggacaaagttatatatagctagataccctatagtagagagataggagggctaagaatatgagagagtagtagtgtgagcctgtgctttgcacctgaatcaagctaactgaataccatgaactgcttttatgagatgcctcagcctatataatttgaattccgggttccttcatttgtaattatctagttgaatgtcaaagttgggtgtgctggatggactgaagcctcttctctgggtggggatgaatataacattaaagaaactggagagaatgaagggcacaggttgatctctgagtgaatcacacgcctacccctacaaaatgtcagtaaagaacaaactcatgatcatccagcacataaaacaggatcccccatttttgtgtcattccacttggtggggtttttcttctacatctattttatttgccaattttgtttatctaaattatatgatcagatgctaacaaatgctcctcactcttgtgccttgttctgatttgtgtttatttttagcaccagaaaagtaccactgtaagtcatgagatgtctggtctgaattggaaaccctttgtatatggcggccttgcctctatcgtggctgagtttggtaagaatgtgagaaatgacaaatctgcattatacggtatagatggtagcttatgatgatggttatttttggtgaaagctaggtaaaaaataagaagctcgccttattttgaaaattgtctcaaagccatgaagtaatatttcagggaaagtactactgatggtatggcagatgagttaagaaaagtcaaactaaggaaagcttttttggtagtttagtgatttgttagtttgctaggcttaagtaaaatacatgaatatatagagggagttgatatgtcataagggtttttgctatatttctgtattaatagtcttttatgctaaattatttataagtttatttgtactgaaagtcctttttttcaaacctctttcccattttagaagaaaatgtactaacaagatcaaacaagattctcttctacatgattttgattttgaaatatttttagattgtcgtttttttcatcttccagatgttctcttttctaaactattcatgagtgactactgacgttcttggcatatcctgtggtgttgtgatatttgggtcatcagtgaccagagctacctaatcaccttgttagttttacaccctgaaatatattttgtcaatgtgatgaccacttctgtttgttgatgtaagaggtttggttaaagaaatttcccccccaaacactctgctggtattagtcctgaattacctaagggaccaggatgagtagaaccaaataagactttgccattatctttcataatattaggggactatttgtttcttgtaaacagataaaagaaaaaccccacaaaactttgtaacactatataagagcatctggagcagcaatcccatgctttcctatctttgtgaaaatttagggagattttatgagacacagaggtggggagacttggggtgggaaggggcaggagggagactgataaatgccagattatatgttacagatgaaataaaaaacaacatttaattattttgcatttataatagggcaatctgaaagcattttattatattacagtttgaagtatattgtgggtcaattggtgctgcctatgtatagtataatgcatttcacttaccacatgcaactcatgttctctgacagtggtattctactagagctcttctatgtgttataaaaaggactttgtcttaggattcaaatattgtccttggcttatatttagcaacaacttaactgtgattctttggacatacttataaataagtgtgttcctttatagggactttccctgtggaccttaccaaaacacgacttcaggttcaaggccaaagcattgatgcccgtttcaaagagataaaatatagagggatgttccatgcgctgtttcgcatctgtaaagaggaaggtgtattggctctctattcagggtgagactggttctttccttatatcattaacagaaatgctttttaaagaagccatagttttcagctgtctgatagtttgtgtccgtttcatattcaccatttcaacttgtaattcagtattgatatgccagtttatatttctcctgcttgtaagtcttgagctttggattttgtgttcatttggttataagtgataataacattttaaaatggatatgtcattgcagcataggctttctgtggatttcccgagagtcactaatagccactgttaataacagcaccaattaattatatatatttttgtgatatccctcctgagttggcaaattctgacttcctttaaaattttcctctttgaaaaaatattattcttgcagtttaaacagaaagtgcataatgagagagagggagacccatctttatcatcaccttttgattagccataattttgtggtttactgtctagtttgtagtttatctgttgccagtttcctaggccactcctgcatctaggctaccagtttattactcagagaatagacatcaattttattgttaaactatgttacatcgttaaactatgttagacttaatttaaaaggtaattttcttgggggaaaaatcaagtagtgtatcctgaagcatcctgaagatgatccaccatcctgatttgtggatcatctgtttcaccttgttctttcatcagcatagatcatcacaagatattttctgatagcaagcaataaagtcagaaatatgcatatttagtcatcatttaaaaatcctaaccatttgagctgctgctgtctttctatttatacctcctacagtatagttctgcaatttggaagaatcccaaaggaggtatgaatgagaatgtctccagtttaaaggagaacttaaatagggtggaattttggctctagtacctccttgttgatgtgattaaagacgtatctgcaactgttaggaagtagaggttgatttttttaaaaaaatctttattaggtgagcaatgatgtataattctttttatacattgctggattcaatttaccaatattttcttaaggagttttgcatctaagttcatgagagacattagtctgtggttttccttttttgtactgtttttgtctggttttggtatcagggtaatactagccaaaattagttgggaagcattccctcttctgttttctggaaggaactgtgtaagcttagtgttaatttttaaaatgttttgtagaattccccagtgaaattatctggggctatttctttttggggaacatttaaattcagagtgcaaattctttaaggttatcatagtttggggtgctataacaaaataccatagactgggtgacttataaacaatcggaatttatttctcacagttctggaggcaggaaatctgagatcggtgccagtttggtcaggttctgctgaggtctcttttctgggttgcagactgccaagacttcttattgtatcctcacatggcagacagagtgagggagctctctgggatcccttttataagggcactaatcctgttcatgagggctttaccctcatgacctaatcacctcctattaccatcatattgcgggttaggattttaagatcttgatttggggacgatacaaacattcagtccattgcaatgggtatgagttttattcagattatttgttttatctagttgagttttggtagcttctggttttcaaggaatttgtccatttcttctaaggtgttgaatttatgagtataaagttgtttataccatactcttattgtccttttaatggctgcaggaattgtagtgctagtccctgtttcatttcttatttgcatcttctgtctttttatctttgtgagtcttgctagaggtttatcaattttgttgatttttttttaaagagctaactttttgtttcattgatttttctctattttcctattttcaatttcattgatttgtgctttttattattttcttttgcttgctttgggttattttgcttttctttttctagtttcttgaggtaggagcatagattattgatttgagactctacccccccccccccttttttttttttaaaatgcaagcatttcatgctgtaaatttccctcagcactgctttggctgcatctcatacattttaataggttgaattttgttgtcatttagacctgtgaattaaaaaaaaattcctttgacagacacttggtctgaccaatagattatttagatatatattgtttaatttctaaatgtttgaggatttttcttattgatttctggtttgattccattattgtcagataacatattgtatatgatttcagttcttttaaatttgttgaggttggttttatgacccagaatgttcagtttcttgctgagtgtttcatgagtgcttgaaaaaaatcatattctgctgttgttgggtagaatgagatgggtagtccaaataagtaggctatctagatatgtataatctgaaaatgttgagaataactttttacttttttttttttcagaattgctcctgcgttgctaagacaagcatcatatggcaccattaaaattgggatttaccaaagcttgaagcgcttattcgtagaacgtttagaaggtcagtatacttaccctcttttgaggtgatactcaaagggattgttgaaatcatgcttagtgagaaatgttggtcatgaggtgcctgagaatggaggagagtcactgcaaagacaaagtgagcttgttctaacttggaataaatctttgcagaggtgatatatgaattagagagacctgttcttcaaatttgtcccttttcctatcaacaaaaaaggcatgtgatcatcccaaaagaaacatggaacaatcttgtccagaaaattaatgctatcttcatcaataagaggacttcaactgtaaggcattttctagctggcaattttgataagcttttattaggcagaataattttaggctgttttctaaattctgatgtacctttggctaccttatgcatattcagcattatcatatgtctgtttgctgctgtagcattttccatcatgatactacactaaatggttattttaccacaggcctggggctgttggatgtttggggacagctggaaagcctttcggttagtaatgtcctttgaatcactttattgtcctaaagtcaactttttctgaagcctttttttggggattgtgaagggttctcttccacctctttctgaaatatttttctttcatagattcttcacttgggtttatttagtttctatttgtggggtcttcatggtgtgaaggagcggtaaagattgaatttcactatagaacaatgtgctctgtggtttctttgttcttttttctcactgaggagatttagttctaaatgattgctttttcatatttgactacagaaatattttataaattaacagaggctaggagagatctcaggcctatcaaaattaatattcaaataagttttttgtattagacgtaagattttctcttttaacattcagttcctgaatctttagagttgatgattacccagaaaaagacttaaaaagtatgttctttagatgtttgaaaaggtcgaaggggaaataccaccttctgaatttgtgtgtgggatactgatagttatgtagaagaaaaggacgtgttccagtgtcctttagaaataatgatgtttttagaaatgatttatattttacaagttttaatatattttagcactgaattgagatctagaaatatttgagtttctttattttcctaagctttttggttcatttctaaagtcatctctctaaccaagtttcccttcctccagtaggtcagtagtatgtactcaaactggtgcctaatacaagcagacctttctttttcttttccttttcacagatgaaactcttttaattaatatgatctgtggggtagtgtcaggagtgatatcttccactatagccaatcccaccgatgttctaaaggtaagagagatacagtgtgatttgaaaggagcataactttgagtcagatttgggttcagattcccactctgtcacttgccagctgtagaaccttgggcaaatcagttaactgcattaagcctcaatttcatcatttgaaaaatgaatataatacagtgtttataacatagagttgtaaaggattagcgataatatatatataaactgcctatcattgtacttggtgtagtagatgctcaataaatggcagtcagtttattatgatatgtgttaatccactggtcctcacactggggtatgcaagaccctataggttctttccaagggctatgcagttttataggaatcaatttccagatctcttacatccatttgtactccatcctaaaactggtacgagaatgaatctgttcataatagcccttactcaattttacaaaagaaatgtacgtccccacctattctaaatcttggtatggtatgttgacctgtggtataacctgggatgccaaacagaggggtaaactgaaatacagttcttggagaagcctattttagtaaccaatttgggtatcttaagtctgtaatgcctctgtctttccctgtcttattaatatttctattcagggtgagatttggctttaaacatggtatattttggcctgtattggaatattctgaattcagaaccagaatagtataggttggtggtgctgacttgttaagagtatagttggatttctttaaggttttttcaagtcacagactgaaacatttcttttaatataaattttcatcttatttcataaaatggtaaatattttctacttattaacgtatttaagcttatgattagttaaaagcactaaatataggattaaaataagtgaggggaacccaaagttttaacaaattattttaaggggattgcgagaaaaaagtaagaggacacatgcttttttaaatttgaccactagtgaaaccacaagtggctaggttagcaaaggagagatctatttattgcaattcagagaggggtttgagaacagagagaaagacatgaaaaacaacacacatgaaataaaccactggtggttgatggataaaaatatgagacagtctttctggactaaaatgatagtaatttacagaatttttatatcattttaggtttacagaacaagtttttttttcaccgtttattttagattcagggagtacatgtgcaggtttattacatgggtatattgtatgatgctcaggtttgggatatgaatgatcccatcacccagatagtgagcacagtacccaacagtttttcaacccttgtccccctccttctctcctgcctctattattccctggtgtctattgttgccatctttgtccatgagtatgcaatatttagctcccacttataagtgagaacatgctatctttggttttctgttcctgcattaattcatttaggataatggcctctggctcaatccatgttactgcaaaggacatgattttgttcttttttatgactgcatagtattccatggtgtatatgtaccacattttctttatccagtccaacggtggtgggcacctaggttgattccatgtctttgctattgtgaatagtgctgtgatgaacataggagtgtatgtgtctttttggtagaattatttattttcttttggatatatactcagtaatgggattgctgggttgaatggtagctctctgttttaagttccttgagaagtctccaaactgctttccaaagtggctgaactaatttacattcccaccaatggtgtctaagcattcccttttctctgcagcctcgccagcatctgttgtttttactttttaataataaccattctgactggtgtgagatggtatcttgttgtggtttgatttacatttctctgatgattagtgatattgtgcatctttttatgtttgttggctgcttgtatgtcttcttttgagaagtgtccgttcatgtcttttgcctactttttaatggagttatttggtttttgcttgttgaattaaattccttatagatgctggataccagattttcatcagatgcatagtttgtgaatattttctcccattctataggttgtttctttactctgttggtagtttcttttgttggaagaagatttttagtttaatcaggtcccgcttgtcaattttttgttttgttgcaattgcttttgatgacttagtcataaattatttcccaaggccaatgcccagaatggcgtttcctaggttttcttttaggattcttaaaatttgaggtcttacatttaaatctttaatctgtcttgagttaatttttgtatatggtgaaaggtaggggcccagttttattcttctgcatatagctagtcagctgtcccagtaccatttattgaatagggagtcctttccccatgcttatttttgttgacttagaacaggtatttatgaagagaatttaattgaagagctccttgtacctcttactctaagcagacaaccccacctcctatggcctggccttatacctctcaatttcgtgtcctttctaccttacaggtgtaaacttacttccatctatacccatccttatcttgtcttactgtagtggttttccagaccagaccagtattacctgggaacttgttagaaatgcaaattatcaggccccatccaacacctactgaaccagaaagggtaggatggggcccagcagtctggtttgacaagcccttcaagtgattttgatacatgctcaagtttaaaaaaaacctggttactctacttttattcacttctgtttcatcagagacctttatcatttgtcctctttctcttattttcagtgtcttcctctttaccggttatcttctctcaaatgataaatatggtcaaatctctctatcctaaaatattttcttgaccctctgacctcaaaacaccatgctatctcttttcttaccttctcatccagattttacaagagtaatctttacattccatttccttcataacctgctgtaatcactcctgctacttgattgaaatcactctccacagggtcagcagtaatgtcctcattatccaatccagtggacattttagttctcatcttacttaacctattttgactaattccttctactagaagttcttttttggttttgttactacactatttagattctgcttctagttttcctattccttagcttcattcatgggcttcctttttatgcatatactttaaatctttttcttctcccacccaaggttccatctttagctcttttctcctcttcagtctctccttgatggcctttttcattctttttttttttttttactattattattattttttttgagacggagtctcgctctgtctcccaggctggagtgcagtggcgcgatctcggctcactgcaagctccgcctcccgggttcacgccattctcctgcctcagcctcctgagtagctgggactacaggcgcccgccaccacacctggctaattttttgtacttttagtagagacggggtttcaccgtgttagccaggatggtgtcgatttcctgacctcgtgatccacccgccttggcctcccaaagtgctgggattacaggcgtgagccaccgtgcccgaccgcctttttcattcttaatactttagctctcactatatcagttaggttatgggctaagctactgtcacaaagaaactcaaaaataaaaggtctccatatacaagtatttatctctctcatgtaaccatctagaggactgcagttaatgctggtaaggcagaactacttcatgtagtcatccaggatccaggtttcttcatttttgttgcactgccatctcctagggcagggattggcaaactactgtctgtgggtcaaatctggcccaccccctgttgtgaataaagttttattggaacacagccaccccatttttttatttattgtctataattgcttttgtgcttcagtgacagagttgagtagtcacaacagaggtcataagccctgcaaagcctaatatatttactgtctggacccttacagaaaacgtttgttgacccctgtcctatggtattattttagtctgtatagttgaagttggaccactatcaaacctacattccagcccatgggaagagagtcaagggaaagcagtttccttttgatttgtcaaaaataaagtcaggaaaaattttaaagtttattgtatgcaataagagaaagtacgggtctcgatccaggatacttcaaaccaaatgataacaaacttatcttacagtacagtttataaagcagaagggcagaaacattttgaccttttttgtgattggctgttataaattatcgttcttttaaaggcaagcagctgtttaaggtgattgtctatagttattggtttcatttcactgaagcattctgacaaagatgtaaagcttatgttttgtgtttatgattagagatagcagttccgaggaaataggatgacttaaggttcggttacctgatgatgggtggctggtcttggggtttatctcaattgttgcctccatttttatctttaacagtttaaatctttaaatatgtagttttggagaaacaatttcaaacatatgagtgagtagaaaataacatagtacagtgaacgtctttgtacacatcacggaggtagctaagattttgctacatgtgcttttttattccctttttctgaattattttaaggcacattccagacattgtcattttcccccatatacttcgatgtgcatctcataaaaggaatatttttctatataaccatggtgctattgttacatttaacaaaattaacatttattcattagtaacatctaataatctatgttcacatttccagactgtcttatattttacagttgatttgtttaacttgggttccaaagcctatgcattatatttaatagttatgtttcttaagtcctttttattctagagtaccccactcctgtccatataccttttatttatttatttatttatttgctttttgccattaacttgtcaaataaatgggatcagctctcctttagaattcccaagttttggatttgtctttttgcttccttgtgatatcatttaacttatttctctaaatcttctctctctgtaaaagggaaggtttctgtaaaggtcataccgagtcatgtgaggaggcacacagtgtttggttgtcccaatatagggatgttaaggttgatcagtgggttcaggcgtgacagcccgatttctcctttgtagtttcctgtcaatccttcatctaatggtttcatccattggtggccattacctgaattgattgtttcatttaaggtcgcaaagtggtgattttctaattccatcattccatccatgtttcttagctagaattcttctgcaagggcaatctttttttttttttttttttttttttttgagatggagtctcgctctgttgcccaggctggagtgcaatggcatgatctcggctcactgcaacctccacttcctgggttcaagcaattctcctgcctcagcctctcgagtagctgggattacacaggtgcacaccaccacgcctggctaatttttgtatttttagtagagacggggtttcgccatgttggccaggctggtttcaaactactgacctcaggtgatccgcccacctcggcctcccaaagtgctgggattacaggcgtgagccactgcgcctggccaaggacaactttttctcatttagtggggctgtttggctgttctgaaatataggcaatttccttttaagcaagacactgggaagtttcaaccattatttctgttcacgttccattctgaaggacttggttccatggctacatctagcttcaagaaaggagagtagattttgggagacaataatctaccacactacccagacctactgggtcatctaaactagaaacctagatcatctttgattcttctatatctttgcttccttctagtattggattaggtatcaagtttctacagattttgcctcatctgtatttctcaactttgtcctttccccaccattccttttgtaggacctcatctcagtagcctcctaacttgtcccttcactctagtgtgtaccccactccctcaacccatctccagatgaagctggagagatctatcgaaatccatatctgatctactatgtactgcttctttgcctttgtgcacgtaacactttcttcctgaaacgtctttctcattttcctggtgaatttgtccttcaagaccaggctcataaacagggccaggactagggcaaaacaagtaaggcagtcccctttgatgcagaatgtaagaaggtgccacaaaactcagtaatcaatataaacaacatttgtatgtagtatttttaaacaatcaaaattaacgcaaaaaattcatgatgaaccaaataccaaaatttcacataactcatctcattcaccttaccctaatcctggccctgttgagtcctagctttagttaaatttgatatttgattcattatggctttttgtggattaattttggttaaaaaatatcatattgagacatcatttatcttgattactgagtttttcttgcactcccttacatttcatgcctaagaaaagtacttcacttgcctcacgctagcccctctgttgtcaggaatcacctccttaaagaagtgttctacttaccacagtgtattagtagttttcatttgtctttgtgataggttgtatcttgatttaatgggtttaggtttttataattataatatttgaaaactcttagtagtaacagttaactttctgcataaaagcatgttgccattacatgacttactaaagacatttgttgaaacctagaatggtagcatggtgcttcataaaaatcaggcctacatttgggccgctagtatttagtgactgactactaggattgtatgtgtgcagagtctgtgggaaattgtaccaaaccttttacatggccatttaatgctatctttccttcttgcagctctcaaaggccacttggcagaatataatattatgctttttataaatagaactcaacttaaggtctcataaacataaaattatattttaaaacacatttttcatttttataattacgtaagcaatgcatgtttaatgtagaaaaatatggaaggcagaaaaaacacaaaagagaaaaatgcttacttgtagcctcaccactcagacataaaccactgtaagtatttagttttatatgttcacctcgtctctttgctgtgcttatggatatttttaagtttacatgttttttataaaaatgatatagtacttcgcaattttttttctggttagcaattaatttttgatatctttcagtgtcagcaaataccattgtacaacaaaattttatggctccatagtattctattaaatgaatgtataatttctgtaaccaacctgtgtagttgtttttggatattaagttgtttctaatttttcactaaatgagtcattttttagtcctgctgagtacttgatctttcttttctccaaattttcttctagctccagaaataatagacttagtgtgaggaatgtgaggccgatgaaaaccatttttataaaatacactttgacacaaattctttttctatacagtttaactaattaactttatcataatagcagatatttttctgggattcctgaatacttctttttaaattttagatgaatttaaaatgaatttaaatgaacttaaaatgaatttagcattttggttctctctgacaaaataagatgttcacctcttttcattttagattcgaatgcaggctcaaggaagcttgttccaagggagcatgattggaagctttatcgatatataccaacaagaaggcaccaggggtctgtggagggtaagtactcttttcctgctattatcctacactctcagttcctacaatttgcagagaatttttttttatataaagacataaaatcgtgaattataatccaaaaactaaggtaagaaactcctcatctcccttgaaaggcccaaaacttatcattggccttttatttctgcataatgtttggggattatataggtggggaaagttattacattatttgagatggctgtttcgatcatattcacagtgaatgtagttgttcagtgtatttttttgcaagttctgtactaacacgatgatgtatgtctttgtagtgcttatgttcaaaagctgttaccggctgtgtgctgtggctcatgcctgtaatcccagcactttgggaggccaacgcgggtggatcacttgaggtcagaagttcaagaccagcctggccaacctggtgaaaccccatctcaactagaaatacaaaaattagccaggcatggtggtgcatggctgtagtcacagctactcaggaggctgaggcaggagaattgtttgaaccctggaggtggaggttgcagtgagccaagatcatgccactgcactccagcctaggtgacagggcgagactctgtctcaaaaaaaaaaaaaaaaaaaaaaagaataagaaaaaaaagctgttaccttaaacaattttttaacctaaaaagtctaacatgtactgtaaaatattgagaaaatatagaaaagtaaaaagaaaaaaaatccagtagtcccactgcctagagataatttctgttaaactttttgtcatattatctttcagtcttctatctatactttgcttttcgtcattgttgctctaactttttaatccctaattattgtaatattaataatattattagtagaatatacagagagagtggaatgggaaatctattaatagacttttaaataaaaatgagagctttggtatttttctttataatttttcataacaaaaatttcaagcataaagaaaaattgaaagaatagaactatgaaatacatacctatgagctggatttgatggctgttaaagtttgatcgtatttgctttatctgtttacgtgtatacagacatacactctttttagctaagctaaatgaaagtaggttgcagacatcatggcactcaattaaattcttcattgtgcatctcctaagaataaggatagtcttctacataataataataccattatcatatctaagaaaatgaacaagtccctaatacctaatatctagcccatattagaatttcctgttaatgagaccaggctaatttataatttattttcttccttcctccttttttttttttctttttttttttgacagggtctcactttgttgcctaggctggtcttgatcttctggcttcaagtgatcctctggccttggccttacagatgtgagccaccatgcctggccaggctagttttcttataaagtgtttcctcattgtgtttgtttctctatctttatagagaaaatatctttatatttacagtttatttcctataaactgtaaatagggtccattggcttgattagattcatgttaaacatttttggtaagggtgcttcataggtgatgctgtgtatttcatactgcatcacagcaggaggcacataatattagtttgtcccatgattagtggtgccaagtttgattatttggtaagatgacgtccaccagatctcgccattgtaaaacataagttttttccccctcctttgcaattagcaagtaatctgtggggtgataatattctagtaatatgcatatatcctaatatctaatcacctttcatctaactaatggtctttgcatccattaatggtccttgaggtttgctttttggtaacagcagggtacacttgcttgatatgtctaatttaaagccagaaaatagaactaactagaactttctcacaaactgatgacaaggaacaaaaacagaggaataaatagaattggagattttttcacaggagcatagctactttattttttattgtagtaaaaagtagacataacataaaatttaccatcttaaccatttttgatggttcagtagtgttaattaagtacattcacattgttgtacaactgatctccagaactctttaggtcttatcaaactgaaactctatacccatgaagcaactccccatttctccttcccctagcccctggcaacccccattctcttttgtgtctctatcaatttgactattataggtacttcatgtaagtggaatcacacaatatttatctttttgtgactggctgattttacttagcatgatgttctcaaggttcatccatgtggtagcatgtgtcagaatttcttcctttttaaggctgaataatattccattgtatgtatataccacattttgtttatccattcaaccattgatggacatttgaatggcttctgccttttgcctattgtgaataatgctgctgggtaaatgggtgtgcaaatatcttttttagaccctgctttcaattcttttggttatatagccgaaagtggaattgctggattatgtggtaaatctatgtttattttttgagaaactgaacataactgtttttatgatccaggctacttacatgatctaggcacctaacataaagaagcaaagtacattgttgaatgtattcttctgagacagacatgttttatttgcatgttaaaaatacaggacttactttttcatttcaacaagaaaatatgtttgcatttttcttcaaacgtgctcatctttgtttatcttcctgctctgattgtaacatgaatactgaaaacatttcactttcttcctaacttcattgtaagaaaaaatagcacgagcacaataacaaagtataactagcacttaccacagagttggagagagagtagcatggtggggactgtggtcctggagagcacggagagcacagtccccgttgagagaggacagctactccttagctccagcccattgctgccatgcgttgatggtgagcccggtgtggtcaaattttctggcctttcaagagaagctggaaatctgcatttctgtgtgaaatatcctgatttttacatattaacagccaattcagtcttttggaaacactgtgggccactcgaaacatgcctatagcctgattttggcctgtgggctccagtttggggccttactgttcaccaaagcagtcttctgtgaagggtaccctctttatgagaagcaggtcaaagagccagcaaggaaggcacccttcggctagccagccatatcagcacaatcaaacatcttggcatagctgtgtcacttccacttcattttatttatttatttatttatttatttatttatttatttatttatttattttttgagacggagtcttgctatgttgccaggctggagtgcagtggcgcgatctcggctcactgcaacctccgcctcctgggttcaagcgattctcctgcctcagcctcctgtgtagctgggattattattattatttttttaagtgaaagcaagtttattaagtaaaggaataaagaatggctactccataggcagagcagccccactttataaattgagtttgggaacttagagatgactgaaaactttttaatatagtggttatcccagaaagcagatgtcctcatggtatgttattttcaattttaactgacacctaaacacagttataaaagtaaaacattcattgtgaaaatgtaaaaagaaataggcataaaaatgaaaattaacatctcttatcctaataccagaggaaaaaaatattttgatgtatttcgttctaatcctaagaatttggcctggtgtgtataccttttcccctgaagatagaataatactatatataattttatgccttgctttatttaacatgctatcatgctatcataagcgttttcttgtgtcattaatattcttcaaaaatgtgacttttaatgctctagcaaccctgtgttgtaatgtgagctgtgataggagcatcgtgctagtgagtgaaaccctggtaatgttaccacagcaggacttgtaagcgaaggaccactttcccttggcttttcctcttgcttcttcatacctttgctgtcaccttagtgtttgtcctttctgcacatctgaaaattctgtgaattaaacctgaaagctctcttctccccactgatttttgcttcatgattttatttataacagctttattgggaaaattcacatattataatgataattcccaaattctttattgagataattcacataaaattcaccatctttaaagtatacgatttaattgtttctagtatattcacagattagtgcagccattaccactgtctaagtttagaacattttcattaccaaaaagaaacccttaccctttacccatcacttctcatttcccccagccctcctagctgtggacaaccactaatctactttctgtctctatagatttacctgttctaggtatttcatgtaaatggaatcacgcaatatgtagactttcgtgactggcttcttccatttagcatactgattttaaggtttatccatgttgcagcatgtatcagtactttattcctttttatgggtgaatattaattccattgtgtgggtataccacattgtatttgtcccttcatcaattaatgagcatttgggttctttgcacattttggctattatgaatactgctatgaacatttctgtacacatttttgtatgaacatctattttcagttctcttgggtatatacctaggtgtagaattgctcgctcatatggtaatctgtgtttaactttttgaggaagtgccaaattgttttccacagtggctgccccattttacattcccactgacagcatataagggttcctatttcttcacatcctcaccaacacttgctcttttactttttctttcttaatttttttaaatttttttttgaggcaggatcttgctgtgttgcccaagctggaatgcagtggtgcaatcatggctcactgcagcctcagcctcccaggctcgggtgatcctcccacctcagcatctcaagtagctgggactacaggcacatgccaccatgcctggctaatttaaaaaatttttttaagagatagagtcttactgtattgcccaggtttgtctagaactcctcctcaagtgatcctcctgcctcaccctctcaaagtgctgggattacaggcatgagcccctgtgcctggccttcttttacttaaaagaaaaatcgttatagccatcctagtaggtatgaagtggtatgtccttgtggttttgatttgcatttctctagtgactaatgatgtttagcatcttttcgtgtgcttattggccatttgtgtatcttttttgaaggaaatatcttcaggtcttttggccattttaaaattggattgtttgccttttttgttgtaagagttatttatatattcttgacactagtcccttatcagatatatgagcggcaaatgtttttttcctttgtgtatgttgactcttcactttctgagtggtgtcttttgagtcataaaagtttttaattgtgatgaagtccagttgatcttttttttttcttttgtcttttgtgctttgggtgtcatatcaattattttatttttagtatagcaagtgaattggaaatttgtatatgttccattattagtcattgatttgaaagagtgacgtctgtacttcagacttgtatttttctgttacttttcaactcctgacctattttgttcactctaagacatcactccctttgtatttccttggtgcctaatgtcacttgtgtttcgtagggtgtggttccaactgctcagcgtgctgccatcgttgtaggagtagagctaccagtctatgatattactaagaagcatttaatattgtcaggaatgatgggcgatacaattttaactcacttcgtgtaagtaggatgggatgtgctcattttatttccagcattttgagcacaaaaagcctcttttactgaaatcctcaggtggaatttgataactggtacgtatggcctaaattcccttgtctctcctattatcagaacttcaagccttatgaacactttatacttcacagaaatgccaggtgctatgggggcttgggtacttgggaacattgtctaatacagcagcctatcagaggtctatttgatttacatttatccatacatagcttctatatctaataagcacatctattatttgctttggttaattttgtttgagaaagcaaacttttctcagtgggaatcagaaaaaaaggggtaaataaggtctgtgaaactaaagcacagttttttggctaaagactgttactgatctcattttacattttctttgtcttgcaacctttatgataattttgttactcaaatgcatttggcatgtgatgctgtggtttgaaaaatttatgtaactaatacatggtgcatgatactttctacttaggaatcttgttaggtttagaaactctcctttaaaaaaaaggctgagtttcagattgaaaattgaagggacagcctttgaatgatgtctctttagaaaaatttcctgtctctttagattgtaacgaaaggccaagtgccaggttttatctgatgggtctgagttatattgtacagtttacgtttggcctaatttctgtttaagtgggcagggagtgaaagtggggtcgatctacttaaacttttcctcttagttccagctttacatgtggtttggctggggctctggcctccaacccggttgatgtggttcgaactcgcatgatgaaccagagggcaatcgtgggacatgtggatctctataagggcactgttgatggtattttaaaggtaagtacattgtggatttgggttacaatttggctttctttgatgtcttagaccttccttcagttcttattattagttgctacataccattttgaagatgaaagaatcatatttttttagtagcttctcagttattcccaggtagaaaagctgtctccttagcaatctgctaatttgcagtggtacttaatataatgattcccatttgaatgctttaaaatacaggatgcttttattaatagtatcatgtagaattattgatagaaaagacaatatatcccccatttgcctacttcatacaacacagagaccctgcaatagaaaactcaatacttaaggaaaaaagcctgtattttatttcagttcacggttatgctgttgttcactttggctttgaaagttcctgctgttgtgtttgtgggaactgaatattctaaaagtattacatcattactggtgatattattgctactgaaaacaaattgaggctaaaatatgatgttgccatatggtttctctcctgttatcagttttgtttaacaactattacatattagacaccattttagtagttagagagaaattacagttattacaaaagtactataggtatacaaacggatcatcagtacagcctgataagtgataaactcaagagttctcaatttggaagcattgaggtaggctccctgtagatggtggcatcttgaataacaataactcatatccactgagtgcttttttgtgtgtcagcaactgtccttatgagacttatgtgtattcgttcattgaatcctcaccattactccacgaggtagacactgaagcactgaaagattaagtaagctgcctaaggtttcacagctactaagtgggagaactggaatttaaactcagatcacttgacctcaaactgacatttacctctccactatggtgctttcctcatattggtggccaagggttagattataaaggatactgaatgctatattgaggtgcttggacttttttttaacttgtcagggagctgttgaaagtttttaatcagattagctttgcattttaaatagattactttggctttatggagactggatctaccacagtggttcctcatcttgggtacacattggaatcacttgggagaactttcgcagctccctcctctaccttagaccaattaactcagaacctggggagtaaggtccaggtgtcaatattttaaactatatcaggtgactgcaatgttcacctaaggttgaagactactaaggggataagcctggagccatggttcttcaaagtttaacatgcatcagaattacctggagggcttgttaaactgcagttcacttggagccatctccagattctgatttagtaagtatggagtgggacctggaaatttgcatttttaataaattcccaggcaatactgatgttgctagtctggagaccacacttggagaaccactgacctacagatagggaagctgattagaaggctcttgtaatctgagaaagaggggatgaaggcctgaacttgagcatgataatggagatatagaaggtgggacagagtcaagaaagaattagttgatagagtcagcaggatttgattgactggatgtggaggggtgtgggagaaaagaggtgtcaaagataagttctgggtttttggagttggtgaccaggtggtgacattcattgacagaggcatcacaagaggagcacgtcttgggggagacatcctagttttggatactcagtttgatgtgcatgaggaaaatccagtggatacatatggatattctagccctgactcaagagagggttcatggatatagataaaagcccatggagtcattagcacacaggtggtatataactgtggagagagttgaccaaggagagtaggtagaggagttcacaacctttttgccttcccagcatactggagtactataaaattctttcccgtaataatgattgcctggggcagcaattctcagaccctggaaagtatagtttggcaaaagcccccattggtatttctgcatttgacaattactggtgtagagggaagagcactgggccaaggaaaaaacactgcagaataccaatttttatttatttatttatgcccaggctggagtgcaatggcgtgatctctgctcactgcaatctctgcctcccgtgttcaagcaattctcctgcctcagcctcctgagtagctgggattacaggtgcccgccactacgcctggcttatttttgtttttagtagagacagggttgcaccatgttggtcaggctggtctcgaactcctaacctcgtgatccacccgccttggcctcccaaagtattgggattacaggcgtgagccaccgtgccctgaccggaataccaatttttaaggtcttggcagatgaggaacctaggaaagacaccaaagacgaggaaacttagagagtagtgtcatgggagccaaagaagttaatgagtttcaagaaggaatgagtggttacttaatgtcacatgcaatagcgatctaatatgataaggactgcaaagagtctgttggatttaatattttttagaaggtttggtgaattggtgtttgcaaaagccaattgctgtgcattgaggaatatgtttgattattcattcaagtaataaaaaagaaaaaatcaagctgactcttgaagaggcccccccacacacacacaaaagaaagaaatgtttgtcttatgtgctaagcactgttctaggttgttgaggatgtactggtaaaccaaaatgtccctgtgtttatgacacttagattctaatagaaggagataaacacaggaagtaatgataaatagacaaatgtaaagcactgtttcaagaagattggctaaaagatttactgtaagatttactatacaataatatagtaatagctaatgtttattgaatgcttattctatcgcaggcactgtacatagagtatatcctttaactctcacagcgaccttgtggagtagatattatctttcccattttataaaggaggaaacttaggttcagagtagctaagtaataacttacacaagattacacagctaataagaggcaggtctgagacttaatccacaatctgtctgattccaaagtttgtacttacagccactatgctgttctgaatctgcagaaacatgtttttatgttggtagtaacctttaagtacttacatttgctcactcatttactcacttgctactaaaaaattttaatagcagtcattctttaaaatgactttgttctattttgccatttatgtaatagcatcagactttattattttgtctatgcttatctatagaagttctttgttttcacacaactgccttatgccaaaagatgcctcccagttctcacgttgtgaagaaattggtcactgtttttggaaatttataaagattcaagccgggtgctgtggcttgcatcctgtagtcttagctactcgggaggatcgcttgagccagagtttgaggctgcagtgagctatgtagtcttgccactgcactccagtctaggcgacagagcaagaccatgtttcttaattaaaaaaaaaaagatccagatggctcacaagagtgttagagacccttactgtttttgtgttcacctcttcaacaaatacttacgggaaaatttcttgcaccagacactgtgttaggtggtggtgacacaatggtgaacaaacaaagctagtttctaatctcttggagatttcattctagttgagggagacaataaacacacaatgcacagtataattttagatagaaatagatgctatgcagaaaataacagcatattgcaatagtgactcagtagtggggaactacttcagcaaggatggtcaagaaaagcctctgaggaggtgacatttgagctgagatctgaatgatgatgagctggccatgagagctgggagaaaaccatttcataaagagggaataggttactgaaggcctgagttggaaataagctggacatgttcaagggttagaaagaaagctagtgtggctgagtgtgtggtgaatgaagggagaaactagtaggaaatgaaactggagagaaaggcagcagctaaatcatgtgggatcctataggtctttgcagagactttgtaattagaatgaaatccaccaggaagccatttgagagctttaagcaggaaatgttatgctctcatttataattttaaaagattgttctagcttctaggtagagattttagaccaattaaaagtccattgtggtagtccaggtaagagattatgagattggatggtctttcagaggtctcttgtcatttaacagtctaggttctaggttattcacatctgggctttatttggggtgattttcacaattttccaacatcagttttggtctcagacctttactatttgctgaagatccattgggggaaacatattaccactatatcttcataaatattgtgcttattattttactgtttgttcccaaaagtagttagtaaggataattatctctagtatacttaatgtacaggatgggaaaaagaatatttacaactctggcttctcatattattgtcttatccaaatatatcctttttttagaattgtggtgggtttcacttcactattggaaaggcaaaataacatttttcaatgtctaacacaatgcctaacacactgtagttatgtaatagatatttgtccattatatacgaaccatttctgctggctaaattcagcacgtgccaccagtttacaacgtttatgcataatttatcatttaattctcataaccatgtatataagacccctgttgtataaagtaggaaaccaaaactcaaaacacttcacatttttcttcatgtaatcctcaaagcattcacatgaggtaggctatggcattatatagaatttataatgatgaaacagactcagagaagaataatgacttgcccaactttctattttcttaccctgctttagttctctttgtggcacttatttttggatataatatatatcaatttgtgtatttgtcagccccactagaatatgcactccatgagggtagaaactgctgtataggttacctattgctgtgtaacaaattactccaaaactcattgccttaaaccatttgttattttgcagtttctgtgggccagggattgcaaagcagcttagctgagttgattctggcttaggctgtctcctgaggttgtagttcatatggcaactagggttgctgccatctaaagccttgacaggctgggatagctgcttcagtgatcactcatgcagttgttggctggagccctcagttcctcaccatgtagtcctctcttcatgatatagcagatggtttcctctagagtgaatgaatccaagagagaataaggcagatgctttattatatataaaatatattttataacctagctatggaagtgacatatgttcactactaccatattctgttggtgacacagaccaaatactatggggtggaggctacgcaagggtacaaataactggaggtagggttcattgggggccatcttggaggctggctaccatagacactttttctgtcttgtttattagtatattctcaacatcaagaatggtgctttgcatatgtatggtaggtaaatatttattgattaagtgggtggatggatttagactacagatgaatttaaaatggacctttagagaaaagactattcatggagccataagttgccctggggtgggagtggaaggtgatgtcaaatgtagagaaaggtgaattcactctgtttttggttatatctttcctgcagatgtggaaacatgagggcttttttgcactctataaaggattttggccaaactggcttcggcttggaccctggaacatcattgtatcctttgagagaatgaaagcaagtgcttcaagctcccagataattctaggctatgggaaggaaaatttgattattaaagccttttaggctagtgagaaactcaagcatcccattggtgacccttgagaatcaaattaagcaaagaaacagctttcagttggaggctaatacaaactaaaagggatagaaaagatatgtcaaactttactctttaaaacaaaatgacaacaaacacagctaatctggaaggggctatgaagtttttagaaaccctgatggacgaagcctacaggaaagtccatgctgaggtggttcagatttcctacccctaactataggaccaaaatagctgggaaataaaaacaggacagaagacattcatggggtgaaggaatccacagccaagcaggcttctttcttcatgggtgaatctgtctcctccagttgtgtttgagtgcctcctaagtgcagagccatgtattggatactgtgtgtggtgttgtgtgtataatggtaagcaccgcagggttggaaagtaattctctgcccttgtggggtctgtagacagagagagggtatctcgttccctcttggaatcactctgatcatctaattaattatatgtcgtcactgatgttcttggttactgtgtgtgtgtgcgtgtgtgcgtttgtcctgtttccccctgaagactataaatatattagagttttactctgtttatgttgttcgatgccagtgatctgaatgggcacatggtaggcactcaatgcatgcttgatttgacaggtggtgttttatttatttatttatttatttttatttttttttttgagatggagtcttgctctctcgcccaggctggagtgcagtggcgcgatctcggctcactgcaaactccacctcctgagttcacgccattctcctgcctcagcctcccgagtagctgggactacaggcacccgccaccacacccggctaat

SEQ ID NO: 492 - DNA, 32742 bp, Homo sapiens
  source 1..32742: mol_type = other DNA
ccgcctcccaggccaggcgagcaggcgggtggctggggcgcctccacctcctcttcctaaagcggcgaggcgcagaggagcggcatcactcgagcccaggtcccagccaccaccactcacagcgctcggcgttcaggaagaggagcagcagcggaggcggctgcttcagcggcgggcgggcgccagaaaggtagactgagtcccagggagctgcgccgctaacagcccacctcctagccccgggctacgcgccgccagcccagtaaccccacttttgtgtgtcctcccaggccccgatcgaaaagcctgggagggccgccgaactacccccggagggaggagccagtccgaacccaaggcgccaccgccgcagaagcggagcgaggcagcattcgcctccatggcccactcgccggtggctgtccaagtgcctgggatgcaggtgaggaagcgcaggccgcccccgccgcccacgtgactgcttgggagcccggtgcgccctcggtgctgggcaccggcgacaagggacggccccagggctcccctgagggcagggccggtcactatggccaggtgacctgggagtagggctggaggtgtttcctggtgtgtaggctaggtagtgctcttcgctgggaaggcgaggcgggactggagcgcgcaactaggtggagattgagggcggttgggggtataaaaataggccagagccacagacacctgcgcctgctgagcttggcacggttggggatgggggggcggaacttaacctgggagagatggaagtgccttggaatttgtggggtataacgcgagtagtgagtgccctacaccccccaccccaaacacacactcaagttggggcggggcaacaccaggggtggcggcggcggcggcttgaattgggctcttcctgtgtgcgtagggctaagagagaggtgacctctttctccctttcggtactgctgcttaagggcaaagttgtagcttgctccccgacctagcccagcccatagtgtggcgtgagaaatgctggttctgttcagagtcactgaggtgatgacttctcagccccctccgtgcctttcccacaagatgactgttacatgtggttaaaggaagctttttgtcttggacaagggactactgcatgggacccaacttgttactcgaagtctacccagcccaaccccctcccattatattttcattttattaaagataagctatgtcagaaaactttttatgctgttatgtttttaaatcggtgcattttaggctatctgctaagtgttatccaaatttactaactttttaaagcattcatgttctatttttttttcctttgctagatggcctaaacaacccatttaggggctaaaaccactgaagcctcagtctttcatgatctaaaatgtgaaaacaaacttttttgaagttcaaaaataaaatgtttatagtaaatagcttatatttctagtagaaatcaaagagctgtagactggggcctcaatttacttattgatacatggagtttttttttttttttcagtgttctcattttatgaatgtccacaaaagtgatttttaaattctttcccaaaatgggatttatttgtgcacctagaactcttggtgtgtcctaaacaccagacatttcagctgcatttagggcaagtctgggttgagtctcaggaagttagtgtatattaaataaagagagagagagaaagggaaataggaaatagtagggcttaaaaaaaaagattaatccactcaagccttgcaaaatgccttaaactttcttcctctcaggcggcctcccctctccttccctccttcttttccccacgcaccctgccccacaccccattcattcagttctgcctttgattgtatcaagggaattcatagttcacaatactaagtacagttttgctgtttgatctgggaaaaagtgacattttctcaccgtgctcttctttccattctgtggagagtaaaacgatgcacatgtgaagtttgtctctgagggtctccatgcttctcgctccattgtgtgcgcgagcctgcgtgtgtgcgtcagcagagtgagtgcctccagttcatcaagtttgtgattctggggaactctgtgtgctgaggggaaaatggtttctgatttttattttatttgtcttgaacttattgaatttatatggtttaggaactgcttgctgttcagtatttctgattgctccctgcttttaattatctgagttgcctatctcttgaatttttaaatcttaattaatgtggattcgaatgtgaatcatatactttaaattacaaattctgcctttcactctgtgccctctgagttgtgattactttgtcccacctaatttgagtagggcaaacatctcaacgttagcaaagaagagaggaatcttttttttttttttttttggtcattctcttcatcttaatgaaatggtaaattcttaacttcttatttccattttatttctaatgtagttcttaagcactttgtgcagcacacagttttttccatagttgaaaatgtacaataccttaataataaatttgatagcatgcagtgtgactcttgaagctagactatttttattattgttatgtagcaaaatattgcagatgagatgcagaaatctatcgtgagcttgtaaaattctcctagagttttatgaaggcgttaggagcaacttttagacctttagaaaacttcagttagccatgtgttcttgaaattactgtatagtgtttccacaaatcagggtgaggtagccgaccagcctataactttttaacagtttattttagagaattatgaagattgatgggaaaaatgatttttccagaaatacaaagaaaattactttatccacaattattttctccctctgaggagagacgtgaagtagaagcccagctacctgttctatcacttaagatttccagcattcctgactttcaaacaaagaaattgctgttgccactagtttaaaatagaaaagaaacttggagtgaagaaagaaaacccaggatttcgtccagttcaaactcttccttatgaattagttattcaaactcatattgttgatatttcttaatattgtggtaacgaacattttttgccacgttacaccaaatgttgagggtatgaagttttttgtacttaatttgtgcttacttctttagtgtgtaactagaggaattttccataccagtagctgaactcttgaaaatatttaaagtacaacttaaaaaaaaaccaataaacctgtttctttccactcaaatatttactctttaatgattcaaaccctgttttctttgaagttttcagttataaatcatacttaagtttaagatatttccccttagagcctacaatagtatttttgaggacaagtttcatttagaatattgttgattgttaaatctttcgtaagatgtaggtggaagaataaagttaaatgttgagttagagtactaaatgttatgctttatgctgtgcctcttgttaaagaacttttaaagcttctgctaaagaactttaaaattagccttcatgtatctttaaatatgaccaaggtggtacagtttaaatctagttgtcatttgagatgagaagtagaaatgaagtttaacgattaatgatcactttattgaagacttttatctaagtggtgggaaacactgcccgacattggtgaacataatcactgggttctgggaagcatactgacgtatattacatgttccacccttaaagatcttaaaatcttgttgagttgttaaaactagcacatgaaatatcaaataatgcaaaatctgtgaactcactgtaagtataatagaagtttctcactggaagtgttgaaggcttccagaaagtaagctgaccctaaagtcttgttaggatgcacactgggcagggcatttccaagcaaggaaaaatccccagcagaggtagacagactaggattttttgactttacaatggtactcacacaaccattctgtttttcgctttccatacagtattcagtaaataacatgagctagtcaacactttgttataaataggctttgcattagatgattttgcttaactgtaggctactgtaaatgttgtgaacacgtttaaggtaggctaagctatgatgttcggtaggttaggtgtactgtattaaatgccttttcaagttacaatattttcaacttatgataggtttattgggacgtaaccacattttaagtcaaggagcatatgtatacaatatagataaggaaaggtgcactgcatttgtgagtgcatgcacacacacacacaatctttgagaacaggataaagtcatttgggctgtcatagagaattcctctagaaaaatgatacatgataaggtcggaaaactggattgagtacagatcatgattgtccttaaatgccagggaaggattttggcctttgaactagccattaaacatttctgagtaagggagactcaatgtaccaagttatatatcgaaagagaaatctcaaaattggatgaatgaatcaactggaggattgagaggggaaggcagtttgatctacagaggctatttcttcttttttaattttttttttttgagacacggtctcactctgtcacccagactgtagtgcagtggcgcgatcacagctgactgcagccgccacttcctgggttcaagcaatccacccatctcagcctccagagcagctagaactacaggtgcacgccaccatgcctggctaatttttatggttttttttttttttttttggagacaatgtttagtggttgtccaggctggtttccaactcctggactcaagcaatccatccacattggccttccaaagtgctaggattacaggcgtgagctactgcgcctggctacagaggctatttcaatgggtcaatcatagttatacagatgcaatgggccttccatggacaggttccatggacatatgtttagtactatgaagaaaaaattaattaccaggcttaataattagctagtttcagaaggaaaagttaaagactgtggtgtttaataggagggaactgggagacttatgatacatctgaaagaaattggaatgtagtggggaagagccagatctggtaggaagttaaggatttctgttctagacttgtgaattttgtggtaacaatgggatgacaaagtacatatgtccaataagtagttgaaaatgtagaactgaagctttggtcattcatcagatatttactgagcatctactctatgccgggcacttcacttgaaaatgaaggactagagacatcaaggagggagaggttcataatgccagaaagaatatgtggaagtgagggccctcatgagacaggaaaagtaaggttgtaagaaaagtaagggttgtaagaaaagtaagggtgtaagaaaagtaagggtggctttaagatgtatgaaaggatgagaacgtgtgtcaagttagagagagagttaactggggtgggggatggggggattctttacttaacagtcatccggaaacctacattggagaaagaattcaggttggtaccagagtccagtatgtggagttcttacctcccttacacctccctaaggggataatcagatttgcaatttgaggttgaaagcattgctttgcattggtgaacccgaattattgtccttgttattgagtagttaatgcagaggtgttgaatatgctaatgataatggcagaagaccagctggaacaaaataatcaaagactgttagctgagagaaggcggggttagttagaacttttgacactaggggagtagggactgtagggagaataaacaggaattgggtatgataggacatgtgccttcaacagtaatcagagtttagaaatggcacttgagtacaaaggtccgtcatcatgtacttctcttgcttgagtcacagcaaatgagagaatataatttagctggtacttaggaacaattgaacattgtgatattgtattttttattctgcttttcatattcagtgaccttgagcaaatcatctacaaaatggggaataataaaagctgcatttcctttgcctcaatgagaggttattaggatgaattaaccatcatctgtggagttggagctcctttgtaaaaggtgttatgatgtatggggggcagttcatcctgcaaaacaatgcttggctaatcacatgaaaacactgccattatctcatctctctcctgcttgataacccacatttttcttttgaaacccaatcaccaccccacaccaccccaatgagacacaaagccctctgctcagctttccatactttctgttatatggctcctctctgtagatctatacttagttcccactacatcccaacaagaaatccctttaattctaccatgccagtcacagttcaataaccagtgattggccaaattctacctgattttcaaggtcctccatcttagcttcttcatgaactctctctgaatgtcccaggctatagaaatctcttctatttccaagcacctattctgtctattgtcagtagtagacagtcttgtccttaatgtattatactgccttagattttctctaattatatatgttatacttgcctcccaaatgaggttgtacatttcttgaaggtggggaccatgtatttcacttttctttataccattaggtatgaattatatgtaaaatcttggctaatcactatactgtacagtggacttttctaactgtttaaaattctgtttctttaaaaatattgtacaacacctgaactctgtacaccttaaagactaatttatatgtgtacaatgtagactctatacttatttaaatgattttcatgtattatgtataatatgtctagcaaaacattcttgtaactaatcatctgtccacacacactgaagctttcattctcttgtcttccacagactttgagagaaaaatgagcttcattgctttcttggtaaccatggctgatttcaggcaaatttgtttctcccctcatctcttctccttttctccttccttctacttgtactttcccatgactcttcagggtcctctcactggtgatttggacctatctacctcttgtttcttccctcttccctcccactccccaaaaaacaaacataaataaaaaactgttttacttcctgtctgaactgtcacattagaaagaatctgataatttcactcacactaagatgtttttgattaatggctcagtgctttacttctccatggatattcacattttacagagaattataccttaagaaatggaaatctaatagtagaatttcagacagcttgatagcagtttttgacaaagttctgtgttctgaaagagtggtggttctactgttttttttttgttgctagaaaaatggtgttaggcaaacaaaaaataatagtattattagctatagtacaacaaactccttttcattccttgtaattaagactcgaagaatttccaccacaggtacatgtaaaacaatgtctctgaaggagtggcagaatgtaactcattttaaaaaaatcaattaaatacacagaactaaaattttgaccccttctttttttcttttattttagttgacatgtaataattatacatatctatgggatacagagtaatatttttttttgaggcagggtgtcactctgtcacccaggctggagtgcagtggcacaatcacagtttactgcagcctcaacctcccaggctcaggtgatcctcccacctcatcctcctgagtagctgggattacaggttgtcgccaccatgcctggctaatttttgtatttttttgtaaatttggggtttcaccatgttgcctaggctggtcttgaacccctgggcccaagcgatcccccatgcttggtctcccaaagtgctggattacaggcatgagccattgtgcccaaccgagagtaatatttcaatatatggatatgatgtgtaatgatcaaatcagggtaattaacgtatctatcacctcaaacatttatcatttttttgtgctgtgaacattccaaatcctcccttctagctttctgaaaacatacaataaattatggttaaccatattcaccctacagtactgcagaatagaatttactcctatctagctgttaattttgtgttagttcaccaatctgtccacatcttcccctcctgcttcccttctcagcctctaatactcacaattctactatctgttttctcatatgagtgagaacatgcagtatttgtctttctgtgcctggcttaatataatgtcctccagttccgtccatgttgctgtgaataacaggatctcatccctttttacagctgaatagtactgtcttgtgtatacataccacattttctttatccgttcttaaccctatcttctgtgcatttcttacttggtcattcgccatttcagactaaagtgttagatggcaggaaccacatctttgaattaatgtttgtagaaatcaaatatttattgaagatattaactaatttctctcaatactcctataacatagagtgattctgtaggaaaatgccttcaaatttggatttaaacattaaactaagggcacattgacagccaactctacccacgatcccctttgttgtccctccctaaaaccacatatgacttaggaaaatcacctgacgcgaacattcagagaaaccagaaaacctatatatggaacatatcctgtcctccattcctgcctgcctctccccaccacccctcactagcttataccttgctggggatagagctacaggatgcatctaaaaactccccctcaggcttttctggacttgttccagccttcccctgacagcagcctgctggcctttcttttcctccatttatcatagcatcgtggatgagagtgatttgtgtctcaaaatatcaggttaaccattggtatgtcttagctttggatagtctggcaaaattagaacaaaactgtggttcatacttcctgggccccagagtaaacaaaattgtagattgcttagatgaaagagttgaagatagtctaattatcttttttatatgttcactttctcttttttggtcaagcatcttaaaaaatgtgccattgaagaaatcgaagccattgtgtttttgcattttccccatgaaaaatgtttacagaaaaagttttcagcctttctttgtgatccttgtaacagagattgtgtgttgtcagcagtgttttaaatttttccctctccttctattacctcttaaagaaaaagtggggaaaagaaatctgtacaagtacaaccctattaacttaaaatacaaaggactgaaatgcattgagttcaattcaaccatcaatggggtttttttcaatttgtttattatggaacaatagggtgtctagccaaagaattaatggttgctttgaattatggaaaaagcttcccagtatcaacttaatgaagttttactgaatttgaaatccacaccacactagatgtgttaggaaatttctaagcatgctagtgaattactctaccaggtttcaatagtgcctggtaacacaatcctaggagtgaatttttggcaggtggaggaaatacttcaagaacatctagaagcatccagatttttctttgaaaatgcatttttgagttgctctgttagtccctttttaacccttcttcccacccccagctttccactaaaccatttgctttgggacatatcaatttacagtatattatattaagctaggtttgactgcttgatgcactatagtataaataacagagcagtgggtggtgggggtgggatgggcaatatagataatcaggtggagcataagctgttattaatgcaagacaatttaggggagctgagccaatagaaaccataaagtcagaatttcttcccaaagcctctgcctcatcattatcgctgcccactagagctgggaaagtttctaaactccctgatctcaatttcctgccgcctgccttaacttttagcagaagcacaaaagaaaccaatcagcaaagcatgcacacatactactaagtatggtgacagaaaatagaactttgacctgttgtggttaaagagactaaagtcaatgtatctgacagcctcagggaaatacgcatatttcaaatttatgttttttaagtgctactgaccccataggaagaacacttggcaaactcattaattaggatcctgtttgagtttctagttttagttcaaatcctttgtttgaacttagtggtgagctttcttatgtgcttgtcagtaaatggtaatacattggactttaccagcttggacagtggtgacccaggttttatgtttttacacacacaatctacatggtttgatttaagccagaaaattattagcagcaaagtttggaaggcctgctttgggtaggacagagtgcttgctgtctatctttgaaatacaaaaaatattagagagtccttgagctcaagaagtttatactctaaccagagtgactagacacctacacatttaggaatctaacaatgcagaacagtagtaatgaatcccaaatgagatagaatctgatgtagaagcatccatcccaaggaagactggagtaagaaaggaaactatcatttatagaatacctttctgctaggcattcgtgttttgctactccactaccttgcttctcggcaggatggccttcaatagacttttaaaagagagtatgtatacatatgtaactaacctgcacaatgtgcacatgttccctaaaacttaaaagtataataaatacatatatatatatatataaaataaaaaaataaaagagagtaggaggcaagcaggagaaaaggcccaaggggacacacacaggctccttgtataagagagatttggtgtaggtacctattggtatgaattgtgttagggctagactgtaaagggccttgaatgccagaatgagacatttattcttttttttttttttttttttttttttttttttgagacggagtctcgctctgtcgcccaggctggagtgcagtggcgcgatctcggctcactgcaagctccgcctcccgggttcacgccattctcctgcctcagcctcccgagtagctgggactacaggcacctgccactacgcctggctaactttttgtatttttagtagagacagggtttcactgtggtctcgatctcctgacctcgtggtccgcccgcctcggcctcccaaagtgctgggattacaggcgtgagccaccgcgcccggccaggagacatttattctttactcagtccataacaaggaggtttgggtttttattttttatttttttagcaatatagtgaaatgatgaaataacattgtttgttttggaagattgcattaggctgttggaaacctaacaggctaggctggagataagggaaggcttaattgataagggtttaatctagggcagtgatggttaaactggagcatgcatgggaagcacctggggggcttgtgaaaacacagactactaaaccttagtcccagagtttctgattgaatagatctgaggtgaagccggtgaatttgcatttctcatgagttctcagctgctccgccaatttggggagcactttgagcaccactcaaggatgactttaacagacattggcgaccccttaaatatgagaagaaaggaaacatgatgagagagtagagtcagagataaggctgagtttggaagaaaattggtacattttggggaatgttgaatttgaagtgctggtcacatatccaagcagaggcaatcagtaacacgtttgttgaagagaggagatggagactggcgaatcttatgtgaagatagtagaggaaattgtgagagatgaaaacaacaagatttccagttatctttccaagaagctgaactcaattttgtgttaagttctgcagcttccaaaatctcatggtcacccatgacttctgttttccttaatctaggcaggtttgcgacttagcaaacacccatcctcatcattatatagttatcattggcccatgtgtgctgttaagtaacctacttcagtttttattgattgatttaattttattattgttatataattttattataataatttttacaataattttattgtttattttgttatatttatttttattgttttggtctggataagccccttagatgacaaattcttacaaatagaacctttctgtggaattatgttaccatgctcagtatggttaggtgtttactgtagtaaacagctcattaatgcttttatcttcaaatgcagacccttattaagaacatgaaatctgtttatgcttatagttgctaaagtgcaacttggctaaagtgatataaatggcagtatcttaaatgccagtaagtggcaatatttcccccacaggtagagatttttagacctattattatgtccccccctcaaaaaaaaaaacaaacaaaccagacttaatagctctggctgcatacacacacacacacacacacacacacacacacacacacacacactcattcacagtcctgacgtttcaaagccaatttgtatttatatatgtaaattcctggaagggagaggaagttacttctgaatcattaaagaaatatcaaaccacttcctaaatggcctttctgctctctgaaatattctctatacctgtcagattcatatattatcgtttgccaacaggtacccagtaggaaagctctgagtttagttcaaacaaaggattagaactgaaaataagagaagcaagtagggcaacaccaaacaatgtgagcaaacttgatttacctacctcattcaccaactttggacctaaatcacttttcaatttctaaaatgaacacacaaccaacaaaaacgaatccatccttcagaatcaaagatttgccaccaatgaggatgtgcaaaagcatgtgaagaaatattctcttaaaaaattttggctgggctccgtggctcacgcctgtaatcccagcactttgggaggccaaggtggatggatcacttgaggtcaggagctcgagaccagtctggccaacatggtaaaaccctgtctctactcaaaatacaaaaattagctgggtgtattggtgcacgcctataatcccagctgctcatgaggctgagggaggagaatcacttgaacctgggaggcggaggttgcagtgagctgagatcacaccattgcactccagtctgggcgacagggtgagatgctatctcaaaataataataataatttaagccgtatttaattatcactagaatccctaagcgacttgcttcctcttcagggagttaaatttatttggatgtaagaatgctgatatgtttaccttataccttacacttcattgtgaggatttgctggggaaaatgatagatagataaatgggtagatgaatgaatgtatatatgcaccctcaatgtgtattgcacatgaagtatattttacatttgaaaatacttttaatctgtcttgtaaaaataaggcttgacatttgcctatagagtttttaataaactatactaatagtagttacaactattttttaaaagtagaaaaatgcattgtcaaaataaaaatgagtaacaggatggtcactatgttcaaggagcagaaaaatatcatttgaaaatgtcatttaagaaggtcggtgaattaagagaaatcaatgtaatttatgtaaaaaatatgtattcagtaaaaattgtggtgtccatggacttgctaaatatttttattatatgaaaatgtatggaaaatatgtagaattctttacctcatttaaaaccttgtttactggaaggtaaaaacctgtgagtatgtacctatgtctaaatatataatagtattgtcaggattttacacatgatgcacttttattgtaacacatgttgcacgtttattgtggctagttctttctacctttgatatttaaattcttagtattcctgaagaaactgaactcacaacagtctgtaacatacagagtacagacaatgggaaatggcttttaatgaaattcaataccaatattaagcagttttagcgaattaggattgaattgaacattatctaggattatatttatcaagattttcaattctttgcttaatttttcctgtagaatagttttacagaaaatcattgcattaaaggaactgcttttgatatatattaatttgtttacctgttagtaaaatcagagatatgtgggcagtaaacgagtgacttctacttcacagaaacttgtcatcattgtctaagctcttattttgaagctcaagttgttataagtacttaacactatagattctaagggatagagaatggaagggaccaggcattgaattctgtttctgtgacaaacaaagtcttgtaaccggagagctgctttttttttttttttttttttttaactatttatctcttcatgaaaaatggtgactgtcactgaaagatcttttttactctgtcacaggcttctcaaagggcacacaaaatgaaaacgtgggattcaactagttaaataatgaatcaatttcgaggttttagcataggtgacacctccatggtcgtctttttggactgtgatttctggtaatagcaagtgaaaaaaaactattaccgctgttgctatggatcttctatctgctgaggttcaggcatcgtttttggaggctgcgatgtaaaccctgcttagggaaggtagaatttcataataacagaggattactgctgcctcatgagtaaacagaaaatgtaggtgagggaaaaggtgttggactctggaagaacagaaaaacagtatttccaaggaaggggaaatcctttgctttaaagattgagaattctttctgtatttttttagaatgggaaatttctctactttctgcagagaggagaaaaagctaacagaaaaggaaattggggaggtaatagtcatttgttttttcttgttgcgtgtgagttttgtgataaaagtgacatttacataattaatttgctatggcaagaaaatgtctaaagagtctttttcgttggtagaaagcttgtgaaagatcagggaaaagatctaacataacgggaatggtgattacagctgcttttctatttaagatgtgcaattttggtagcatgtgttttgggccaatacattgtttctagacacttggagtcattttgggtggcctttttttttcctttggtagccaaaataaatatttttcattaataaagaaagatgccagaatatctatcacttgattttacttggctaatttgaactgctattttgtggggagcggggggctaaagaggaggctcactttaaaatgactggacttaatatcattgttatttttccagtaggttctggcattaaaggtctcccttggggaatgattaaaacagttctgtggagcatttcaaggctgagtagcatctcatatatactctaaaataagtttgcctaatgactttttagcaccacttgatttatgttttggctaagagttctaaatagtagtagtccaattacttttttctaggaatatttacagacactacatactgtattgtttacattattgacttttaactttacagtagtttaaaaggtgtaaatgtctttatgcttaaaacaaacaaacaaacaaaaaaacactgttttctgccactgttttctctatcctgttccaggatagagacagttctctccctttgtccacccacatgcctgggttctgggtcaatctgtataactagacgtatcttaatttgattactctggggtgtatttttgatggtagtgcatcatgaaattacaatataggtgtgatcttggttgaaagataaagtacattttagatatttttaaaaaatttctttaactgaaaagattatctgttaattgtgaaagaatactcttatttaatatggccaagtggttccagagcttgatactttatttttcttttcctgataggacactaaatcatttcctcctaactactagaatgaataaagaatgtagtgtatactgttccactatactgtgaaattgcctgtgtgcctttctgcaaatgtaaagtaaagagattgcataggtaatccttaagctctaaaactgagttttggagattctactcaggaattgggactaggttattatttgtaaaagacagcatacacgcaacattttatatattgaagggatcaggtactcattccaggcaaattttgaatttgatgtaaataatttttaactgaagcaatgaatgtgtaattatgcttttactgtgtgtatttaattttctgctaagaggtagtaaggctataatatttggcttatgctttggacaaaaggaaagttctttgaaattttgaatttttaggttctccctggcaaatattttgattccttgtatttttggaaaataataatcatctaccatcttccagtagtgcttttggagcttttttaattgaatgcagcctttctcaaccagaattcctcatctgaaccataaaacagaaaatgattttgagttactgtcttctcaattctctcaagaaggacatataaggaagcccaattctagatgcaccggagagcagttaattttttcatataaggattctttagggtagcagtggtcaaactacatctaagggccaaatactgtctgtaacctagtcatgtgaggcctgcaagctaaaaatattttttacattttaaaagagttatttaaaaaagatgtgacagagactcagagactgtaaagtgtacctgacccacaaagcctgaaatatttagcatccagcctttacaagaaaggtttgccgatccctgccttggggcattaagcccgactgagaattgctgatgtaaagaaaggaagcattttatagtactttcactgaggttgtggatatagtatgacaatagaaaagattttcactttactaaagtaactgacttgcctattggttccattattgtgatgcttaattcaagaaaagccctcagatcagagtaaataggcagatatgtttctgtttgctttttagagatacactttaaccatggaattacatagaatgttgtattggtaatgacaatgaatgataaattacatttatatgtttgtgtgcagatacattttagtatttttctcggtttctagagaaagaaaataaaaatgggagcattttataaagtaatataagggaggacaggggagaggcttaattgcttttatcagtatttaaaattagatggccacatctattagagaaggaaagtgaatagggagtgttaagtgtcagatataatcacatttgtttcctccttgtactgagtaagtgtcttcaccctacaattaacatctcaggtagcttgtctgaagtaaggagaataatacttaatcaaaaatgcattaaaattattagatcatagcatatgaaataatcaggctttaccaatgccacttgactacttgatttagtgggggaggtaccatccaccataaaacacgtattggtatgtcacaattgtcaaaggaatgaaaatgaccatcaggcattatttgtaatttgctgctgatttcctttatctccatattcagttaatcatgaagttctatcagtattttttttccgcaaaatatcagacatcatctcttcttttgtcacactattcttttgtcattaagtagactcaaggctgcgtgtacagatgatgcagttacttaaaacacaacctttattttttcactcatctgctgaaagctttcagcggctgcctactagcctgaccagaaattccaaggaaagatgagtcaagccaggcttgctgaggtggtcaggaaaggctgtactagatagctgagctggctttcagactgggtgtaaataagggaaagaaagaggagaaatgaaattagccaaggcaagaaataacaaagggaattctaaggttgcgttttccaaaatgttttataagtccttttggggtaggcagtgaggatttgtttgatgaatagtactttctccctggttagggttgtaaaatgatagggtacaaatgaactcaagttgtaaattactgatcttttagggtagacactgttccaatcattttaattacttagaattgctcatcaagcaatttaagaactaattaagaaactttgtcatttatctccatcctgaggttacttatttgtgattactctccccactccacccccagctagaaatcactcagtataaaatttaaaaaaaaagccaagtgtttcataagggtcacttccagttctaaaatcttactgcatttttaagttcctaaacagactatatagcatttttttttaaggaaaaagatcaacttttgtatatgtattcagatttagtactagatgttgattatcccaattggagaattacagttttgttaaattgatttctaaatagacaaggactataaatatcaactaatataatgctttatatttatattagcaaaaattaacttagtcatatctgtgttgagaacatggaaatagctttatgtttgaaatgatatttgttaaaagattcaactcattagtagatatctcataatttcagtagcattttctcctctatttgaacatttaatttgtgctttggtaatttcagcaatgtcagcacagatcaatgggtgtaaaaacgggtgaatttgtacctctagagatagggattaacatatttacaagtgctattgacaatggggacaatggggtaggatggagataggtttcagaaatcttagttcaagaatatttggggaccttcaagaggagattaactcacaacaaaaagtagaagagtcttctaaactgaaagtatttgggaaagtgaaaatatgacaatatttagtgctttttccccaaaatgagtggtattccctatgcaaaggaaagggaatagcaataataaaattgtcactgagattgctgaaatctcagccctgtattgttaatgtaagctactttctcatatatattaactgtatcgtggtgtacagtatggagcttttatgctcatttgtaatagttcttcttaggttaggttttcaggtacaactatttcacacatacacacacacatacttaccattttacttggtttttaagtgtattcttatttattaatgcactgttccaaatcttttaaagaattagatagagtaataaaaactaacaataagcatttgtttagccttgcacacatatacacacacataaacacagactttgatgatatttttcactttgggaaaatgaaaaggtgattattgaaaaattagagaccattcttttgttcaataacctcctctctttttgccaagattaaaatcatttcctattgatgccatcatgccatcagtatcattttcttttgatcataaaatgttaaagccagcaggacccaagagataattttccctagtcctacgattccattgggtaactcttaataaatactatttgattaaattcattcagaatatatatttgattaaggaggaaaatgttggagggaaattattctgcagccactttctcattaagaatgaaaaggtaagtctatgtaaaattccactttttcaatcagtgttaattttctaaaagaactcatggtgttaataatttagtgctgtgcttacaagcttcaaacatattgattttaattggagttccacatctagaagaaagataggcagtgagcaaatcaattttgttttaatccaatgcattttaataagtgtgctaaaaattcaccataacattacccatgatagttcgatatttgctataaggggctgctgccttaaattctaaccaaaggcatttatttctgaaagtactagaatgacatccttttattttccctctaatatggatagcataaaatgaggctctcagcatctgtcacttcaaagtgccctgtgtgggtttggttaaataatggcctgaataaattaggatacctgttttatcattcatgtattaacagagtctttgtctttctttcattgtatggccttttccccctttccaaatgaatattttatagttagggcttgttatcaatcccaggccatatttatgtaacctcctgtttagtcagtaataatctctgtaattttaacattaatgctcctggttaaacctgacgcctggttgaattgtgtatttctatatgtatttagcacaatgaaattaaaagaaatttacagcagagtggtatgcaaactgtggctcttcaaggcctctaatctttgcattagagtatgaaatcatcctggatgctccaggacatacagtagacatgtggttctggttaatagtgattgtagatgtgcttctagaatcagatttatatataccactgatatgcatccttgtgtatgtggctgctaccaactcttctttgagtatagctccgtattctttcgagaattgctgttttgcaacacaaataactgtctccagttgaaggaaaaaaatctcaaagttgtgacttcgcaaagtttttattatgttaatcacatgaaaatagggattgacttaaaatttcatacctatgttaacatccgtcagtttactgaatatagtctccctttcaccaaaagtcagaagtcaagttgcaaatgaaaagataatcacatgccaaagatttcattttaggagggaccccaggtaaataccctgcaaacatccaacggccatggtgtgtaaagggccctactggatactgtgaggatagctggcactgagtaaggcagagccctatccttaataagcctgctattgaaaatagaaagtcatggcaatgaaagagaatgcaaacatagtaaaatgtgtgctctaatggaggcacaagtaaagtcctgtgggagggcagaagatgaagcaatggattggttaatcaggttcccctagggggatgataaggcttgttttgtttttaattaaagatgctgcgattttcagagatggagaaggagagcaaggtattgtagactgagaaaatggcatgagtcaaaggctcaaaaatttaaaaatagagtcatttcctaatggatcactgtatttaagtttgtatgtctaaggtattacctactgaagcattgggcttgaaatatgttcagatatccctggaattttccctttggaaacttagtttcactggatgttcaaattctctctctctctctctctctctctctctctctctctcgagatctatatatatatatatatagagagagagagagagagagatctatatatatatttatatatatatagagagatctatatatatatttatatatatatagagagatctatatatatatttatatatatagagagagatctatatatatatttatatatatagagagagatctatatatatatttatatatatagagagaaacgtatatagatctacatatagatctatataacatctatctatatagagaaacatatatatatgttactttctgagtactactttatgttctgagtgaatttacttcacaactaggagagaaagacaaataaaactttaggtcctgtatgagctgaacttattaggtccttatttaggtcctgtatgagctgtatgaaccccttgacttcctccgggatagtcacgtgtatataatgggacatggccagtgtgaaggatgagaaatcagtctggacaatgactcattctgctgctctttatctattcttggtgtctaggcccacttcattacagtgttagagtgttggggcttgaatacggtctactagtgattttgaatttctcactggaacaatggcgtggtatataattttcatttgagctattgtgtgctgttataggcttggccacatgaccagtaccaatgaatccattaccttgtttcaaaactagggttggtgattgctagtgatgaaggaaggggaacaaagggacttggcttctaatacttcacagattcacacagcttcagagcagtaagggatttaaagattgaatacacctctctccctcatacagatggtgaaatcgacattaagtcactgatttcttgtaattttcaagataagcaaaattaagtcaattttttcctgacctctctgctctctttacctctgtagtacttatgagaaaccagacctcctttttcctttggaatgactgtaaggtcagagaggaattagctaaatgatgcaatggaatttgcatccagcatttattgtgatgatagccttgactttcggtttattgagagaagaatgtgattgtttgcaggatgtttccttccctttacccatggatataattaaaggtttaagggaacttcagatcccagagagttagtaaaaaacaaaaaacacaaaattagttatttcttttcacttaaaagggcttatatccaaagatgatttacctggttgaacaaaataatctgacgtttctacttttaattaaaataacaggaatgtgaagacctccatatttgtgaaatggagctaatgaaagtgctgcctattatgactttggttcttgcttgaggatttttaagataaggaaagttattaaatttattctcgttctttccatatttcatttttctttggaaaaatgtgatatgtggttaagtgacaatagaatcaaagaaatgtctcattcttctttactccattgtaaaatgaactgtcttacaaacatgtaaagaacagcattcttcacatcccagaatgtatcctgcttgctttcttgttcttttcctctgatctgagctggggtaaaaagaggaatgcaagttagcaggcagaggaagctcttttcctatcctctcgtgagtaggaggaattaagatgaaggaatattatcaattattcttttgttcttaaagatgaattagactcaaaattattagtcaggagaaactcctcaaactgctatgttattcatacgctatgtcaaaatcttttgtaataattttaatgaagttatcctttactaaaatatctcattctaagtatttttgctaatgagatgcatttaaaaataagaataataaaataaagagaagatgaaaaagtacctatacaattaattttatttctgccttatgaacacatttttcttgctgctatgcacaaaattgctgaaagtttaaacagttgccttaatagtatgaaataatactgtgtgagacctttgactttatgcttcaccattgagaccagggttggagtgctgttgcctcattcgtctcaaaactgccgtttaagtaggtgggtaaagataaggagtcaactgtgagttgataaaatgctgtctgatgaccacaaggaagcccagggttgatgtaatgacatatccctactacatttcatttatctcatttcatgcatgtaaaatctgggaatttgactgctactttatgttgcaaaggcaagttataataaactttgagaaagatgtaaaaatgtaagtataccataaaaataggtaagctaataacattttcattgtacacttagttaaaatattttgagcccttataaatatggaaatacaaatttaaatgactgtccacataaagaaatttaacctgaagccaaattcttcatgtttaatttgaaacatatacagacatacttaatttttatcttagttcttattctgtcatatgcaaaatacagtggagctaagtatttcacttcagaaatataaatcacagggatctctaaagaattccataaaattttatctgataacttgtagtatgaacctgaagttgtgcaaagtaaaaaattactctgctaacatcacatttttcaaaggttgagaaaattttgtggggagtttattttatccttctgattattaaagtaatctgagcatgcatggtcatttgaacaattctaggcctgcataaacctagcacaaaattaacaattgatgctaaatgttgttttttattcctggacaatttcatcaatttgtggggggttttaaatgaacagaactggaaaccttagtattaagggttactgaagtatacaacaaatcactgataaagctggaattggagctgttggattcttgacattggatcctatgggaatcatgatatggaatggcatcactactttatctcctacactctagaggctagcccattccagcctagttattgacatggaaaaaaaaatagtctgagaaatgccagaaagtcaagattacttatgaatcatttttctttaaaattgtaatatgaaatatttggtagttgtgcatacatatgagggccaatcaattgcatagtggttcaacaattattaaaaaattgcatcattttcaccaacatctttcccaccaaaccccaaccaccacagtctggttaccattctactctagttctatgaggtcaattttttatattccacatgtgagtgagataatgcagtatttgtctttctgtgcctagctttcttcacttagcatactgtcttgcaggatcatccatgttgttgcaaatgattggtaaaaggatacaaaattttagttaggaggaataggttcagaagatatactacacaacatggtaatataattaataataatacattgtattcttgaaaaatactaacagagtggatgttaagtgttctcaccacaaagataagaaatatagcatgtaatgcatgttaattagctagatttagtcatttcatgatgtatatactgtatatttcaaaacatcttattgtatatgataaatacatacaattttgtcagtttaaaaaattaataaaaattatatcagtttaaatatagaaaagtcctattttaaattttttcaattcttttaagtttacatttttcaaattctttaagcattgggatagtacagagtagacattagacaattgtgtgatctctttacgatggaaaataattttgcttttatagcaaaaggggttatagtttaaattacaaataaatcctagctgtagtgaaggaaccttagacataacagtcaggagatctgcgttcagatttaagctttgccactagttaactaccttttatctttgaacaatttgtaacctctccagggtatagtttcctccctgtaaaaatatattttggacaagtttgctaagttcctgttcatctcaaagattatctaattcttttaatttcaagagtctgtatctcttcttaatttctctaagacttaccattttaacataaatggccttaaattacatagcttccatttagtgatcctagcctaggacaaaacgggtatacaataaatgcttgttgctgatggtgatgataaagagttggattgaatgacctatatacatttccttccatttctaaaagcccgtgattgagagagcagccaattgtatatggattatatctggcacttaaaaaagatagtgtcctgttttctcgaactcagcactggtaagagttatacggctgttgacattaaaattctgttttttgtttgtttgtttgttttgttttgttttgagaaaggctctcactgtgttgcccaggctggagtgcagtggtgtgatcatggctcactgtagcctcgcccttctaggctcaggtggtcctcccacctcagtgtgctgagtagctgggactacaggcacgtgccaccatgcctggctaattttttgtatttcttttttagtagagatagggtttcaccctgttgcccaggcttgtcttggactcagctgagctcaaatgatccacctgtctcagcctcccaaagtgctgggattataggcatgagccaactgcacctggcctaaatctccttttttttaaaaaaatgatatcttgattaggaaacattcagcaaacattttaggcaatgttcataagggcaagtgaaaaatcttaacacaggcaatcataatagaacagtaatttaatttgaggctcataaaccaactagagaatgacttttatttatatgcattctgcttcttagatgacaggaaactgtatatacatggaagtaatccagaaaaacatttcgtctctagcctgggagaactgatttgatcaatttaaacaggtagctaaatatctctagtttagtacattgttaggctgaagtttttagttgctctctgtgattgtcagggcactttgtattcactgcaagtcactcctggtgttcccacttgaggacttcaaggaagtaagaaatcttcttttaagccttgatatcattagcacattatttgctcattatttcctgtaacactcctcctcatcaatgagtcactgataggcctatatacaggccagtctttgtaaagtgcaaaaagttattttatagctacagcattcatagtatgggctttattaatgtaggaaggcaggtgcaaaacaattcaaccttactcagcttggttcttagttctggaagattcttttaggatacgtgagttgaatccttccaggtcaaatcctgtgagaaatctgcctcctcttccttacatctattatgttttcactctcagtcccagagtcttactgggggtcttagttaggtagttcaaattcaaagaactagattctttaccttggttctttcccacattttgctctctaggtccccattctgcgagaactccaagactaattctaaatccgtcttcaatgttcttgtttctcctggccaccaattcctaatgcccccctccacaagttgacccattttctactaactagatctaaaattttatccttcatcaatgttggctgttatcctcaaaactctgtcatcagtcacatcttaacctattataggccctatcgacaatacatagactatattgggtataaacaatgtttaagaatatgtatacaaagtgtacgggatatgttgcttgtgttttgacaaacattatgtttctaatcttgagtcatccctcgggattccaggataccttcttctgctgtgtataccaaaattggtgcatactcaagtcatgcagtcgaccctgcggaacccacatatatgaaaagtcagccttccctatacatgggtttcacattctggaaatattgtatctttgatctgtgtttggttgaaaataaattcgtgtgtaagtgaacctatacagttaaaacccatgttgttcaagggtcaccagtgctaattttagagacatatccttagaagaagtattgcagacttcatttttaaaaatataggtatgtatagtaaatgccaaagtcctcttagttttactttaatctccaacttgtccacttttaatgtacagaattagatgagacccatatgcttgcctgggaaaaataaggataatgggttccctgtaatcaaggatacaaatttcacatccatctgcttagtggttcccaagtgctgatgtcgagactagtgttcaaatgactacacaggaatcatttggggtgctttttcagaagtattggttgcaaggccccagtctcagtaggctgaatcagtagttttggggtaaagcctaggtatccacattttaaaagtgatataggtagttctaatttatagccaggattggagagcacctagagaacttgtaagagttctttcagctgtctgtttctgtggtttaagtatccaagaaggcttcttctatctgctccttactttgcacaggagacaagcaagatgttcacctaacattgtttccttttggacttcttcagagtatttccatactaaatagttgttgttgttattgttgttttagtggtaatgataccttctgaataagacttaaatttctaacagtgtacttatagttgaagagtgcaaattcaagttaaataacagataaaacagggccaaggaataatctgattgccctgaggaggtggatctttgaggttttcattttcgtagccctgttttggtatggcacgcggaaatcatctgtcattaataagtcaatatgagcttaatttagcagttcctcctatttgacactacagaacatagagctctttttttggggcagctttgagaaggcaatacaaatgcagatagagtaataaattgtgatttttgcagtagaggtaaggaatatttagccatttcagtatttttttattattatactttaagttctggggtacacgtgcacaacgtgcaggtttgttacataggtatacatgtgccatgttggtttgctgcacccatcaactcatcatttatattaggtatttctgctaatactatcccccccaagcccccaccccctggcaggccctggtgtatgatgttcccctccctgtttccatgtgttctcattgttcaactcccacttatgagtgagaacatgcagtgtttggttttctcttcttgtgttactttgctgagaatgatggtttccagtttcatccatgtccttgaaaaggacatgcactcatccttttttatggctgcatagtattccatggtgtatatgtgccacattttctttattcagtctgtcattgatgggcatttgggttggaatttcagtattcttaaaagaatatttgatttggatggagagggagctgacttttcttagaggttccaaagaatgatgggaatgattaggcaaactagattctttgtttaggtggcttttaattgcattccttgggatgcttgctatttatttacttgatcttttctcttgtgctaaaagcaggaaggaaacctgtcttaataaagacttaggatactttggtttaaaatgatgaaggggaaattataacttttgtattatctatcagggattcaagattagtaaatggggcaggggtctctatcccttagctagttagggaagtgaggttatattagtgaaatcttgttttcatagttccctccactctgaaagttggtgttttgtaggagcattgttagatgcaaaataaaagagtaggaagtgcaaacattgtataaatgatggatctttctctttttctgtgtctaacttgctattcctcaatttaaaatcttaaactatatccatggattagagtttacttcagtgcttctttaaaatgcaaaatgtgacctcgttttaaaatttttgatttacatatttgcaagaacccatttattgtaggaagcaaggaacagccatatcctccctgaggttgactgtttgaatcaaatccttttaaaacactaattaggaagtttaagtgttcatttttgttctttaacaacagaagattcttgttataaagttaatgaatacatacacttcccagaatgtcttatcagaagatatatcctatgtatcttcaaataaatgatacattcccaaattttagaattgttttataactgtatcaggaaaacagaaatatttttttctaaaggaagttataaggaggtgaacccatcaccaagctatgtagtaagtattttttccacaaggtattacaaagccaaggaccatcaccaaaagtaggaagaggtaactgtgggttagccactatgtattagtagtcacaatgaaatacaatgtcttggtaaaagaggacaccaaggaaatcaataatgatggcactcaagtttttgagaaggtattataaccaaatatgggcattaaaaatgcatttgcaacctactggaagcctaagctatttttaaaagcccatatggaaagctcaagatgtgtttgttccatgtgggtactggaggtgggtggggatacacaagtagcttgcagtctcagagacttctatatggaaagcacaacttttagaaatggaaaaaaatccaatcagagagaatggggaagcttataaggtaaacaggtcatgtacaaactgtattttaggctgtgtaaaaagagaacttggtgaaattctttaaaagcagtcatgagttttggagttacctcaaaaggtagtggtttactggagtagtagtgtgtccatttggtgatcatggtgcaatgaacttgataagagaaaagcaatattttcaatgccctctttgtctaataaaggaagataaaagggacatgctaactccataattgtcttctgaaattgatgatgaagtgaaactaagtaaaactgtagtaaatgaacagctattctaggtccagttaacaaattagacatgatagctcaccagaacttgatagaatcctcttatattttgaaggaactcaaagtttttgattaataaagcacttaatgtgcttttggcagggttggcaatcttgagtttctacttgatcagcagtatattttcagcaagatgaatttaagtaagtatataaagtttgtcttggggtaaaattttaattcaaaattgtatattataagatacagaatatttctgaatcaggaaacaacagtgaatttataaatctacgtcatgcctatacatttgttaaccttgaaagcctatgcttattccagattttattgtagtgaagtgttaaattattctggatcttcactgtgacatgagttgtgaaaagttcaatgtgttaccattttctcatgattactagcaattattacaaaggtatagaatcttagttcagctattgatgataagattacatatagataagattccaactaatgaaaaacaaagacctgtaaagcctggagtcttttgtggtctgtgttatttagatggcggtttggaagtgtagctaagatgattgggatatccgagttggagagagaggagtgttaaaaggtaatattggcagaatgttagaaacttaaacagttcaccttagcttaggttagatattctcccactattgctacatttgcattaatgtgtaaactgtgtataatcagcggctttattccaaaaagtgcctgatgttttggcatgcactggatatatttgctgtgtgagaatgtttgtgatagcaggatcagctaagctcagttagtgtgtatgattcactagaatatggactagctgcctgtttgggattacagttgttctaacaaagcacatgtggggagtcagaggagtttgtatgcttttacaaaaatgtgttattgtcttatgtgatttattttccttcattaaaaaaatttgattcaaaacatttgtgttctttctttttctcgttccccactcccttcagaataacatagctgatccagaagaactgttcacaaaattagagcgcattgggaaaggctcatttggggaagttttcaaaggaattgataaccgtacccagcaagtcgttgctattaaaatcatagaccttgaggaagccgaagatgaaatagaagacattcagcaagaaataactgtcttgagtcaatgtgacagctcatatgtaacaaaatactatgggtcatatttaaaggtaatgtgtgtgctgtattatttaagtcataaggtattttcattagaagttttttaattctatttttttgaaaggcaatgtcttaaattaggatttggcagtctatggcttccaggcagaatccagctccatttatagtgccaaataaaccgttgttagatttagcagctgtattctgaatgcatcccagtactcagctgcaccccttttccacacctgaacttttggtttgatggaggagcagaaatgcagctggtcctggagacatctcctttgtcaggaaagagctatccccctgggtttccagacactattctcaatggtcttaactgtctcaacctcagagctgatggaacatgtaagtatgtcacttatttcattgagttatggtagttatttacacatttctctcccccaccaggttgtgagctccttcatagcagggagtttagcttaaccagtcctggtacttacattccttagcacagggtatggtacatcttaagcatgtggtaaatatttgttaaaatggaattaagtggaataacatctgcctccccctccaaataaaagttggatttttactggttccaggatcatgggattagcagacacctgaagttccagcagatggaggtgttactacatagcagaaaactggttggtaaaacccagtggtccttgggttccagagttagaagtcaggattcgtgtctgttgaaatgtgaataataaatagttgaagaaaagcccccatgaactctagcttagtttggagtttgaatcattttaaaattaaaattgtttatccttgtattgcagtttttcaaatgaaggctgtgctagatctttgccattcagggtttaaaaggagggaagtgtttgttgttactggttgatctataggccaaaaagagcgtatctataactaattaagctgttggcctgcgtaaaaattaatgctatcattttatcctctgctgaccaaataaaacttcggatatccatctatacctttacgaaataacctgtcttcaagttcacagattctttcttctgtttgatcagttctgctattgacactttattgtattgttt

SEQ ID NO: 493 - DNA, 32742 bp, Homo sapiens
  source 1..32742: mol_type = other DNA
gcggggcctgcttctcctcagcttcaggcggctgcgacgagccctcaggcgaacctctcggctttcccgcgcggcgccgcctcttgctgcgcctccgcctcctcctctgctccgccaccggcttcctcctcctgagcagtcagcccgcgcgccggccggctccgttatggcgacccgcagccctggcgtcgtggtgagcagctcggcctgccggccctggccggttcaggcccacgcggcaggtggcggccgggccctgaggcgcgggatccgcagtgcgggctcgggcggccgggcccagggaaccccgcaggcgggggcggccagtttcccgggttcggctttacgtcacgcgagggcggcagggaggacggaatggcggggtttggggtgggtccctcctcgggggagccctgggaaaagaggactgcgtgtgggaagagaaggtggaaatggcgttttggttgacatgtgccgcctgcgagcgtgctgcggggaggggccgagggcagattcgggaatgatggcgcggggtgggggcgtgggggctttctcgggagaggcccttccctggaagtttggggtgcgatggtgaggttctcggggcacctctggaggggcctcggcacggaaagcgaccacctgggagggcgtgtggggaccaggttttgcctttagttttgcacacactgtagttcatctttatggagatgctcatggcctcattgaagccccactacagctctggtagcggtaaccatgcgtatttgacacacgaaggaactagggaaaaggcattaggtcatttcaagccgaaattcacatgtgctagaatccagattccatgctgaccgatgccccaggatatagaaaatgagaatctggtccttaccttcaagaacattcttaaccgtaatcagcctctggtatcttagctccaccctcactggttttttcttgtttgttgaaccggccaagctgctggcctccctcctcaaccgttctgatcatgcttgctaaaatagtcaaaaccccggccagttaaatatgctttagcctgctttattatgattatttttgttgttttggcaatgacctggttacctgttgtttctcccactaaaactttttaagggcaggaatcaccgccgtaactctagcacttagcacagtacttggcttgtaagaggtcctcgatgatggtttgttgaatgaatacattaaataattaaccacttgaaccctaagaaagaagcgattctatttcatattaggcattgtaatgacttaaggtaaagagcagtgctattaacggagtctaactgggaatccagcttgtttgggctatttactagttgtgtggctgtgggcaacttacttcacctctctgggcttaagtcattttatgtatatctgaggtgctggctacctcttggagttattgagaggattataagacagtctatgtgaatcagcaacccttgcatggcccctggcggggaacagtaataatagccatcatcatgtttacttacatagtcctaattagtcttcaaaacagccctgtagcaatggtatgattattaccattttacagatgaggaacctttgaagcctcagagaggctaacagacataccctaggtcatacagttattaagagaaggagctctgtctcgaacctagctctctctctctcgagtaataccagttaaaaaataggctacaaataggtactcaaaaaaatggtagtggctgttgtttttattcagttgctgaggaaaaaatgttgatttttcatctctaaacatcaacttacttaattctgccaatttcttttttttgagacagggtctcactctgtcacctaggatggagtgcagtggcacaatcactgctcactgcagcctcgacttcccgggctcgggtgattctccccaggctcaggggattctcccacttcagcctcccaagtagctgggactacaggtgcgcaccaccatccctggctaatatttgtactttattttatttatttatttatttattttttgagatggagtttcgctcttgttgcccgggctggagtacagtggcatgatctcggctcagtgcaacctctgcctcccgggttcaagcgattctcctacctcatccccctgagtagctgggattacaggcgcctgccaccatgcctggctaattttttgtatttttaatagagacgaggtttcaccatgttggccaggctactctcgaactcctgatctcaggtgatccacccgccttggcctcccaaagtgctgggattacaggcgtgagccactgcgcccggcctaatatttgtattttttgtagagatggtgttttgccatgttgtccaggctggtcttgaactcctgagctcaagcgatctgcccgcctctgcttcccaaagtgctgggattacaggcatgagccaccgtgcctggcctaggtagacgcttttagctttggggtgtgatgcctgccccagtatatagtgaatttaattattgctagagctggctgtttgttagttttctttgaacataagatactcattgtttttagtttgcaaatccctcttcctttttaaaaaatttctttcccttaaattgtttgcatgttagcaataacaaatgcttaaatggtgctatgtgctagatactcttctaagccctgttatgtatattaactaattttttaaattacacaaatcagagaggttaagtaacttgcccaagattacccaacaatactaggatttgaacctaagtttgtctcaccccagattctgctcttaatctctaaacttttaagttagtagtgacaatagtaggtatttattgaatacttaactatgttttaggcgttgaagtaaatattttgcaggcattatctaatgtaaacaccctaaagttacataacaggtaccctttaggtaaataaacactagtatgaccttggaggcacagatagttgaagtaacttgcccaatatcacttacatgaaattggccctcaaatgtgtctgatacaacccatgctgcttgtaactatcgttttaaactgccagggtaaacttggacacacttgagctaagaaaaagcttttagatttttgcaaattaatgtgaaagatatgctttatgtggatataatatcttctaaatttcggggatggtagtcctagaaatgtaatcctgccctagccgagcttaccctgccaataattttttacagaattggtaaaacggagcaccttttttttgtccttggccacactgttatcaacagggtgtagattgacatcaatctgtaggtgtaaaccagaattactctttgtgaccaccaggaaatagagcagttcagttcaggggtttctttctgtgaatttagcactgtgacctgcatactacaagtctactttgttttctatccattgtttgtatctgggtattgcaaaaggtaggaaaaggaccaaccagatcagcagagaagagttgccttggagttttcttttagttttctgcagttcattagatagtaactaggccatgtcattttactcccttgtagtgaagatatgttgaagttgtactggtatactcttctacctttctgtaattttatattgtgtagacttgataaaatttatgtgtcaatcaccaccattaatatcaatattgagcctcaattcttatttttctgcccagtggctgccaaattactaacatttacaataattcactactactaagataatctactagttcgatcacatacttcaaattgttatggaactactgtcttcagcattgtgcttctgataactgataagtataattttttttttgtccagagtgaacatgtctattcttccactgtacacactaataaaaggaaaaattgtaatattgggtaaattcatgtccttacacatgtagtagttatgagcccatgtccctagaatgagtaataatttatccctcccttggttgaatagtcaagaatgctgattttaattcttctaacagctttatccctcagaagggaaggcaagcaagttatatatgtagtttatttgtaagactgatatgaaattggaagatgaatctactattagctttaattatttttacatttaggaatattgcatcagtaactcataattttggttttctgttatcctgagttaacacaaattatccaaggagatggcggatcatctgctttgaggtgtttttttttgagaattttaatgtatctgaatataaaaggtaaaaatatgccaactagcaatttctgcccattccagaagtttggaaatattactcattactaggaattaaataaaatatggtttatctattgttatacctcttttaattcacatagctcatttttatcttttatttttgtttgttttttttgagatggagtcttgctctgtcaccaggcaggagtgcagtgatgcaatctcggctcactctagccaccgactccctggttcaagcgattctcctgcctgagccttctgagtagctgggattacaggcaggcaccaccacgcccagctaatttttgtagagacaggatttcaccgtgttggccaggatggtctccatctcctgacctcatgatctgcctgcttcggcctcccaaagtgctgggattacaggtgggagccactacgcctggcccacatagctcatttttagactcacttccattaagtcttgtttggacccacgaacattgtctttttttttttaagatggagtttcacttttgttgcccagactgtagtgcaatggtgcaatctcagctcactgcaatctctgcctcctgggttctagcaattctcctgcctcagcctcccgagtagctggaattacaggcgcccgccaccacgcccagctaatttttgtgtttttagtagagacggggtttcaccatgttgggcaggccaggggtgatccgcccacctcagcctcccaaagtgctgggattacaggtgtgagccaccgcatctggccaacatgtcttttttttttttttcctttttaaccacaaagagacttaagcagtccttgtcacagatgatgaattgatgttgcaagtattgtcttagcttggattaattttcttgcttactgtaattttagataatatagctttgtaattagagattttatgtgtaaaccacaaaaatgtttacatgaaggccattattacagatgtgacgtgcataattattagtaatttgtatgtttacatgggtcagtctggcaaaaaattatgaagttttaaaaattaaaaaaaattataatgccagttttactggaaagtaaaattatttcagtaatcgattatagcaaaagtattgattttcattccagacaaaagtcagaatgaaaggtaatttctcaatactctttcagattaataaaagtacctgtagcgatttttatcattcacaagtatatcacaagtaagttagaatttgagaactgtgttctagatctctgaggagatgcagtcagatttctgaactgtctcagcaaatggtaagtaacttagagctagtaattaataacctgtcctttgatttctgattcagccaagaatggccatatttgggaaaggcagatctggagagtaaccacgttttcattcatttaccacttctaggcccctccagagctctcagatattttggggttgagcccttccccaaagccatacaggaccttttttttgtgatctgttctagccatttttatgttgggtgcttgttatggactgagcatttatgtcctcccacaccccccccataccttttttgaagtcctaacccccagtgtgatggtatttggagacagggcctttggaaggtaattacagttagaagaagtcgggagggttgggcccaggtctgattggattagtgcccttatatgaaaagacaccaggacgggcgcagtggctcacacctgtaatcccagcactttgggaggccaaggtgggtggatcacgaggtcaggagtttgagaccagcctggccaatgtagtgaaacaccatctctactaaaaatacaaaaattagctgggtgtggtagcgggctcctgtcatccaagctactcgggagggtgaggcatgagaatcacttgaacccgggagttggaggttgcagtgagcccagattgtgccactgtactccagcctgggtgacagagtgagactctgtctcaaaaaagaaaaaaaaaaaaaaagagacaccagagagcttgttagaagaggtcatgtgagcacacagttagaagaccttcaagccaaagaagaggcctgagattgaaacctaccttgcaggtaccttaattttggacttcccagcctccaaaactgtgagaaataagtttctgttaagtcactcagtctgtggtattttgttatggcagcctgagcaggtagttgttctttcagaaggtgttgataataaccacatgcaacaccaagtcacaaataataaaacagatgtaacttatattcatacagaaagttgggcactgccattgccttgttggtttacacggctgtgctagttcagtagcagaaaggtgctggtctcctttactcagtttacaatctaggcagtagaatgtaatcactgctttaaacttgatactgcttagggagagaatcattggtgctgggtaactttgggttctaggtttactttttgtgtatatataactgtttttggtaaatcacaagtttctgggcttgtcgaattagattttgttacagattatgagctttattatgctatacagttagttgtatgtatatatgcctttcccactagattttaagctttttttttttttttttttttgtgacggagtcttgctcttgtcgcccaggctgaagtggagtgcagtggcacaatctcggctcactgcagcctccacctcctaggttcaagcgattctcctgcctcggcctcccaagtaactgggactacaggcacgtgccaccacacccggctaatttttgtattttttgtagagacagggtttcgccatgttggctaggctggtcttgaacttctggcctcaggtgatccacccgcctcagcctcccaaagtgctgggatttacaggcatgagccaccacgcccagctataagctctttaagggttgtaaatttataatcattcttttactctcctgcaaattctgttgcacactgccttaatcaaggtagatgctgaatgcatttttgtataattgaatatgttgcaatccccaactctctccaactgttcctgtcaaagcagccactggattgttaactaatccatattagatggggttaattaatatcagatgggacaagtaagggctaataagattataggccaccaagtagatttctgtctagctcttatagagattgagtttattggacctgtttgataggaagttttggtgtttgggatgattaaaactgaagttcctatttattgaattatacctatttatattatttcatatcagtggtccacatgcaagtgaggcttctgagacagagtttgagttctctcttcaactaccataacacttaacctgtatctttttttttttttttttttttagacggagtctcgctctgtcactcaggctggagtgtagtggtatgatctcggctcactgtaacctctgcctcctggattcaagcagttctccatgtctcagcctccctagtagctgggattacaggcctgtgccaccatgcctggctaattttttttttgtatttttagtagagacggggttttaccacgttggccaggctggtctcgaactcttgacctcgagcgatcaacttgccttggcctcccaaagtgctgggattacaggcatgagccacagcgcccagccgtctttttttttaaatagcaatttaacactgttcacagttactcatgtacatgtcatgccatctattacactgtaagttctgtgagggtagctgtatcaaatttatctaactctctctagtatgcatgacatagtaagtattcaataaatatttgcatattagtgataaggatacaggttctgaatagtgggtccttaccatttaagaattagtatttgatggccgggcggggtggctcacgcctgtaatcccagcactttgggaggctgaggcgggcggatcatgagatcaggagatcgagaccatcctggctaacatggtgaaatcccgtctttacaaaaaaaatacaaaagaattaaccaagtgtggtggtgggtgcctgtagtcccagctactgctttgtgaggctgaggcaggcagatcacctgaggtgggaaattcaagaccagcctgaccaacatggagaaaccccatctctactaaaaatacaaaattagccgggcgtggtggcgcatgtctgtaatcccagctactcgggaggctgaggcaggagaatggcgtgaacccgggaggcggagcttgcagtgagccaggatcgcgccactgcactccagcctgggcgacagagcgagactccgtctcaaaaaaaaaaaaaaaaaaaaaattagtatttgatatttgatcattaaatatgaattaagaggacttagactttttgttaaatgtcaagctgggaaaagttgtcatttaaatgaattgcctcttatttaatttcgtctgatgatacattttgtttttattttgtaaaaaattattttttttctttttggagacagggtcttgctctgttgcccaggctggtcacaaactcctgacctcaagcaatcctcctgccttagcctcccaaaatgctgggattacaggcgtgagccacctcgcccggccttgtattatgatacattttgaacaactacaagtagacttggtataatgaacctgcacgtacccattgccaagttctgacaactgtctgtctatagccaattatgcatttcttaaattagaacccccccaatatacccaaatatatatatatgtgtgcatatatatagtaagttgtaacaaagttgtgaattcatacctgaagtatctcaagtgatgcaagttttatgaatttttgtttatgccttttgggaagagttgtattgacaaattttttatgcttaaagtaaaccataaatcaaaaaaataaaatctaggatgcaataaaacaaaacaacttcttgacataagtatggtatgtaaatctgttttgattggaaatcaatttgttatattgccagaattcctgttttagaatacatctctgctgatctgtctgtattcttagactgcatatctgggatgaactctgggcagaattcacatgggcttcctttgaaataaacaagacttttcaaattcttagtcgatctgcagaacctgtagccaggcactgaaccattttgatagatgcagtaatcgttgcaagtgtatatttcaaggagttctggctgggtcctagtttatgcttgtggcagaagcagtgagtaactgggaggaagttggtgagtaagcttcaaggaagaagtcatttttagtactctggatcttcctgattttaaagcactacaaaatggtgcattttcattcttgtcaagtgataacagatatattctgatgagcctgaaatgaatatatattgtatcatttttataatatctagcaaggtttgtattttcctagaacttgaactaaatttcagttcataaaatttataaaatacttagttgttgtaaaatatttttggaatgttcacataggtgacacacaaatgtcccattttcattctttctatagtaaatatgttctgatatgtgaaggtttagcagatgcatcagcatttaatcctagaggatctggcataatcttttcccccaagaatagaaattttttctgcttatgaaagtagtacatgtttctttaaaaacaaatcaatattgacttctgcctgctgtatagcactatgcctccacctggccatgaccaggggcatgtcctggtccacctacctgaaaatgtttgcaaccagcctcctggccatgtgcacaggggctgaagttgtcccacaggtattacgggccaacctgacaatacatgaagttccaccaaagtctgagaactcagaactgagctttggggactgaaagacagcacaaacctcaaatttctcagcactggaaacctcaaaatataactgaattccataaataagattttaagtcttaaatatgtatttttaaatgtattaaaagtcaagctgcttgtatttaagcacctaatacaatgcttaggttgtaaaaggagatgctcaataggtactaactgatatattgagatttaattatggtttgaccaatatttattggaaaccgccaaagcttaaatcatcagcttcttgaatgtgatttgaaaggtaatttagtattgaatagcatgtgagctagagtatttcattctttctggtttatttcttcaaatagactttgaatataatggtgaatgggtattataaattaactaataaaaatgacattgaaaatgaaaaaatatatatattaaagtgtagaaagtgaccaggcgtggtggctcacacctgtaatccaagcaccttgggaggctgaggcaggaggatctcttgatcccaggagttcaagaccagcctgggcaacatagcgagacttcgtctctaaaaaaaaaaaagagagagaaaaaaattttttttatttaaaaaaagtgtagaaagtgtcaagaccccacttcttaccattatttggtatatttctctatacccacccacccttcctccttactccctccctcccttcccaatctttttatctttttgtattctgattttttgtttgtatattttgctttaatttaatgtatcctttaaaaatttcccatacattttatatgtatatataaaaacgcatgctgccaaagataatttataagaaagaccattgaatttttttaaaagtgatatatattcattgaaaaaaatttagaatatatagcaaagcaataaagaactaaataaaattgctgtaactcctctttcaaagataagtgcttttatgattttgttgtatttttttctgtatataggtacatatatagtatttataaagctgtactcatagtacattttcacatcacaggtaccatatcagtgttattaaatattttgtatgccaggggctagacataccaagacaaccaatatgtggttctacttaaataatattagagtatcttttatgatgacacttcatgagttgactataataatcttagacttctaagagtttgggttttcaaaagatcacttagcttttttgggtgatttttcccccttactgtgagatgagagaggctgtttggatttgggattggggtagcggggacagcaacttttcttttctttttcttttttattttgaggtagggtattgctgtgtcacccaggctggagtgcagtggtgtgatctcggctcactgcaacctccacctcccgggctcaggtgatcctcctgcttcagcctccccagtaactgggactacaggcgcgtgccacatgcctggctaattttgtatttttagtagagatggggtttcaccatgttggccaggctggtctctaactcctgacctcaggtgatacgcccacctgggcctcccaaaatactgggattacaggcatgagccgctgcatcagccagcagtttttcttgtggttttttttgtttgttttgttttgttttgtttttgagatagggtcttactctgttgtccacgctggagtgctgtggtatgatcgtagctcactgcagcctcaaactcctgggctcaagtgattccttctgcctccgcctcccgagtagctgggactacaggtatgcaccaccatacctggcaaatttttacaaagttttttgtagggacggggtcttgctacattccccatgtcggtcttgaactcctggcctcaagcaactctcctgtctcagcctcccaaagcactgggattacaagtgtgagccaccacaccatgccagtttttcctgttcagtgtgatattttatcttgttagactacagtgtgttaaaacttgttttactaaattttcaaacatactcaaaagtggagagaatagtataatgaatacccgtatgttcatcacccatgtttagaatattattaaatataaagattttgctgcgtttgtcttagctctttaaaatttttctttttctctttgtgacctaaaggaaattccatatcttatcactttacttctacattcttgactaagatgactaagacatatagttacatggttttttgttttgttttttgttttttaaagacgaaatctcgctcttgtcccccaggctggagtgcaatggtgccatctcagctcagtgcaacctctgccttctgggtacaagcgattctcctgcctcagcctcccaagtagctgggattacaggctcctgccaccacgcctggctaatttttgtatttttagtagagacggcggggggaggtttcaccatgttgacaaggctggtctggaactcctgacctcaggtgatccacccgcctcggcctcccaaagtgctgggattacaggcgtgagccaccgcgcccagcctgtttttttgtttgtttgttttgttttttttgagacagagtcttgctctgtttcccaggctggagtgaagtggcgcattcttggctcactgcaaccttcacctcccaggttcaagtgattctcctgcctcagcctcccaagtagctgggactacaggcatgtgtcaccacacccggctaatttttttgtatttttagtagagacgggatttcaccgtgttgcccaggctggtctcgaactcctgagctcaggcagtctgcctgcctcagcctcccaaagtgctgggattacacgtgtgaaccaacccgcccggcctgttgttttcttacataattcattatcatacctacaaagttaacagttactaatatcatcttacacctaaatttctctgatagactaaggttattttttaacatcttaatccaatcaaatgtttgtatcctgtaatgctctcattgaaacagctatatttctttttcagattagtgatgatgaaccaggttatgaccttgatttattttgcatacctaatcattatgctgaggatttggaaagggtgtttattcctcatggactaattatggacaggtaagtaagatcttaaaatgaggttttttactttttcttgtgttaatttcaaacatcagcagctgttctgagtacttgctatttgaacataaactaggccaacttattaaataactgatgctttctaaaatcttctttattaaaaataaaagaggagggccttactaattacttagtatcagttgtggtatagtgggactctgtagggaccagaacaaagtaaacattgaagggagatggaagaaggaactctagccagagtcttgcatttctcagtcctaaacagggtaatggactggggctgaatcacatgaaggcaaggtcagatttttattattatgcacatctagcttgaaaattttctgttaagtcaattacagtgaaaaaccttacctggtattgaatgcttgcattgtatgtctggctattctgtgtttttattttaaaattataatatcaaaatatttgtgttataaaatattctaactatggaggccataaacaagaagactaaagttctctcctttcagccttctgtacacatttcttctcaagcactggctatgcatgtatactatatgcaaaagtacatatatacatttatattttaacgtatgagtatagttttaaatgttattggacacttttaatattagtgtgtctagagctatctaatatattttaaaggttgcatagcattctgtcttatggagataccataactgatttaaccagtccactattgatagacactattttgttcttaccgactgtactagaagaaacattcttttacatgtttggtacttgttcagctttattcaagtggaatttctgggtcaaggggaaagagtttattgaatattttggtattgccaaattttcctctaagaagttgaatcattttatactcctgatgttatatgagagtacctttctcttcacaatttgtctcttttttttttttttttgagacaaggtctctgttgcccaggctggggtgcagtgcagcagaatgatcacagttcactgcagtctcaacctcctgggttcaagcgatccttccacctcagcctcctgagtagctgggactataggtgtgcgccaccactcccagctaatatttttattttgtagaaacagggttcgccatgttacccagcctcccaaagtgctgggattacaggcatgagccactggcccagtttctacagtctctcttaatattgtatattatccaagaaatttcatttaatcagaacctgccagtctgataggtgaaaatggtatcttgtttttatttgcatttaaaaaaaattatgatagtggtatgcttggtttttttgaaggtatcaaattttttaccttatgaaacatgagggcaaaggatgtgttacgtggaagatttaaaaaaaatttttaatgcatttttttgagacaaggtcttgctctattgtccaggctggagtgcagtggcacaatcacagttcactccagcctcaacatcctgcactaaagtgattttcccacctcacctctcaagtagctgggactacaggtacatgctaccatgcctggctaatttttttttttttgcaggcatggggtctcactgtattgcccaggttggtgtggaagtttaatgactaagaggtgtttgttataaagtttaatgtatgaaactttctattaaattcctgattttatttctgtaggactgaacgtcttgctcgagatgtgatgaaggagatgggaggccatcacattgtagccctctgtgtgctcaaggggggctataaattctttgctgacctgctggattacatcaaagcactgaatagaaatagtgatagatccattcctatgactgtagattttatcagactgaagagctattgtgtgagtatatttaatatatgattctttttagtggcaacagtaggttttcttatattttctttgaatctctgcaaaccatacttgctttcatttcacttggttacagtgagatttttctaacatattcactagtactttacatcaaagccaatactgtttttttaaaactagtcaccttggaggatatatacttattttacaggtgtgtgtggttttttaaataaactccttttaggaattgctgttgggacttgggatacttttttcactatacatactggtgacagataccctctcttgagctacatcggtttgtggggagtcaaaagtcctttggagctaggtttgacaaataaggtgggttaacacttgtttcctagaaagcacatggagagctagagtattggcgaattgaagaaatccccctttttttttaacacacttaagaaaggggactgcaggtatactcaagagagtaagtcgcaccagaaaccacttttgatccacagtctgcctgtgtcacacaattgaaatgcatcacaacattgacactgtggatgaaacaaaatcagtgtgaattttagtagtgaatttcattcataatttgatcgtgcaaacgtttgatttttattactttagactattgtttctgattttatgttgggttggtatttcctgtgagttactgttttcctttaaaataggaatttttcatactcttcaaagattagaacaaatgtccagtttttgctgtttcatgaatgagtcctgtccatctttgtagaaactcgccttatgttcacatttttattgagaataagaccacttatctacatttaactatcaacctcatcctctccattaatcatctattttagtgacccaagtttttgaccttttccatgtttacatcaatcctgtaggtgattgggcagccatttaagtattattatagacattttcactatcccattaaaaccctttatgcccatacatcataacactacttcctacccataagctccttttaacttgttaaagtcttgcttgaattaaagacttgtttaaacacaaaatttagacttttactcaacaaaagtgattgattgattgattgattgattgatggtttacagtaggacttcattctagtcattatagctgctggcagtataactggccagcctttaatacattgctgcttagagtcaaagcatgtacttagagttggtatgatttatctttttggtcttctatagcctccttccccatccccatcagtcttaatcagtcttgttacgttatgactaatctttggggatttgtgcagaatgttattttagataagcaaaaacgagcaaaataggggagtttaactttaatattttcttttaaaaagcatttcatgttataagatcaattctgagtggtagaaatgctttgacattttatttccattttctacttttagtttttttcctatttgtttaagatcttagaggattattaagctgaactcctcaactgataaaaagcatgacatcttaaacataagcaaagcatatttttaggttaattttcacatagaaaacagtttattttatgtgaaattctatgtagatatactatttttttggtatttattgatatgtttattttattttattttattttattttattttattttattttatttatttatttttttttttgagacagagtctcactctgttgcccaggctggagtgcagtggcatgatcgtagctcactgcaacctccacctcccgggttcaagcaattcttctgtctcagcctcccgagtagctgggactacaggtgcctgccactatgcccggctaatttttgtgtttttagtagagatggggtttcaccttgttggtcaggctggtctcgaacccctgacctcaggtgatccacccacctcagcctcccaaagtgctgggattataggcatgagccaccgtgcccggccgacatgttaattttttaaaaaaggctttactggggtatattttatataatataataatcacatgttttaactatacaattccaagctttttagtatatttatagggctatgcaaggaagatatactgttaaacagtagaaattgagaaagctcttctgataatatctcttgatttgatgatggctcatgcctgtaatctcagtgctttggaaggccaagacagcagaatcacttgaggccaggggttcgagaccagcctgggcaacacagcaataccctatctttacaaataataaaaatatctgttgatttgaagtaaagtttttttttaaagacaaggtctcattctgtcacccaggctggaatgcagtagcaagatcacagctcactgtggccttgaccttctgggctcaagtgattctcccacttcggcctcccgagtagctgggactaacaggtgtgcaccaccatggctggctaatttttttttatgtttgtagagattgggtcttactgtgttgcccaggctgatcccgaactcctgggctcaagcagtcttcctgcctcagcctctaaaattgctgggattacaggcttgagtcaccatgcccagcctgaagtagcatttctaccctgtttaataattcagcagcttgtcatgtaagatattcatatatgcatataaaacattaggcagcttaatttggtaaaactgtaaaatggaaattttaaattgtttgcagcatcaataacattgatgtcagtatgatttttacatgctgatcttgaccaatttgaaacagtgagttaaaatctggctgatccgtactaatcctaaagaaatattctatgaactattaaatgtttccagaatatataaagaaacattatgatgtcaacacacccatctatttttttttggaaataaaaactccatttttcttattaaagaaaacatgcttattagaaaacatacggctgggtgcagtggcacacatgtaattccagtgctttgggagatcgaggtgggagaatcacttgaggccaggagtttgagaccagcctagacaacataatgagaccccctctctacacaaaaagaattagttgtgcatggtggcgtgcacctgtagtcccagctacttgggaggcagaggcaggagcatcccttgagcctaggagtttgagactgcaggagttcgagactgagtggaatgcagtggaactgcattccagcctgagtgacagagggagaccctgtcttaaaaaaataagaaagaaaacacaactgcagaaaattataaaggatttaagtcattccaaatatcactgccactttttatttagaatattctaaagaattctctctctgtgtacacacacacatatgcgtactcttaatccaagtagcttggtaggattttatttacctagtgcctagatgggaaattgcctggggattccaaatacctatttcattaaattaaagatgtcactgattttaagacttaacactatttttcatactgccaagaaagaaaacactaccagttataaatgtaaattgccatcaattgtaatacatcaattttagagctattattaataaaatgtgaatgtgcatcttagagcaatgaaatatagtactatatatttgatgaccttttctgccctgtgatattcagaaagtgaaagttaaatatgggctgagcatggtggctcacacctgtaatcccagtactttgggaagtcaagacgggaggctggcttgaacccaggagttcaagaccagcctaggcaatgtagcgagacgccatctcaaaatattaaaaataagtaaataagtaaataaaaagaaggttaagtatacaaatgtatttcctttgttgtgaatttatttcaattttatagtgattttttttttttgagacgaagtctcactcttgtcccccaggctggagtgcgatggcgtgatctcagctcactgcaacctctgcctcccaggttcaagctatactcctgccttggccccccgagtagctgggattacaggcgcctgctaccatgcctggctaatttttgtatttttagttgagatggggtttcaccatgttggccaggctggtctagaactcttgacctctggtgatccacccgcctcggactcccaaaatgctgggattacaggcgtgagccaccgtgcctggccagtggttttttgttgttgttgttgttgttgttttgtttttgtttttgtttttgttttgagacaggatcttgctctgtcacccaggctggagtgcagtggtgccatcttggttcactgcaacctctgcgtgggctcaagcaatcctcccacctccctttccagagtagcggggaccacaggtgtgtgccaccacacctgactaatttttgcatttttttttgtagaaacagggttttgccatgttgcccaggttggtctgaaactcctgagctcaaacaatccaactgccttggcttccctaagtgaaattacaggcatgggccactgtacccagtctagtgatttttttatttttatttttattttattttattttatttttttaccaaaaaaacaacaaagcctcaggaggaaaagttgatacacaagtaaattttattggaaatgtttttgtgtggaccttaagcagagggaaaattagtctgcattatggtgtatccagactaaatgactgatattaaaatgaaattattcttaggatttgcaatcttagagaaaactttttcatttttatttttttgagttacaaattatcttcatttacatttgagaacagtgagtcacagagggattaagtaacttactcaagatcatacaagtctttgatttgaacccaatcttttaactctgcagaactcagagtcactcttatttggaaaaactttttaactgatgtggatcctctaatatgggcttcctattattcattctctattagtcagaagttttgcaagcagacagaattcattttgccaattacgggattttccctcagttgcagtcaaggttcataaaactataactctttatctttaattagaaatgtttttttttttgagacaaggtcttgctctgttgcccagactggaatgcagtggcatagtggcccattgcagctttgaactcctgggctcaagggatcctctgcctcagcctcccaagtatctgagactacaagtgcgtgccatcacccatggctattttaaaaaaaaaaaaaattgtagagatagggtcttgctgtgttgcccaggctggtctcaaactcctggtctcaagcaatccttctgccttggtctcccaaagtgctgagattacaggtgtcagccgttgcacctggccaaaacgataacttaaaatacacacacacacacacacacacaaacacatatgtgtatttgtgtgtgtgtgtgtgtgtgtgtgtctcaaaaggtatcaaaagagaatagctataactttagtgttgatcttgatagtgacttgattaggctctgtttaacatcaaagatgcaaattaatactttctttgaacatattaaaaatgcagaaaatattggagtattttattttaaataaattgtattctgtatatttaaggtatacaacatgatgttatgggatacatataggtggttaaaagattactgcagtgaagcaaattaacgtatccctcaactcacatagttacccattttttttttgttttggtggcaagaggagcttaaaatctcatttagtgtgaatcccaaatacagcacaattttattacctatatacttcatgttgtacattatatttctagacttgttcatcctacatatctgctactttgtatcctctgagctacatctccccattttctcacttgccccccaagtagtttcttaaagtgtctcatgtaagagggcagtagctttcagcttaaactttttctctgtatgtagtcgatttctttgaggtatacttttctctccagaatagttagatgtaggtataccactttgatgttgacactagtttacctagaacttatcttctgtaaatctgtctctatttccatctctgtctccatctttgtctctatctctatctgtctatctctatctatctatctatctatctatctatctatctatctatctatctatctatctaaagcaaattcatgcccttctcctatttattgaatcgagaccatagacaggggtgagagaaagaatttggcaggaatggggatgtgtattatctgtggcataaggaaactttacagaactaggttcaaaagtatactttctagttctttcccatggcttttcactttgatgtagtccttatcaggtaactgaggttttatataagtcccctgattcttagaacatgaaggtgtagtagtcaaggttggtcccttgaaaccacaaattttgtgaaaaaaaattaagaaaattgaataatttcctcagcaaatacatattgatcatctgttatacagccatgagaagtggttctgttgcacacgtttattttatcagatcctaatcccaaaccaggcataaaatggaaaccatgaagataggatgaaataacttctgaatgtttgaatgtttgaaaatagtgtacttaaaaataccaggtggtttttgtttgttttttgtttttttctttttttgagacagggtctcactctgtcacccaggctggagtgtagtggtgcaatctcatctcattgcagtcttgacctcccaggctcaggttatctcccacctcagcctcccaagtagctgggactacaggcacatgccaccacgcccagctaattttttgtattttttgtagagacggggtttcaccctgttgcccaggctggtctagaactcctgggcttaagcgatcctcccacctcagcctcccaaagtgctaggattacaggcatgagccaccatgcctggcagaaaataccaggtttttaagtatcagcacttactcttcaatcttttctattactatgttgtgctaaatggtattttttatttaattagagcaatgctgttcaatagaactttctttgaggatggaaatcttttatgtttctgctatgtggtacagagccactagtgacatgtggcttttgagcgcttgacacatcttgtgcaacacaggaactgaatttttaagtaatttatattgccacatgtggctaccgtatgggacagtgtagtactagatgatctgtaagggctgtgcttcatcagtgtcgttttttaactgacaaaaacctttagttttttttttagtaatgtgtttatttaaaagaattcataaaatacaagtaaacaaattaacttgttacctgagcatatgtcctttcatacttattttttctgcatacatattttggaaaatggaatatctgccctttttttttatctgagatacagtctacctctaaaaatacatgattctaacattctcacttttgttggcatttgatcagggtatagaaaaacagttaaaaggacagagaatggttgagagattatgatatgaagagaaaatgtgattgagtgtggtagacttggggcctgcttgaatgttgagagaatgactgttttccgataaaaaaaaaaagtccattctaggatcctaaaagaagggtctgaagttcactgcagaaagcaagctacatagtactaagccactaaggggacatggagcccttagtaattcctaccttagtaatagtctcatcatgccctcttgggaacccagccttgttgattagcctctctgctttctctccttatagttcaacctccctgtttgttccaagcagttcttttcctgcccatttattatgcatttctatacagctttcctcctctttttctataccatgctgcagttcttattgctacctagaggttttcaaaattcctaggggcggataagtaggcataaacaaagttcttccctattatccttcctattttttcacctagactgaagaggtagacaaaatagaaataaagacattaagggtatgtgtttgtagtcccaaagagcttctctggcaattttatgtagttgacagtgacgctctgagttcaggacagattggactccttggctgagaggagtgaggagataggacggtagaggagagggtagagcaactctggaggaagctttcccctcacctttgccagtcctgttatcctagacttaaccataattaaagatgagggaggcactcagtaaagggatctagtgggaagcttgttccagacagccaaggagggaggttcgcgcagttcctttggccacccaggtggggtaattgatccatgtatgccattcatgtacaatgtaggcacttatacctgtattccaatgtagtgaactataccattactcttaaattaatattctttattagcttccatggtggctataggccaggcaagagagttaagaaaaaataaatagccaggtatggtgactcaagcctgtaatctcggcactttaggaggccgaggcaggaggatcgcttgagtccaggagttcaagaccagcctgagcaaaatagtgagatcctgtctctattttttaaaaaagccttggggcaaacaggagtatggaggtttggatgctaatagaacagcagtgtcttactgcttggagttctcttgtttcttgtcctatcaccgtagcctttggatcacagcaatttttccatgactccatacttttcagttcttgaatattttttcctttattcctcttgtctctgtaaagacatcaactggagttggactgtaataccaggtatctccagaagatggcactatttaacagattttataaataatttgatgtgagtcactgtcatctgaagcttgttgccttttctttctttcttctttcttttttttccccatcaattctgtatgtttgaaatgctgggttttaagttagttagaataagggatgtctgtaatttccctaaattgagaagtaatatgcaaaggttgatatcagaagtcatatgctcaccttgcaacaccaaataatactggcccatttgtgatttttgaaagtaacactccataataaatggatgtatatatagaagcataacaaaaatagaagcacataaaagtgaaaagtctcataaacgccattgtcactactcatgtaattgctgttacaaatttgtttaaatgttgaataaaaatggtgtcataggcaacacagtgttccactacttggtgtttttaatagcattattctgtctcagtgtgctttggattatcaggtgctttttaatagttgcatggtattacattgtgtagatgaacttgattaatttaaatggttccctgttaatggacatgttggtttgtttttgtgaacaactgatacagtgaacatttattttttaaataaaaaaaagagagacagggtcttgctgtgtttctcgggctggccttgaactcctggggtcaagcgatcgtcttgcctctgcctccctgggattacaggcatgaagccaccgcacccggcccagtgaacactcttgaatgtatctttgtatacttgtcagtgtttttgtagcattgattcccagaagtgggattactggattaagtgacatgcatgtttgcaattttaacaggtattgctatgtcattttcaaaagaagctatgccaattaatactctcaccaacaagagtgcttatttcccctcagcatattatcaggcttaagttttgccagtatgggtgggagaacagtagaatcacattgttttagtgtttgtttctcagatagatataattttacaccttataaccttctcttctataaattgtctatttgtgttcattctccattttcctatgggttcttattgttggagcccaatatataaaagggggtatttgttacagaacctcttcagttttggttcatgtcatgcctgggtttttaccctttctacggatgttaaaaaaaattctctattttcttccagtccacttatggctttattttttacatttagattttaatccgtctggaatttatttttgtgtatgctgtgaggtagggaccatacttttattttttcccaaatgggttactagttggccaaacatcatttattgaataattcatcttttccctactgactcgaaataccatctttattgtatactaaatcctcatatagttctgggtctgtttctgggctctactttgttcatttactgtgctggtactgcaccgttgtaattgctgtggctttgtggtatggtatggcttgctctctgctagggcaagtcgaagctcttttgttcacctgctctttcacccaaattttctgtcctgaatccagcacagccaaattatggtcattgtcaccaccaactacagtgggtgttgagcatttcccattgaatctcctgtaagggttttattggattctgtgatagcagtaaaatgggagcctaagaggtattccttaaaggactactaatcagacctggtttcccagatgatgctgaagatgacggggcctgggctagacttttgagggacatatccttggggttgggtgtgatatagaccagcccttacaatttgcttgactcatgggaatcgtacagggccagaaccagacacctgtcatgctaataacttccctcacaattcagaaatcactgtgattgaagatgggtggctgttataatactacccacttaaaaatggatgtaacccattttttaggactcttaaaaacatcaaatcagtaatggccgattaggactttttaatttttactaatctctacttgaaagttttctagtcattcatttcaggaaacctaattcttataattcatatcatttagaatatcataatgctatggatattagctagctaacttctcaaatcttctagttctcatttaatttgaagtttgtgtgtgtacataaggatatacatatacatatgtgtgtgtagatatatatatatatagttttttttttttttaactagaatgaccagtcaacaggggacataaaagtaattggtggagatgatctctcaactttaactggaaaggtatgtatcttgaaagggaagaaaaaaaagcacttcataccgagtcaattagtaacagtgtgctttcaatcaatcactaagagataatttacatagtataactaaatgggttatttaacccttggaagcagtctaggttaattatcgttccctaggtcatgtagtaaaaagacagtagaatccaacattaaccttaaatgtccatattgtcaagtactgctgtctgcctctgtgggactctaatttgggatccttcaaaaaacattgatgggggaaaagatagcctttaaaaaaaaaaaaaaaacaaacctatgtgagtctatgtgaggtagactcacatagtttcctaaaagatagcaaagcagtattatgtagtggctgaaagtgtgagttccggagcctgacaactgattcaaagcatggcttagtacttcctaactctgaccttgggcaagttacttaacctctctgtgtcccatatgtgattagggtgaggttgataatagcagccatagagttaagaggattaagtgctataatgcaagtagagctcttacaacagtttctggtaaatcactcaataaattcagacatactattattttaagaaatctcaaagagttttcttgtaccttaaaattctcctagtgtgaaccattggttttggtatattgtgcttccatgtagtttaatatcaagatgtttttagatttcccttttaatttatttgttgacccattggttgttcaggagcatgctgtttacctgaaaataatggagatattaaggtatttgaatatttatcttctagtacattgaaaaactttttgagagtaaccaataataaatgatggaatgctactgctttttttttttgaagctgccagttattgtttacttacactatgccaaatataaaggcattaatctcataaaagtttcacaacaatcctgtgagggagacgatatccccattttacaaatcaggaaattaagacttaataaggttaaaagacttgcccaaagtcacagaaccagtaagtggtagagcttgaatttgaatacagacctgactctaaagctcttttctttctttagattttagtgttcattgcttacttgaatgagtatctataagaaaactttaacatgtaaaacttctgtgaaattatcttgtcccatatcagggtcatgtcaaactaatgtcctcctcagcatctttggaaaacttcagaggagaaatgagctttgcccctcctgttcatttcatataccactgttagacctgtccttccctttcagcatgctttgtccatatttagaagctgttgaagccattacttgtctggtcagtttttagtgctggaatggacctagccttttaggccttctgagatttagtttgatctcgtctttcccacctaatggctctgttctactacatagatttgatctgaaacagttctctgtttctaaaataactttcttttcatgatagtcacagtaaagtacatttattatggaaaaatcaataagtataacgagtgaaagttatttcttggtggtaagattatgggattatttgaactttctgtttcattgtattttatttatttatttatttttgtgatggagtctcactctgctgcccaggctggagtgcagtagtacgatcttggctcactgcaacctccccttcccagttcaagtgattctcctgcctcagactcccaagtagctgggattacaggcgcacgccaccatgcctggctaatttttttatctttagtagagacagggtttcaccatgttgaccaggctgatctccaactcctgatctcaggtatccacctgcctcagcctcccaaagtaccgggattacgggtgtgagccaccctgcctggcctcattttgtcttttgggggtatttttgtgtgcagatatatatgtatataaatatttttccctcttttccccagttagtatttgagcagatgaactttggacccgaatacctgtattcaagtctctaataccacttcttggctattttcattttatcaaatggcctcttatcctcgtttttctcatttattaagtagagatgtaactacttgatataattcaaaaactcaataatggcattcttttgttttttagactctagtgtctgtactcgttgtaccatgctgggattcatttgaacaattgcatggcttttttagtgtattattaaatttgcagtttacttagaatttactgggacctcatacaaatgggaaaaaaacataactgtgttactcatttgctgtgtgcctttggattgaccctattttttgtattcattttctccccatgtcctgagttccactttgaataaaaagtaatttttttcctgcctgtaaaataggctaccaataggctgcagttgtctatagtagctgcttcactgaggagagctcagcatgagagaaatagtatgaattgcttgccacaagttatgggctagccttacttcattctgtacttggacctgtttaggcttctaagagatcttacctccaacaataaactgctttgagacatgaaaaggtggaagctttacttggttataactttacttttaatacctagaacagtgagtcttcaaacttgtatttgcatgcccaatttataaaaagtttcctgagcatttacccctaatatatgcattttaaattatatatgatttatggtaataataatatatatgttacaaaatacatacaaaaatatagattaaacaaggtgaggtaaaaaatttaaaagttctaatctttcttgcaaaccagtggatcttttgtgccttactctggtaaacactgtcttagaagaatatatagaacattaaaatcttaatgctatagttatatgacagagtatgatgagagctacagataaacaacacatcatgaatcttcttgtggcagtgtttataaccattatgtgaaatgctgcctcattcttataactagcataagaacagataggactttctcgattttgaggggtaattattagatggtattttctgttaaggactcttccagctataaaattcttaaatgtagaaagcgaagtgagggtttatggtgagaggaagcattggtatcatgttttagtgtagtccaagaatatggacacatccagaaaatgcagatcaagtttagcctaatgagaaaatatattttggagtccatatggtaaattaaattatgtgatttttgagttattgtacaaatataattcttagaatgttagagtcaggagactataagagaccaactgcttcaagtttcatttaacacatgggaaactaaggccagagaaatttcaagacttgcccaagattagacctcttgttaagtaatgaaagtgttttaaaaacaggtgggtcaaattctgtttttaaaatttccattatgatgaaaatttcagtattacaggcttccaaatcccagcagatgggccacttgtttaaaggagagtttgatataataaagcatctaaaaacaagagtttggataattccttagggttgttatgatgtgatttgacttataattggaaataccgttttattcattgtactgattttcatttctctttttcttctagaatgtcttgattgtggaagtaagttcacatttacttttaatataacatttatgacttttctaacttagtatgcaccatcctaaaggtaagccagggagagaaattcctctgcatcagttttaatggtgggcttgtgttctaaaggagtgagattggttttttgtaaagactacttagtaatttgtttttaccaataatggaatggtatacttcctacctctctttttttagtttgaagtattttctttctaaacataactctctctctctatttatctatatataatatatacatatatatcttatattttatgtatatatatatatatcttgcttagattttgtcttatgtaatatttggtacataaaaaataatatttataatttatagactattttccatgtgttattatgtgctaaagtattttgtatcttagcaccgagaggctaagcagtttcctagggttaccagctagtaaactaagggaaacctttacttcctttagctcagtggttctcaaaatgtggttccctagaccaaaagtattaatatcagacaagaacctaccgaatcaaaatatctgtgatgaggcccagcaagctatgctttaacaagtttccgagtgattctgatgcatgctaaggtttaggatcccttgtttttactcataagtcactttctcattaaggccttccctggccatcctatataaaatctcatgttttcacaccgtcaacttcgtattcctcctcaatacttttattttcctgatcacttatcactaacagcctctctctctctctctctctctctctatgtatatatatatatatatcacttatcactgtctaacagcctctctttatatatatataatctatagattatatatatatgcagcattgtgcaatcattatcacgctcaattttaaaacattttcattgccccacaaagaaacccaatccccttagccatcactccccatttccccttcccccagcacctagcaaactgatcatctacctacttgctgtctataagatttgcctattctggacattttgtataaatagaatcatacaatatgtggccttttgtatctggcttctctcacttaatgttttcaaggttcattcatgttgtggagtatatctgcactcatttcctttttattgccaaattgtatggatagacaggtgttcctcaactgtgtcctgataaacccatctgaagttgaaaatatcataagttgaaaatggatttactactttgataaatctatcctaaagtcagaaaaatctcatgttgaaccatcgtaagttggataccatctgaattacatttttgttatccattcactggttgacagacgttaggttgtttccactgtttgctccttatttctcgtacctgaaatgtccttattccctcccttcttatcccatgtttaagtcatttaagacccagctcaaacgtcacctccacaaaaccttccttgatacccctttcctcttcaattcacttggaccttttgcatttaattttaatttttattttttttaagacagagtctcactctgtcaccaggctggagtgcagtggtatgatctcagctcactaactactctgcctcccaggttcaagcaattctcatgtctcagcctcccaagtagctgggactacaggtgtgcgccaccatgcctggctaattgtgtgtgtgtgtgtgtgtatgtatgtatgtatatatgtgtgtgtgtgtatatatatatatacacacacatatataaatatatatacatatatatatatacacacatatataaatatatatacatatatatatatacacacacacacacatatatatatatatagttttttttttttttaagtagagatggggttttgccatgttggccaggctggtctggcctcaagccatcctcccacctcggcctcgcaaagtgctggtattataggcatgagccactgtgcctggcctgcatttcattttaattataaaatattttgaactcagaaaaaagggtatgctgaatacctacgtacccacaaaagtattaacattttgccatatttgcttctgatcttattttttttgagaaattaaagatcataatacaactaaagccccatttctttcccttcattcccagaagtatgacaattatccttaaagttgatatatatcattcccatgcatgttttttatacttccctagtacaagttagctgtatcctctgctcaggggctcatcaagctgaatcaagggactcatgatcctcttcaaagttccttcaggttgttggcagaatttagttccttgtgattgtaggactgagggcccgttttctcactggctgctggccaggggttgctcccagatatttaaaggctcatgccctagcccatgacagtctcacaacatggcagctgacttcttcaaaaccagcaggagaatcttgctctagtctaccacataacctaatcacaggagcggctatcccgttattttcacagatcctggtcacattcaaggggagggaacccttctgtgtgtgtacaccaggaggcaggaattttttttttctttttcttttttgttaaaaagtcttaaagtcttttatccctaaaggaggcaggaattttgagagccatcagaattctgcctaccacagc

SEQ ID NO: 494 - DNA, 27718 bp, Homo sapiens
  source 1..27718: mol_type = other DNA
cttcctctcgcctcccacccccgagccgcggctcatcctctagggcggagagaggtggcatttgagtcctccggtatcccagcaggcagtgcagcctagagacgctgacaaaggagcggaggagcagtcgcagctgctttccgaggaagccggtgttgccgaggtgagagtcccccaccgtcccgtcacccacttcctctgacttcgggaaaatgtggaagttacgtggctgagagccccccgccaaagaatgacccatccgcacagccggagcttggctctgtgattgacagcggggctccgcggcgccgggatgcgggtgggcggcggggaggagacggaggggatcctttcctgtcccgtgtgtgactggcggtggctccgccgcccgcggcgcccggccccagggtctggccagctggtgtgtagctcgctcctgcccgggcaaaggcaggctcgggagcctctcggtgcctgcccgacggagttcggttgccccggggatgcggctcgcgggacaactcttcggtggatgcaccgaggacggctgggggagggaagttgactccccgtttggggtgacaccgtcctcgcccttcctccagcctagccggttgccccagcgagcaactggaaggaaatcggcagggttggagcgaggcgtcccgggatagcctcagctttactctctttgcctggagggagatgaaagtagggtggagaggcggggaggggagagcgaacgccttcttggaaaaatggggtagggtgtagggggtgcgtggcctgtatccttccccctccccagacctctgcacggatcttgatggttgcaccagctgctctgctgtaaacaggctcacatgaccggtttcacatggagcggccggtgtggggacgtgggctgggaaggctgggccccagtcaggtggagctgaaatcctaggacagtccattttgtactccctctccagccctcctgcccttaatcaatgttctgcggtttccccctttgaaagaaagtaattgacatctgccctctccagctgaagtagcagatctgccccagtagaatctgagagatctcacgtcggggaacgagaggacaaatgctaagtgaaaattgacctttgagggagataagaagaggactcaaacgtgaaaaattgtgtcctttggatcttgcctaaaaagcagtcctgttctttcagagtgcattgcattcttaatgtgaattccagacagaaaggagaaagtctactttttcaggcaaggcacacatgggatttaatattcttggtgaatatcttgtccacacttactctgagtactggaaaatctctttgcctagaaaagactatatacaggatattgaatatggagtggataccaacttttagattacacttatagttggtagtgggaagtttggaaaacaggaaacggccaaatgtgtctttcaagttgttcacgtctacatacccaatcaggatgcgagattaaactagtttctgaagcatttcttgaactcttaaaacaacaggtatacctaaatactaggagagttgaaattttggaatttttcaactctgtaagggatagctgtgatagattctccatacatgtattaataatatataattaaatgtaatggacaatattcagtataaagttactcctttataggcaaaaatagacaatagaacaaatagcttgtaaaacaatgcatgcttcttccttaaattgtttatgtacatttgcttcccaagtgttttatttttcttttcttagagagcttttacatttaactccattttctgaaaactaacagttaagaaatgatcagagaagctattccattccctaataggtcaataaagtaatttgctactattctttttctgtttttaaagaagtttaaaatggaatatatagacattttacatgtctacaaaaatatatatattttttgagacagggtcttgctctgtcacccaggctatagtgcagtggtgcagtctcagctcactgcaacctttgcctcctgggctcaagcgatctcccacctcagcctcccgagtagctgggattacaggagtgcaccaccatgcccagctactttttgtatgtttagtggagacagggtttcaccatgtctaccaggctggtctcgaactcctgacctcaagtgatctgccccccctcggtctcccaaagtgctatgattacaggcgtgagccaccacgcccagccaactttattttgtattttttagtagggatttcccaatgttggccaggctggtctcgaactcctgacctcaggtgatctgcccaccttggcctcccaaagtgctgggattacaggcgtcatccactgtgcctggccaaaattttttttttttttttgagacagagtctccgtcgcccaggttggagcgtgcagtggcacaatctcggctcactgcaaactctgcctcctgggttcacgccattctcctgcctcagcctccccagtacctgggactacaggcgcctgccaccacgcccagttaattttttgtatttttagtagagacggggtttcaccgtgttagccaggatggtctcgatctcctgacctcgtgatctacccgcctcagcctcccaaagtgctgggattacaggcatgagccactgcgcctggccagtttttttttttgattagctgaacatagtggcttggcacctgtggtcccagctacttgagaggctgaggtgggaagattgcttgaacccgggagatcaaggctgcattaagctgaagccatgccactgcactccagcctgggtgacagaggaagaccctgtctcaaaaagaaaaaaaaggtggggagtggtggctcacacctgtaatctcagcactttgggaggccgaggcaggtggatcacctgagggagttcaagaccagcctggccaacatggcaaaacctcatctctactaaaaatagaaaaattagctgggcatggtggcaggcgcctgtgatcccagagctttgggaggccgaggcaggcggatcacctgaggttgggagtttgagaccagcctgaccaacatggagaaaccccgactctactaaaaatacaaaattaggcaggcgtggggcgcatgcctgtaatcccagctactcaggaggtggaggcaggcaaatcgctcgaatctgggagcagaggttgcggtgagccaagatggcaccattgcactccagcctgggcaataagagcgaaactctgtctcaaaaagaaaaagaaataggaattgcaccgtgcaaaattctcattaggtattttaaccatataggttgacctatacctcttttcatcgggaaattgaagatggcctcagctaaatcctgcctccaaaattagaaataacagtttcagttgactttcttgaccttcagggcagaaaacaaagtctgattcttttactcattccagcttcttcctggattaggcagaccacgttattagtgatgaagttagaattttttttaagaaggaaggctctagcagtgtcttactttagcagtaccttggttagatcaccagaaccaatgtctggttttcagcttttccaggttcaaaatttcattggcacatcaagaaattgtcagtctcactgattgattcacaccaaccaaactcaaaagatttctatgagcatgaatggcaatttgctaactctcagtgagaactgccaaacagaccagaagactcacgtacaagccaaggcaagctttgctattgactatatggaaacacaaagaacttgctcttgacttcccctttttccaggttctatgaggaccacttttttcaagcctagcagttagtatattccacagaattacaggtttcttttatataaaaaccatttcagttacacctttgtatggatatatcctagtcacctggttgaattgggtcacatgtaaaacatctctaaaatctgtttcttctccattcctgcagccttagcctaggccctcatcattgcttcatgccacattcattcaacagttttttaattttttatagtaactactcaggagtcaggtgttgtgcttgaatggtcaatggcaacccctgtccaacttcaaatctgaattggtcagttctgtgcttaaaatccttaaggccaggcaaaatcgtaggttacacttgtaaccccagtgctttgggaggccaaggcaggaaggttgcttgaggccaggagttcaagaccagcctgggcaacatagcgagaccttatccctatatttaaaaaagaaaaaatccttaagtggtttcctattgcctgcagcagtggttctcaaagtttagtgtggatcggaatcacctggaagacttgttaaaacagatggctgggccccagtcccggaatttctgattcagtaggtctagggtgagaaccaagaatttgtgtttctaacaagccagaaccactggcatagggaatcaagtctaaacccccaaacgttcacaaaatcttgcacaatctgcctctaacttacctttctagccgaaacttgcccctctccccatatttgctgtttttaaccatatgcaatgccaaagctcattttaagcatccctttcatgcttctacacacattcttcctggaattcacccggccctccacttctactgcagactagccttaaggcagatgatcactttctttatgctcccagagcactttatatctatcagcagtttaacactgctcacatcatatcttaattactgctgtatatctgtttttcctgctagtctgagtttttggaaggctgacaaaatattttcatcttgtctccatattccctagcacagtgccttgtatataataagtgctcaggaaatgtttgttgagtgaatctgtgatttttttttttttgagacagagtctcgctctgttgcccaggctggagtgcagtggtgtgatcttggctcactgcaacctccgccttctgggctcaagtgattctcttgcctcagcctcccaagtagctgggattacaggcgcccgccaccatgcccagctcatttttgtatttttagtagagatgaggattcgccatgttggccaggttggtcttgaactcctaacctcaggtgatcctgcccacctcggcctcccaaaatgctgggattataggcgtgagtcactgcgcccggccatgaatttgtgattctaaaacttctgagtgtttcatgtagcaacatatatatataatcatataatatggattttgctttgagaattgcgcatcttgaaatgacatactgagatgttgtaaaacatggaaacaacacattaattataaccgggttgtaaataacacatttgaaaatatgaattgttttcaaagagacattaggttattcttttttttaaaaatcttaaaatgtatactactcaacttttaaatcttgaatatagaagagccaatcactacatattatttatagcagtcaatctcattagttaaaatagcaaagcataccaaaaatctagaaaatatataaaaacaaaagtgtcaaatattaagcaatgaacattaaagtagaaagtaaacattagaacatcacttgttatgactttaggaaaatgccagcaattaaaaaccccaattaacaatactgggaattcagaggaggccaactgagtttatgaagtgggagggaaggaggttttaatgctagtgagactaaaggaaaataacatatcgctcttaacaatttagtatttagttggtcattggcaaggattgcacagagtatggaagaaggagatagcccctgtgcccagataaaagggagctgacctgaaggtggagctgggaaccttaatcagagtaaacagcaagagccagggagagatagttaagtagctggtacactgtgaccaagcagatgggtcaccagtttctgggtgagggctgtactttgaatcatccttaactgttttcaaacttcgatccacttacttcacttgcttcttgcagcctcctctttctttcttttttcttttttgaggagtctcgcctgtcgcccaggctggagtgcagtggcggatctcggctcactgcaagctccgcctcccgggttcacgccattctcctgcctcagcctcccgagtagctgggactacaggcacccgccactactcccggctaattttttttttgtatttttagtagagacgggatttcactgtgttatccaggatggtctcgatctcctgatctcgtgatccgcccgcctcggccttccaaagtgctgggattacaggcgtgagccaccgcgcccggcctgcagcctcctctttctaaaaacaggttgcagggtgcaaatgagaaaatgctatgaaagtggtttcagtgctccttaacggtctctaagttttgtatctatggtggtaaaatggattcctgtttatctcaaagtcttatcttttcattcctctggtcaatgcaaagtgaggaaaatggaaaaaaccatcatactttggggtactggtctccttggattgatggtagtggcaggcatgtgtgaatatctcagagtgtttatgcgtctttttgtgtcagagtagtttgcaaactggtcacaaggtggtgtgcacacataaggttttctttataatttcattcaggattgtttttctgtgcctttggtacaggggaggaagacaagacagtttcctgtatcaccagatctcagctgcgctctctgcctgtgaggtcagaagtgtgttggagcctcagatttctaaatgcttgctggcacagttaggcactgaagagccagggaaaatcagagggaaacagaaggaggggaggggagaagaggggaagagaggtaactgggagtgctgattctctctgctctcctcttaccccaacccatggtgagcagccacttaagatttactgctcctctaattaggatcccttgcttgtcttgtatagacaaagtgtgttcagctatgacgggtgagtggtggggggaatgttccccagtggaggagacagttattagtagacatctgtaggataactgataagcttttagctatctgctaagtgcccagcactgaccttgggcctgtgaggggtgcaaaaaacaaaagcatcccaccaaacaacaatatggcattatacctaaaatctaactgagaagtcaaaattaatgcacacaaaacaaatgtcaaaatattccattctggctgggtgcagtggctcatgcctgtaatctcagcactttgggaggccaaggtgggagtattgcttcagttcaggagttcaagaccagcctggacaacatagggagaccctgtctctacataaattttttaaaaacattagccaggagtggtggcacttacctgtggtcccagctacttgggaggctgaggtggaagaatcacttgagcccaggagtttgaggctgcagtgagctgagatcgtgccaatgcactccagcctgggtgcaacctccgtcttcctggttcaagcaattctcctgcctcagcctcctgagtagctaggattacatgtgtgcactaccacgcccagctaatttttttgtgtttttagtagagacggggtttcgccatgttggccaggctggtctcgaactcctggcctcaagtgatccgcccgcatcggcctctcaaagtgctgagattacaggcgtgagccactgtgcccagccagggaaggggaatttgaattaggttttgaaaaatgagtaaaattttgctgtccagagaggaagaatgcagcaaaccttcattattaatgccctgatgaatagttcctgacaactatagctgtttcatcatcaggaaaatagtgtgtgccactcagtaagtgaaattgtctcttgatttttctttataaaactgaaaaggaaacacaaatgaagataatgcagacttagttgtgacttgaattttggatcatcctttgagaactctgatcttgataagcagggacaattgctacagattagggcatgtgtggtagtcagcatcagggaagcaggactttattttttttatttttttgagatggagtttcgctctgttgcccaggctggggtgcagtagtgcgatctcggctcaatacaacctccacctcccggattcaagcagttgtcctgcctcagcctcctgagtagctgggattacaggcatacaccaccatgcccagctaatttttgtattttagtacagacagggtttcaccatgatggccaggctggtctcaaactcttgacctcaggtgatctgcccgcctcagctttccaaagtgctaggattacaggcgtgagccaccgtgccaggccgaggcaggacttacttgagacatagaagggatgactgtataaggaagtggaagcctggagaccagagttctgccaccaataccctgtgcaaccttggataagtctcttaaccatcctgggcctgcttcccacatctgtcaaattagaaaagtgggaaccaactaactctgacttggtgtgcacttgacttttggaaagcaacctcataaaccgatttgcagtaagtttttaccagtttagtatataatctttccccaggatttttgcactttatcattttgtaatatggactgcagcaaagagaaagtgttagtctccagaaaactatcaattcaaggcaggtgttacaccttattatgttcattggcacagttgctaatattgctctgttgacctggtgctaattcttccctaatttccactggttggagtttaggatgcaacttatatcttagccaagataagctgggcgcggtggctcatgcctgtaatcccaccactttgggaggccaaggtgggcggatcacgaggtcaggagttcaagaccagcctggccagcatggtgaaaccccgtctctacaaaaattaaaaaaaaaaaaaattagccaggcgtggtggcgtgcacctctattcccagctactcgggaggctgaggcacgagaatcgcttgaacccgggaggcagaggttgtggtgagccaagatcatgacattgcactccagcctgggtaatgagcgaaactccgtctcaaaaaaaaaaaaaaaaaaaaaaagtgataaatgggaacagagataggaaaagaaataatagtaaactgctcaaaaattattaaacacttcttttatagtaacaaggagatagcctattcgtgattcatgggaaaatgtgtacatgttcaactcacaaagagaaagctttgaaattaaaagaaaaagaatttctactatgccattattcaaagatagtaaaagtaaaatttctactttgacctctgttgactaacttcttcttaaagttagaaccaagagtttagcatttgtctgtgtggttaattttgacttcccagtcagatttatgaaccatttcatactcttttaaaacaaatagtttcacattagagttatacatgttcttaagtttgcaagttatcttaaatctttttctcattatgtttctgttgcatgtaaattattttaaataatcgaaattattctgtttagcccacagtttaaggttttcaatatgtttttagaggattataaactagaaaatacagttaacagagatttttcacattgtttctaaattccctcttgtgttttcaaaaacaggcacctttttcaaagtaggccctagtagagttgttacttaattttttttttaaatattcgttttttttaaataagtattcaaagacttcagaattcaaaagatacaaaaggatatccagagaaaaattccttccacccccatttctctctccagggacaaacgcggatatccttccaaagaatttcacccatatccaagataataggtttacatattcttatctcccctttttttttttttttttctttttgagacagagtctctctcgcccaggctggagtgcagtggtgcaaccttggctcactgcaagctctgcctcccgggttcacgccattctccttcctcagcctcctgagtagctgggactacaggcgcccgccaccacgcctggcgtggtgtatttttttttttgtatttttagtagagacagggtttcactgtgttagccaggatggtctcgatcttctgccctcatgatctgcccgcatcgacctcccaaagtgctgggattacaggcgtgagccaccgcgcccggccttatctccctttttatacaaatggcagcatgcattacacactgcaccgctccttgcgtttctcacttaacactaccacttgaagatcagtccatctccaactacacagtctcctcttgatatctggtatcccaatgaatggatagactgtactttatttaatgaatcctcttttaatggacagttgggctgtttccaatcttctttttttttttttcagatggagtctcactctgtctcccaggttggagtgcagtggcatgatctcggctcactgcaacctccgcctcccgggttcaagtgattctcctgcctcagcctccctagtagctgggattacaggtgtgtaccaccacgcccggctaattttagtatgtttagtagagacggggtttcaccgtgttggtcaggctggtctgaaactcctgacctcaggtgatccgcccaccttggcctcccaaagcgctaagattacaggtgtgagccacctcccctggcttgtttccagtcttttgctattaacaacaaaaaactagctcttactgggtgccaagttctgttccatgttgtttcacataaatcattttatttaaccctcagcactgcagagaaacctttcacctacatgacttcacacaaaaaggggaatatatatgccagataaatccctagacgtacgatctctggaactgaggctatgtgcatttaattttggcacatgtagttgttatgccaattcacctccccacaagcaatgtaagcacatgcttgatcgttcccatcatatgctatcaaaatttgagttttactaatgggacaggtaaaaaattgtgtcatagtatggctttagtttgggtttcctttgctgtgagtgaggttaaacatccttttgtaagttcaaggacaatttctatgtcccttttctatgaagtaaagtttttttgccatgcagagtttaaaaagttatacagatgaatttatcattttttgtttgtttctgtcttcagaaacagtttttcatttgtttgtttgtttttttcccaagacagattcgtgctctgttgcccaggctggagtgcagtggcacagtctcggctcactgcaacctccacctcctaggttcaagcaattctctgtttcagcctcccgagtagctgggattacaggcgcacgccactatgcctggctaatgtctgtatttttagtagagacgggtttcaccatgttggccaggctggtctcaaactcctgacctcgtgatctgcctgccttggcctcccaaagtgttgggattacaggcgtgagccaccgagcctggccttcaggaacagtttctttttctttctttcttttttttttttttttttgagatggagtctcactctgtcacccagggtggagtgcagtggtacgatcttggctcactgcaagctccacctgccgggttccagtgattttcctgcctcagcctcccaagtagctgggactacaggcacacgccaccacgcctggctaattttagtatgtttaatagagacggcgtttcaccatgttggtcaggctggtctcgaactcctgacctcaggtgatccgcccacctcggcctcccaaagcactaggattacaggcgtgagccactgtgcccagccagggacaatttctaagtgaaaaaaaaaacaatttggtttctgtttttacatcactgttagaaagcctgaggtttttttgtttgtttttctcattgtttcttctagagtatttatggctttattattattttttaattttactttttaaaaaaaacttttatctgtttagaattttccctgattaaggagtgaaagataaattattttttttctagatagatacctgatttagccagcatttattgattaatctatcctccacaaatcagagataccaccttttatcctaaattaaattctcatctcgacagagttttagaatgagatggtgcatataattttgtgatgccaaatttggatgttctcttcctaatgcttcctaagatagtaattatacagcttaccattttttattgaaaaaaaaaaaaagagaacacatcaaacttctgagagcacattatcccaatagaaatgtgtatgcttttgagtagaagaaataaaaatgcaaaattagaattatttaatcggaagccttttagaataatcttagtttggtttttttttggttttttttttttttgtataaacccaggaacttggtaatcttagttctgttttattttatcttctttttttgagacaaaatctcagtttgttacccaggctggagtgcagtggcgtggtcatggctcactgtagcctcaatgtccctggactcagatgatcctcccacctcagccccctgagtagctgggactacaggcatgttccactacccccagctaatttttgtattctttgtagagacaggattttgccatattgcccaggatgattttgaactcctgggctcaataaatcctcccaccttggattcccaaagtgcttggattacaggcatgagccaccgcatctagccttagttttatttattgaagtggacagacagtggaaaaaatactggactaggaggcaggaggcctgtcaactttggttttttgttttatttatttatttatttatttatttatttatttatgagacggaatttcgctcttgttgcccagcgatctcggctcactgcaacctccgcctcccgggttcaagcaattctcctgccttagcctcccgagtagctgggactacaggcgcccaccaccacacgtggctaattttgtatttttagtagagatggggtttctgcatgttggtcaggctggtctcgaactcctgacatcaggtgatctgtccgcctcggcctcccaaagtgctgggattacaggcgtgagccaccatggcgccaggcttcaaccttgtttttgtttttgtctcagtctggtctcttcataattaaataataataataacaacaaacacttagaacattgcctggcctttagtaagtgttattcaagagctttacatacagtatattaattcattcagtctatataattattaaaaagtttataatctgttatgaattatacaaatattagatatctttactaagaaaatgttgataggcgctttcagctcagtcaaaaaaacaaaaacacatccgacactgttgttaattacattcatgctataaagtatggaaataaagtagaatgattatctgaagcagcctatgcattaagtgccttcctttttaccttcatgtttctgtgcctttgttgttcccttggtctgaatgctctcccctcaacacttaagtgtgtacccttcttttcttccaagaccacctcaaatatcaactcctggcctttcttttttttgagatagagtcttgctctatcacctaggctggagtgcagtggtgtgatcttggctcactgcagcctctgctcccgggttcaagtggttctcctgcctcagcctcacaagtagctgggattacaggcacccgccactatgcctggctaatttttgtatttttagtagagacgggggcttcaccatgttggccaggctagtctcaaactcctgacctcaagtgatccgcccgcttcggcctcgcaaagtgctgggattacaggtgtgagccaccgcgcccggccaactcctggcctttcttacaggtagaattattcatgtagtcttctgattctctagcaccatatataccatggtatccttataagtatctattataatagaggtagcttcaatatttttgcttgtcaattagacttgaacttcttgagggtagagcctatgcattattcatctttgtatctctgctcagcttctgacatagttcttggcatataatagatgtccagctgaaagaaaagaataaatatttgcatacatgactatatagctcctatttgatagaagttggaaaggcctctatcagaatcagagcatacgagcctcaatagctggtaaaaccaaatcattcattcgttttatttctctttgaatgtatgagaacccgaacttgaaactgttaaatggcttatagtctattttaaaggtgtgatccacagggtaaaaatcagatattttctctgattgtacattttagcttttgcattttatttttaaaagctatgtttcaattgtgggggcacgcctgcagtcccagctactccagaggctgaggcaggaggattgcttgaggccaggagttcaaatccaaccagggcaacatagggagaccctgtctcttaaaaaaaaaaaaaggcacacttggtgtgcttggtaaataagaatattgattataatgagattaggaaataaatacagaaacatcacgcttatcaggcattcagacttctgtcagttatagctatctggaacatattcaggaacccagagggaatccaaaaaagcctctgaagttggagaatagctctcacaaagcatgtgtacttgatgtaggagggagaggcacagtgccactcacatgccaaagccctacttactgacttcacattttcataaaaaaattccaaggactgcttagcatgtgtggtcattcggcctcctttcaagacattttagcttgtttctggtttcagtagaaaaaagattaaaagaactctcccacccatgctgccaagaaggcactaaataaagtattgttgacatgagtgtaaaaatgattctcatggttttctccagaaatcatggaaacttactttgtgtttattttttagtctttaagaattctgctggactcatgcaaaatcagttgtgacgatacttaatttattctactttttaaaaaatctgaggtttaaaaagagcgatatccctttgatctcacctctttgaaagggggtcattaatttgagaaagacttctttattcctttgagtatttagattattaatcataggttaaaatcctcaatgtgaaaggagcatgtataaacttctttgcataatttggtaaaagctatacaagtaagtcaagggaaaaagtcaaaagccatgtttaagtgatttggggactttttttgagtcggagtctccctctgtagcccaggctggagtgcagcagtgtgatctcgggtcactgcatcctttacctcccaggttcaagcgattatcctgcctcggcctcctgagtagctgagactacaggcatgtcaccacacccagctaatttttgtatttttgattttgcatttttgtattttgtatttttagtagagacagcatttcaccacattagccaggctggtctggaactcctgacctcaagtgatatgcctgcctcgacctcccaaagtgctgggattacaggcatgagctactgcacctggccgattcaggggcctgttttaatgcatgctaaatatactttttgtgtaggggctatagattaatgaaaattgggatcattcacttttcttctcgctttctccttctatttctagattgccaaaatgctttggagtttttaactgaatctaagaaaagtccaaaatagatttgagactgtaaaaacagaaactgcagcaagggggattcagtgccaatgcatcaacaaaaaagacaaccagagttagtggaaggaaatcttcctgttttcgtgttccccacggagctcatattttatgcagatgatcagtcaacacataagcaagtgttgacactgtacaatccctatgagtttgccttaaagttcaaaggtgagtctcctagctctattttctgggtttttaactggtccctactaattttttacttgtagaaactaattaaaaaaaaaaaacactaatggccattgtgactttttctttcagttttgtgtactactccaaataagtatgttgtcgttgatgctgcaggtgcagtaaagcctcagtgttgtgtggatatgtaagtcaagatcaattcctggtaacacgttttaagtgtgttaatatttatgtttttaacttgaaaaaaaaagatattttcttgaagctgttctcacataggcatttattatattttgaatttttgccgaaagtttgtctatcgaaattgtttctaagagattcggccaaatacttaataatattttattacgttggagctcatgtatatgttagtatctccatgaacattttctcattgttgtggttttagtcataccagggatgcttataaaggtaaagttctgacttattcctttaaatttctccagctataataggggatttagctttccttggaacatactgctattatagtgacatttggaaaaatgtaatactacagtctaagaacaagggtaatataagttcatctgaagtgattcaactaaaagcctggaagttaatctatataaacaggaagcagttgtgcaaccactcatctgtaaaatattatttgagctcttccagataatttcatcttagagtgtcagataaatgattgttcaagctgttcatatttaatttttattttagaactagtggtgaccagatggatccattgaccagcccttaatttaagctaccaagtacactgtatttgtttaaatcttctgtgagaatgagaagcagaattcttttcttttgaatactttttcaccagctcaaagccataaaatgatgtatctttgagaacgtttttgcacatttttaaaaattttcattcagtacacagtaagcaagagctattacaaagaaatgtagtctcttgccaaataaatgtgttactttgacctaattgttttgtgttccctagtacgaacaaaataaaataaatggaattgcagaaaacccataagaattacagtgtttggctgggtgcagtggctcacgcctgtaatcccagcactttgggaggctgaggtgggaggatcacctgaggtcaggagttcaagaccagcctggccaacatggtgaaaccccgtctctactaaaaataaaaattaaaaaaaaaaatagctgggcgtggtgacaggtgcctgtaatcccagctacttgggaggctgaggcaggagaatcacttgaacccaggaggcagaggttgcagtgagccgagaccacaccattgcgctccagcctgggcaacaaaagtgaaactccgtctcaaaaaataaaataaaattacagtgctgtatactcttttctctttagagaagtagaggtgtattattggccttctgttgcactggtaatagtggattacttacttatttgattgcttgtttctacctgcatacatggaattcaattttaagtgtagggcgaggtttgttgcctaaacaataagtaagtagcaatagaaatttatgagatgtttgtggggaataaacaattgcatgtattcctatttagtaaatgttgctgcactgagttatccagaaaaaaaaaaaatgtgattgctaaagagaattttttttctttcttttttttttttttttttttttaataagacagagtcttgctctcttgctatggcagcgatcatagcttagtgcagcctcaacctcttgggcttaagggatcttcctacctcagcctcccaagtagctaggactacacgcacaccagcaagccagttaatttttaattttttttgtagagacggggtctctgtgttgcataggctggtctcaaactccaggccccaacctcccaaagtgctgggattacaggtgtgagccactgcgcctgaccaaaaaggaattttctttacctgttatttttttgcttaagacttttattctgtgttttagattatgtgctttcatccaatgtttccgaattactcatttcttttgggttatactgtgattttttaacatcttagcaaatttctgtttttgagtatttggttgtagtcagttaatattgtttaatatattaaaatatctcactgccttctgtttggccggcccccagaaatctaaacagcatttgttatttttgctgttttcagtgtgattcgtcatcgagatgttcgatcctgtcactatggtgtaatagacaaattccgtctccaagtttccgagcaaagccaaaggaaggctttgggaagaaaagaggttgttgctactcttctcccatcagcaaaagaacaacaaaaggaagaagaggaaaaaagattaaaggaacatttaactgaaagtttattttttgagcagtcgtttcaaccaggtagttttgggttgtttttaaagcccttttgaggtcttacacattattaactttaaaataatcaggcagctaagaataattactagaaaaatcatctaccacttcaaacatggtcaactacttcaaaactgcacctagagaatcaggtacctgaagtagaacaagaagcctggaggtggactttgagaggagggaatacccctcactggaccaggctgtaaggagcgggtagatgttgctgtagccttttaaatatatctgtatttaaacataaacataaatatatctaagactgcaggcaccatactttatgaagctagtacaatttggcagttcctatacttttgtttccatgactttcctatatcctttctcatttaattagttccaaggaagagagagattgtgtttggcaataggccaagcttagtgcactgttcatattattttgaaaaaaaaaaaaatctcattaaagttgaagttaattaaactaagtagattatgatatcccctgtgggctattaattgaatccctctccagccctcatttccttccagcttagatattcagaagtgttatgatatattctttcaacattgacactaccctcatattcaactctttggacgtcattatcccgtcttcttaacttctcattatctcctcctaaacctgttgtaataggaggatgataaaattttccatagaaaaccagggaaactggaaactttttgatggtgatactggtacatgaatatgatagcagctgtccttgaaattgcaacattttatgaaggattaaaaaaaatctacttgctgttacattcagtcgtatcagtttgtttgttttaggatgttcatttcaataacagggagtagtgcctctttgatttactgtagccaagagttttttcctagtccattagggaccatctagattttctggtaataccaggactagtgactaggtagtagctattaggttggtgcaaaagcaattgcgatttttgccattacttttaattgcaaaatccgcaattacttttgcaccaacctatagtggattgttttattctcagcaactattatcaactgacaggaccagcttttcatcttttgaagctgaaagagaacctttgtccagtgtcactttatcagatcaatattgtaaagttaacatagttatgaaatgcaagattccctttttaaaatacttcctctagtacaaagaaggccatttaatttgtatttgttttttgaagttacacttgtaatttaaaatggtctttgaagttcagttttgtatttaacagattggtttaataaccaagaataataaggagtaagatttaggggtatatgtgtatgtaaatatatgtaaggagaactttattccttttatttttaaatttattaaaattcaggtgaagatcatgctaaaaaggctaaataattaaagtatgtattgtcttattttattttttattttttgagaaagggtttctctctatcgcccaggctagagtgcagtggtgccatcatagttctctgcagcctccaactcctggattcaagtaatcctcctgcctcagcctcccgagtagctgggactacaggtgctcgtcaccacacccagggtctcgctatgttgcccaggctcgtcttacctagcctcaagcaatcctcctgcctcagcctcctaaagtactgggattacaggcctgagctcccgcacctggccttattttagttttctaacaaaccttggtatctaaagtatattaaagaatttttctaatagtaaaattggagtaggcagatgaatgaggataggtgatgctagcataacacatggtgatctctgttttgagggaaaaaattatctaatccattcctgtaaggaagctcaatgaaggcaggcacttttcctagtaattttatatcctcagcacctagcacagggcctggcacagagaagttacataatgaacttgtaaatgggctgagctaggaaggctggacttcaggtctggtgagggtctgtgggaatggtttttttgttttgttttgttttggcttacaaggttttcatggctatgacagctgtttagaggaaaggtgataccacagcagagccccattcacagtcctggccaacatgtcccgtttatgggtagttaccccaatgtgcctaattacctggaagtaagttgagtaaagttttcttctttaatagagtatcatgatgactgatttagtctcctgtctattaaatttacaggaatttatgtgtagtttccaacatgtggaaaactcaggtttttaagtttttctgaactaaaatgttgaaaattaattgagattgttttggggaggctttgaaatgtcattacttttacaagtccttagcttagagaatatttcaacaaatgcgtattattaaagtattagaggtgcagcagtgttgtgagactcacttttagcaggaaaatggttgatggcttcattatgaaaaatttggattttgaaatatattgaaagtcagtaaaaacgagaaaaaaatttaagtttattgtataaaacacatatagcaataacataagaaaatgtacctgtaatctcacacacttaacaaatctgcttatataagtgttccatgttactttccagaccttgcctatgtgcataagtacattttgtgagtatattttgtgagtttttttcattcaacagaaatttaactgttaaattaagggaaacctacaaagtatactttcataaaatgctagagttcaggttattaaaaagccattttaaaagatacatctgaatcttagtgggtttgtcttaattacattattaatgaactgctgtgtctatgctataatgtttgagttagtgccctctggcttcagaaaattatggtcttaattattgtttataataatacaaaattgaaaataaccgaaaagtccatcaattgggaattgattaaattataaatattcataagatagtgtgccaggcagacatttacaaggatctgatagaatgatgaatgcttatacattgtcatagaaagagcttcaaatatatttctaagtaaggaaaaaaaaacagttatataacagtatgtataatatggccttatttatgtaaaagattcttctacatgtttatatgggcatttgtaaaatctaaaaggatacataccaagctgttaacagtgttagctctaggagggtggaattatggaggaacatttacgttttctgtatctttataacatattttacaacgatcctgtagtactagggaaaaaagctttttccattttgaaaaatttcaagcatttatgcaaatgtttttcgaatactaaaaattccaaatttctctaaatactaaatgttctctactaaaaattatttgaaattatcttttgtgggtttgcagtgaatggcgtacttgtcataaataactgttttctttgagaattcatccttgcaacaaagataactataaaggtactctattaactgaaacaagacttggggtttttcttttaggtatttctgctattgtttcattccaaacaataattactataaaatttgaatttgttttcacctctctggctctgatgaagtacagttaaactccacacaacagctaaggtattaataatttagaaaagttccatttaataatagaatgaacagcattatttcattaatgaaacacaaagattgtgttgctgttggctattcctttcaatgaaaggaaaggtagtgggaaaagccatatgacagaaaatgctgttattgggtttcttaaaaatatgagtatgtatactatacacatagagccagaactgtagaatagcaggtctgataacatttttaatcttttttgttttgtttttttgagacagagtcttgctctgtcacccaggctgaagtacaatggtgcagtctaggctcactgcaacctccacctcccgagttcaagcgattcttctccctcagcctcctgagtagctgggactacaggtgcgtgccaccacacccggctaatttttgtatttttagtagagatggggtttcaccatgttggccaggctgttctcaaacccctgacctcatggtccacccaccttggcctcccaaagtgctaggattacaggcgtgagccgtgcccagccttttttaaaaatcttttagaattttattttaggaacatttaacatgagatctactctcttaatgaatgttcatgtaaataaaatattggttaaatgtgggaacaattgtcgagtagatttctaggcctcactcagtttacataattgagacctatgcccattgattagcaatttgcattatcctcctcctccagcccctggcaaccacccattttgctctctgcttctatgagtttgactattttagatttcctgtgtaagtggaatcatgcagtatttgtccttctgtgactggcttatttctcttagcgtatttgccagatactgtttctgctgttttcttctttactataaatgggttagagcagagggaaacacttttggttccttaacattttcaaaattgatagcgggatgtgcagttattaggatcaaacctatctggggagctccttaaaatattctcataaaggtagtggaggtctagtgtggcaggctcaaattgaatatacacaggcaagccactggggtactggaagaaagtatcagaacttcaatttatatttatttttagcacattcttccaaaaatctatttgtatgttttatattaagcataacacagtacagaacttgtgcatataattttaaaatgtgcatacatcgatgatacatgcttgaatactttctactgactagggtgggatggtcgggggagttggtgaccacctttcagtaagaactcactacctcacaatgccacgtcagcattccatcctgcaatgattcagaccagttaagacatgggcttccacatcagcccagcagttaactctcagatggaaaaaatgatggggaaacaattggagaagttagacaaaatcagaatactggtctgtggtggccagtgtttgtgaaggaacttttgtcttaaagtttttagaaggaagcttagggatttttgtctttttacagaaaacagagctgtatcctcaggacctagtttactaactgtcttcctgggagtggtgtgcattgcagccctgatgctgcctacactgggggatgtggaatcgctggtgcctctctacctccacttaagtgtgaatcaaaaattagtggctgcttatatcttaggtaagggttttaaagatgcatttgggacatatgtgtagggctttatgtgtgtggtagggtggtggtggtttgattttttttttttttcccaaagaacaggtaaagaaatgcttcaagagcatattgaggtcaggtgcctttgaagacttttttaactcacatttagttctttttagcttatttatctagtacctgatactatattcaattattttccttttgctgacttacaatggcataaaacatgtataaaatgtaagacgcatgcattccatgatacagcatttctacttttaggaattgctcctagggaaacagacaaagtacatacagtgataaagatgaacagtgcagccttgtttaatattgtgaacgtttctcttttattattattttttctttacttttgaagccaccatgttcagaacctttctctttaaactaattcccttatttcctgttgattcactatttcagtcatcctggcttgaaatcttagagttaattgtttcaattgaacaaatatttattccgtaccttccatgtgtcgaggattagtgttctggtgatgaatgactttcctcatgttctcctctcacctttgcttagatgccaactcttttcagtattccctggcatatgtgctttctcttatttatttatttatttagagacggaatttcgctcttgttgcccaggctggagtgcaatgttgccatctcggctcgctgcaagccccgcctcccaggttcaagctattctcctgcctcagcctcccgagtagctgggattacaggcatgcaccaccacatcaggctaattttgtatttttagtagagatggggtttctccatgttggtcagggtggtctcgaactcccgacctcaggtgatccgcccaactcagcctcccaaagtgctaggattacaggcgtgagccaccacacctggccgctctctcttttttattttgaaatcatcttgattgtctctctcccttctgtctgtgttccttctctccctatttctttcccccattcattcccacccccaaccatccatcatgttgtcagattaatttctcttttgctctcacaaccaccccctagtcagaaaccttcagtggttccccataatccataggatgaagtatataaccttcagtgccatagcttggcatttaagactctccacaatctgagacctctctgagccaattttatctagctacttcattctgtaaatcactgcataaagccttttagattattcactcattctggaaaagctcctctagcggcccggttctccaggcccttactcatgccattccctcacctgaaatgcctgcccatctcctcgttctctctctctttcctgtccatctttttttttttttttttttgagataaagtcttgctctgtcacccaggctggagggcagtggctggctggatctcggctcactgcaacctccgcctccccagttcaggggattctcctgcctcagcttcccaagtagctgggattacaggtgcttgccaccacacccggctaatttttgtatttttagtagagacggggttttgccatgttggccaggcttgtcttgaactcctgacctcgtgtgatccacctgccccggcctcccaaagtgctggcattacaggcatgagccaccatgcctagcccctgtccatcttttaaagcagctttttatcattgggggcaacttttctgactgccccagtcccatgtgattatcctccttctctgtactttttttttatcacactttcatcatccttcatttaggactgagcatattcttactattttatattttatatattctctcttcaaaagagagaagcaaagtaggaatgccatacttctgtctctttgtggccctagggccctgggatacaggtagactctttgtgcttctgttaacaaagtccactggctttacccatgcttcaaaatggcacatctgctattattatgtttgatgtgactggataaagtaggaggtatgtttgatagatagatttgctatggccagacattagtgatttaattaaatctctccagtgactgcccattgctataaattggatttcttctttatgatatcaacaaaattcaaattgactttgggttcttggtagagtgcctgcctatgtgctatgttgtatttgttcattgaggtccaaacaattgcttattgaatgaaagattctgttaggtgcatacctttaactgttctccatttttcttctttcaggtcttatcacaatggccatacttagaacatgagcaaggatttcaattgacttctgaagtaaatctgtcttgaaaatatgaatgtggactgccttttatctctatttcactccattaacatgcaacaaactattgaatgatttcaaataattgcaaatgtataatatatattttaaattataatttaatttgaaggactgcagaacattattttacagacagcaaggatgcttctgagtgacacctaggaaattatttgaagaaattctttttatatctatacctgttgtgtaagaaactttaaaacatttgttattttctcacctttttttctaattcactttgattgctaggggtcatgtatgcttcgaagttacaggactaaaagagcaaactgaccggcctaaaactaaaatgacatttattccctagctacaaacatcagcgttattatgttaattataccttgccctctatcattataaatggttgccatggtgtttctaaaaataagtgttttaccattaatgtgtagagggcaaacaaagcataaagtactaagggatcatgcttatcctagggtctcacagaagagaggacatatttaattaatcttgtgaattacagaacaggttgtggtccagacaccaagaatcataggggtttttttttaaaaaacctaatagaagtagggtgacctctctctttggtctaagagttctaaaggaaggtaggcatctgtttaattagttggttcaccctggctttacctctggttaatgctttgtgttaataggaaggaaaaatcactttatcttttcttccaagcccctccctgcctgacttacccagactgggattaccagataccaggtgatttatgtggagatgatttttcacctttaaactctaagccaagtgtaagaaactcttgatagctatgtctattttatatcagtcactgagacttttttttaagtttttatttattattaagacaactttgccaaaaaagtcccctaagcacaactatttacatttctttatagcctcttctgatctctaacacatatgcagttttaactgttattttcatagtaactgatcttttgtctaaggatttttacctgaaagcacaatgtattgagtctcttgaaaatcatctttcagatctttttacagaatgaacttatgcactgctactgtagtattctcaaggaatatatgtaaacacaaatgtatgcctgaggttggtttttgcagaaaacagtctctgcttctaaaaacttctatgtctagtcttccataggaaatcctcactgtttaaccatgtgaggagcctaagtcattaaacggatcatgtctgtacattgtgtaatgaatgaaaagcacataaatgtaatctactttgaactttgtaaaaatgatgtgtggaggctattcttgtttctccatctcaagtcctgtgtgtgcacgtgtgtgcaagtgcacatgtgtgtgtgtaataacacattgtaaagaacagaaattactttaaaaaataaacagaaatggagacctgagcttc

SEQ ID NO: 495 - DNA, 18642 bp, Homo sapiens
  source 1..18642: mol_type = other DNA
cagtcccgcgcctgcgccctgggcagttgccggtgagcttgggagaaccgtgggcgctgaggcggtgagtccccgagcggccagagggcgtggccgttccctggggcgcgggcgcgggtagcggggctcctttccgtggccggggccatgctaactgggtgattccagctgtgccccgggcggcgggcgccggaaggagtggtgggcggtgggcccctatccggccagggtccccgccaccactccctgcgacccgaccgggccttcccgggagtccttctgggctgggagctcccctccaggcgtcggggcctcgtcgcccaagagcgaacaggggccgcgcccgagacactagcatccgaatttgaatcagcttttacactttttagggacgtgtcactcttgccgttcctcaagtgctctctttacacacatcgcttttcttataggccccatgagggtggattccctacgagaaggtttggagagaaatcactggtcccacagtgaaatgaacgtttctctgggaagggtccatcgaaggaaacccgaagggtcaattccctggtagacgtggtggaaggttttgggtcagtcagggaagggctgaccagctgtgaggctggcgcagattaacgggtgggtccagagccaaaaacagcacagttcctggatgccctccagcaacggttaggtgcctagactctgggaaatagaggccccctaggaatgactcctgacaagcaataaactttaattgagtgcttcctctgtgccgggcatgctgctattcgcttcgcatgcaattggatccatgcagaacattttataaagtagatgctatgattatcttctgttacaaaagaggcactgggtgtcagggtcacacagctagcaggttattatacctaaaccgatctgctaaagtcgggctaccatcatggtaaagggggatacaaggacagagtgctgatttaggttgactggggaggaagagagtcatgagtactttttttcccttgaatcccctccagagaagaggacaactacagcagctgtctcagcacatgcagagagagaggacccaaggcacatgggcagatacaggtcttgagacctgtagaaacatgtatgtgactgtctctgtgacctcaaagactataccaagaacattttgatgtttttagaccttttgattgctggagaatatagattttgacgtaatcaccatttccctctggcatttaccatgtgaccttagacatgttgttcaatccccctaagcctcaaacctcaattccctcatctgtatccaggggataatactagtacccagctcctaaccttgggtgagggttaactgacaagtatatgtagaatgcttagaacagtacctggcacatagcatgaactcaataaatatccgttgttgtgaatgcatagcaaattcctaatggcctccctattgcagtgtatttttcacataggagatcctcttggaatgctatggtggaggggagtggggaaggaatggcatggggttactgggggaattacgcagactcggtgaggacaagaatgagagatggacaatttgctgcctttgcaaaccatggctctacctaagttcactttggtcgaaggccattaggagatacttaaagctagatggactttcagagttttttggaagtattgttagtattccttcgccatttcttttgagatctacatatattcagaaacacatgacaattggaattaaactgggaatgggttaaatgcaaagagatctataagggttcatttattaataaattcacggtccttagcctgggaccatggaattctagagcagaactgtccaatagacctttttgcagtgaagtctattaagcatttgaaatttagctaatattactgagaaactaaatttttgactaaacttaaagtgtcacatggggctgttggctaccatattggacagcaagcgcaattctagaggctttgagattttataaacttttgaaactagatgcagaaaaggatgtgtatgtgtatttttctaggaagtgagtctgaagctttcatcagattctcaaaaccaagagaaaaataaagaactactttaggtctttggtaaaaaagaagttaacaggttctttggtaaaaaagaagttgaccgaggtaagtaagccctcttgtgaccactcctgtttctcctttctcatttttttctgtccttagctgtaggtggctccctcccaccccaacgatttcagagagaaacaagtcggaatctgagaagtgaggctccagataaactgtaaactgctggaagggggcgatggctgtggccctgggttgtgcaatccaggcatccttgaatcaaggctctgtgtttcaagaatatgatactgactgtgaagttttccgtcagcgcttcaggcagttccagtacagagaagcagctgggcctcatgaagcatttaacaaactctgggagctttgctgtcaatggctgaagccaaagatgcgctctaaggaacaaatcctggagctgctagtgttggagcaattcctaactatcctgcccacagagatagagacctgggtgagggagcactgcccagagaatagagaaagagttgtgtcactgatagaagacttacagagagaacttgagataccagagcagcaggtaagaaaagaatgtgggatctttgtgattggtccaaaggaagtagctgaggcagctgggactagaccacacatttgtctctatgtcattccccagcctcaagatttctccagagtcctcttcctttttctcttctgctgaactcagcaaatgagtcagtgcttttaactctatcagactcaattccccttctataacaaatagtttataatgtccactttactatgcacaaatgaaattgatagacaacataatctacccacatacatcaacccaaagcatcagtaaattgctccatggcctgaaggccaattctagccataccctgtttatctgtatactctgtatgtaatggtttttttatcttgttgaaaggtcattgaaaaaaagaggaaggagaagaactgacagtgaatgtgccccacagtgcctaaaatatttactatttggctctttataaagtttgccaaccctgaatcaagtctagaaggaatataaaggaaaagaaacatagtttgttataaattgatagggatttgtacatatatgtgcttgggcctgaccgaatgtcatgaagttgtcagatgtttgcatctatgcttagaatcattgtgaatgggacagccagaaattcagactgataaagctcaagtactacgaacagtgttgctcctcgtcatgtgattttccaaaatggcatacgactctaggtaaatctgaacaataagcagtgtagtctttgcttttcacattagtgcattcctagaaaatttcatttgtgctgaaactatgcaaaacaaaacaaacaattgtacttatttgaccaacaaggtggggttcttgacaggttctttttactcacatgaatgtttgagtgggacattccacacttggtagggacctagaacaattctgcattgtaaattatgttccattaaattctgatagccaccacctgtcagcatatccaaaactccccatggggacagtggcactgtctgccattcagaatgactgtgtaaagcctcttttcagaagtgccgtgactgagagagggcagtatctttgggaaaagggagcaggagcttccagatgggcatcagggatactccagtcttgtctatgggggttctctgcaggagctgttagcttcagggctcctgaacaggagtcttctgaagttttctgtctccctagggtacttgggttggtggttgcccttcctttctctgtctccttggttttgtttactatataagattttatcttcatgtggtctagacatttgctgctgaatacagtcactactagtcatgtacagctcttgagcccttgaaatatggccaatacaaattgagatctgctgtaagtatgaaatacacaccacatgcagaagacttggtatgaaaaaagtaggtgaaatatctcactaataattgttcatattgattacatgttgaaatcctgattgtttgcactggattaagtaacacgtactattaagattggccttactttttaaaaaatttattcatatggccactagaaaatttaaaattacatgcatgattctcatacaattctactgggcactgttggtctagacttgagagtgatggttctggcatttcccccaggttgatatgcatgacatgctcttggaagaactggcaccagtgggaacggcacacataccaccaaccatgcacctagagtcacctgcactccaggtaatgggacctgcccaggaggccccagtagcagaggcatggatcccacaggcagggccaccggagctgaactatggtgctactggagaatgtcagaactttctggaccctggtaaggcaagggtttctctcctttcttttgtttctgttttgagagttcaggaactctcaagggttggggttgggttagaaacaccaattactcaatggaaattgaccactcagataaagaagaggaaaaagtctctctgggaatagtagggaacaaagcactttggatagaaccctgggattaggaaccctttaagctaatgaccctgataaggagtcttttgatcaagaatgttacacaggaaaactatgggagtttggattctggataaggactcatttctcagcccaattttaatcaacaggaactgtgatgtggtgggccccaagggcctcggttgcttttatggcatcagagccttattcaaacttaatactttagtaatatagtctatttagatcctgtaagatcaaccacttactgcagtctaaaggaaatatctacctcattaaatcaaaacctattacagtgtttttcaaactgtagtaagcagaccatttgcagcatgaacaccacaggtgcatgtttagcaagctctgcaggtgagtgctacacacactaaagtttgagaatcactggcccagacaccacagggattagttctagaaggagaaagtccaagtggagaaaggcagcacgatcacatagtccagttgctcctatattttattcccctttggggttttctattttttttttttttttttctgagacgggagtcctgctctgtcgcccaggctggagtgcagtggcgcaatctcggcgcactgtaacctccacctcccaggttcaagtgattctcctgcctcagcctctcaagtagctgggatcacaggcatgcactaccacacgtagagacggggtttcaccatgttggccaggcaggtctttaactcctgacctcaggtgatccgcctgccttggcctctcaaagtgctgggattacaggcgtgagccattacacccggcttctcctttggggttttcttacccagtgttccctgtacctcttctacccctcacattaaagctttggcccgagtgtggccagaatcctctccccgactcccccaggtactgtttcaacatgttcgcacgttcaagagactgttaaatactgagaccacagaagacacataaaaaatgaaaataagaactgtccaagttataaaatataaatgtctgatccatccataactagctcagtacccaggattaggaaccatgcccctttccacatcatattaatatcatttattcatttgtacactatctacgagcacctttgaggagccagacaccatgccagaccctggggattcagtagcacacaaggttggaaagcagctctggtcatcttggagattacagttcagtggacaattcagatatgttagtaggacgttttgtcctgtatgtaacagaaatctgacagtaaatggtatgttgggaggaataggatgcccaggagcatggaggagggccacctaaccagcttttggctgagagggaagtctggaggaaggaggatctgggttaaaacctacaggatggatcaaagtgagcctgtggagtggtgtacatgggaagcggagagggctgggatcaaaagcaacaacatgtgcaacgttctgaaggcagagagaagacctcctgctgcagtgcaagggacatagaagagcagtggggcaggagtggcaatagaagaggctggagagagaagcagggtcctgggtcacgaagaacttgcagcctcatggagaagtcacacttgattatcagggaagtggggaaccattttgaggttctccagtaccagaatgatacacacaaatttgcattttaggagattattctggctatagtaggaatggatacatactactgaaagcagggaccccatttgggaggttgttgccatcattcaggtgagaagatgttgttctagagcaagggcatgttggtgatgatggagtgaaaatgtaattcaaaagatacttagcaggtgtgaaatatagagcttggtgattgggtgtcagggtgatggagaagaagggagtaaggatggaatccaggtttctggccattgaactgggtagatggtaatgttattcactgacatgacaaacaaaagaggaagatcagattcggtgggtcaagttgagtttagatttgaacatacagagtttgaggtgcttatgggtctccagcatatttttaaataaaagtgacaaaagaggaaaactttacaagtatgcatattgtggtcaaagcagaactatatattgccatttatgttccaagctttacatcatctacatttcatagtctattgaggaattctaaaaaaaaaaaaaaaaaaaaaaaaaaacaaaaccgggtttatgtgtatatgcctggaacaagtagtaaaacttagctagtaatattttgaagtataactctttctgcatttgcattctgattctccatgttaattcgctccttttgtcaacactgcaggtacaaataccacatagtagcaatatttatctggtgttaatattttgctctctaaagcacatggaaatctagtatatttaacaaaggataggtagaattaattaatttaacagataaaaattacaaattggaggacaggaaattatccttttcttatcaccgtttaaagtgatatattatgctttgaaaaatgttgcaaggcttattttattatttaaaggttacttaaacttttactttaaacaaaagtatatttgatgtattacatgaaatacattctattgtggactgaatggaaagcacaagatgccagctgagtggaaaagaaattcaaaagtaatggaagaagtcaattgattttatattaatgtttggaacctatttcctatgagcaaaaaattaggttgttgagtatatatgaattgtgcatatatattttttcatgtaatataactgaaaacacatatacacattcattgcaaaataaaagagaacttaagtgaacaatataaagtgacctaaggaagacataaactttaaaacaaaatcccttatttgaattcatgctggacactttgatgccagagataggcaataatattagaatgtatgcaatcagaaagaaaagaggcaaggagacgctagtcttaaaaacataaaatatatcatgcttatctttgaaaatatggagttcaaaattcgtacaccaaaactggattgcattttgagttgtcaaagctttgggtttttcatttcaattgatgaggtttcatttggaatgtgtgtgaaatgtaaaagatcacatctttttggtgatgaagaatatgagagatgaaaatttaaagtaaaatacaggacaaacaaatgctgtctagaaagcatcagaagattcttataacttaaacttcttcagattattctactataccaaaaaatttaccataagctaatatctaacccccaactatagtaatgacatttcttggtgtagtgaagctcttacgagacagtctttgctaatggggtttaatgaagccattccctgagtttaggatggggggaacattcaatgaagcaccttctttgttaatctccaattgcttttccctctttgcatgggatagctattgaagggcaattaattatccccgaaacttagcagcttaaaggaaaaagtatttatcatgttactatttttgagaggaattcaggagtgatctactagatgtttatggctcagagtctctcttgtagttgttgtgaagatgtcatcagggactggcaggatgcctcaattccttgccaaaggaatttctccataggttacctaagtatctttatgatggggcagcaggcttcccccagagcaaaggatccaagagaaagcaaggaggatgacacaatgtctttgataacctacctacataccatacttataccatattctgttcattagaagagtcactaagtccaacccacacttaagtgaaggaaaaggaagttccacctcttgaaggaaagaataccgaagaatttgggagcgtattttgaatcaaccatgcctggacttaatagccttttacttaaaaaaaaaatcaaaaataatttcctttttttttcttcagttaatttttcctaagtaaaatttcttcacttaatttggtcaaatataatatacctatgatggatctcttagctatagccagaggatgagtttaacatcctgggcaatatgttattgtcactggaaaactaatattctagactatggtctcaaaaccaggagagatgattaaatttaaggtaacaggctttggtttctatctgtagggccctccttttttccttttatttttaattgacatgtaataattgtacctatttatgggatacagagtgatattttgatatgtgtgtacaatgtgtaatgatcaaatgagggtaattagcatatctgtcaccttaaacatttatcatttctttgtgtttctcattcctgtgggagctaaaaaagaaaatgagctcacagaagtagagtgtagggcccttctctttttactgaccagcagttaatgtttcttctattactgtaaaaccactcatccaataatagttgctttacagatagcttacattgagggtaaagaaaagagctccttgacagaagtaggcattaaggcctgcttttttattgccactcaacattgacccagaagccatggagccaaactagaaaacatttggagaatacttatatatgcgggtattgatatgataaatttctagaattggaattgattgattaatgggcatttaaaactttaatagatattgtcaaattgacttctgaaattattgtaccaatttatcctcccaccacaatatataggaatgccaaattctgctcatcttcacttatctttgctatgtaagagccataactgttctcgctatgttggccaacagagtagggcaaatatctgtggaaaccctttcagtaagtgtcagttttattcagcattggtggtggtattttattcaatatataagagtagaggatgggaactgatacctaaaggtgagacatgggtcaaaagtgaatgggaattggttttagctgacatggactgtgaaaataaggttgagaaatgcaaataaattggtgacagtgtccagaagtatctgaatattactcaggaccacagggttgtggtgggctgtgctacacatataagaagtgcattaggttggcatccatgaagaagctcaactatgagcaccatgttctcacatccaaggtgtagagactgtcctgatgcacccaatttggggccaagctttttgaaagctggcaccaggagtatgatgctggggacaaggaaccaaagcaaaagtactcaaacctctgtaatttggtgctgtacataaggtagcagctagacttgagggccaatatgggaagcccatgagacacagctgcctggtagtaacacttctgaccttagatctcatgggtaccagattctgcttccagggctacttttagtccttcagctaggtcgtagagcttcttttacccaaggagcaggtgtctgggcctggttttgaagtgatatttgattaaatctataaccttaagagtttcaaatctgtgctctgtaagatgagaatagccatatgaacaattcctgtcattcccaaaactgtttttctggctttcatattgagatctcctgggcctccaggcttctaccaccctaagcctttgctacttgctgctctccccagtttcaattccttctcacttctgcttgatggcagctttctttaatctatgaactccagtttatttttttccactaacttttaaaaattttttttttaatttttgtgggtacatagtaggtgtatatatttatgaggtatatgaaatattttaatacattgcatgcattgcataataatcacatcatggtaaatggggtatccatctcctcaagtatttatcctttgtgttacaaacaatccaattctactcttagttattttttaaatgtataatttctgtttttttgggggggcctcttccaccacatcattcagttatcccactcctgggtttaaaccaagctttgttaacaaaatagtgagtttataaaacattttattggaagtgtattttatatttcttaatctaaaatctattgtttttttccctgtgaaaatgtaaaataaagtattttacaccacttcctaggatttgatataatgtactgaaatctaaattttacttcagattaatgttagccaaactaatttgttaatatcatttaatgatgtcaatatttaaattttttttacatttacatctttttaaaatagcgttattgaaatataattcacataccatacattgtcacccctttgaagtgtacaatttaatgttttttggtatattcacaatatgtacaactgtcaccaccctgtaccctttagctatcactttttggcccccatctctcccactccaaagcaaccactaatttactttttgtctctgtagatttgccaattctggatatttcatataaatggaatcatacaatatgtggccttttatgactagcttctttcacttagcatattttcaaggatcaactatgttgtaacatgtatcagtactttattcctatttatggttgcatagtccattgtgacattataccacattttgtttattcattcaacagctgatgaacatttagattgtttttatattttggctattatgaatgatgctgctataaaaatttcagtatgacattttgtatttatgtatgttttcatttttcttgggtatatacctaggagcacaattgctatgtcatatggtaactctatgtttaaacttctcaggaacttctagactgttttacaaactgattgcactcttttacattccgaccagcagtgtacaagcactcttatttcttcacatcctaggcgacatttattattattatttgacatttttattctagccatcctataggtatgaaatagtgactcattgtggttttgatttgcatttctttctttgaagagtaacgatgctgaacatgctttcatgtgcttattggtcatttgtatattttcatagacctatttagtccccttgcccatttttaattgaattatttgtctttttattattgaattgtatgtgttcttcatacaggtgacccttgagcaatgtggaggttaagggtgctgacctattgtgcagttggaaatccatatacataacttttgtttctcccaaatttaactactaatagcctactgttgactagaagccttactgataacatcaatggtcaatgaacacatatttcatatgttatatttgttatatattgtattcttacaataagtaagctagagaaaagaaaatgttattaagaaaatcataaggcagagaatatatttattattcattaagtggaagtggatcattataaaggtctttatagcaacacaaatgaactaagacagtgtggtacttccataagaatagacatgtagatcaacagaatagaggagagtttagtcttgctgtctcagggctgtcagaggtggaaggaaatctgcctgtaagtgtatttgtgtagttcaaacccatgttgttcaatggtcaactgtgtattctagataaaagtcccttattagacatatgatttgccggtattttctcccgttctgtaggccatcttttcactttcttgatagtgtcctttgtagcccaaaatatttttttaattttgatgaagtcatatgtaattgttttttcttttgttgtttgtgcttttgatgtcttatctaagaaataattgcctaatccaaggtcacaaaaattttctcctgtgttttcatcgaacagttttataattttagctcttacatctaagactttgatctatttttcattaatttttaatagggtgggaggtagaggtccaaataataattttttcccgtggagacatccaggtgtctcagcattatttgttgaaaaggctattctttttatattgaatatccttgaaacccttttcaaaatcagttgaccacaggacaggtatatggatttattgctagattctcatttctattctgttatgtttagttggtttatagtattttctatgtcttgtattattgatcttctgcctagattttctgtctattagtgcaaggagttattgaagtgtccaactactattgttaaattatctggttcttgtactatttctgttgagttttgttttatatattttagtactcagaaattaagtgcatacatgattataattgttatatcttcctgatggattgatatttttatcattataaaatgatcctgtatatcttagtaacaggggtttttttgtttgttttaatgcctattttgactggctctcttgtggttgctacttgtatgatatatctttttccatccctttacattcaatcggtttgtatctttgaatctaaagtatacctcttataaacagtatatagttggatcttttcaatccagtcagaccttctctgctttctgattaagtcatttaatgtatttacatttaatttcatttgtgatatggttggatttatatctgccattttgctttctgttttctatatgcctcaagtcttttttgttcttctatccctcttttactgctttctttttcattaagtaaatatttctcatgtaatattttacttactttaataattttactacttttatttctttagtggttgctctaggatttaccatgtacatcttatcattggtttcaaagttatactaacttaatgccagtgagatatagaaatgtttctcctatgtagctctgttctcttttccccctttttgtgatattactattatacatgttacatcaaaaatgttttaaacccaagaatacattgttataattattgctttatataattttaagactcttaagaagctgaaagaagaaaggaaaatacatatatattataacttttgttatattagcattgtttatcatttctggttttcttcatttgttcctgtggatttgaattaccaactggagtcatttcttcagtcccatacactttgctcttacccacctcatttctgctgttattgggaaatatattacatttctatatgttgtatgcccagcaatacactatatacatatttttatacagttgccttttacatcttttaacaaaagaaagaagcaatactgtcttttctcattacgtaattatttttacttgtgctgctttgtcatgtggattcaaattaccattcatttagattataagtcagtattttgtacctaagcctttgctattctctcctattccaagtttcaattgaaactccatcttttacttcacagcagctttcttttgatctattaccttgaattttatttgacctgtttcatattaccctgtaatttcactcttagctttgaaatccaaatgaaaacaaaatagtgaatttaaacagcacttttatttgaaattcagctttagtttcttaatcttaaaaaggaaatttttttttcatgaaaaactaaaacaaggtattttagcccacttcctctgccttgaatataatgttctggaatttaaattttacgtcagattaacattagtcaaactaaattcctaatgtcattttaataatactaatatttaaacatcagcctacatttagatatcaaattagtaatttacagcccacatttcattgaagaccagtaaacttgatcagagataaaggaggagaataaggggctcagaaaagaggatgtaagcaacaccagctgtcaatgaggagaggggtggtcagacaaggcgagagtgagtggttggaaacttcacctggttgtccttagattgacactttgaaatactattttgtagtcattttgggttatagtcattttcacctgtataagttatctgggctaattttaagagaatccacttttagacttcagcggaaaccaacataaatgctgcttttgctaggttcaacccagttcaattttcgtttaaattcaaaagactccactgaaatttttccagtaaacactttactactttcacctctctttcttcatttggcactcaatagcagtgtttcccagtattaatatggcaaaactttatgaaatttactttatattttagctctaacctaaacaaatctagtatcaaaatagatgctgaaatgatttagtgcattgatttcagcacagaatttattcactcaccttccatagattagagaatagctttgaattgaacaccacctcattttcattttgctcttatcttttaaagaaaagactgttgtaagagactcaggtgaagtaatagtaatggagaaggaagtagatactaagaggctatctgtccaagaaatcagcctaaattttggaaaaacctttgatgagccaaactgtaatgcttcccatctttcttctggccaggatatccattaccaaaacttgacatgaacttctcattggagaatagagaagagccatgggtgaaggaattacaggattctaaagaaatgaaacaattacttgattccaagataggtaagtaattgttctttgatatactagtgggaaaaaaaaagaaaaatttaacctaaataaagagtttggaattctatttaggaatttctatgttcctgccactggtttaacataactcttcattttccttcactttcttttctccatggaacacaatatcatctgcagtttctatttcttctctcaggttttgagatcgggatagaaaatgaagaagatacttcaaaacagaaaaaaatggagactatgtatccatttattgtaactttagaggggaatgctctccagggtcccattttgcaaaaagactatgtacagttagaaaatcaatgggaaacccccccagaggatttacagacagatttagcaaaactggtagatcagcagaaccccactctgggagagacacctgagaactccaacttggaagaacctctcaaccctaaaccccacaagaaaaagagtccaggagagaaacctcaccgatgtcctcagtgtggaaaatgttttgctcggaagtcacaacttactgggcatcagagaattcattcaggagaagaacctcacaaatgccctgaatgtgggaaaagattccttcgtagttcagacctttatagacaccaacgacttcatacaggggagagaccctatgaatgcactgtatgtaaaaagcgattcactcggcggtcacatcttatagggcaccagagaacccattctgaagaagaaacatataaatgtcttgagtgtgggaaaagtttttgtcatggatcaagtcttaaaagacatctgaaaactcatacaggtgaaaaacctcatagatgtcataattgtgggaaaagttttagtcgactgacagctcttactttgcaccagagaacgcatactgaagagagaccttttaaatgtaattattgtgggaaaagttttagacagagaccaagcctcgttattcatttaagaatccacacaggggagaagccatacaagtgtactcattgttctaaaagcttcagacagagagccggccttattatgcaccaggtcactcactttagaggacttatttaagaattgctaagggaaacaggtcttacacaaattgacactaactcaaaaaaaatcttaacctgcagcaggctgtttgtcttggaagcttttgtttgagcttataagaacatagacagcttttttttttactagttttaaaacccatcttccaaggtatatgaattctagagtatttatctactcctgtgattttcttagatttgatttcttctgtctgcacaactcttctttttttaattacaatgaaaaattttgtgttccaaggcaactgtatcataggtgtaaacataaagcatataaattatgacaatccttttagaggtagggtcaatatagtggataaacctgtctatcagacgtattgattatagcagtactatagttattctgctgtcattattaaagatgattatattcattcaaagctttagatgtgtcccatgtggcaagaaaggagacagtgaattttgtcaaacaataaaaatgtgtcaggaacacaaggatgaaggggatgtcatttgcctggtaagaactgggttatttccactgaaatttgttatgtttaaggaaattaagattttaagcttgaaattatacaagcagaatctaatttaattttgattgactgaagaaccagggtcttttgctctcctttggtatttcactctcctttggtattcaatcatgtgtcttttagtgctttttaaaattttacccattctttaattcagcatctccctatgtatgtgtcatagaatacttagttctgctagatattctgcaaatatatttgggaattacttcctgctgtttcgccttcttaggttcatagtacacatcagcatatgagaatctctgagaggtcctctagaaaggagagaaaaagcacctcttttggctcaatgttttccaaacttatttgaccccaaaacctttttcatatacccaataataagctacagaactaatattctgcaaatgtctcttggaacacactgccttaaacagatatttctatagctgtcagtatagttatgttgctcccaagcctagttatctccagttgttttaagggtgttatgaaaaattcttaaaatatatatgaatttgtgtaacacacacagagacacacacacatactactttaagggggtgaggatcattaattcagataatttttaagtttcctagtgattctcaatctctttgaattttacttacatttacacacacacgcacacacatatgtatatacacatatcattttaagaagctgaggatcactaattcagataatgtataagtttcccagtgattctcaacctctttgaattttacttataattacatacacacacacactgctacttatataaatgttctcatgtaatcatggtaacagctcaaattcccaaagcaagggaagacttctcattgtcagttaaacctgttaaaacatgaaaatattcattgagcctagttccttgttataaaatacaagaaataagacattcaggcattttccctttatgaagatgttcagtcatcctttccttgaactacaattaggaaaagtatatgtctttattccattgaagttctcgagagtgatataaatactttggggggtatctactatgtgcctaactagtcctgttctaggcttagtggaagctagtaaagaaatataattcatggatcaggctcataaagattttataatatttttagttaaacaagagttgggaaacaggtggagaataatgcaagagagtttgtaattaagtgccaattataccaattgctagacccaggatgtatctttaattcttgtcatccaggtcaacatatgatgctgctataagtctggggctcaaattgatatcccagtagcaataaacatataatataggaggagtctgaatgtagagatgaaaaatacagaatgtaatggcttctcttttctctcttgtggaattgcattcaaaccagaacagtgccttagaatggatgtgcccaactgctctgtatttatgcaatatttgaataaagcggaaatgtatgtgctcttcctgcttcacttgcactaattaattatttgaacaacttagagcttcttccctgaacagtggcaacaagcatggcaattgactctgtcctcatcccaagttggaatcgcttttctctctgcaaccatggcactgtgattatgcatcatttttagcatttaatacagtccatttttggctagtagggttagttgcaatcataatatgagttgcatcctccctctcatttatatcaaatatacttgactagatttttacaagttagaga

SEQ ID NO: 496 - DNA, 32742 bp, Homo sapiens
  source 1..32742: mol_type = other DNA
cttccggtggagggccgcctctgagcgggcggcgggccgacggcgagcgcgggcggcggcggtgacggaggcgccgctgccagggggcgtgcggcagcgcggcggcggcggcggcggcggcggcggcggaggcggcggcggcggcggcggcggcggcggctgggcctcgagcgcccgcagcccacctctcgggggcgggctcccggcgctagcagggctgaagagaagatggaggagctggtggtggaagtgcggggctccaatggcgctttctacaaggtacttggctctagggcaggccccatcttcgcccttccttccctcccttttcttcttggtgtcggcgggaggcaggcccggggccctcttcccgagcaccgcgcctgggtgccagggcacgctcggcgggatgttgttgggagggaaggactggacttggggcctgttggaagcccctctccgactccgagaggccctagcgcctatcgaaatgagagaccagcgaggagagggttctctttcggcgccgagccccgccggggtgagctggggatgggcgagggccggcggcaggtactagagccgggcgggaagggccgaaatcggcgctaagtgacggcgatggcttattccccctttcctaaacatcatctcccagcgggatccgggcctgtcgtgtgggtagttgtggaggagcggggggcgcttcagccgggccgcctcctgcagcgccaagagggcttcaggtctcctttggcttctcttttccggtctagcattgggacttcggagagctccactgttctgggcgagggctgtgaagaaagagtagtaagaagcggtagtcggcaccaaatcacaatggcaactgatttttagtggcttctctttgtggatttcggaggagattttagatccaaaagtttcaggaagaccctaacatggcccagcagtgcattgaagaagttgatcatcgtgaatattcgcgtccccctttttgttaaacggggtaaattcaggaatgcacatgcttcagcgtctaaaaccattagcagcgctgctacttaaaaattgtgtgtgtgtgtttaagtttccaaagacctaaatatatgccatgaaacttcaggtaattaactgagagtatattattactagggcattttttttttaactgagcgaaaatatttttgtgcccctaagaacttgaccacatttcctttgaatttgtggtgttgcagtggactgaattgttgaggctttatataggcattcatgggtttactgtgctttttaaagttacaccattgcagatcaactaacacctttcagttttaaaaggaagatttacaaatttgatgtagcagtagtgcgtttgttggtatgtaggtgctgtataaattcatctataaattctcatttccttttgaatgtctataacctctttcaataatatcccaccttactacagtattttggcaatagaaggtgcgtgtggaaggaaggctggaaaatagctattagcagtgtccaacacaattcttaaatgtattgtagaatggcttgaatgtttcagacaggacacgtttggctataggaaaataaacaattgactttattctgtgtttaccaattttatgaagacatttggagatcagtatatttcataaatgagtaaagtatgtaaactgttccatactttgagcacaaagataaagccttttgctgtaaaaggaggcaaaaggtaaccccgcgtttatgttcttaacagtctcatgaatatgaaattgtttcagttgactctgcagtcaaaattttaatttcattgattttattgatccataatttcttctggtgagtttgcgtagaatcgttcacggtcctagattagtggttttggtcactagatttctggcactaataactataatacatatacatatatatgtgtgagtaacggctaatggttaggcaagattttgattgacctgtgatataaacttagattggatgccactaaagtttgcttatcacagagggcaagtagcacattatggccttgaagtacttattgttctcttccagcaacttatgatttgctccagtgattttgcttgcacactgactggaatataagaaatgccttctatttttgctattaattccctccttttttgttttgttttgtaacgaagttgtttaacttgaaggtgaatgaagaataggttggttgccccttagttccctgaggagaaatgttaatacttgaacaagtgtgtgtcagacaaattgctgttatgtttatttaattaagtttgatttctaagaaaatctcaaatggtctgcactgatggaagaacagtttctgtaacaaaaaagcttgaaatttttatatgacttataatactgctgtgagttttaaaagtaaagcaaaagtaaactgagttgcttgtccagtgggatggacaggaaagatgtgaaataaaaaccaatgaaaaatgaactgctgtggagaagtgttacatttatggaaaaagaaataggaaccttgttcatcaaattgatagaaaagcttttaaaactaaacaaatcaaacaacttgagtataatggaattcagactttgatttgcctaacataaccaccatatttgcaaggacagctctctatcttctggtgtttattcttaaaaacttaaaagttagatttagcgatcaccagagccactacttttatgcttaggtatttgtttgacttagaaaaaattggtcacgtgtaccactttatagtgccctgcaggtgttaagatatgaaggcactttgacttacacctcataaaatctttacaaagtattttctaaatgaataatgatgaaataaagtctttattctaggtgcatctgccccacataatttgttttctttggactagaagttttgatgtgttgagaatggtaatgaattaactccattttaaatgtagaatgcgtatcactccaatatgaatgccctaatgaatcctaagatttgtaggttttgtgtactagtatgaaaattactaaagatggaaaaatcacatgttggagacataagatacaaacctttttgttttctgaaaatacaacctctgatttctgattccttgttgtaatatggtgtaattatactagattgtaattttgttgttagattatacttttttaagttcagtgtttgaggacagactttcatttggttagtagtattatggcagctagcagctaaatatgataaagtgtacaatcaaaaggatatttttaatgaagatattagtggtctaacatgtcatttcagatacatagctgaaatgtagtaaaatcagttttactacaaataaacttgcataaggtttataaatttataagtttataaatcaacttgggtaaagtgtaaataaacttgcactcgtggtttctctgaagtctcctgagctaactttgcataaaggtgttattctgtacttcgaggaagtgaattattggggtcaaccacattttttttccttcctacagtctgattgccctttttagtttttaggatctttgtggctgcatcatttttccccttttgaactgtgcattttctaaccccatacttaaatattctcataacctccaaattattaattagatgcaacattcagtggtatattactggagtttctgatttctgcccactataggaatgtgcttcctgagaagattgggatcgtgattataataatagttaacaggggatgagtactttctaggtgccaggcactgttctctctgatactttatttgatgtattgttgttattcccattctttaaatgatgcacagagaggttaggtaagtgacttactaccaagtgtcagggccattaagggtcaggattctgaattcctgaaatgatgaaatttagcttgaagaaattggtttgatttcctgcttagttttcaatttcatggtggtctttgattgtattttgtgctataacactgccttagcatcctataactatagttacagtgttatattaccattttttattgttaatacaaagccatcatgaaataattcagtttatgtgccagctttttttgttactaattcttgaaccttggcgctgtacttcttcatgtggatgcctgttaaggaaagataaagttagaaatctttgaccctgctaggaaatttgtctttgttatattgggagctcataaaactgaagtattcaaaagttagaatacatacacacaagaaaaattagtaactaatttaataatgttttctttgcacatgtctctgttgtcttttggtcagagtgaagctaaatgtgtttttcacataatttgtagcctatatgaagtcctggacatgtggtatggttggaaggactgttgatgaggtttattgtctctctttattcttttatgttgttagtgtccccatacaacggggcggggggagtggggacaaaatgataacttgctttatatatgaagccttgggtttgaatcatactgttatcacatttcctatgtccctatcctgtctcctgcaggttttctttcttggttttcttttttggttttctttcttcctttcttcctttcttttcctttctttcctttcttccttttttctttccttttcttttttcctttctttccttcatttctctcctttgctcctttagtttgtttctttgtttctttggtttgtttctttgtttctttggtttgtttctttgtttctttagtttgtttctttgtttctttgtttctttcaacaggtctcactgtcgcccaggttggagtgcagtggtgggatctcagctcactgcaacctccacctctcgggttcaagccagtctcatgcttcagccttccgggtagctgagattacaggcatgtgccaccattcctggctattttttgcatttttagtagagatgaggtttcgccatgttggccaggctgatctcaagttatctgcctgcctcagccctccaaagtgctggaattacaggcatgagacaccgggtccagcttccagcaggttttctttaggagggatattttacaatgctgtaagtttttcctaacgagaattatcatagcactacatgttctgtcttcagtaagtgatacaagcttactgatgatgttgtagttatgttcattggtggtcgggtgtacattgaaactttaacacataatagcctctcctgtgagcagtggttcctgttggtaagatactttactaagggaaggaatgtgaggtgtcgctggggagagtttacccaaataaggatggactttctgtctttgtttcatcagtcctggtaatagaatgtttgaatagatagctctaggcattacatactttcataaatatgattattgtaattacctctttggcccagttgctagtaaattagggaccccttaatgatttatttcctgtttattcaccctgatgaagaacttgtatctcttttaaactgtactttatcgcctttctcaaattccaagattctcatcacattttttttcttcccaaactctaaataaccttttaatattaagtatctttgtggaaacattgttttctttttctatcccaatttttaaagcttttttaaaaaaaagagtgcttttgttgggatgtacattttccaaatgcaaaaacatttatgattctgtgtctcttataaaatatgacactctctacttttctctcatttatttagtgccacctatgtgtgtaatttcattacccacagcagtcttaggaggctggtcgagttccttatttgcagatgaggaatctgaggtccagagatcacttcttggtgagagtctcacagctattaagtattagagccaagattttgaacgtaggtctgattcacagcaaaaccgttaaccactaagtacactgactccagtaagagccctagtcctcacccaatacactttaattcccctgtgcattcattcaaattcattgaatttgctgcctttggaaacctctcaggaacctcctcaacctctcttctctacagacatcagctttgcctgataggtagggatcatagcaaaacacagttttccaaggtggtgataggtggagtgatagtgctctggagatggccaaagaaggaaggtatgagtgtatctgtgggtgggtgagtggtggataaggggaaggacagagccaaaagcgacggctattggaaaaactatgatgagaaacaggaagatggaaccttgttggaattagtgaaagaccttagaattcacaggaggtatttgtccttcacgcgagtgtagaccaaacgtaacctatgagtttcttttattccacttattaaagcagcaaccaaaggtattatataccttctgtattcacttaaaatgactgattttgaaaaagtcatgcaaacatccatttacagataagcctcattaactcaaaggcagtggccctgttgggctctgatgattactcaaaccatttctgacactctgacactacatccggaaatcatccggaaatgcattcagagcctgcaaaagctttttttttttttttttttttttttgaatagctacagcacttgcagatcttcctcctttgagagaatatttgattttaggaaataagcaaatgtagataagtatgattcaactgggcaataacttttaggcaaagagaaaaaaacaaaatatagcaatgtagtaataaggctgatattatagtgcttttatgatgagtctgaaaacagtctccaacatttgtaaatgttttaaatcgggtctgtctactacagtagcccttaagccatatgtagctattgagcacttgacatgttgcaagagtgaattggagactgattttaattttatttaattttaatgtaagtagtcgcacatgacccgtggctactatggtagatggcatagttttagacaagggcagtagtcttgggtagatacttgatttacttagaacatttctttacctagctgtaacaaggttctaatagctgattaaaggacaacatttttagcatgtaatatacagtaaggaactaatgttaattactgccaagatgtataaacattatgaaaccttaaacaaggatgaacacagaagcagtggcccttctttgtaaataaggggtcagttacttcctaataggtgtcttagttttagttaataatctaatagcacccccaaaaagcaaactgttaatttgttattagccatcctgtaaagacaagggagaaatcggggccaggagagtcctctttcccattctccataatttttacgacctatagaaataagagcctaagagtgaccagttcctgcaacctaactcaaaattaggcctctctgttgaagtaatagtgaggcaaacaatcccttgaagcactggggcatgcacccttatgaaatctaataattctaaaatatcattggcagtattaagctagagttctcaaaatatgctgtagaaaatattggtcatttaaatatagctgagtaaaaataagcaagatcaaaatgataagaaaatgttgatttctccccttttgaaccagtaactaactataagggtatatacccatgcttaacttaaaaataattatttagccaccttgggtatagcacaacatatggatgccattatagtccaccttgatcttacaaggaagctttcttttagcgtagctttacttttatttaagcattattgaagaagcttggtatctctgtttaagttgcttctgtatcagtgttttccagggccctgtctcagcttccatagttttccttaagagcagctaattaatgcttcactccatatgctttaatttgatattttgggaagtttcattttttaaaataatctttttatatcataggcctttgaagacatatttgtttacaaagacatctgcattgaaccatttgtttttaaaaacatgtatcgggcatgtcctatataccagaaactatgccatttactgaggacaccgaagttagagaatggtcttaatccgaactagttattgtctcactatccaatatggatatcaaacattcagcgtcatgaggatttactactgtgttttctcccaagagttttataattttagctcttatatttaggtctttgatgcatattcattgatttttttttgtatgcagtatgaggtaaaggttgaaacgtattctttttgcatgtgggtgtccacttgtcccagcttcattttttgaaaacactatactttccccattgaattgtcttggcttctttgttgacaaaggatttattatttctgccacaacccagctgtttctcactgtctaaacctttatgcctgctgccccgtaggcttagtggaatgcctctccatcctccactctcttttgtttagctagtacttccttatcctttaaggggtcagtaggaacctcaccttcttcagtatgttttcctttgtcttatcaacctaccaccatcacccacacacataccttttccctaaggctgggataggaacctcttaggcaatgatctatttgataagtactcactgagttcatactagacactctgcagtatatccgtaaatgaagtaaaacctgacaccaccctcagaaaacttactgttagtgagaaaatgggctataataatagagtggggtaagtttattgtagggataagcataggatgctatgagaatgcagaggacaggaatttaacctagacttctcagttctcccgttgaagttgacatctgaactgaaatctggaagaccagtaagagatagctatgtaaaaagaggggaaggacaataggaaagaaggaatggagagaggcccagaaactacagagtatggcacaagtagtttagcattgttgggtcacaaattctaaggatatgaaagataaagttgaagaagtggtggggctggggaggacagctcctgtagagccttttacagcgggagaaggagtttggctatggtcctgcaggcagggagaaaccactgaaggggagaaacatacagaataaatttgagtaagaagcttaaatctccccaagcccttttaaaataaattaagatataaagcctttgggtttctttatgctttgtcctattcttctaattgtccaaaacaaaacaaaaaccttccttttctgtacctattaaaaggttaattttataaagttacagacagcatgctgattaaagaattcttgataattagctattttgtctgtctttgtgtagattactaacaattgtgtcatcagatttaaaagatctaaacctctggactttatatattttttctacaagtactgtgagattgagaacttaattcaactctagtaactggactttttagtgttgtttgcagcatatgattgttaaagaaagtttagtatatttgtgtgtgcgtatatatatatatatagatagatagatagatttgaggttatatttaatcattgactattggtattctaagattttaaggagagaaaggtaggttacaatatatggctgatatatggttctggaacaattttcttagttttcagtaattctacctaaaatgtacgtccagctttgcactcactaccacattgtaatttccagtatacttgtctatttttcgagatgttgaaatctgtggagaattttttctcatgtttagtgttttagctatgtttatctctagggtatagcacatacaaggtggcaatatagatgtgcttaatgaataaaatgatcttcaaaaactgaccttcatttgaagttctattttattcataaacacataaaacgtttggtatcactgtaaaatttaactaaaaacaaaaactatctttaagctcacaagttaatttaacgttttttcttacacaggcatttgtaaaggatgttcatgaagattcaataacagttgcatttgaaaacaagtaagtgtctcgttatataattttaatgatgaggttctttaatattttatgctaattctattcttcattttttaaaaattcaagtccagtttgagtgcttttcaggaatggatcttcatgttactgactgagaagtttctgaacaactcagtattaaactaatggaatgactgtttctgctaatgtcctggaggtcccttattgtatggtattgatccttacgtcttaattcccttgaatgtgaagaaagaaaccagagagtcttgtgtattagtaactggaagttcgcataggagtatttgtaaattttaaaaagatagtaatgaaaagattcatgggtattgctaaaaagttgtatgtgagttctttaacattaaatctaaaactgatggttttagttgtctagtatattttatggaaacagtcatgtttacctattatctgattttttttaatgtttcatatgttcagcaatagcagtagctgatcttttctgttctcttttgctagatgaagaaataaaaacagtcataggcctaggaatattaactgtatgaaagcatcaatagtatagatgttaacattttattggagaacacaagtctcttgactaaatgttttgaatgctaataaaggctattttcagggtagctgttggtaagattgtaaagtacatataaactccttagtcaaagtgtagatgtggctatgatcttaggattttactaaactctgatggatggttaacagttatcatttttttggctcttatataccaagaaaattaataatatatcaaaagcaggctgcaaatctatagagacagaaagtagattagtgattgcttgtgctggggctggtggggagaacatagctaaagagtacaggatttttgtgtgtgtggcaatgaaaatgttgtaaaattgactggtaattattgcacataactgtaaaccttctataaaccattgaattgtacatttaaattgatgaattataatgatatgtggattatgtctgctaaaatgtagtatgtgacccaggcatactgagcaataaatacacacatcttgcttctaaagtttaaaaccaggcctgtgtttcagtgtctagaaaatatatttcataattgaacttagcagattcttttggctagcaacaggacaaagtagtatccttagatgcctgaaacacgtgtagggggacagagataaaaggattaaaagcatctaaccctatttctggctctggactaataatcgcagaccaaaatacaagtttgaatagtagaatacctttccctgaatacataaagccaaaagttttagtatttgtctcttcgctgtttcatatatccatggctatgcaatagacaacagcatcacaccaacagaggaatctttgataacttggagggtatttttttcttacaattatacactttatctacttacttacatcactaggtaaatgctgtttcccataaagggagagttgtctttatttgctactcttttagtttttcctgtagtctataatctaaagtgttaagcaaacactcatttcctctatgcatttaagaatttgtctagtttatacattgatttattagatcacttctttttaattttcaatcagatttctaccataaacttaaaattatttcatctttggaccttccaattatttatctcctgtaccatatctgcatgaaagtttctcttcaagctctttgtcatcctgggagtttgaaatagatcattgattttcccttgtgttcatggagtatgtttgcaatacaacactgggtttgagcacatcaataggatttaataggtctccaccaaagtaatctctttgcccttccttgtgtgtttcctttttggttttctgttagaaacaaaacgaaaacagtgttttgtaaaacaccagattgtatttaccctttctttcctttcaatcaggaagaagctcctgttactgatagcagattgttttaggtgctttgtttttaggtgcttcctaaaccttccataaagcataaaggtgttttcatatttcacattttttaataaggaatttgaatttttatctgtatacacttaaaatcattattttttccttggaaccattgagttatatattattatatgctttaaaatcaaatttagcaatgaatgtataacatctattaggtgtgtataataactcagaggagggttcagttaatttaggccctaatcagatttccacaaattctgacttaatatttgcccgcttatataacagctcttctttaacaaaaacaagtacttttctcaatagaattttactaagaaagctctttagtaaaacatcgacattatacatacaacatatctcagtatctgctgatgaagaacaccaaaaagaacccagatgtgactgctccggaagttgaatcctcagtatttttgcaaagtttgtctttcagtattttatttgtgtgtgtgtgtgtgtgtgtgtgtgtgtgtgtctatatatatatatatttttttttttttaaagacaggatctcactctgtcacctaggctggagtgcagtggcatgatcatggctcactgtaaccttgaactcctgagcttgagctatcctcccacctcagcctcccgagtagctgggactataggcacataccactgcacctaatttttttttttttttaataatttgttgtaaagatcaggtcttaccttgttgcccaggctgctcttgaagtcctggcctgaagcagtgctcccacctcagcctcccaaagctctgggattataggcttgagccaccgcatcctaatattttatatttttatggatataaaaaataatttggtatctttcagagttgtttaatatcattttaaatttaaaaacataggcaacttaaactcctataggctgtctccatcgggtttctgtggtttaggagaccccaccatcccagtgcatgctgataacgtcatactgatcagcatccagctacccacagcaagaattgaccacctcgtgggatctaaaatttaaagggggaaaagtgagttgtgaattgctaatgtgctgatagccccattttgcttgggaattagagggcagtttttgtggtccttggaatgtggttaaaattcttctgcaagtggaagcatatttatattactaacaattactggtactaatattcaaatattgaaggaaatttctgttgtggacttatgtttaaagctcttagaagttgaaattattggaaagaagacttgttttgaaaatcataatgttgctgtattgtgtttagagaaatattccaaacgggagtaggctgctgtgctgcatgcagactttgctgaaatgttactatattgccgttatgtcccactcagcaaaaactgatgattttaaagcttttgcttcttgaaactagaaaaagaggggtcagccttaaccaaaagttgatggcagagtggtcattatttcagttaaacatgaaaagcatgttaaataattgtatgtttgcttatttacagctggcagcctgataggcagattccatttcatgatgtcagattcccacctcctgtaggttataataaagatataaatgaaagtgatgaagttgaggtgagttttccctgccataaagtcatttagcactgaaagagtggggttaatttatctgtgtttttttttaatactttgtctttaacactgtttaaattactttgagaattacagctggaatggacacgtgcttttgactaactcatcttattaataattcaaaatgatacatgatgcttacatttggctatttgagcagtactcagagcatgtatttgaaagtcactgccgcaagttcctttgcccactagtaattcttttctccttctctcaatttctgaatctttgaatagtatgttgtttgtttacaactgtgtccccattgtaagcaaaatggattatgaaaattaattttacacaggaaagaaatcatgctttattacaaaatagtatactagaatttctttaagtagcagtgaatcttcttggtatatttttaaaaacctacaagctttagtttatacatattggtaaaatctctttttcacaggttataccgtgaactacctgcttatctcccgttgagctctttgaccaaaatgtgctatggagatctaacatgtgaacagaaatgttgtgtttgtgatttctttctccattagaaattggttttgtatttaaggcgcttacagtgcctcatatagtttgtgtggtatcttctctcctttgtatcctttcacatactccattttgagctgcttctcttctttttctacaataataagcataatgccttactattagttaataatagttgccgttccatgaatatttgtagtatgaaggatgtcgctaagtagacatttgtgcaggtgaggcagagtggttctaggtcctgtccttcagttctttatttatttatttatttattttttgagatggagtctcactcttgtcatccaggagtgcaatggcgcgatcttggctccctgcaacctccgcctcccgggttctagcgattcttctgcctcagcctcctgagtagctgggattacagtcgcccaccaccacgcccagataatttttatatttttagtagagacggggtttcaccatgttggtcaggctagtctcgaactcctgacctcaggtgatccactcgcctcggcctcccaaagtgctgggattacagatgtgagccaccatgcccagctggtccttgaattcttatttgctgcactaggtagtaaaggtgtagcaaaaacaggacagaatcttctgcctttgatgaaatcacattccagtaaggatagctaatatgacagatgtgagtcttaaagaaaaaaaaagggagaggatgaaaggtgatttagggacaggattgctgtttcagagagtagtcagggaagatctctcaatgtccaggcctgtgtttttctctctacagttttaaagtggacataggatatagtgttatttattttccaaaaatgtaaccaatctctactaggtgtaagcagctgggcttggttttgcaagggatcttaatagggaacagaaacactgtgtatgcttagctgtccacttccccagaagactgtaagctctctgaaggcaagacccaggtctttggtctgtattaggagtacccagaatagtgtttgatggagggatgaaagggactttttctccccagcttggtcacttgacagatcgggaccaatgagataccattgctaggatgacctcactgtcttacacaccgattcgttgaggtaatttctctggctagagtagttgagaaagatggaagcaagagggaaaggtatgttaagttgtattcagtcactgtattgtgtgatcattaactttggttgtaaaagggagacaagttcgagcttttactctacttgtcagccctagactttgtacctctcttggcctcatgtctttatcccccttgtctttcttatttctcttttctgcttctgagtatccctgtctctctgtccatatatactctgttgtctcttttcctattaaccttgatttgctagggtcttcatgaaaggttccatgctgtacatcttaagtgaactttgaagtggtcatcaaagagatcagttagaagaactgatctgcagtgtgtgacagaccaggaaagtgatatccagaggattgccaccatgaagttgtcatttttagtggagaggaagcaggagaccagaaagtgaccaaggatctgtccatttagttccaggagatatgactgccagagtggtatccttagtgggctgaatgttcagtggtcttactttagtgaccaagcaacaagacagtagggcatggtcagtaactttcagtcaatttttgcttactaggataaagcaaaaataagcttatacatttttagatacattttttgtaacttgctgagtacccaaggaaagtgtgcttgtatttatgggcgtctattttcagagcactaattattgctgaattagaacagaaatataggaaaactgatttttacaaggagcttcaaagcaatctcaggtagtttctgattatgtatctctgcctacctcggggtacatagacagggttacaatttggttgaggatatatgacatgtggtttttaaagacacctaggggcattttaagaaaatttcctcgatatctgaaaatctgtagatttcaaaattatgttaatcatgaaatattctgtgttgtaatttttgtgtaggtgtattccagagcaaatgaaaaagagccttgctgttggtggttagctaaagtgaggatgataaagggtgaggtaggaaaatgcctatttaaatttttttcttatattgtttcctttttttaaacccaggttgtacattcccgtgtggatttctattttgaagtaatatctaattttgagtaatttaattaaaatgttttcactatgtgttcagtatgtttctgttggtcataaattttttcacatagattatttattttaaaataactgaatagggagaacttcttattcttactttaaaaattgtgattagaagtgacttttatttatttctcagttttatgtgatagaatatgcagcatgtgatgcaacttacaatgaaattgtcacaattgaacgtctaagatctgttaatcccaacaaacctgccacaaaagatactttccataagatcaagctggatgtgccagaagacttacggcaaatgtaagttgatacacaagaaatgctgagaacttggaagtgatatgcaattagtttagaagaatttctagtagtttaaaattttttaaactactagaaattgattttaaatttggtggactttggcaaaaatggtttggtttgcaagagcaatggagaaaaaacttatttaacttttcctacttatagaatcaaggcagccttgcgcttgtttaaacttacttggctatacacgtgtctgatgtacataatgtacatttgttttctaaactaactttgttcattctaagatttaaaaactgatcaaacaaatgtgataattctgtcataagtcacaaactataaacgatttctccgtttttttctcttttacctaaaatgttttcagataaatgtgtaataagtagagccaaagaagctttaaaaagtcatctcatcttacaatccttgatctggaataatgcttaaagactatagaagagacgcatttttattttttacagattttattaagtgaatacagtacgtttgatttggacatgttgttgaacattaaattgcagttcagaatacatagaaatcctcccttttctagagattgtgtatgtgtgtaaatttttgtgccttctggttcatgtacgtttccttctctccctcaaatcgtttagcagtttcttaccccattctccgtgatgtgcttatttcatattgcatgcctgtatcaaaacatctcatatgccccataaatatatatacctactatgtacccacaaaactaaaaattaaaaaaaaaggaaaaaaaaaggcctgcaacaagagaagaagaaagaaatcagataccctgtaggtagctatctcccaaaagttttcaatagttgacttaagaaaactactgacttgtatgtaactgaaatcaggaaacctgtagtgtagagtggttcccctgaatatgtctcttttggtaatctaagctgtatttcagaaatgtacagaaaaggagctaagcttctaaatggatatagcatattttgcataaatcaaatttaatatgaatccatgattcttgtatgtgtaaatctgcctgcatttatttatgtcagtagttggtaattattcatcttaatttttttttttaaatttctaggtgtgccaaagaggcggcacataaggattttaaaaaggcagttggtgccttttctgtaacttatgatccagaaaattatcagcttgtcattttggtgagcatttttgagttgtttatttttagtttaattcatctggggcaattgccttgataataatgttgttaatttaaatcatttagtccatcaatgaagtcacctcaaagcgagcacatatgctgattgacatgcactttcggagtctgcgcactaagttgtctctgataatgagaaatgaagaagctagtaagcagctggaggtatgtcactttccctagcactgcttgtaagggtacctaggaacgattaactgtatcattccacaacttgaatatggggagcttgtcatttatttactgcttcttaacaattccttaggttctatagttggaaaattgtacaaagcataatcatactaaagtttccatgcctgaggtttcaaaattaaacagcagcttatgtatattaagggacttctggtactttcacttttactagaagtttatcaaagttgctaataaaatgcggcaatgcttcttccatataacatgttgtcattaaaaatactagagaatatttaaatatctaatcatattcctctcattatgtatgtttatctttgtttaaaagggtatagaacttcttcattctaattggttgtcattctttaaaactcctgtcttcagattcccgccagaggctatttccctaacttactattttgtctcttaaggtgcattttatctacttttattaatcctccaataattttcatcaccatatatttgttttcattgataactatcaagtacgtccatccattactatagaaactaagtggatcttagatgaatgtgccagctctactatattcctgtcaaattccagagttcgtcatcattattcattagaaggaaaacaccacacatttgaaatagtaaagaaaaaaaggagttccaaactgcattttaggagaaaaggtagtcaagactgtgttcttataaaaaccctgtgaaatttgccacctgtcaacttgatgtatgatgctgaactcttagcagaaggggaaaagtttaatctccttttgccactttgttttttcttaaggccatggaggtctgtttaattggtctttgctctcattctttcttgatgtccctgtgttcatgattttgtggttccttcagtgattctctcataacttttagcccagagctgcctccttactttgattgtgagtattatgaaaatatactcatatgcctcttaaacatcgaattattcttaaatgatctatcatacttttggctaaccatttatcagtgaattatcaatgaaaaagaacgaaccagattaatgaaccaggactcaaaaaacatgacttcttgaaaagtcctagaattattttatagattttattactctagtctaaaaaaaatgggtattgcacttttaaattatttatgctagttgtattcattcattcaaattatcaggtctgttgaacaatgagaaactagtatgcatgcctatctttcttcactactaatattaaagagatttacatgttcctataagaaattcccatttttcaacatgagccactaatacgtttggttttcattaatggcatgctagaactgaacactaaattttgataatggtatttaaagacagtggttatccacaagtttgggatgtcagtgtaacttagtttcgtcatcactggatatttacaagtgctcatcataattgtggatccagatcacaaggtcttacggactctggtctcatgttagctttcagatgcttactaagtttttaatttttgacattttttgattattcagtttaactactgtaccaacaatttttgattccttaggttttgagggaggtgtcattttaatgtcatttcaacagaggaatgtttagaccacagtacctaatgatgttataaaaaatggcactgtttccagaaaatatatactgataccttttaataaaaatgaagcgaataaaattttctataaagatgatatttaaacatttttttacctaaataagtaacattgagtttgtcagaccgagtgagctggtttttactggggaacatttgacctgcttcttagttattatattgctgatgtcattggttaactaaggcagccttgtgataagttttcagcagttaccttggaaaatgtcaacaagttctttcctattaacaaaaacatataaaatgtcatagacctttagtaacctaaaaagtacttaggctgtgagaggtattttctaaaacctgttagttttaacctaaaactattaataatttatggacccctcatatacagggtcaagataatttacatggctggcctaaatacagttgtcgtaatagttgataaagtgtattcatcagacgtccatttctcttcagagttcaaggcagcttgcctcgagatttcatgaacagtttatcgtaagagaagatctgatgggtctagctattggtactcatggtgctaatattcagcaagctagaaaagtacctggggtcactgctattgatctagatgaagatacctgcacatttcatatttatggagaggtaaatattttactgcatagtttttttttccccaaacaagtatttcagctggctaatcttttgtcttaaaatgtttccccttttattaggatcaggatgcagtgaaaaaagctagaagctttctcgaatttgctgaagatgtaatacaagttccaaggaacttagtaggtaagtcagaagtatctgttgacatatagtacaacaactaagtttaggtaaacagtttatttatagtgatagaattccattttttcttactggagggtatcatttaattgaaacatagtctttgaaatatgatctgttctttttttttattatttaagttttagggtacatgtgcacaatgtgcaggttagttacatatgtatacacgtgacatgctggtgcgctgcacccactaacttgtcatctagcattaggtatatctcccaacgctatccctcccccctccccccaccccacaacagtccccagagtgtgatgttccccttcctgtgtccatgtgttctcattgttcaatcgatctgttcttacagcatacaaaaaaatatttgttaagtatgatgctcaaaggttacattttcagaaggtattcaaaagagattgcttttctagttcaaacctactaatacctgaaaggataaatcttgcccagccctcctgactgtataccttttatatcttaaaattaaataatttttcaaaatgaatgatatttggggactttatgatttgaaatagatttgtatttgatctttcttatgggactataaaatgatagcattcattttaattatctcagggttgaagatctgaacataggttacttaaatctaaaaagtcccaaagctagaagaaacttcagatgtctctgggactttctgcaaagtcaatagtaattctccattttgacttgagtagtgttttatcaccatcaccatcgtgagtatcagcaaatatttaggagctcttcaccaatactcctaaatgctgcagatatctttagtagaacatatcaaaaccaggtgcagttttatcaagaaagctacatatgtttttaatttgtaaataaaattgggacatactgcctatatgttttttatcttttaaacttgagatcatggccattttatataaagtaatacatgttctttggaaactttaaagaagaaagcaaggacttctcatacattctgtttacgtagtttcaatgctaatttagcctgcttttttgtcagcatagactcataaacatcttccttgtcattaacaaacactagaaatgataaatgtatctcccaaagaaaattagcttgaagataaagtgcaaatagtaggaaaataatgcagaagtgttagctcaactgtgtactacagacaactggagaaatgtgtttgtaatgttactaaggtaacttgcataccaattgtatgtgtacagaatgtatgcatagcgcaagataaagtgctaatctcaagacagttgggtgatgaataatatttattttcttctttacagcttgtcaagcaattgcataccttttgtagttagaaaggttattgtaaatttaggaattcttatggaaaaagagctggtagttgttttgttttttttttttaatagcaaatgagtagagaattatgtgtcagattcattaaagttggttttgaagatggcatgatggtagtggggaaagtgcttgggcattggagttggatctggatttcagtcctactttattctttggtggcaatgtgagcgtgggtcactgtcttagcccccctgagaattatttttcttacctatcaaatgtgataataggatccacctcatagagttgatgtgataattaaattggaagatatagtaggggacaattctggacacagtaggggactctgttcttcaccttattcaaaacaactccatttcagtagaacagaatcacagtaaattgctctttgggatttggaaataagtgtaatgtagaattggattatttgctattaaatattaaaagtagattctacctgtggttacctggaaagaagaggatctcagaaataaccagaaagactgctaaaagtaaatcagccttgtttttgttttgttgtttctagttagtaaaatgagataattctgttttagagatggtccactgcaacactgggaacgttggaacttttcagaaagcatttttgtgtaagattctgcaaggcagatctttagagaggtgtcataatcagttttgcatgtgttttgtttgagtcaaccaacgttatttgtgatctctatttttcacaaactctctttggtatgtgcactaatttatcttttcattaaaattggattcttcactcactaagaatgaattggtatgactattcagtcagctatagttaacacacagtacttaggataattaagatattatcttaataaaaacatccccaaatctcatttttcattttgttaactcacttagatctttattaaagtcaacattaattcatgaaaatgtaagtgttgcagtttaaaatcaaactgtgtgaagactccaagtagcttctctcacctcacctttccccttttcgttatagaagaacagaaataattgacagaaggacctagaccaagaatcctgatttaatggtgtcagatctgttctatgaccagtcaaagagtttctaggggtgaatgaggcagccacacacagcaagaatgtcaaagctatgctctgattacaagagccacaagaattttttgtgagaaggcttttcactgagttcttatctagcattggctcaaagcaaatttttgcttccatcttttcccccaactttgccttgagctttgcctttaaaggcgaaaaggaaaaaatggaagatgagatggtgagggcaagcacatggtggatgtggccaatgtaagggtacttaggtaccttgggtgagccctcagaatcagatgtagttcacatgtacatttccagaattagtaattcttaagtttgtaatgtcttgctttaccactcgtgtcatgatgcaaatgaaagcagtcattttccagtaatgtatatgattgtaaaataaataaggaaatgatcaagtacctattttttactggtacttgaaatcccaagttttaatagatgttactgaaaaatacttaaattggtttaaagctttttcattgtggttttgagttatcttaaagtgggttttcttaatcttttactctgtgactaatcccttcactttttaatacattgctaaagtttgtaagtaatgcacaggagtgatactctgttaacacattgaccttgaagaatttgtattccttttggatgtatgtatagctgcttaagccactttcagacttagattatcttttataaatgtgccttccatacagaattctgaaaatatttaccatggacaaagaagcagatttaaatcaggtacagacaagaattgaaagtgttgaataagtgaatatatttcccattctctctacttttttcttaattcttatagaactttgcagaaagaatgatacataccacagtaccagcaagtttaaagcgtacccttttgtgcaaaaataagaggttatctttgaactgccttaaaaatccaaaattaccctatcagtttgcaagtattaatcaactctggtacctgaccaaaggagtttaaacaatgatgtcctaattaaacagaaaaccagattaaccatcttgttgaaaagagtctctactttggttttgaaatcttacaattcaatacatacacatacacataaaaatatctatctatatgaatgtaatagtttacagtagggctgtgcttactgctttgaggtatgtgtttttaaaaccaaacttgatttatttatttcttaggcaaagtaataggaaaaaatggaaagctgattcaggagattgtggacaagtcaggagttgtgagggtgaggattgaggctgaaaatgagaaaaatgttccacaagaagaggtatgttacagtgcgaatattttgtggcacatataataaaagtaaaagttttttatgtgatatgttgaggacctctaatatgtgcataaagtgaatgcaaatattctgattatcaagcatgcctgctgtaattaatgttataattgtagataatggcccttctctgtcctctaatgcagtgagtttggattagtcactttattgaattcttttttcctgatctttaaaatgggtagttataaatttttaaatatgagacatacatcactgggtcgagtgttaatggcaatttaataaaataatatatatgtaaatgcttcgtaaagcactttgtaaatgttaatgttgctgacaaaagcaaaattggaacacaggttttctggctttcatcttttcacttttttagtgtggggattgtgtagtatgtgtgtttattctgtgtgctttaaatttatttctgtgcttaatatctcttccccatcctccttacctttaaattctgtaacccttttatcttcataaatatatgctttttgtagcagcttttaaagtatttgcatggggtagagaggtgaggatgcacctttctgtgcaatagtactcttaagatactgtctcatcaaagagccgtaattttcacatattgtctagctttctttttgaaagattcttttagctaaagttaaatcttttttttctgcgtacaatttgtattcggtaattttataaaccaaaactgtttataataacttacattttttaaaaatatgatgattgataacactaatagagctaaataaagtcttaaattggtcctttttttctcttttgtgttttctgttttttaccaaggaaattatgccaccaaattcccttccttccaataattcaagggttggacctaatgccccagaagaaaaaaaacatttagatataaaggaaaacagcacccatttttctcaacctaacagtacaaaagtccagagggtaagaattacttgtcactttgaattacaatacaagtaatttgtctcagatgtcacaattggtattttggatgttttctctggttagacttgtaggctacttatgttctattttttttccaaatgtaattgccagcttatgagatactacaaattagtgtgatacatacttttcaatttattcacagtaacaactcttatgccataaacacaaaataatggggttgcatttagtggtcacatttttcttttgacagtggactctcttttttccatgccttctctctttaaattttgcaggtatcgtagctcaaaatacaccttctgttagttgcattagttactacttgaaccatattttagaaactaattttctctgtttgaactaatctgtttagaaatgggtttaaaagtcctgcagtgaaagtcctgcgttcaggcttctgtgtatcgtttgttatagttaatgacatcccttgcattccttatactgctttaggtgttagtggcttcatcagttgtagcaggggaatcccagaaacctgaactcaaggcttggcaggtaggaaaacattccttgagaaatacactttcagtttatattttaatgtttattccccttgttaacaaagattacaaatgatcctcaggattagggactggagggaggagtgtttgtgggtatgtggatccattgccctggagttaaagcttaaacaccttcatgccgcttgtaaggcttttcctaattacttgtctagttatcatctttaaattatcttctcccttgcactctagagaaccttaagccatactgaagtactttgagttctctgaacattctcgtgcttattttgcttctagacatatgtacaggtttactctgcctggaatgctttttctcctccacatgtcacctcattttgaccttattccttacaaagctttccttgtgtacttgccgaagatccccacccccttgactggttcaagagccttccccttctgttttgcaatgtgctcacccctagcatagcacttaaacatagatgtttatttgttgatctcctcaaccacattgtaagttctttgagggcagggagagctggtgagaactgtttatggaaaaaaatgttgtggactcatggattaaaagcaaaggtgccattttacaaagaggactataacggcaagtggattggatatgtctcattgccgggcagcccattattccagaacacagagtaacttttttctggggtccgtactaaaggccatcattccattcttgcctttcttcattttaatttactattcaggtctactcgtgaagtgcttaaattagagtggcccttggggtactccagcagtttagacatgttgcaagaaaagatattcgtaaataatttgctccgaagtcaatctaactaaatctgttacataggattttaaagctattttggtgatatttgacccagagggaagggtgtagcattcattccatcacatggtattttgggaaataatacagttaaaggcttttgtaacaaataaagcttgttggagaaaaacccaacatgcagaaatgaattgccagttattaatttgcacaattgtttctaggtttccctataacttgtgacaagaagtagttgttttttttttccctcttaatatatatatatatgggctaggagtacagacatttagcatatgccttttaaaaatctgttcttatgttaagtagtgtccatagagagaagttcaaactttccttgtgattcagccttttaaaattttcagagtacattattgaaatgtgtatgggcttgataaaacttaatgcttgtcaatgtacctatttttttgtctcacagattattcagtgcatttttatcctgatgtttttgtttgtattttgtgtgtactctatttacttggttagcagaaatgatttactttttacttttgtacccttggtatttcattttgattttttttttaagaatttgatcggccaggcgcgatggctcatgcctgtagtcccgacactttgggaggccaaggcaggcagatcgcctgagcccaggaattcgagaccagcctgggcaatgtggcgaaaccccgtctctacagaaagtacaaaaatttagctgggtatgatggcatgcacgtgttgtcccagctatccaggaggctgaggtgggaggaacacctagggcctggggaggtcgaggctacagcgagccattatcatgccactgcactccagcctggataacagaataaaaagaccctgtctcaaaaaaaaaaaaaaaaaaagaggcggaggcgggcggatcacgaggtcaggagatcgagaccatcccagctaaaacagtgaaaccctgtctctactaaaaaaacaaaacattagccgggcgtagtggcgggtgcctgtagtcccagctacttgggaggctgaggcaggagaatggcgtgaacccgggaggtggagcttgcagtgagccgagatcccgccactgcactccagcctgggcgacagagcgagactccgtctcaaaaaaaaaaaaaaaaaaacaaaaaagaaaaaaaaaaaagaaaaaattttgatcaggataaagcctttcataaatgaattagagcatcttatactactcattttgtttatacatctcatggtaaagcttgtataattttgaattatacattttgtgattttgctgatactgaatactagtctttataataatctgatacgtttaaaaggttgctattgatctattcgtattcacagtagatgtgtaaagtagtatatcaactacttttgttttcatatattgatttatatttacagcaaacatttgtatacctgctgttcaccagatcctgtgctagggaattagtcgttatttgcatttttcagattaatctatcattacttttataggatcattgttgcaatttctttttcagggtatggtaccatttgtttttgtgggaacaaaggacagcatcgctaatgccactgttcttttggattatcacctgaactatttaaaggtgagaacagaaagaactttaacttctaatccttttgtactaaaatatacaaactttatagtagatctttcagcagttaggactcattctagcctgtgcaaaacactgtatgacttgtcaaaggtaatagagaaaatacgttgtttggcttataatttttttaaaaatggaagtctttataaatttaagtaccaatataccagttttcaataaaattttatacttccctttattcttctcttaaacccttacactcagtttaggcaatcctgtacatagcctgttaatccatttgatcctttctagcattttggttttttccagacaaaaatctgtgtctataactcttgcctttattgttccttttatgtcatttatcaaggaaatctaagcatttcatgaagttctttgtttaaatgtttaccctatttttctctttactgttattcaaaatacaaactatttgtgtcttctcataaatgttcagtttagttagtgtgatgcggttatgcctccttaaaatttcaaactggaagataggaacgaggaggctacaaggtgtagtggagcaagcactggatgggcaatgcagcaatttacttataagacttcagcaaatgaactagctgtgtgactttaggcaagtcacttccctacactagatgcttcttgaaattccttttggccaaaatgttctatactttaatgaaatggaaactgatctacttcattttcataatgttttatttgtatccatacatatcaaaattataatgtagctggtattaaatgtttttaaaaagcatttcaactctatttatggcattaagaatttttttgctgatttcttgaaagaaataaaaagtacatgatttctgcttgtgtgtaaataagaatgaaaggaagaaaaagtgtaatactgggcatgccattcattcttatggtggccagttaattaaaagtggaaaggtttcatccagcaaggtttacatgggtaggatacctctttgatttttttttaagtatgtttatgtgtaatctctctgtgtgtgtgtctctctcgtaattagcttaaatcatcatgaaggcctggagagttaggattgcattgtatcaaatcccttgttcttttgactaatgttctttcttagatcctttgatttattctcaagaatatcttctttggttatcagcagctgccctgttgccattctttccatcaccagaacttccctcgtttgggcctggcatctctcaccaaaaggtgactgctttgccccagtgggataacctggactactcttctgttttgcaagatattcctattccatgagctattactatacctttggaggaagtcactcactcagctgcagtctctcctttgctcaaattctatgtaaaacagattctggtgtaactatgtaaattgctaatgatggcagagcacagatgaaacggaccaaatccttacctgacctttcttttccagaagctgccacaaccaagattttagaaacttagctttacaggagcttctccaatgactgttcatgtagacagtctctatgataacctctgcttcactgagacgcctactactactatagttatgaatctgattccccgtagccagtaaatgagatgtttatgagtggattggaaggacagtggttagaaatgaggtttcatctggttttaacagaacccaacatactggaagtgctttttgtaagggtctgtcattggaccccaggtgtatatttctatcaactaaatgtatactgtttctcgtacttgttgtagcagagttgtagtctttaggaagttttcaaggcatgatgtaagacctagctgtctggtcagctattaaatagttttgttttcccctcatgaggaatagtcagcattttcagttgatgaaaaaatcattgttccttaaccatagtatatgttcttttaaaacaaaagatggcccaaactcaatgctttgtaaattaagatattaactggcaaatctattttaatcaagattatttacaatgtgtgattttttaaggttagctggttataccttgaatgtcatttatctatattcatacattttagcatgttttatttaatatcctatcatgaagaagtccccaaaatagcatatctgtgccttagcagtagaataattggataatagtgccaaattagacaactttaaattttattcagtataattttactgctgagtgtttttgttatatctctaattcttgacatcaataatctgttatctgtagtaattttctttttaaggagatcattcaatttcctgataattctgtgtaacagtgtttactgtaaatttagaactgaaattgaaatattccagtatatttttatctgatgaaaaggagaaaggttttattaagtaaaatgtcaaattatttttactgttatcttgtatattttaaataggaagtagaccagttgcgtttggagagattacaaattgatgagcagttgcgacagattggagctagttctagaccaccaccaaatcgtacagataaggaaaaaagctatgtgactgatgatggtcaaggaatgggtcgaggtagtagaccttacagaaatagggggcacggcagacgcggtcctggatatacttcaggtacaaactaagcattttactcagtaactttatctgttcctagacttatagctgctaatctctaatattcattagaaccccattataacaatttgccgctacatggtttccaattcacagtgggttaaattgtgttacaggagacatagagtaaaaacctgatgataaacacgtagagttcacagggccggtgcaagttctgttcatgctctgattgggggtaaatctgcaaagcccttgtgtgttgatgattttcttaaggcctctcctgattttataactgtatagtcaaaacttttttcatttgtgtactgtggctcatttttattttgtcaggtatgtgctggtcatacttgctggatggactgtgtaaatcaggggtctgcctcttgtggctcataaggtgattttgagtgacatggccaaagtcagccctaggcacagtcaagaagtaggcgaagtttctctttgccttcccagcttttctgtccgtgcttctttcttctctcccagtacctttcagtgaacctgatccccacctgccagtgcctactgtctttcttgctcaacagtgtatctcctttgtaacttgctaatgatggtataaggtataatccatttcacgcatatttgcatttcaaaaaggaactctttaagatggaaaagccttcaagatccacaggaatgaagctataatggtgaagctataattggtcattagctccaacagaggaagagagaggtagtagagctgatattctggagttggggagagttacctactcctaaggccaaccttgaacctaacccctaacccctctcccaacagtctgttctttttactcatgaatttctgcctcaccgtggagctctttttctccgctcctgtcctctaagtcgttaaccccttcaggcataatgaatttattatagtaattctttattaatgatcaattattgtaatgggagtgggagggcaggttgtggaccaaacatcaggcaagcatgtatctgccttcagctagatccaatccatgacccacaagagacccttccctgaagcagttgccatggtggcctcctttgccaccctctcagaaatgaccaaaatatatacattcccctctgtcctgggccaaatcttgctaaaaggagctctctttttagaggttttgtttatcagggtatcacacttaactgtcgtggataatcttttcctccagagagtatagatgtttaaaggaacacagctatttaatgatatggcacatcaaggtttgaacttaggtggctaataacatacctttttaaaaatgagaatgaaacatgtttataaccaaaattaacctcaaatattgcaaagcc

SEQ ID NO: 497 - DNA, 16196 bp, Homo sapiens
  source 1..16196: mol_type = other DNA
acaagccccgcccccgagaactcgggaagccggcgagaagtgtgaggccgcggtagggccgcatcccgctccggagagaagtctgagtccgccaggctctgcaggcccgcggaagctcggtaatgataagcacgccggccactttgcagggcgtcaccgcctacacgccccctcgtctctcggacggcggcgtctagcctcggggcgctcggccgccccgccctctccgggggaggaatcaagaagagactgcccaatagggccggcttgacccgcgaacaggcgagggttcccgggggagtggcgcggcagaaggccccgcccaggagccgagggacagcccagaggaggcgtggccacgctgccggcggaagtggagccctccgcgagcgcgcgaggccgccggggcaggcggggaaaccggacagtaggggcggggcctggccggcgatggggattcgggagcactacgcggagctgcacccgtgcccgccggaattggggatgcagagcagcggcagcgggtatggcaggcagccggcgggccggcctccagcgcaggtgcccgagaggcaggggctggcctgggatgcgcgcgcacctgccctcgccccgccccgcccgcacgaggggtggtggccgaggccccgccccgcacgcctcgcctgaggcgggtccgctcagcccaggcgcccgcccccgcccccgccgattaaatgggccggcggggctcagcccccggaaacggtcgtacacttcggggctgcgagcgcggagggcgacgacgacgaagcgcaggtaaccggccgggcgggcgccgcgcaggcggaggagcgtactgtcccgcgctgcgccgcgcggcggtaaaatacacgctgtttgttgtgcttgagaaccgagcagaatcgagagggtcttaaccaatccctttataccccgcacctcctctcttgagcccctgagaccccgagagcgaaggggacttgccgaccggggtcacccagcttggcaaggggagggctggagctgaactccagcatctgcaccatctcccatgctccaggtcattgtggagttcccgctacagtcgggaatgagatggtcctgggcacgcagttccatgccccacaaggattttactcggttgtccagaattgatgctgtagtcggaatacaccaatgctttgagtaattttgtaatgtacaccctgaatgaaggctgcctaggagagagtggctggagcccagagccagcagtttctaacccatcaaccactccccaatgcccagccgttcacaaggagtgatttgggcaatcaggtgtcaccctggtgtgagaccccagaggaactctcaagaaaggggctaacttctcaatgctctcctgttcttctgccttgttaacgagcctttcttccaccagacagcgtcatggcagagcaggtggccctgagccggacccaggtgtgcgggatcctgcgggaagagcttttccagggcgatgccttccatcagtcggatacacacatattcatcatcatgggtgcatcggtgagtatctcccaggccccaatcttaaaagccaggaagtgcctgctccatgcctcagcttttccaactaattgttgcagggccccacaggctctgctaagttgagctcctcctcccgctcctgctagtgcgccaggatcatcccggctctacctggtgtgcatatgcacttgcaagacttttttttttttttttttttggagacggagttttgctctggtcgcccaggatggggtgcagtggcgccatcttggctcactgcaacctcggcctcctgggttcaagcgattctcctgcctcagccccccaagtagctgagattacaggcatgcaccaccacacccggctaatttttgtattgttagtagagacggagtttcaccatgttgaccaggctggtctcaaactcctgacctcaagtgatccgcccgcctcggcctcccaaagtgctgggatgacaggcatgagccaccacgcccggctgcaggacgtttctgaaccctgtgcctagccgctgaatgtagcccttaatcctggagttgcaggctctttagggactgtctagatggacttcttggggaaaacagggaatgctattcattctgtagttttttcagacctgttcatgccttaacaaatgagttccaaaggcaggatctgaggcctgatctctgcctcttcactaacacttcaagttccgtcgatacaaacacttagcttttctttgaacactgtctctttgcctcaatttcgaaagcctaccaaggagctctgcctcaccccacctggccccaattgtccagcttgtagaaccgccattctgcactcataggaaagacaaaagaatagtatagcatgaggatttccatgggaggggagggaggggtggtcctaggacagccatcgcccgagactagagcaccctcccctgtgtcccatggggcagtgagactgtgcaggggctggtggaacaagggcttcatctcaaattacacgtggtctcagttttcacttttaaccctggatgcactcaagaatctctctgctcattactgtatgaccatctttgccattaacttaccttgtaaccttgagcaggagctctatcaaaactagttagttcttccacatcgtgcgcccctcagtgctggctgagctcagtggttctttgttcacatagaacaacgcgctgtcacactttgtcaaacctactccttgacacctttgtacttctgatcagaacttagaaaaggagagccaaaagggaatgaggaggcagccgagggagaagggctctgccagtggcagagtaaggaggggccattgtcctctgactccccataagcctgagacccaggagaggtaccaggtggagcccacagtagattgggcttggcctcagccccagccccagcctggtcccctcagaagagccatacctggccgggcacggtggctcacgcctgtattcccagcactttgggaggccgaggcaggtggatcgcctgaggtcaggagtttgacaccagcctggccaacatggcgaaacccagtctctacttaaaatacaaaaattggctgggcgcagtggctcacatctgtaatcccagcactttggggggccaaggtgggcagatcacaaggtcaagagatcgagaccatcctggccaacatggtgaaaccccatctctactaaaaatacaaaaattagctgggcgtggtggtgcgtgcctgtagtcccagctactcagtaggctgaggcagtagaatcgcttgaatcagggagtcagaggttgcagtgagctgagatcgcgccactgcactccagcctggcgacagagcgagactctgtctcaaaacaaaacaaaacaaaaaggccgggcgcagtggctcacgtctgtaatcccagcactttgggaggctgaagcgggtggatcatgaggtcaggagattgagaccatcctggctaacatggtgaaatcccgtctctactaaataaaaaattagccaggcctggtgtgggcacctgtagtccagctactcaggaggctgaggcaggagaaaggcgtgaactcgggaggcggagcttgcagtgagcagaaatcgcaacactgcattccagcctgggtgacagagtgagactccatctcaaaaaaaaaaaaaaaataacaaaaattagttaggtgtagtggcacccatctgtaatcccagctacttgggaggctgaggcaggaaaatcgcttgaacccaggaggtggaggttgcagtgagctgagatggcaccattgcactccatcctgggtgacggagtgagtgagactccatctcaaaaaaataaaaataaaaagagccatacctgcatcagccacaaaccttaacagccaggactctgaccgttaaacccttagtccaagaagcagactggaggagaaggtaactgaggttgctttctccatccccaccccatgctgtcacaaggcactgcaacagagcaacccaggccacaatgatagcttatgactcctggccttcagctcttattagacacctcattgagagcatccaagcttgctgtgtgagttggagcaagtgtcttccttttcctgaacctcagcatttcgtgtagcaaatgacagcttttgaaacgagggcccagggtccttaggcttttccaagctgattttgtcatttcactgcctccgcctgtggccagcttcgggttgggcaactttgttttgttgaaatcagtagggttcccctttgctctcctctgttctgagagtgacaacctgaggctttcaaagcagaaataggaagtgccagctccagcactgtgggtaggggacaaggggtcctctctctgaagagcctcgtggtttgttttttcctcttcctgctgggggggagatgggaggtggcgtgctcaggcagcacctggaacagctccggctcccgggcttcttccacgcctgatgcctcactcggtgcgggaggtaggcagggtggcacttgagggcacgtgatcctagaatctgctgttccaggaaagcagcccattctccgttcattgagcagacagcgattgggtacttctgggccacagcagccagtccctgccctcctcatgggacctatgtgctattgcggccagggaaccacggcaagtaagcagaccagcaagagttcaggctgacgtgtgtttcagaagatacacatgggccctgtgtccccagtcccccaaagcgcatagatcccacaaagagggccgggagagcacaaacacagaaggaagagcaaatgcccggagccccgagttgggaacaagctcagcatgacctagaaactgaaagcaggcaagtggctggcagacccacagcctgggcaagcaggacaccctggggcaggctggacccacgtggccttcctctgtcccttcctcctccctggccagcttacctcacacttgcccacacacccagcttccttcctgggggccctgatggcacctcagagttaccaagtgggccacttcctgccttctcaggactcccacccctaccagaaagggagccgaggtacttactgcccccttccagaaagctctggccttgtagactagtgtgcgcctggaacagcatctttccccacctgatgggacctcgatgatgctggagagcttcacagggagtgaggggaagagactgggattgatagtctgcggggtcctcacttctctgggccttagtttccccacctggatcacaagggccatgggcttgatgggcgttcaggacgcatcccaatgatgggcctgtgggagggatgacccagcggcccccgcctcccctttcctcagaacatttctgggctgacttccccattggtctgataagattcttgctgtgtcatgatgatgttggcactcccccaaagccccggtgactcatgagcccccgggtatagcagggaggcccttttgttggtttttcagctgaactaactcagcagcccccaggttctctggccccagtggccaggaaccagctgggcccctgccaaggcccagggctccacccagggagtctgggcaggtccttaaccccagtgacccttggggatgggatggcccacccccgctggccctccagcaggcatcgtgctctaccatgaaaccctcatgccaagacaagggctgcagcgatttcggtttataaaacagacaggtcatggcccaggtccctttgccctggcctagccagatgttggtggctagagatcttcatcatgccctgcttctactaagtcaccttgtgtccttgggcagatccctcccctgctgtggtcctcaggaaagaggagggcgtggggaagatgagaagctcccaactgcttttcactaaggaccccttgaattgcccccacccacatggcacgagtagactcttgaccaagctgtcaggtttcccgatgtcttcccatgtttgttcctccagaaagtcccactagagcatcgcagccagctgggagggcagggctacccctgagtcctgaggagagcagctcagtccggctcagctcagcttagctccctgtcaccatgggagagagcggcctgccttaccccacccctactgtccgtcttacctcacctcgcctctcaggtgacttggagcccagcagacggtcggtcggttgcagggcctgagctgaaacaaggtgagccggttcaatctctagttaatcccaaagggagcagcaggaacaaacggcctggagcgtggggttgctgtgactcagcagaccagtcccctgccaccagtacctttctggagtctgtcccgatgcctcccagtcttccggaatttggtcatgagcaaacatgacctgctttgagtgaggcttagaggtatttgcaggctgtggttctttccgtttatttcagggtccagttagttcccagtaagctgaccctttctgtgtggggccagccgtgagttgatgtgacatgggcaacgttcccctccccagccccactgatggcaggtgctgtgaggagctgagtagaggagctcctaccccagggcgaggggttgtctgctggactttgaagggtgcagcagtgagaggtccgtgtcgctgtagtcctggcaccgagctcacctgaggagcatcagaagtggagcagggcccctgaagagcgcaagcacacaaggcacccacaccatagcagttgccctcctggaagccctgtggtggcttcctaactgcctggctctgggtgagggcgtttgacctggtggcatggcccccattctgtaatggtttgtagaaatggacccatccatggttgcagtgcctgattgcttcgaagagcatgtgtttttttttttttttttttcgtgacatggagtcttgctgtcacccaggctggagtttggtggcgcaatcttggctcactgcaacctccgtctcctggattcaagtgattctcctgccttagcctcctgagtagctgggattccaggtgcctgccaccacatccagctaatttttgttttttcttttttttgagatggagtcttgctctttcaccaggctggagtacagtggcgcaatcttggctcactgcaatctccacctgcgaggttcaagcaattcccctgcctcagcctcccgagtagctgggactacaggcgcgcaccaccacatccagctaattttttgtattttagtagaaacggggtctcaccatgttggccaggatggtctcaatctcctgacctcgtgatccacccacctcaacctcccaaagtgctaggattacaggcatgagccaccgcgcctggcctgtatttttagtagagacggggtttcaccatgtttgccaggctggtctcgaactcctgacctcaggtgatccaccctcctcagcctcccaaagtgctggggttacaggcatgagccaccacgcccagactattagtttttaccatgttttattgaaatatatgtcatgggccggccacggtggctcacgcctgtaatgccagcactttgggaggccacggcaggtggatcacaaggtcaggagtttgaggccagcctggccaacatggcgaaaccccatctctagtaaaaatacaaaaattagccgggcgtggtggcaggtgcctggagtcccagctactcaggaggctgaggcaggagaatggcttgaacccaggaggtggagatttcagtgagccaagatcacgccactgcactccagcctggccgacagagtgagactccgtctcaaaaaaaaaaagaaatacatgtcatgaagaacacagatggtgcaggtctagcttgttgatgacttttcacaaactcagcacagccacagaaactgctcctagatcaagaaacagaatatgctctgcacccaggaagccccctcacctggggctctcacagtcactggccctcaaagggtcatttctgacccactccccaccctccgctccattgttggttttctcgccgtcttttgttggtgcgcaaatcttaactgtacaattggctgtacaccctcatcacaataaaggccatcgtcatctccccagaaagttcctgggtacccattcccagccaatctgccctgctccaggcaaccgctgatctgatttctgtcacaatgggttgcatctctgatgctgagatttcccagtgttgctgagtagtatccgttgtatgaatgcacagtttgccgggtcacatgttaattcaagtgtttgacttgtttccagtttggggccgctatgaaccaaggctgctgtgaccattcgtgtgcaggtctttgtgtggacttgcactttcatttctcttggggtggaacggccaggtcacaggataggtgtgtgtttcacttgatcagagggagcacccgcaccacctcacagctcaacttcagccattttcattttcttgccttactgcacttttcttgttcctgattgcttaaagggatgattaatatttcagcatttcctataagtgtgatatttgtagtatttgtaaggatgatggtttgggggtttttttgttctttgttttttggtggtggtttttttttttgagacgacgtctagctctgttgctcaggctacagtggtgtgatctcggctcactccagtctctgcctcctggttcaagcgattctcctgcctcagtctcctgaatagctgggattacaggcatacaccaccatgttcagctaagttttgtatttttagtagaaatggggtttcaccatgttggtcaggctggtctcaaactcctgacctcaagcgattccccgcctcggcctcccaaagtgctgggattacaggcttgagccaccacgcccagccagaatggtgttttatagatgccctttatcaagttagtgaagttcccttgcattccccctctgctaagagttttagcgtgaataggtgatttctgaaacacttgatctacatctgttgggttgagcaagattgctagatttaaaaaatcaaaacatagcagtaggcagagagttcttagaggttttttttaatctcttaatatggtgaatttcaatgatttttttctgttaatatcaaaccaactttttatttacagatgtatttattctgtaaataaaaaacctaccgtttttaacattgcaggatttggtttgctgatgttttcttctttttttttaaagagacagggtcagtgggtcgtcgtggctcacgcctgtaatcccaacactttgggaggctgaggcgggcagatcacttgagcccaggagttcaagagcagcctggacaacatggggaaaccctgtctctacaaaaaatacaaaaaattagctgggtgtgttggcatgtacctgtagtcccagctactccagaggctgaggtgggaggattgcttgagcccagaggcagaggttgcagtgaactgagatcgtgccactgcactccagcctaggtgacagagtgagaccatgtctttaaaaaaaaaaaaaaaaaaaacctcctgatttcaagcaatcttcctcccaccttggtctcccaaagtgctggggtgtgtgagttgtgcccggcctgctgatatttcgtgtgggatttctgcatctgcatgtgtgtgtgaatgaggcgtatgggttttcccatgtgcctttctcatcaggtttccgtaccaaggctctgtaggccccataaggtggcttgggaagtgttcccctttcttccttctgcaggaagagtttgcttcaggctggaattctcttgtgcttgcattttggtagaacccactggcaacactctctatgccagggggttgtttctgtaggaagatttgtggccactgtcccctctcaggtccattgctctgttttttgtttgtttgagacggagtttcgcttttgtagcccaggctggagtgcagtggcttgatcttggctcactgcaacctccgcctcccaggttcaagcgattctcctgcctcagcctcctgagtagctgggattacaggcatgggccaccatgcccagccaattttgtatttttagtagaaacggtttctccatgttggtcaggctggtcttgaactcccgaactcaggtaatccatccgcctcggccttccaaagtgctgggattataggcttgagccaccgcgtccagctgtttagttgtttttttgttttttgttttttgagacggagtttcactcttgtcgcccaggctggggtgcaatggtgcaatcttggctcactgcaacctccatctcccgggttcaagtgattctcctacctcagccttccgagtagctgggactacagacacccgccaccacgcctggctaattttttgtatttttggtagaggcggggtttcaccgtgtcagccaggatggtctcgatctcctgacctcttgatccgcctgcctcggcctctcaaagtgctgggattacaggagtaagccactgtgcccggcctatgcccttttaaaaaagcaaccatgccagggggttgtctgtttctattcgtctttttcaaacaccaatttccagctttgttcatcttttctttgggttagcttttaattttattaattttacttgtcattatttcctattttcttcctggtaatttggcttgcagttctatctttttctcactttttttttggagatgaagtctcactcttgtcacccaggctggagtgcagtggcacgatctcggctcactgcaacctctgcctcccggattcaagtgattctcctgcctcagcctcctgagtaactgggattacaggtgcctgccaccacacctggctaatttttgtatttttaatagagatggggttttgccacattggctggtcttgaactcctgacttcaggtgatctgcctgcctcagcctcccaaagtgctgggattacaggtgtgagccaccgcatctggccctttttctcacttcttaagtggaatgcttagctccttatttttgaaccactcttttttgctaatgtaagcacttgaggtcacgtctcacaaatgtggctacatggtacttctgtcgtcccttggttctactgaattgaattttcaggttttctcctggaacgcaggagatgcgtttatgtcttctgggtcagggatggagggctggcacaggcttgaatctcggggctcttctgtctgtatatcaggcaagacagacatgcttgtggcccagtagtgatcctgagtagtgcccagatcaccaagggtggaggatgatgtatgtaggtcgtgtccccagccacttctaaccacacacctgttccctctgccacagggtgacctggccaagaagaagatctaccccaccatctggtaagtgtgtcccaccactgcccctgtgacctcccgccagggacaggcctggtcctgccctgcccgcactggttacagctgtgccctgccctcaggtggctgttccgggatggccttctgcccgaaaacaccttcatcgtgggctatgcccgttcccgcctcacagtggctgacatccgcaaacagagtgagcccttcttcaaggtgggtggtgtcagggcctcccccagcctggttctgccctctctaccagcccccagcatggccagcttcggggacctccccccatcccatcccgggatgctctcctcctctcctgccccgccccgcctgctctcgtacttccttgagacccccattaccagcccccgtgaccaggacccacaggtcccctcctgctgtgctctgctgcgttttctccgccaatcatagttgggtgtcatgattttggagagagagctttctccagtgtatttctcccaggtcaaaatatcctgaaatctggcctctgtcctaaggcacaggggtcccagcctggggcagtgtctgtgctgcctgctttggcctccctccctctggatgtgcagagctgctaagatggggctgaacccagtgtgggacggggacactgacttctgagggcaccctccctggacctccagggaagaccctccactcccctggggcagaacacacacggactcaaagagaggggctgacatctgtctgtgtgtctgtctgtccgtgtctcccaggccaccccagaggagaagctcaagctggaggacttctttgcccgcaactcctatgtggctggccagtacgatgatgcagcctcctaccagcgcctcaacagccacatgaatgccctccacctggggtcacaggccaaccgcctcttctacctggccttgcccccgaccgtctacgaggccgtcaccaagaacattcacgagtcctgcatgagccagatgtaaggcttgccgttgccctcccttcccgcctgccaggctggcccaggcagtgctcccaccactctatgagcgtgtccggggccggggatctgggcagcatccatggtgccggggccatccccagcgggaccacaaggtggcagcgttgctccacgaaacaccgcctttccgctctgcttccccaaaggcccggccaggccgcagggtggcagccttgctctgcgaatgcagcatggcccgcgctgggtggtttcccaacccagccagaggctcttgtcctctggctggttttgaatgcgggggtagtaaagcaaaggtcctcttctcattttcaaaaccaatgaggaagccatggcttggatgcctcctccccctgctcccctacaggccttcaggccactcagacccaccggggacccagcatgaggcaggaggggaacgggcccccggcagcatgccagcaatgccaccctggcacccagggtgggaaggcttcccggaaggtgttgagccagagggtcatctgggaacacaaggcacgggaggtggccacgggggcgaggaggttctggcctctactcccctgggagggcgtctgaatgatgcagctctgatcctcactccccgaagaggggttcaagggggtaacgcagctccgggctcccagcagaggctggaaccgcatcatcgtggagaagcccttcgggagggacctgcagagctctgaccggctgtccaaccacatctcctccctgttccgtgaggaccagatctaccgcatcgaccactacctgggcaaggagatggtgcagaacctcatggtgctgaggtggggccaagcctgggccgggggaccagggtgggggtggtactcaggagcctcacctggcccactgcctccccgaggacgaattcctccagaactcagacaagggtgacccctcacatgtggcccctgcaccacagaggcccaaggtcagttcctccaccttgcccctccctgcagatttgccaacaggatcttcggccccatctggaaccgggacaacatcgcctgcgttatcctcaccttcaaggagccctttggcactgagggtcgcgggggctatttcgatgaatttgggatcatccggtgagagctcttcctctctcctgggaggctggcacagggtggcagagccagtcaccctgcagggctactcttccctatcttgggggagctcctcctcaccctgcagttcaaaacctaagtgtctgagctatcagaccgggctggaaagggctggacccctacacagccaagcaccccacggttttatgattcagtgatagcatcaccatgtccttccttgatttaaggggacctggaagacaagggggatcaggaagtgagtcttgcagcttgtcactaggaagccttgtttggggtccccatgcccttgaaccaggtgaacagggcggggagctaaggcgagctctggcctcttccgtccccagggacgtgatgcagaaccacctactgcagatgctgtgtctggtggccatggagaagcccgcctccaccaactcagatgacgtccgtgatgagaaggtagggggtgcaccccagtccccaggagcatgccctgtcgcaggcccatctgtgacgaggcactgagctggggtgtgcatgcagagcaggtgtcctcaaccccggagaagtcaccacctctgagcacagcgtggcctcccggaggtgacctggactggcagtcatgaagcccaagttgtcatgtcccaggcctgacagtcactatgtgaccagggaaggccattgcctctctgggcctcagcttgttcatcagaatagactcgagatggaccagggtggtcctggagggtcctcagggaggggccctgagctgggcctctggcagggtgagcagagccaagcaggggcctcctcctgccctgagggctgcacatctgtggccacagtcatccctgcaccccaactcaacacccaaggagcccattctctcccttggctttctctcaggtcaaggtgttgaaatgcatctcagaggtgcaggccaacaatgtggtcctgggccagtacgtggggaaccccgatggagagggcgaggccaccaaagggtacctggacgaccccacggtgccccgcgggtccaccaccgccacttttgcagccgtcgtcctctatgtggagaatgagaggtgggatggtaggtgatgccttcgaggcccagcaaggcagaactgggcatgccctgtgtgcgggcactggagctcccactgagacactcacgcactggtccacaccctgagagagctggtgctgaggctgccctttccgccacgtaggggtgcccttcatcctgcgctgcggcaaggccctgaacgagcgcaaggccgaggtgaggctgcagttccatgatgtggccggcgacatcttccaccagcagtgcaagcgcaacgagctggtgatccgcgtgcagcccaacgaggccgtgtacaccaagatgatgaccaagaagccgggcatgttcttcaaccccgaggagtcggagctggacctgacctacggcaacagatacaaggtgccctacagagaaggagcagtgtggagggtgggcggcctgggcccgggggactccacatggtggcaggcagtggcatcagcaagacactctctccctcacagaacgtgaagctccctgacgcctacgagcgcctcatcctggacgtcttctgcgggagccagatgcacttcgtgcgcaggtgaggcccagctgccggcccctgcatacctgtgggctatggggtggcctttgccctccctccctgtgtgccaccggcctcccaagccatactatgtcccctcagcgacgagctccgtgaggcctggcgtattttcaccccactgctgcaccagattgagctggagaagcccaagcccatcccctatatttatggcaggtgaggaaagggtgggggctggggacagagcccagcgggcaggggcggggtgagggtggagctacctcatgcctctcctccacccgtcactctccagccgaggccccacggaggcagacgagctgatgaagagagtgggtttccagtatgagggcacctacaagtgggtgaacccccacaagctctgagccctgggcacccacctccacccccgccacggccaccctccttcccgccgcccgaccccgagtcgggaggactccgggaccattgacctcagctgcacattcctggccccgggctctggccaccctggcccgcccctcgctgctgctactacccgagcccagctacattcctcagctgccaagcactcgagaccatcctggcccctccagaccctgcctgagcccaggagctgagtcacctcctccactcactccagcccaacagaaggaaggaggagggcgcccattcgtctgtcccagagcttattggccactgggtctcactcctgagtggggccagggtgggagggagggacaagggggaggaaaggggcgagcacccacgtgagagaatctgcctgtggccttgcccgccagcctcagtgccacttgacattccttgtcaccagcaacatctcgagccccctggatgtcccctgtcccaccaactctgcactccatggccaccccgtgccacccgtaggcagcctctctgctataagaaaagcagacgcagcagctgggacccctcccaacctcaatgccctgccattaaatccgcaaacagcc

SEQ ID NO: 498 - DNA, 9647 bp, Homo sapiens
  source 1..9647: mol_type = other DNA
cagcacctgggaaacgcccgcgcggtttggggcaggcgtggccgtcggggcggagggcggtggccggccgcggtccgggcgtcaggccgggcggcgggggcggcagggaggcggcgctctggggccgcaggcggacgtactctgtgagcggcgcccgggcgcctgggcaggcgcctcccgagtaccggcgcccattttgcccgcccgctaaggagacccgtgcgcggcctacacgcttgggggacagccctttaagacgacatctccgcgaacgccggcctcttgagccagggggacgctcttttgaaagtcagtcccaaaacagttaaggttttattttattttgttttatttccaagtcacagcccccgaatctcgtacaactctccctggaccacttccggttgccggcccgcgcctcataacttcggttcgagtgacctcggcccgggatgcccctcggctcaccccgggctcacgtcgcgatcctggcttgagtggcccagggtgggagacctggaagttttagcctagctgttctcaaggcggattaattagcccaagaaacattatattcatgtgagtaaccttttgcagaaacagtgttatactgtatctgaaaaagtatcactcttaagcttggctgctgctactttctacaaaggcttttaggtagctatttgttggatacagggaaggggaaatggagaacttcagtttttattcaagttcggatgtatcacattaggtatccagaatgcaagtttcctcgggtctccttgtctcgatgatatcagacagtaaaaatatatgtaaaagtaatttttatttcgaggtatgtcaaacgtgccaaggataaaagtacagatcttccaactcacaagtctaggaatcacacgtggattttgaaagcgattctaaatcaaagcacaatatatgccgtgccgcctccacagcccgtccgtgttcgtgtctttgatttggttttctactttgtgtagttttgaagccaggcaggtatggcagtactggaaagggaacattcccaaggtgctacttgaagtgttgatgctttgctcttttctcccaagtcagttccaacccaagtctccccacacatagggtccccatccagtgcaacgatctgtaatgtgcacgccagcagcctccgtttttacctaacgatctgtaaggatcacatggcacatctttctataattaatttgatcatgatgaaggttggaaaattttcgtgtgcagttacattggacctgtctaaattttctcttgtttcaattttatatcatatgttattttcagttactgtttgtggctagtatgccccgtcctcatggagcaggaacggctgttcttattattatgacattaacatttggtgatgggatatagtgcctttaggcactttcaagaagaaaaataccttttgtttgttatcggcggtagtcaatctcatattccagaatgaggttcactaacttttctaatgctcatggctgccttttacagctccaggcatttaactggagtagaacaaaattattaacatttatggcaagcttattatatgctagatactaagcatttatatgcctggtacatgtaaactgccccatttggagtcaagctcaacaacttccccactgtgtgaccttgagcaagttacctaacttctctgtgcctttcttttcctcacctttaagtggggatgataataattctgcccacctcatagcgccctatgaagattgtgaaaattaaatgagtcaatatatgtaaacatataggaaatgctaaataaagactatcatgattaatatgttctttaattctcattttacacctcaggaaactgaggtggagagacgttaacttgtccaaggtcacaaagctagtaagtgacagactcaggactcatacacaggcctgggcctgtgttcttggtaatttcactcattgtaattggacgagtttattaattgacttctaataaaataagtgtattcaactgatcaatgtttaaaaactgttcatcaacctggcaattaaagcaaactatacttttttaaaaaagacacaaaagaatttattctgtaaaggaaaaatgatagttttacttagattactacctaaggaagcccttctatcttatatgtcatccatttaaaacctaatttacaaaatgccttactaagaaattgtctgtcttggccagtgtgctctctggccccgaaatcaaggtgaccctcatggggacaatctcttctagtggatgataaagttatgcagttatctaaacatttttggaattcatttgtatttgtagctggcagtattccttgagttgagttgcacaagtttatattccatgtattgtattgcaccttgtacctaagtctatgttgaggttttaaaagattcgtcttagttcgagaagtcctgaattttgtaaacaagtatcatgtgcaaataaaatgttctctagtcaaataaatttgggaaatgttaacataaagtttctttactgcataacttgccagaacagttactacactaatgtgctttatgactctccaagattcccaaacttatttgaccaaggaaaatgttgggagcaagttttctaagaatcacatttttccactcataaaacctgtgattgtataggctttgatctgaatccctctccctcagcctttgcatttctctgctgaggactttgttcatgctcatatggtgacttctctgtcccttgatcactgcagttgtctttctctgggcctgcatgccctctgaatgctagcacacacaattccaggatactgtgctgagaggtggttcccaagctcatcccgctgatgcccagcatgttgacctttgggtcacagcagcacatcacactgcctttcttctgagaatattttgtagtgactcataggcctctttgtagtgactcagtaactcagaccatcatctccaaactctttgccctctattccactggcattatttccttttaatgtcaatataaccaatgcaattttgttttccattcaaaacaaatttaaatgtcaacatgttggttgttgctaggacctatctatgaaattgagatggtcctgaaacccttaacacatggtttccacttttttaaaacagttattggccacacttaagtcttctgtgcttgaaatccgaatttaatatattttattttgacattagtatttaccaggtttttatttgtatttctcttttccaaagctctgggaaggaagagaggcaaaacaactgtatctgcaaatgggaaaaaaggggggctttggaaaaaaattatatatagccagaggcttatgcctagagaatcaatctctacccacgtatacatagccaatcatgacaaccactgtggcgttcctttgtttcccttccctacccaccatacatatacacctgttcactgaaacattgcttgaccagtacctgagacttggggtgcccagaactgtatcattcctgctattgagcagaatacaatactgtgctttagggaagacaggacttgtgaaataagcaaagcaaatgtgtaaggtgactttgtttaaatataaatgctacagtagtcaaaagaggcaagaattttctaaagttttcatagaggaggcaggcacctggactctgctataatagcactaagataggcagagaggcccagggaggcattttaggcaagtggaaaacaagagcaagggtatggagctagaaatgagcctggtatttggggaaagttggtctcaactgcagtggtagttgtagtgcctgctggaattggtgacatataggatgtagcaactgaataagaggaagaaatccaagataattcataagttttgagtctgcaggatcaggaatggtggtgttgccattgagagaaatcaggatttggttaaagagaaagtttagacgagtttgaaatgagagagcacatatgtatgaaaactaagacaggagcttacaccaggctcagagtcagatgcactcagggtataatgggtgaagcatctggttgctctcgacagtctcactttgaggactctaacaaccaccctcccacgctgcatttcttttcccacctaatgagaatagcaggtctttgttttgaggggcagctccccagtgccgtatctatactctggccaaaggtagaaatacagtacaactgcgctataatgctctgagtaaggtctagaagattgactcatgcaaaatgcacatcaagttattgtgaggtcctgaaatgatatctggggcttgggcagaggatcgttatagagtttgccctaccactcaaatgctttgggaggtatgcttcctttacacctctcaaatgtgcttctggtcttctggcttaggaagtcaaaatttaaacctagtcctctatggaaaaatgggctcctgtaacatcctgcagaattattaaaataaaacaaggacctagatggataactttcatttgcactcactcagctccaaatcagcatgatccccaaagtctcttgcagctcagaaattccatgaagctagcttacttttcctaacaagaaaatccccttctagaaatgcccatccgctatttgtaaactttcttagtaaactgataaatagatcatttgcccttaaaacaaacttttaatttcaactctgaaagacatgcatatatgtccttcagaatcttaccttttaaaatggaaactgcttggaagtggcttttacctggggaatatgacatgcatgtgtctgttatactgccttcctgccaaaataagtgtgtctttaggcacgctctttgcatattctattgctaactacattttgccagacactgcttgtgaatgcagtatgtgtgagaccactgcccagcttcctgtagtgctagtcctacatttccacagaactcctcacctagccaaattcttgagcgctttgcagtcagcagcactacctgaggctctgcctgagtgtcactttagttgtcttgcagaaagcttcagatgtccttggttctatttaggttgtgcaaatagacatatgaggtttggttctggttagtggttgctagtaccagatcaccttgcttactggtgagttcattcaaacccaaaaagtcacacctgtgtcctgtgcgcgggtgctgcaggcttaggtggagaaaagcagggctagaattggaacccaaagcccagaatggcaggagaggatgtgggggctccacccgatcacctctgggttcaccaagagggtatctaccgcgacgaataccagcgcacgtgggtggccgtcgtggaagaggtaactgtttacattttgcttatttctttgattttgctttcaagtaacttggtttctattccagtctcaatattctgaagtctttggttttatttttgatcattcctttccattaggagacgagtttcctaagggcacgagtccagcaaattcaggttcccttaggtgacgcagctaggccaagtcaccttcttacctcccagctacctctcatgtggcaactctacccggaggagcgctacatggataacaactctcgcttgtggcagatacagcatcatttaatggtacacatgttgcttaattattttccattgtactgggactctcgtaacagagtactccataaacttttctttttctgacaggtcaggggagtacaggagctgttgcttaagcttttgcctgatgactaacctggtatgtatttctatttctcctctgtcctccccctctttgttttggctctattcagttgtggtgattttaatgatttttttttccaggtgctgggattctacgaagatatgctcctttgttctgttcagtatttggcaatcacttcatccactactgcagtgcacccacccttgggcctggggggagggagtgggttgaaaaactgctcaagaaacagaagtttagcaagggtcatgaagaatactgcaagtgaaactgcagagagaggttacgtaggcagaaagcaagtcaacaaaagcacttagtcaggatccgtaacttgaaattgactcctttggaaattgccatagaacccttaatggacatcatcggctggacctgggatctgatgaatcccacaaaagtcagcaccttctacagaacagatgccctgatcaccaaggacttggtactgatttagagagaagagagcagctcctagcagcatcaacatctatttgtcgcttatttgccctgcagcaattcacctgcctttccttctcccatcctgtaaatatcctaggttttgctccagtgtttcccatcccagtactgacctaatttggatctgctgagtatttagagggctctgaaaagagatatgcattgatgaaattagctacaaaggcttgtgggcctttttttctatctgaaatcgtgtcttcaaattactggaagttgctgatcaaaattgtgggctcttgaattcattctctgattacagatattttaaataagctggtttctataagaacttcaagaaaaaccattttagctgcttaactggcacctttctcaggaagtaataacaccaaatattgctgattcctaggaaaacatttactacttgtaaagaatttcctgagttaaagtagttataacagtttatatacattaaaagtaaggttttactttaaaaaaaaaagtcttgggaataatagctaccatgtattggagtcctttccaggcactattgtatgtactttatatactttatcacatttaatcctcctgtcaatgctttgaggtaggtatgattcccattttatatatgagtaataaaaaaagctcaaggagtttaatcatttatcaagggtttcttctgcgaatgatagagccaggctgcgccgtcggctcctctagcctaacgttggtttacagtattcaaaaagagttgattgaattcaaggttttttttccatgtaaagctatttatatcttccaagcctaatgaaatggatattataaaaatacagttgattcatcctatgtttgggaagagtatttttagtgtaattattttccagcaattgtaagggcatatactgcttgtctcagaagaaaattccacgtagaggggctttaaagtctttatggaaaaaagaaaaataaaaatcatttttcttgttttagttttctggatatgccgcagaaggatccgtgccagaagcaagcctgtgagatacagaaatgtttacaaggtagtatattgtaaaatgctttaaaaatatttttccactgtgaactaactataagagaccaattattcttttatctgtattaactcttttttaagaatgtaacgtatatgtaattatcctgaagattctcttcattgtatcatcaaagatgcagaaaataaaaagtaatgtgatcaaagctaggggttttcactccaggtgattagcatcacctggagatctttaaacacttacctagaacaattcagacttcctagggctagggctaggaaaaaaagggttttttgttgttgttgtttgtttttactaaaaggctagttttaaattggttggttatacttcactgcagctgacaattcactttttaaaagcaatctggaagaggtgcggttgaaataacaattggaattcaggctgccaaagtcatcaactaactcttaaaggcagaagtgaatctcgactaaagcatatttgaggtgatttgtccatttgtccagctgctaagtttgaccaaatgttagaggattttagttttctaatcagtgaatgactgttgccagaagagcaaatagaaaaagctataaggctatctgaatttgaaaaaattttaataagttttcctcactagtaaagtaatagatggagatggaaggtcatgaaaatatagaaaggtatgaaggaaaaatgttcagagttcccccaaagattcaccaccaaagaaatcctttgtttgtgtatctccttggacttttagctttcattcttggacttttcattttttgatgttagcaatattttataaaatcttttagattaaaatctggatgtataataatgccattttagtcaaacttcttccctccaactttaaggaaaaggaaaaagttttttgcatttaattccttctcccaaataaaaccttaccttgtttgaaataacccatagctaagggaaaaaaataagttaaaaagagctggtgacacccccttggcagtgtgggaggattaagaactggaaagactaaaagatgacaagcaccgttataaggactttatacgtattaagcctttcatccatgaggtagatgctactatgacccccatttcataaaggggaaaacagacacacaagttatgtaatttgactagggtcacatagctagtaagaggtatggtgggaatttgaacaccccccgccaaccccgcccttggtctagctccaaatctggactgttacccaccttgctatactgcctttctaatcagaattgtctttcctatcctgagctaactaccatgtactccattttagtactgggggactcattaactgcagctgacctagagtctttaggtcaggtcctccttaacttagtgtttatgtatagtagggatctgcaaatgttttatgaaaaaggccaaacaagtaatattttaggctttggaggccaaaggcctttgttgtatatattgtgtatgtgttgtgtgtttacaaccctttaaaaattaaaatccatttttagctcccagctgtaaaaaccggctgaatttgaccctaaggctgcagtttgccaattcctgatgcacagccttagtaggggaggtccaacaatcagcttaaactgtatgcaaaataatgtgtggtgtatgtgcattttcctaattcatcaaattagtgaccagtaataaaaatgatgttaaaaaccaatgtcctagaaaaaggtgcatacatgctattaaccttaaaggaaattatatattaaaatagctttcaaccactttgtaaatcatactttccctaacgaacctgtcgacaggtctctaaattagaaagaattcagtggactttggtatatcttctttcttccagttccataggtactgaaagtgaaaaggggtgggaagcactgatctaaacctccctgtaccttagtcctatgagatcatgactagagtctgcctgtatgtttttcagccaacagctacatggaatcaaagtgtcaggctgtcatccaagaactgcgtaagtgttgtgctcagtatcccaagggaagatctgtcgtctgttcaggatttgaaaaagaagaggaagaaaacctaacacggaagtctgcatcaaagtaaagttcttctgaagtgctgctccatgtttccaccaaatgaattttttttatcctcctgactcttcaggccaggtagcagcaaatagcaaatgaaaaagtcagctacaaaagttaatgaatatgccatctatgcagaacaggcagaaatataaacacattaaaagacaaatatgtagaatgtaatatactgagctgctaaaataaacctgtttaagaga

SEQ ID NO: 499 - DNA, 32742 bp, Homo sapiens
  source 1..32742: mol_type = other DNA
ggcctgggcggagcgcacagcgctgggcgctggggaggctgcgccgcagcacccggttggtcaggaccaagtgggcccgaggcggacgtgagaagggtcgggccaagatggcggtgcaggtggtgcaggcggtgcaggcggttcatctcgagtctgacgctttcctcgtttgtctcaaccacgctctgagcacagagaaggaggaagtaatggggctgtgcataggggaggtgagtaggtctgttagcctggatggaaccctgctgagcagtcccagtgtgtccccggggtgggtgccggcagctcccagggctgcggaggccacaggcatcctcgatttaggtccttggacaccctttacatagctctgtcgcggggagccccgtttcttctggccgcctgacacttgtttagtctcctgcgagcccccggcggtctgtacaggccccgggagccttgccctttctcctgtagcctggggcttctctttagatctgcgcttttcgcccggttgaccaaaactgcaaggcaggtcagaaagacactggagtataatgaggatgtccgggtattacgacgcagcagctgaccacagttagagccccttgcctcgcctcgagtcttctgtctagggagcagagatatcaaccaaagcatttgaagggtatcgaagagcctaacagaaggtgcggggcttgaaggaagcaaaagtttccgctgcattgtgttgaggaggggccgaagaggatgaggaaatacagtttagctgtttacagtctaaagtaattctccagtctttcataccatgtgcgtgaacacatgacctaattgtcatataatctgcatccatatatgtcaaacaaacgtaatgtgatcaataatgttttttgctttttcccactctagttgaacgatgatacaaggtaagactgtatttgtttactcatatcttataatctctaagtcattgttaacctaaaattatggcgactttggcagtattgtgtccggatcgtgtcttaaattaattaccattatcactccggggctcccttaatgatacaaccttgaactttggtttctgccttacctcctattcagttgagatatgggataaacatcttaataagcattatcataattgttgcgttttaggggtgagacagagcctcactctgtcgcccaggctggagtgcagtggcgcgatctctgctcactgcaacctccgcctcccaggttcaagcgattctcatacttcagactcccgaatagctgagattacaggtgcccgccaccacacccggctgtcttttttttttgtacagacggggtttcaccatgttggccaggctggtctcgaactcctggctcaagcagtctgcccacctcgacctccccaagtgctggaatttcaggcgtgagccaccacacctggccttgctcagtgtatttcatgttctgtctccccttaaatgccagtgagatatcagtaattttcttagtgacagagagcatatacgtttagaggcatttccccattgatccattccttcacgtaaattgacagtgacattgcctttcctcctgatggacctcagtgatctcagagatccccagtagcttcaatacttgacgtggtgaaacctttcggtaacattttaatttaaacttcaaatcataccatagtatacttctcaagcccacctccttagttcccaggattccaggaatttagctttgtccattataactttatacactcagccacttgtgcatgtgtcccagattgcttctaacagatagagtgcagctctagcctcaattcagtttccctcctcttctttggtctctgctaagatttcattgcaaaaacagttaatcctgttattttgctttaattcctttttatattccaaaccccacttcctttttttttttctaatttattcccagtaggagtgactccaaatttgcatatactggaactgaaatgcgcacagttgctgaaaaggtatgtgtgctaaaattttgcatgatggaaacttgcagttggggaaagatttctgtaatccagtgatctcagccagagtatgcggtttctggctggatgagatattctttctagtaaaatcagatgaagaatctactcactaggaatgggacctaattttctgttctttgtagcaaattgtctctacttgatcaagattaataatcactgtcagtaccaccctcttgctgctctccttgctgtcactgcctgttttctggcccttctcccactttccttgatactttggcatccttgatactttcacatcactattacctctttatctcgaattccaacatctactcatgcagccctctcttcttaaacaggcaaactgaccatagcatcatagttcttagtctgccttgacttttttcctatctgcactcctacaccatcttttgtggcatgctctagccttgatggtctagtgtaatgcttctcacctaatcgtggtatcggaccagttaacgtttcccccagtctgtcacagaccgatgcttttgtaaaatacaaaaaaaatgaattacttcccctcctcccaccaagttatcaggccacaccttcatctacttattactactagttacaaacttctccaccttaatcactttgcatctcttcccatatcaaagaaataagtcctcttcctatccaaagctgcagcttcttcagagaccttgtttatcaaatgttctgtctcttttctgggtcttctccctgtcacctggttcttttaggataaacatatgcttaaattactctcattttcagaaaggaaagctacttcttaatcccgtatcttcctgtagtcagtactcttatatccttcctttaatagccagacttcttaaaagaatgggctacaattactactccttcaccttccccagtcaaacccactgaggtctggtttctaattctaccttcggtggattatttcctggtgcttatcttcatctttctccttgaatctctaaactctcatgagtttttgttggttttgttgtattgcctttattcctgtttcccccttcccacaatcctttgtggactcctcttcctcctctgtctatgcattaaatattactcattcctcttaggcactgaaatctctgactaaagcaagaaagagagaaagaaacaattcaccctgggcatcagttactaagatacattccaatcttaataatgtaattttattattcaagatttcatgccctcgtcttgagttttatgtcagtttgtactgtctaaattagatattaaactttattagttaagctgcctttttagtgttgcatagtgtattttttatccttttatttttagcctttctgtatactaatatttaaaatgtgtctcttgtgtctcttattagtggtaaatactttttaaaaaatccagtgtgataatctttttaagtggagtattcagttgaaaaacaaaacaaaaataaaccacaaaaaaagaaatatcatgtgagccacgaatgtgatccatatacataattttaaattttttagtaatcacagtaaaaaggaataaatgaaattaatttgaagggtgtattttagttaacctaagtatctgaaggattattattttaatatgtagtgaatattaagaaatgttgagatattttacattccttttttctcttttgtgttgtctttgaattccatgtgtatttcatacttgctgcatatctgaaatcagacctgttgcacagtgaaaatctatagcttgtttcaaaagccttctctcagatttcacccttgtcccttcaacatctgataatgctaagcccactctttcccctggcccttcttgttcttccccacactaaatgtggccactccccttgattcaggccaagacctctgctccctttctccacaccttttttgtccactcataaatgctttattgattcctgcattgatgctgtttgagtctaagctataatcccacttgcctgctaaaaattgccatattgtatatctctcatcccagattatctcatctgaaaacaagctcatcttctttccttcctgaccctttctaaacttagatctgcctcacacgttctacctagtttcaaccttgaaactttagagtcctctttgaccgtttcctgtccaccatcacccatggtccataagctaccaaatcttgtagattcattctttttaatgggtctcaaatctgtttcttccatctctgccatctgcttagcccagtacttcattgttacttcatgtacagtttatctgaaataattttttttccttcgagttcatcctgcaaattatggcttggcatttgaggtcttgtacattctcactccaactttcttagctttgccatctgccatttcacctcaagctctgtatctaaatcagttgggtaagttgtctcccagacacctcattcacactttactacttccattcggcacctgtagaaaatctgttccccccacttcccacaataatcaaggaatggatacacttgtctgccttttctatgaagatttttttcttttttagattcatattctgcttatgtaaaagattacttttctaatataagtgagttctttcctctgagctcctgtattagtctgttatcacactgtaaagaactctctgaggccgggtgcggtgggttatgcctgtaatcccagcacttcgagaggtcgaggcaggcctgaagtcaggagtttgagaccagcctagccaatatggctaccaaaaaatacaaaaagccgggcatggtggcgtgtgcctgtaatcccagctgctgaggaggctgaggtgggagaatcgcttgaacccaggaggtagacgttgcagtgagctgagattgcactactgcactccagcctgggcgacagactgagactgtgtcaaaaacaaaaaaacaaaaaaacaaaaaaaaaactccctgagactgggtaatttataaagaaaagaagtttaattgactcacagttccacatggctgggaggcttcaggaaacttatgatcatggtggaaggtgaaggggaagcaaggcatatcttacatggtggtaggagagagagagagtgaggggggaagtgccacacttttaaaccatcagatctcctgagaactcactctcacactattatgagaacagcgtaggggaaatccacccctacaatccaatcacctttcaccaggtgtctctcctgatacgtggggtttacaatttgagatgaaatttgggtggggacacagagcccagccatatcagctcctatggcattgacttactacattatcttagtggagtttcatgaatgacaacttgccactcaaccatgtcgttagcacattgaaccctttgtcagtgctctgatttatattcctttgtgcaatacagtgttttgtacatagttgtaagtcaaataattactagttgatcatcctaaaagtccttccttgatttaaatattagcatatatattttatatttttgtgtctgaaatgtatatattgaggttgggtgtcttttatttgaaacatttcattattcgtgagaaaagtgtcagttttctaaaatggaatattttatctgatattataataaaatgcaattctatagttgaagggggatgtgttattggagagagctgtaagtaaccatttctgtggattttcctttaggttgatgccgtcagaattgttcacattcattctgtcatcatcttacgacgttctgataagaggaaggaccgagtagaaatttctccagagcagctgtctgcagcttcaacagaggcagagatatccttactggtcaatagaagcttttatgtgctctggggttcctgggccgcattgctgcttgctgcagtcatcctgctttaggtggtttcacaagttttcttcccttagatccaattgtttggtttttagaatttctctctatttctccttttgagtggcttttattggaagaattagaaattttctgacattcctgctcctaaatgccaaaagatctcagggtcaaacactgcgacaatgaactctgtgtggagtcccctccatcttcctccctagtcttctctccattcctccctgcccctccttccagttttcctagtatcatttaatttctaggccatttactatcttggtctctatcctcttgagagattctcttttgtgacttcctctcaaaaaatgcaatgctgggaactgaatgcagtgtttcatgttacatataaccccaaaatgatcaaatggggcatttgtttcctgtgatttgtttcagtatgattccgagtgtcctggccggcgcctcgtaagtgaatatgaagctgatccccatcccacttttgttttcttcagggatcctttccctggcctctcgtagtttcctcacatgcttccgctcatcagtgatctgctgaatgctcaagtgggaccctcaagtgcagatatgcaggctatctctctgcagctctcctctctggtcctctgccctgcaaacttcagctgcaattactatttgttaagcacttactaggtgtttgccaggcactatgctaaacaccgtgtgtggattattgcacttactcttcactgctctgaaacattattcccctgcctcagtctgcagctgaagaaatgggctaagagaagttaagtagtttctcttggcatttgaaaacttgaaaatatatcttagaaatattgtttctcagacttagttgtataaaaaggattattatattttaatataaataatttgcaggaaaactaatgagcattttacaggataacagcagcagtcttgaaagtgacaacttctgaagatttagaaaagcttttcagatagcacagtggtaaggattcgagtgatgaaacatcagctaaattaaacttgaggatgtaagtatatatggcattggaaaccatgtggattctagtttagaaattttggctttaaatgggcattatgggaaactcagcattaatcttatttcattcttttgttgccattaaattgtaataagcttattttaaacttcagggtgctttctgagcccttattagcatcataaattttgttcccacatttttaaagtaccttgacagacacacaggttggctgaactgacaggccgccccatgagagttgtgggctggtatcattcccatcctcatataactgtttggccttcacatgttggtaagtatcatggggttgcaatgtttattgttttcagaaattaatatcatgtttccttttccattacatagggtatggttattttaaaccaaaatttgactgtcctttagcagatgtcattattttgatttattttattatgtattaaaagtaatgatttatgtcatattgattgtttttaataagtctgtcagttgatataaaaaaattaaactgttaactgaaaattgctgattgctgaatatcattactgtccaggacactcccattctgcagacttaaagatattaaagggtaaaatttgcaaaattgatttttacagttgctgtttacgtatagtccattggggctctcaatatacatctttacccttctaatcagtgtaatgtaactaaattgctttctttctacctttacccctttttgagaatcatggtgggtttttttgtccgtatctgcgtctccagaaagaaggagaataacttggggagagtgaactaatattcatgagcacttaactatgtgctaatggtttacagatgttttcttctctaatccttgtggcaacctgtgagttagagatcttacccccattgtacagaagggtaaacaaagactcacatgaattaagtaagttgcagagctgaggttagaacccaggtctgactcccaagtctgctcttcccactgtgctactactagtcatatgggtttgagttgatagcaagttatatattcatctacactgtgatacgaatggcaaaaagtcatcagtggtacagtcccagactttaatgaaacacgagtggtcctaagaaatacagtattagttctcagtcttgggtgggtgaggatgtttctcagaatcacctgagaaagctttcataaaatgtgcctgccccaaattaatctttcctagaccctaactcaaacctactgtaacaacctctgggagtaggtgttaggtggggatattgttgaacgcccctagttaaatactgatttagaataagggagatgacagatctaccttctcccagatttgccaaactttaacatttggcaacacttgctgtatcattctcttatacatatatgtatatacgtgtgtgtgtctgaagataattttttcctgaagtattagattaagttgcagacatggtaccttttacccctactcttcactatgaatttcctaaacacaaagaaattctcttacataaccatgatacatttataaaaattgggaaattaccattcatataatagtattatttaaattacagaccttattcagattctttaattggttcactgatgtcccaataaagttgtttttataactattaatatattcctgtaaagccttaatgtcactgaaaaaattcagtggctgatttgttttcctgtcattgtcaacactgaaatcagattggcctaaaatttttcccatggtagtgccatcagccactaatgaagaaaagtttgacacatatattactgaacaattattttcactatagtaataagttacaatgggaaataaatacataaaatttggtggtaaaaagaaattccctacgaatttaaggaaaaataccttataagtatctgaagcagagcacccagaaaatttcagagttcagagaataattgaattctctcaggggagaagatctgagccattaaacaagaacccaggtaggagtttgtaatgcagcagtaacagtagtgggaacatttcaatctttatagcagtcagaaaaaaaaaaaagggatactgcagaaagtaactgaaaaaaatcaactctaaattatgaaatgattaagaagccatgtgcaaataattcaagacaaaatagatttggagtccagagtatagatatcctacctgaacaagaattagaatatgcaataagggctatgtgtaaagaaagtttagagagttaccatagcatgagggttgggaataccagctttgatttagttggagactaggtctgtgttagcatcttgtttcagtcacttactagttgagaaaatattttaacttgtctatgcctctgtagtttcctctctgtcagaaaagaacatagtctcagagttaagagtagtatatgaaaatcatgtatacaacaccttgtcccacacttaccatggtagctgttcacctataaaatgagcaacaaaagaaagacaccaaagcatttatttgtaaaactctcaaggacatggagagagtatatgaaatatctatattgaagggcagacaatattcaaaggattaacaatgaggacacatcaggtctctcatttgagatcctgagatctcaaaaatatttacaggccgggcatagtggctcacgcctgtaatcccagcactttggcaggatgaggtaggcagatcacttgaggtcaggagttggagacccacctggccaacaaggtgaaaccctgtttctattaaaaatgtaaaaattagacaggcatggtggcgggtgcctgtaatccaagttactggggaggctaaggcaggagaattcacttgaacctgggagatggaggttgcagtgagctgagattgtaccactgcactccagccagggtgacagagcgagattctgtctcaaaaaaaaaaaaaaaaaagtacagtaatgaaactatgggtacaactaaagaaaaataattgcccaactgagctggcattcacactcatctccaaacagccttttaagaagtagtaccttataaatgtatgcaattatgatttgtcaattaaaactagtatttaagaaagtaaataaatgggaaaaaaagaattgagtctaacagaggcactgtattgcattacaaacctcagaaaaagtgagcaatgaataaaaactaactacctttaacaggaaaagaattccaagctgtggtaaagagtgacaagtgagaaagtgaaatctttttttctgttaaaggaaaggtataattttagttggtgagggagagtgacgtgaccatttcagtgctttttatgataaggtaattagtgcaattaggttaagttccagtgggctaggtaacactgttttgaacataatttaaagggatcattccataaaacgattcttcaggaaatttactggatacctgtatggaataataaggtcatggctcctgctgtcctggaccttaatgattttgttggggggaaaacagagtactaaagggaaaacaatgagtaacatgataaagaagaaatgagatgtagtccatatagaacatttgtacttgtaaatataaacaggggaagcatctataaaaataaaagccttgggattaggaaaaaggaagaataagatgttactaagacaagctgcaaacctaaagacttgaacaaaaactaacaaactaggttaagctgtatggggaaaataaagagcagccatcatcagctaaagggtaagtgagagaagataggtcatttattctataacaaaaggcatagtaactaaggaaactctaatgaggctgaattatgtgccctaccgtagcaacatacatgtacacaggataaagttttacatgtaaggaatggaaactagttgagatagaagaacttgataacccactttcaaaatttattcattccttcaaaagaacataaagtgagttggccttcggttgaggttggcagtggagcgtggaggggacagtgaacaaaagcaagggtgaggtaggacaagcacacacacaaagactttaaaatttcatcttaaaagaattttattcttacagaaaaatttcaagaatagtatgaagaaccagatgcaacaattgttaacctttggtcgcatttgctttatcatattctccctccctctccaacatacacacatgcacatgtgcacacatgctatttgagagtgagttgcagacatgatgctcctttacctttaaatacttcattgtgtatttctcaagatcaagggtatttatttacataaccacagtgcaattgtcaaaataagcacatttaataaatacgatcatattgtgcaaactacacagaacttattcacattttgccagttaactcaatattgtcctttatggcagttttttctttccaatacaggatccaatctcagatcatgcatggcatttagccttcatgtcactttagtctcctttcctctggaccagctccttagactttttttcctctttcgtgacatagacattttaggagatggaatgttgctccatttgactttgtctgctatttgcttatgactagattcaggttatgcacttttggcatgtggtgctaggcctttgtcagcgtctcccatctggacgtgcgtgatttctctgcctcaaactaacattttcatgccactgatgaggcagaattaacaaatgtgagtcaaatgggaagaggtgataacaagcctcttctcagcctgtccatttgttgaacagataccgaggacttggccatgccaatttgtaataatatctgcaaagccaattccaaaattgggaagctgtgcatgttccatgatatctctgatcagtatgctcctactttttgcaaaggcaaaccctttcattttcaaacctctgaattccccgtttctgccttcatgttcagcaatgttatctaacattgcttcccactttaatagagaaaacaggaaccattagaaaggaatttcatctgtttctcttgattcacctacttgtcactgtgcctctcttccccttttccctcctattttatctttgcctcctacattctcaagaaccttactctgttttttatgcccctcttttttacacatctacatactttgccactatactggattcttcccattattatttctttcaacaaatttgagtgtctaccatgtgtcaaagtgctgaagataatgaatgagagaaacacggtccctgccttcatggagctttcaaatatgttcatacttcacattgaggaaaacaacaaaaacactctagtttggcttctattaaagtggatcttgctagagtcatcaatggtatccatgttgaaaatctagtgaccattttaaaatcccatcttataaaacattgacactgtcaggtactctctacttattgaaatacttcccagctaatcacgaggagtgtgtggcttttgggggaagaaactaagctgagggtcagagctgaaatacccagtccaaaaccagatggctagtaagcagcagacccagtatctgaattgagtttatatgagtctagagcctaggatttctacagcatctcactttgattgaacaagtgggaatcctattcatggaagtaggaagtggaggaggaaacataggtttggtgatggggaaagagatatagttcagttacatcatacacacacttaacgtacctgaattttacctatacagtacacgtttgcaaaagaaaaataagtgatttaaatgctgcagactatttcataaatctcccaagacttggtactgtttgtagaagttattcttttatattcattttattttacttgtaaatgcttatccaaggagacatgtacctgtagttatgttcctcattttaagatctgctcaatttttttttctagcactacggtgagttctaatatctttgtttaaaaagttttttttttgagacagagtctggctctgtcgcccaggctggagtgcagtggcacgatctcagctcactgcaagctccgcctcccaggttcgcgccattctcctgcctcagcctcctgagtagctgggactacaggcatccgccaccacacccggctaatttttttgcatttttagtagagatggggtttcactgtgttagccagtatggtcttgatctcctgacctcgtgatccacccaccttagccctccaaagtgctgggattacaggcctgagccaccgtgcccagccccaaaaagtttttttaaagtaggataggccaggtgtagtggctcctgcctgtaattgcagcactttgggaggctgaggtgggatgattgcttcagcctgggagttcaagtccatcctgggcaagatggcgagcctctgtctcttaattttttttttaattagccaggtgtggtgatgcatgcatgtatttccagctactcaggaggctaaggtgggaggaacccttgagctcaggagttggaggtggcagtgggccgtgactgcaccactgtgtgccagcctgagcgacaaagcaagacctcgtctcttaaaatttttttttaaaaagtaggatatgagaaatagtcaattattttcagatatataagaacatttccaatggcctccacatgtaattttggaaagataggctggattcagagcaggtctgccacttcacaggaacattttcaccacgtagctcctaaaaggaaatgagaaggcctatttctgaaatgtttccatgtccccttggggggaaaacagtttcagttcattcctccactgacattaaaagagaatgtctatttcaggcaagaataataaaatgggcttttaatactacatatggttatttcatcatatttcttaggaatggtgctgtgtaatatcactgtgcacaaaatcacagattcttcaagaaaactgtttcttaaatacctgtgtaattgcccacaaaggggcccagtgcatgtgacattcagtctaacagcttaaccagctctctgccgtacttgccatacagaaaagctgaaactgctggtttccaggtcagtttatgtggtccaatccgtaacctgctttcttcctgaaagacccaaccagaggaaactgaccaaaagagcatctctcgtgtaccaggcctgagttcaacagaaaacagataagcgacctccaactttttatccctgggtctgaagtcacatcctgaagagtttggttacaccagtaatgaaacatacatggtttcctgttgctttcctttcttaatttccggtgaggataatgtcaccagaaagttccatctccctctctcagtaacagggagaagtggaacaggcaattggatctcaagcagggtcttggcttgagccttggggcggtttacagagtttctgtcttgaccacggagatctttaccaatttgctgggtaggtccatggctgcctggttcccccaggactgctttgccatgacagctacctgaatgactccgaggaactgctctttggtgatttcaggaggttctttccctttaagggttcttcagacaaaatgtctgaagcgctctcgatatgagttttggtagcggccagcctgggtctgggagcagagtgataggacgtaccctgcctggtcatgcccaagggattctgattattcatctgcaacacaccttggaaatcatgaacgtcccgtctgtggtcacagctgtctgtccagtgctggctgacgtccaagctaacagccgccccattgggaaacttcatgctgatcacagtggcatctgcatcctttaaggaggccatatctggtcagaaggcatgtccgagagaaagcacagtgtccagagtggcttttaacagcaacatgcatgcgatgtccacattgtgcacccagtcttgtagagaaccccacctgcccgcctgccctcgcttcctccctccgtccctccctcccttccttgcccaggctggagtgcgatggcgcgccctctcaggtaactgcaaccgccgtctcctgggctcaagcgattctcctgtcttagcttcccgagtagctgggatcacaggcacgcgccaccacgcctggctaatttttttttttttgcattttgagtagagagggagtttcaccacattggccaggctggtctcaaactcatgacctcaggtggtctgcccgccttggcctcccaaagcgctgctcacagcgccatctggtggatccttttgtaagcttcctcaaagcaggactgggcagtggcctattcaaagcacgcagcctcgtgcaaagcacccccatccctgttctcgaattaccctagtgttggccaaataatcggctctgaaggttcactccactttatatagctgatcgtcaaaaacatacagcaagcagcagccgttcttatccattatatcccaaagatggccaggctaatgctccgatgtcattaaagcatctcatacctctgttggaggcttctgaaatgtctttggctgttctgagggcaccaatgggcttttcactcagagagaaggaaaggctgagaggtggccagcagaggtagatagcgttgtgtttggacggaagcagaatgcctgagagaatttctgagtggatgctgaggggcaagggcgagaggtgcagggtccgagcctgctgagatgagaataagtgtccataggatgacagctcctcgcgggcagcggtggctggagtgggtccctcagcgctcaggtggtctcccaaggggtagacaatgctcagagggggtacatccattaggacgggatgccagaacgatcccacccggagaagcttcgccggcgagaagaatacgccttcccacaggggaagatgggggtacgagggactcccccggaggggtgaccgaggccagtctgagcctctgggggcccaaggttgggaactcttggtagccagtggacgggcagggtcggctcgctttggcaggcgccagggtggaggtactgagcttacgtgagacatactctcaggagcattgttttaagacaaccaagttgaactgtcagacggcaacttagatctatggttctggagttctgggactagagtttgttgggcaagagttgggagtggctggtgtagatttgaagccacaaaactagataaaatcccccaaagggtaagggtagagagataaaaggactgaacactgagcctgggccacaccaatatttggagagtgggaagatgagaaggatccagcaacagagacaggaagttagagacgagtaggaagagtgggaacgtgaggcaaagtgaagatagtgtttcaagaagggagtgatcagctgagatcaggtaaattgaagaccaagaataaatcattggtgaccttgacaaaaagcagtttgggtaacatgatgggcacagtagttgttaccagtggttgtagataaaattgaatggaagtaatgcttatgaagtacctttgatgtgtgttaaaaattttgcaatttaaaaattacaaaaaccctatgagagaagcgatgatgtttattctcatttaactgataaggaaataggcttaacagtaccaagaattttacttttagcaatttactttaattctctgtactgctatagaccgttttacaatgctatgttcttttagcaatattttcagccaatttcctttgtactcattgctgggtactgtttggtctcagtctttacttaggaggacattggggagaagtcaaaatctagatcaaaaaggtatacacacaaagaatgttgaagaacagattgccaaaataagtgaatgtaagccattgggcaaaactgtaatctgcagtgtttcattgtgacacctgatcttttgtatcctttataaacaatggtctgaagactaaatttagcctctgtttagtttttggcttttttttttttttttttgagacggagttttgctctcgttgcccaggctggagtgcaatggcaccatctcggctcactgcaacctctgcctcccaggttcaagcgattctccagcctcagcctcccaagtagctgggattacaggcatccgccaccacacccagctaattttgaatttttagtagagaaggggtttctccttgttggtcaggctggtctcaaactcccgacctgaggtgatccgcctgcctcagcctcccaaagtgctaggattacaggcaagagccaccacgcctggccgtttttggcatttaatattttaatcctttctaatgttgttatttggtgcctgtttattatctcttttcaaaagttcagtaaccatatcaagcagaattaagaaaaaaatcaagtaaccatataggaggggtttctactctctggaatgttgaatttatatcacaaccacttccatacaatggcttcctgtaagattttcctctgtaattgttccacacttctattctttagtagcaagcctaataaatatgttcactttcctagaagctgtccatcaaaaggctttttctaggaaatactttctctcctttttaatttctctttctattaccacattccatagcagagctactcttgggctaggcaggctagagttattaataagttttattatttaatggcagactttcgatagtattaccctaacctagcaaaacatttttactttgatattgtccttaggatatattcctgttttgcctgtacaatctgaatcctaggaagattatatgttgctgttatctttaaatctttaagtcaatctttaaatcaataagctgtgagacacagcttattgacagaagatttttaaattttcatttattttcagatgttcgcacacaagccatgtaccagatgatggatcaaggctttgtaggacttattttttcctgtttcatagaagataagaacacaaaggtattgtgtgtgcatgtgtgtgtgtgtgtgtgtgtgtgtagggtctgtgtgtgtgtctacacacagagtagagaaaaatctctttgcgattttaataggatggtcaggaaaggtttcaaggaaaagggtcattgagtcaggacctgaagaaggtgagggaacaagtcttgtggatttcttggggaaagaacgttccaggcagaggaaatagccagtccaaagaccctaaggtgagtgtggcatgttcaggaaacatcaaggaagttggtgtggctgcagcagagtgaggaagaccatgaccatacatgccagtttgcctctgtcagtcccagttttaccctattatcctagtgaccttccctcttggaagtgtcccagtttgaatgataactcatttagttgtcctaaacaaggtccagatcttgtaaggccttggatttgactctgagttgggaagtcactggaggatgactttatgttttaatgggatctctctggcttctgtgtagactgaacagtgggcagagggtgtgggtggaatccgtggcatcagtgaaacctgttaggaagatattgctgtaatctagacaagagatgatggaggtttggtcatggaggtaagagtgaagataatgagaagtggttggatgctgaatatagtttgatggctactaatagtaacaactaccatttatcacctattgtatggcatgtacttattaggtgctttacgtaaatatgctgtaaccctgacaaaaacccagaaggagtattattcccattttatgaatgaacaaactgaagctcacagaggttaaacagtttgatcagtggccagtcttgccattctttatttggattctgtttgaattttatgttcatgtcaagaggttataatatgtgtcagttcaaacaaaaagaaaattactacttaacattgtaggtatgaattctgctaagaataccaatagtgtcttatttagtgcattagttatattctcagaatctgtgttaataatgaatattttccataaaatcagttttccagaaacactaaagttcagtaccttgaactttatacatcatttgaaatgctttcaaccttgtcatcatgcgtttatttatttattgtcatcataagtagttgttgaataagtttgtcagctttcaggatggcagtttgaatgttcaggttcttaggttcctggttcttgtgtttgttaacaattccctgctgttacatgagcagatgtttggttgtgaccatcttatgttgactgagcatatgatcctttttatagaaattaatttatggcatattccatctttggtatctcttttaacattctgcttctagagggacctttggggtctttttcaatattaatctttctttgtgtgatatttctttctttcttttttcctttgatagactggccgggtactctacacttgcttccaatccatacaggcccaaaagagttcagagtaagtatgagagagacttatgtgtgtattggagggctaatctccaattcagagaatttattgttttgtttcattttattcctttcactggtaagacactaagacactgcatttttatttatactcatttacagctctacgatgagttagaatctctttagcagcttggatactggggacctaggaagctagggtcatatgagcagtctcttcactgtaattacatcaccacagtcctgcctgacatttccttttgtacacttatcctaactgagctgctatttttcctttctctggtaaatcataaatcaaagactgaacatgcagagtactagatttgtatagattcttgtctttgctgtgtcataaacttgatttaaatgtttgcatagatccatttccttattgaaatccaattcaatctaaattagcaaatctttttttttttttgagacagagtctcactgtgtcacccaggctggagtgcagtggtgtaatcttggctcagtgtaacctccacctcccgggttcatgcatttctcctgcctcagcctcctgaatagctgggactacaggcatgtaccaccacgcgcagctaatttttgtatttttaatagagatggggtttcaccatgttggccaggatggtctcaaactcctgacctcaggtgatccgcctgcctcggcctcctaaaatactgggattacaggtgtcagccactgcacccggccactagcaaatcttaattgagtacctactatatgccatgttcattcattgtctaattgggagatagaagcaaatactgtattgccttttttcttgtcatatttatcaatttattattatagcattgtttgaaatgtcaaagaattgggaaacagatgctcatcagtacagaactgattaaataaattataatacattcatataatggaataaaatgcagccgttaaaaaaaaaaaaagcaaggaagcttggtagtaatacacaaatatctccaagatattttgttaaatggaaatgcagggtagaagaacagtaagctatgatttgtgtaaagatgtagaagagaaatagataaatacctagtcaagaaaaattaatttttaaaattttcaccacactaatgcatgcatatgcatgaaaatattgagtggtacagaagggcttataataaatagtttcactcctcaaatggaaccacttctttctccttattttccttttagttcttctgttactttgatatctctaaataatatacttatgatgttctttcttgatttaccagttttggatattttctattcttatttattattgtgttatattgctctcacaaatgaggatttagctcacttatactaccccatctccattctcctcaatgtagttatgttactattttttgttctgttggttacttttctaatcttaaagtttgcttatttattctattaacaattgacagtagacaatattttttggctccctgctgttacttgtagttttaccctaagcatttatattttcacagttgtaagcatctatgttctgtgttgtaaccataattgcattttctgtgctttgtctatggttgattctgagagtagaaaataaagtgtttatattgttattattatgtaaagattattctctgtacaaccaagcagtgtagtgtactatgattccacttcctttcttacatagctttttgttttttacatggggttttgagtggctttttccccttatttttctgcctttatcatctcccagagctctacatcctcagaagtaatattaaaatatttggaatccttgcttttcctaggattgctcccttgaaacccactatcctcttaccctgatctggtatcttctctaggcctactgcacagctgacattctgggactttccttcattattctcctgggttggatccattgtcacctggattttatgttatctttcttggttcactgtgtcattttgctggaaaagactctctagtaacttcctaagaatggtgtgtatttcagctaaactttctgagttctgcttgtctgaaatgtttttattcttaattaataaccttactagataaagaattcaaagtggaaattttccccctcataactttgaaggcattgtttcattgtttttaaacatccaatgttactgatgataagcctttgtagggcatttttttcccttctctgacagcttttaggtatctctctttattcttgatgtgaaattttctatgattttctaactatgatatagttagaatgtggatattttattcaaactgctgtacacttcaatcagaaagtgcttgtctttcagctctgggcaattctctgttgttttttgtttgtttgttttgtattcccagataaaacaatccacaacctacctagttcctggagagaggaaatcttatttgtaactcagtccaattccataatttaaacagtttcttctagtttatattggtctttggggaatgacttctcattccttcaattacttccgttactccccatgttcactctaagatggcatcagaagtattgggaagatgacttaaataaaactacactgtaaggaaaggaggctttctagtctcatgctggttatggtagtcagtgtaggagtccttgttctcatggtcagtgttctccttaatttatccaatagaatcctgtctcatggacttgaagtcctagcagaaggagatgcatctctcacttcaagtccatgagacaggattctattggataaattaaggagaacactggtgatgcttcctctctcacagctctctccttccttttccccctaagttaataggacagagatatcatatccttttctctattctttgataattcctccctgtttttttccctttctttttctagaactcctatcagtcacaagttaaaggtcctaaattgacctaatgactctttctttttactcatattttctgtctcttttattttgttctagtttcggctttttaaaattttatcttccaactcttttattttggcaattttatatttttaattttcaagagttttttctacatttgctggttactcccatttcacagcatccttttttattttattgatatgatattgaaaatgttagattgccttctgttttttacagttacctgtttcctctgataatttttttttgtttaatttttaaaatcttccttgtctatccctttttaagaataaagcaacaaaaagtgaagtggtagctcattatttgtggccttggcttgtcaacatgaggcttcactttacggtgaataggttgggagccagctcttttgttcaggtatcactctgttctagacctgagatatcttgctgtgggacaccagtcttagccattgctgtcatacttcctcccagacagtttatcattattattgttatcattattaactattaattagaagaattcttgatgctgctgttactgcaaatgataatgattattattattattattttgataaaagaatgaaagcttggttattaaacatttggtgtatacgcaggccaaatcatgaaggaacacaagagagtagctagagtctcattgctggtaggaggaacaaaaggggtccaagaaatcacataaagggaggaacatgataaagcaacttcataaagttgcttataaatttctgggctaatacttgagcaatgtatgcatggatctgatcctaattagcataatttagaacagaattaaccaatagaccaccgcatagatcctatactgaccactaggtggtgcacatgcaggtatgatccaaagaacactacaaaggctctgaaaaattagaaccgctgcctacagaaggctgcggaaaattgaacctgaacctaactaggtggattgttacaaaagtaacaacattctccatagaatataaacaagacccagcgtgtcaacataatattccaaatactgggaatccaattcagaattacttggtatgtgaagaactgagaaaatttcaacttgcatagaaaaggacattaacagatgccaacactgagctgacacccatgtaggaattgtgtgataaagactttaaagcaaatacagattgagtatcctttatatgaaatactttcagattttagattttttaagattttagaatatttgcattatacttactggttgagcatccctaatctgaaaatatgaattccacagtgctccaatggtcattttctttgagtgtaatgttgattcttatagaataagaatataaagaatgagaatatttttgtatagctgtacagtgtgttttaagctaagtgttaccagattcaaaatattaacaagtttataaagtaaaagagttacggttaattattgaagaaagaaaaaatttagtttttattgttatttatttatttttttgtgatggagttttgttcttgtcacccagactggagtacaacggcaggatctaggctcactgcaacctccacctcccgggttcaagtgattctcctgcctcagcctcctgagtagctgggattacaggcgtgcaccaccatgcctggctaatttttgtatttttagcagagattgaatttcaccatgttggccaggctggtcttgaactcctgacctaaggtgattcatccacctcggcctcccaaagcgctgggattataggcatgagccaccgtgcccagccaagaaagaaacaatttttaatatagtgtagcctaagtgttcagtgttataaagtttccagtagtgtacagtaatatcttaggccttaacattccctcaccactcacttaattgctcacccagagcaacttccagtcctgcaaactccattcatggtaagtgccctatacaggtgtacttttttttggtcttttattctgtatttctactgtaccttttctgtgtttagatacacaaatagttgtcattgtgttacagctgcctatggtattccatatgataacatgctgtacaggtttatagcatgggagcaataggctataccatatagcctgggcatgtagtaggctgtaccatcttgtttggtataagtacactgtatgatgttttaatgacaatgaagttgcctaacgatgcatttctcaggacgcatctccatcaataagtaatgcatgactgtatatccattcgatcaaatattattcataaaaaagaaacaaagtatagaagcatgctacaatctgaaagaatttgaaaacataagtgaaagaagccacacaaaaagtcacatattgtgtgatttcacttataggaagtatccagaatagctaaatccatagagacagaaagcagattggtgttatcctgggctggtgggaaggaagaatgtcgagtaactgtttaataggtacgggattttattttggcgtgatgaaaatgtttttgaaccagatagaggtggtggttgtacgatattgtgaaggtactaaatgccgctgaattgttcactttaaaatggttaattttatgttatgtgaatttcacctaaattttaaaaaatgtgtaaaaggattttaatggacgtttttccaaggaagatatacaagtggtcaataaacacgtgaaaaattgccccaaatcattagtctttagggaaatgcaaataaaaaccacaatgagacattacttcccacacactactacccaatgtcatctacagatccagtgtaatccctatcaaaattccaataacatttttcacagagatagaaataaaatcataaaattcatatgaaactacaaaagttcctgaatagccaaagcaatcttgagaaagaagaacaaagctggagaaatcacactatgtgatttcacagtatattataaagctataataatcaatgcaatatggtactggcataaaaatagacacatagactaataggacaatagagagcccagaaataaacccatgcttatgcagtcaactaaccgtcaacaaagatgtcaggaatattcaatgggaaaaggatagtctcttcaataaatgatgttggggaaacaagatacccacatgcgaaagaatggaagtggatccttatcacacgtatatacaaaaatcaagttaaaatgaattaaagacttaaacataagacctgaaagtgtaaaactactagtggaaagcagaggaaacactgcttgacattggtcttggcaaagattttatgaatacgactccaaaagcacaggcaacaaaggaaaaaagaaacgggtgggactatatcaaactaaaacgcctgcacagcaaaagaaactgaacaaaatgagaaggcaacctacagaaggggagaaaaatatttgcaacccatatatctgataaaggggctgatatccaaaatatataaagaactcatatagctcaatagcgaaaaacccaaataatataatttataaatgggcaaagatcctgaatagacatttttccaaagaagacatataaatggccaataagtacacgtaaaggtactcagcatcactaatccgagaaatgcaaatcaaaaccataatgagttaggatggctattatcaaaaagtcaaagatagaaaacagtatagagactcctcaaaaaacaaaaaatagaactgtcatatgattcagcaatcctatttccaggagtatatccaataaaattgaaatcaatatctcaaaaaggtgttttaaaaaaccagaaaataacaagtgttggcaaagacatggagaaattggaacccttgtacactgttggtagaaatgtaaaatggtacacccactgtggaaaatggtatggtagtttctcaaatcaagaatattattaccatatgattcagcagttccactttttggtatatacccaaatgaattgaaagcagggtctctccatccgggttaacacggtgaaaccccatctctaccaaaactacaaaaaattagctgggcgtggtggcagacgcctgtggtcccagctactggggaggctgaggcaggagaaaggcgtgaacccgggaggcggagcttgcagtgagccgagatggcgccagagtgagactccgtctcaaaaacaaaaaaaaaggaagcagggtctctaagagatagttgtgcacccatgttcatagcagcattatttacaactcagtttcttagccttttttaaaaattctgcatttctctttattaatttattctattttctttgcattttattgttgtattctaaattcttgaggtgaaaaccaggtttattttctgtcttcctagttttctaataaatacatttgaggtcataaattttcctcttcactctgggcccacaggttttgatgtatatatagtaaggcagttctgatgttttttgtttgtttacttgtaaataatttgtactttccatttttattttctcttcaacccaagggttatttagaagtgcatttaaaaatttaaaattttgaaatttccagttgtttagacttgagggagggactagtatgttaatttttaacactacattatggtaactgattgtggcctgtgtggtatcagccttacggatttttaaaatatttcctctgttacctagaacaggggtccacaaactatagcttgtaggccaggttggcctggggcctacatttgtaaatcacgttttattggaatatagccacatccatttatttacatattgtctatgacccctttccagctatgattgtagagctgactgttgtaatagagaccctgtggcccacacagcttaaaatatgtctttacttcaagagtttgctgatccctgacttaaaacatagtcaattttcacagctttttcatttgggttgaaagtatgtatattttctcttgggtacaagttccttatatccccgtcagaataagcttaagttgtgttataccaatccttatatccttcattgtggttttgattattgatatctgagagagatgtgtatgtataaacttcccatcccaactaaattatttgtccactttcatattttagtcagagttagctttatatcctttgaagctgttttttgtttgtttgtttgttttagtgcagaatatttacaggtcataactattaaacttctctgtgtttttccttcacacaatatgaaatagtcctctttgtcctatttattttttatttatgccttgaattctttctctctaaataatattattgttcccgtcaggattaggttcagcagcatatattagaaaaaaaaatttaaataagaaataaaattagaaatgttttttttttttttttgtggtaaaagaagtctggagatggatatcaggtctcagggctctgcagtgtcatcagggacccagactcctctattttgcttcaccatcttggtgtgtggtttccatcctaaggtcccttcatggtccacgagacttctggagctccagccagcacatctccattgagggccagaaggaagaggaaaggtaggagggcaaaaaggggcctgtcccccagctcaactgatttccaataagtgaccttcccagaagtcccagaaaacaattccacttccatctcactggcagaactcagtcaagtggccatacctaagctgccaaggagactaggaaatctagtcttttacttcaagtagctctgtctttgctaaaaatggacattctgttatcaaggaggaaagtgagaatgcgcatttggaataggcagccagcaatctctgccactgcccgttatgtattatagttcttgttagcatttgtttgcctattataactttttccactcttttatttttgaccttcctcagttattttgttttaggtatgcctcttataaaatatagcaagatcttgagttttttggttttaagcaatcaggacattcgtctcttaataggtgaatgtcatacattcattttattaccattgctgacatatgtggcagtatttctgccattatgttttgccttctgtttgctatgcttttaattttttccccttcctgtcacttgcactcattgagttttctggtgtctgatttttctgttttaggaattgtccttactaaatcaatttttaaggttattactcgatgttttttaatattccgttttgaaataatattagatttacagtaaagttgtaagaatagtattaaggattcctgtatacccctcacccagattccccaaatgttggtattttgtcacatttctattgtcattttttttctttattgtatggatatttttcctgtaccatttgacagtaagttgcacacatgatacctcttcagtaggcatttctgaaagaacgacgacattctcttacataaccagaatatcattatccgtatcaggaaattaaaatccttacagcattattatctaatccatagatagtattcaaatgtcatcaccaatttttctaattacatccatataacagaagaaaaaacctttagtctggtcctggatgcagtccaagttcacacattgcacgtaattgtcttggctgtttagtttcctttggcttgaaacagttcttatgtcttttgtgacctaaacatttttgaagactactaaagggcagttattttggaaaatgtccttcattttggatttgttcatgttttatcatgattagatgtagattatgcacttttcgcaataatgccactgaagttatgttggttcttttggtgatttgtatcaggaggcacatgtcaatttgttccattactggtgattttaactttgaccatgtgcttcaggtagtgcctgatatgtttttccactgtaaagttaattattccctttgatattaataaacagttggccctccacattcatggattctgtttccattgattcaaccaaccctggatcaaaaatatttggaaaaaaactgcatacagggtgaacatgtacagacttttttctagtcattattccttacacaatacagtataataattttttttttttttgagacagggtcttgccttgtcacccaggctgcaatgcagtggtgtgatcacggctcacagcagccttgacctccaaggctcaagggatcctccctcgtcaccctcccaagtagctgggactacaggcatgtgccaccaggcttggctattttcttttttgtattttttatagaggtggggtttcgccatgttgcccaggctggtctcaaactcccgggctcaagcgatctgcccatctcagcctcccaaagtactgggactacaggcatgcaccagtgcacccagcctgtatgaggtattataaataatctagagatgataagtcatctagagggaatttaaagtatacaggaggatgaggttatatgcaaatactgcacccttttatatcagggacttgaacatctatggatttcagtgtctgtgggaggtcctggaaccaatccccaacagctacgaagggatgactgtatcttgtggggagttttagcattcatcaattagtatttcctaaattacttattactaagatgtttgtcacatggcaatgttctaattccatcattccttcaacatttactagttggtattcttctctaagaaagagttttctcttctgccaatttgattatttgttcatttatttatttatattaatgtgaacacctggatccttattttattcaatgagttttaatccattactatcattagttattttgaggcacccagtgtttcagaattggctagtggaagcttttcctgtgttattttgacctactcccatctttctttgattttctagcacaagtagatgttccaggtttgtctcattctttcctctacccagcctggattcattatttctccaaggagccttggttctttgtaattcttttcttccatcatgccctatcacttctctaaccacagaaaaccctgatctactattagtacagattggtcttcattttctagatttttttgtatatggaatcatagagtatgtacttttttgtctgtctcttttcatacatcgtaattattctgagattcagccatgtcacagcatgtatcaatagtctgtcctttttattacagaataatattaaattgtataaatattaccacaatatgtttatccattcacctgttgatggatatttgagttatttatagtttttgtctattacaaataaagctgcttagaacatttgtatataggtcttggtgtggatatatgcctttcctttccttggggaaatacctaggatcacactggctgaacatacagtagtcttccaaagtatggacatggtatatctctccatttatttaggtctttaattatctcagtaatggtttgtggttttcaatatacaggtcttccatatcttttgtcatatttatccctatacatttcatgtatttatattattgtaaatgtgattgtattaatttcaatttcctattcattgctactatataaaagtacaattcatttttgtatattgagttaatatcctacaaccttgctaaattcaattacttttaatagcttttttgaagggtccattggattatctacaggcgattatgtcatctgtgattaaaggcagtttcacttgtttctttccaatgtggatgccttctgtttatttatttatttttttgccttattgcgttgttagaacctctaataagctgttgaatacagctggtaagagcggtcatggtaactttgttcctaatctttggagaaatcatttactctttcaccattaagtatgatgttacctgaagatttttcatagattcctttaatcagtttgaggaagtttcttcaattcctggattgataagaaaatgttttcaacaaaaacagatgttgtattttgtcaaatggttatctcctttatagactaattagctgtagtcttttgttatttcagtggttgctttagggtttttcacagggtctgtcaacattggcactattgacattttgggtcacatagtttttgtgtgtgtgtgtgtgcgtgtgtgtgtgttgtcataatcagaaacatctccagacacagccaaatgttttctgcagggaaaaattacccctggttgaaaaccactagtttatagtatacatcttttacgtatcacagtctgtcttcgagtgatattttactagttcatacgtagtataagaatcttgcaacatcatactttcatttctcgcctcctggcctttgtgccattgtggtcatacattttacttgtatgtataagttttatttaaacagtttattatcttttcaagaaatttaaataagaaaagtctttgtatttaaccatatggttagtcatttctagtgctcttagtttctttgtttacatctggtatcattttctctcttcttgaagaacatcctttaatgtgtcttgtagtgtagctctgccggtgctatattcttttgactttgatatatctgaaaaaagtctttgccttcattttttgaaagatattttcgatgggtaaagaactctaggttgccttttttacattcagaactataaagatatttctccgctgttcaacaagaaagtggctgacatttttacctttgtctactctacttaatgtgtccttttttaaggcttcttttaagattttgtttttatcactggctttaaaccatttgagtataagtgtatcatggtgtaattgtttcctgtgcttgggtttcattgagctgcttggatctgtggatttatgtattttttttcatcaaatttacaaaaacttcagacattatttccactagttttttatgtcccactttctcctctcctttaggtgtttcaactaaccatatatttggccacttaatgttacctcacagttcactgatgctctgttcattgtttttcagtcttttttttttctatctgtgatttgttctgtatagtttctattgctgtcttctagtttactcatctttctttctgcaatgttaaatttaccattaatcctgtccactgtatgttttaatttttatttatttatttttttagagacagggtcacgctctgtcacctaggctggagtgcagtctaaaagtctcatttggatcttttaaattttttcttttctatacttaacatgtttaatcttctagcttcttgaacatacaaaatagttataatattcattttaatgtttttgtcctccaattttgtcactaaatcagcatcat

SEQ ID NO: 500 - DNA, 32742 bp, Homo sapiens
  source 1..32742: mol_type = other DNA
ttactcagcttttcatctgctgtgttgaaagccaacttatcatttttcacattattgtatacatctaaaagacatcataaacgaagactggaagtgaaaactgaaaaactgagaaagttttatttgttggaggtaatgtgattatggttgaaatttttatttaatttgtctattgttattgttttgtttatgcagtacagaaaagtcacaactctttctttcttagctaagttcacattactctctgatgtgcaatgttttccaagcaaattcctgttcctcaggaaatttgagctattgtgaactctgctctgccttctaaaacaacacagcaataattagatgtctttaaacctcttaaggaaagataattgcttaaggaaagatcactgtcttggctataaaaagttcactatgaatttgttctcaatgttaaacatatagcagaaaatgttctgtatcttttaatattgcttattaaatactagtagaaaatttactttttgtcaaggttctacctccagtgactccccagcaaatgcctatgtatagaatggtaagaaaaaacgctcttttttaatcattcatttgagtttattagaaaattttgagagctggcagccaagatggccgaataggaacagctccagtctacagctctgagcgtgagtgacgcagaagacgggtgatttctgcatttccatctgaggtaccgggttcatctcactagggagtgccagacagtgggcacaggacagtgagtgcagcgcactgtgcgcaagccgaagcagggcgaggcattgcctcacttgggaagtgcaaggggtcagggagttccctttactagtcaaagaaaggggtgacagacggcacctggaaaatcgggtcactcccaccctaatactgtgcttttccgatgggcttaaaaaacggcgcaccaggagattatatcctgcacatggcttggagggtcctatgcccacagagtctcgctgattgctagcacagcagtctgagatcaaactgcaaggtggcagcgaggctgggggaggggcgcccgccattgcccaggcttgcttaggtaaacaaagcagccaggaagctcgaactgggtggagcccaccacagctcaaggaggcctgcctccctctgtaggctccacctctgggggcatggcacagacacacaaaaagacagcagtaacctctgcagacttaaatgtccctgtctgacagctttgaagagagcagtggttctcccagcacgcaactggagatctgagaacaggcagactgcctcctcaagtgggtccctgatccctgacccccgagcagcctaactgggaggcacccctagtaggggcagactgacacctcacacggcggggtactcctctgagacaaaacttccagaggaatgtcagacagcagcattcgcagttcatgaaaatccgctgttctgcagccactgctgctgataccaggcaaacagggtctggagtggacctctagcaaactccaacagacctgcagctgagggtcctgtctgttagaaggaaaactaacaaacagaaaggacatccacaccaaaaacccatctgtacatcaccatcatcaaagaccaaaagtagataaaaccacaaagatggggaaaaaacagagcagaaaaactggaaactctaaaaagcagagcacctctcctcctccaaaggaacgcagttcctcaccagcaacggaacaaagctggacagagaatgactttgacgagttgagagaagaaggcttcagatgatcaaactactccgagctacaggaggaaattcaaaccaaaggcaaagaagttaaaaactttgaaaaaaatttagacgaatgtataactaaaataaccaatacacagacatgcttaaaggagctgatggagctgaaagccaagtctcgagaactacgtgaagaatgcagaagcctcaggagctgatgcgatcaactggaagaaagggtatcagtgatggaagatgaaatgaatgaatgaagtgagaagggaagtttagagaaaaaagaataaaaagaaatgaacaaggcctccaagaaatatgggactatgtgaaaagaccaaatctacaactgattggtgtacctgaaagtgacggggagaatggaaccaagttggaaaacactctgcaggatattatccaggagaacttccccaatctagcaaggcaggccaacattcagattcaggaaataaagagaacgccacaaagatactcctcgagaagagcaactccaagacacataattgtcagattcaccaaagttgaaatgaaggaaaaaatgttaagggcagccagagagaaaggtcgggttaccctcaaagggaagcccatcagactaacagcggatctctcggcagaaactctacaagccagaagagagtgagggccaatattcaacattcttaaagaaaagaattttcaacccagaatttcatatccagtccaactaagcttcataagtgaaggagaaataaaatcctttacagacaagcaaatgctgagagattttgtcaccaccaggcctgccctaaaagagctcctgaaggaagcactaaacatggaaaggaacaaccagtaccagccactgcaaaaacatgccaaattgtaaagaccattgaggctaggaagtaactgcatcaactaacgagcaaaataaccagctaacatcataatgacaggatcaatttcacacataacagtatcaaccttaaatgtaaatgggctaaatgctccaattaaaagacacagactggcaaattggataaagagtcaagacccatcagtgtgctgtattcaggaaacccatctcttgtgcagagacacacataggctcaaaataaaaggatggaggaagatctaccaagcaaatggaaaacaaaaaaaggcaggggttgcaatcctagtctctgataaaacagactttaaaccaacaaagatcaaaagagacaaagaaggccattacataatggtaaagggatcaattcaacaagaagagctaactatcctaaatatatatgcacccaatacaggagcacccagtttcataaagcaagtcctgagtgacctacaaagagacttagactcccacacaataataatgggagactttaacaccccactgtcaacattaggcagatcaacgagacagaaagttaacaaggatactcaggaattgaactcagctctgcaccaagcggacctaatagacatctacagaactctccaccccaaatcaacagaatatacatttttttcagcaccacaccacacctattccaaaattgaccacatagttggaagtaaagctctcctcagcaaatgtaaaacaacagaaattataacaaactgtctctcagaccacagtgcagtcaaactagaactcaggattaagaaactcactcaaaaccgctcgactacatggaaactgaacaacctggtcctgaatgactactgggtacataacgaaatgaaggcagaaataaagatgttctttaaaaccaacgagaacaaagacacaacataccagaatctctgggacacattcaaagcagtgtgtagagggaaatttatagcactaaatgcccacaagagaaagcaggaaagatccaaaattgacaccctaacatcacaattaaaagaactagaaaagcaagagcaaacacattcaaaagctagcagaaggcaagaaataactaaaatcagagcagaactgaaggaaatagagacacaaaaaacccttcaaaaagttaatgaatccaggagatggttttttgaaaggatcaacaaaattgatagaccgctagcaagactaataaagaagaaaagagagaagaatcaaatagatgcaataaaaaatgataaaggggatatcaccaccaatcccacagaaatacaaactaccatcagagaacactacaaacacctctgcgcaaataaactagaaaatctagaagaaatggataaattcctcgacacatacaccctcccaagactaaagcaggaagaagttgaatctctgaatagaccaataacaggccctgaaattgtggcaataatcaatagcttaccaaccaaaaagagtccaggaccagatggattcacagccgaattctaccagaggtacaaggaggaactggtaccattccttctgaaactattccaatcaatagaaaaagaaggaatcctccctaactcattttatgagaccagcatcatcctgataccaaagccgggcagagacacaacaaaaaaagagaattttagaccaatatccttgatgaacattgatgcaaaaatcctcaataaaatactggcaaaccgaatccagcagcacatcaaaaagcttatccaccatgatcaagtgggcttcatccctgggatgcaaggctggttcaatatacacaaatcaataaatgtaatccagcatataaacagaaccaaagacaaaaaccacatgattatctcaatagatgcagaaaagacctttgacaaattcaacaacccttcatgctaaaaactctcaataaattaggtattgatgggacgtatctcaaaataataagagctatctatgacaaacccacagccaatatcatactgaatgggcaaaaactggaagcattccctttgaaaactggcacaagacagggatgccctctctcaccactcctattcaacatagtgttggaagttctggccagggcaattaagcaggagaaggaaataaaggctattcaattaggaaaagaggaagtcaaattgtccctgtttgcagatgacatgattgtgtatctagaaaaccccattgtctcagcccaaaatctccttaagctaataagtaacttcagcaaagtctcaggatacaaaatcaatgtgcaaaaatcacaagcattcttatacaccaataacagacaaacagagagccaaatcatgagtgaactcccattcacaattccttcaaagagaataaaatacctaggaatccaacttacaagggacgtgaaggacctcttcaaggagaactacaaaccactgctcaatgaaataaaagaggatacaaagaaatggaagaacattccatgctcatgggtaggaagaatcagtattgtgaaaatggccatactgcccaaggtaatttatagattcaatgccatccccatcaagctaccaatgactttcttcacagaattggaaaaaattttaaagttcatatggaaccaaaaaagagcccgcattgccaagtcaatcctaagccaaaagaacaaagctggaggcatcatgctacctgacttcaaactatactacaaggctacagtaaccaaaacagcatggtactggtaccaaaacagagatatagatcaatggaatggaacagagctctcagaaataacgccgcatatctacaactatctgatctttgacaaacctgagaaaaacaagcagtggggaaaggattacctatttaataaatggtgccgggaaaactggctagccatatgtagaaagctgaaactggatcccttccttacaccttatacaaaaattaattcaagatggagtaaagacttaaacgttagacctaaaaccataaaaaccctagaagaaaacctaggcattaccattcaggacataggcatgggcaaggacttcatgtctaaaacaccaaaagcaatggcaacaaaagccaaaattgacaaatgggatctaattaaactaaagagcttctgcacagcaaaagaaactaccatcagagtgaacaggcaacctacaaaatgggagaaaattctcacaacctactcatctgacaaagggctaatatccagaatctacaatgaactcaaacaaatttacaataaaaaatcaaacaaccccatcaaaaagtgggcgaaggacatgaacagacacttctcaaaagaagacatttatgcagccaacagacacatgaaaaaaatgctcaccatcactagccatcagagaaatgcaaatcaaaaccacaatgagataccgtctcacaccagttagaatggcgatcattaaaaagtcaggaaacaactggtgctggagaggatgtggagaaataggaacatttttacactgttggtgggactgtaaactagttcaaccattgtggaagtcagtgtggcgattcctcagggatctagaactagaaataccatttgacccagccatcccattactgggtatatacccaaaggactataagtcatgctgctataaagacacatgtacacgtatgtttattgtggcactattcataatagcgaagacttggaaccaacccagatgtccaacaatgatagactggattaagaaaatgtggcacatatacaccatggaatactatgcagccataaaaaatgatgagttcatgtcctttgtagggacatggatgaaattggaaatcatcattctcagtaaagtatcgcaaggacaaaaaaccaaacaccgcatgttctcactcataggtgggaattgaacaatgaaaacacatggacacaggaaggggaacctcacactctggggactgttgtggggtgggggcggggggagggataccattaggagatatacctaatgctaaatgacgagttaatgggtgcagcacaccagcgtggcacatgtatacatatgtaactaacctgcacattgtgcacatgtaccctaaaacttaaagtataataataataaaataaaaaaaagaatgcttggaatcaattacacccaattgctgttaaatttctccaatttatcatgctataccttgcatgagtagtcaaagaggacatagtatacaaagtatataacacaaagatagtttgagtaatacggtggaaagactatatcacaagattggaaacaccctgggatcaagatcaaattctaatgatttgcacagctatcggaccttgtggtgtaacacatggattatgcattatgtgttagaaatggtttgtgaaggaattcatcgattttgtagcttgttttatttaggctctgcacagaacatctatactgtatgattgttcactttatctcgtgcagctgtttgctagagaaccataaagaagggttttgaaaacattttttttttgagatggagtttcactctgtcacccaggctggagtgaagtggcacgatgtcggttcactgcaacctctgccccccgggttcaagcgattctcttgcctcagcctcccaggtagctggggttacaggcgtttgacaccacgccaggctaatttttttatttttagtagagatggggtttcgccatgttggccaggctggtcttgaactcctgacctcaggtgatccgcccgccttggcctccgaaagtgctagaattacaggtgtgaggcaccacacccggccagaaaagcctcttttaagatatcaagagttggatatatggttacaactacgaacagaaaaaaattatacagatatttttaaatggaaggtaatccatccacattcttttcttgcattggaaaaaatggcagctctctgaaaaataatatagcacatgccttgtgagatggctaacagtaataaagaaaggaaccctggaaatggggatgaaaagagatgcacagaagtggaatagtcaagagaaagctgcttcagaattaatagataatccaaaataggaattatcaacatgcacataatagagattcaagtattaatatggtttagtttaggttacattcttggtttattctaagagttatgaactactgtttgctgctggtttttctccccttctgaaggattttattgttgtctcattttgttttgttttatttgccattttgctgtttgggatcacttctagtctatattaatcaggtttaaaaagttgaactgattttgctgttatcatataaagcttctaatgggagacattgttaatacagatagaatatctggaatttttctgattccaactttcttttaactcatttttagtttattgtttatattctgcttatttggcaaattttcatgatttaaaatttttcttagttaaaaattgtttgtaatcactagttctatttgtagcttcagtgcactgcataaattttatgcaatacaatacaggtaatggaaactctgaagtcatttagttgctccagccacacaccaattagctcatgttgtttttgctgttggtccattccagaaaatggtaaatatacaggaacatacagaggataacaaatattcatgtttctgatacatctcaaattgcacgtgtccaaaactgtacccttgatctccccaaagctgttctacttgcagccttcccaatcacagctgatgacatctccatccttccagttgctcaggccaaaagccttgcagtcctccttaatacatctttctttcactccacatacaattcatgagcaaatgcaatggcctttattttcagaatgcatcctaactttttcctaatccattttctttcacctgggtcactgcagtagcctcctacctgggctccctgcttctgcccttgctccctacagtgttcttcacactgcagccagagtgattggcttacagtttaagtcaaatcaagcaacttcattgcaattgcccccacttctcccagagcaaaagccaagatcctccatgcttcctctctgcttccatctcctgacactcctgccttgcttagttctttctaggcacagggctactcggtatatattcttgaagtaaggcaggaacaacccatgtttgtattaaaggacattgaggttgtctccccggttcacttttcaactcactttaatgtgacttctatccccactgttccactaaactgctaacgtaaaggtctctaatgactttcatgtgactgaatctaatagctacttctctgtccttgtcttacttagtccttctgtcttatcactcaactagcacatattctaattctaggaatatggcaataattaaaagaaacaaaaacccatgtccctgtgggatgtacattctagtggagggaagaaataaataaggtgacaagtgccatggagaaatttgcagcagggaagaagaattaagagtattggagtaggtttccattttaaataggctggtcagtgggaactctattgaaaaggtgactcagtcttgagtagaattttttttttttttgagacagagtcttgctctgttgcccaggctggagtgcagtggcacaatctcgactcactgcaagctccgccccttgggttcacgccattctcctgcctcagcctcccgagtagctgggactacaggcacctgccaccacgcctggctaattttttaatatttttagtagagatggggtttcaccgtgttagccaggatggtctcaatctcctgacctcgtgatctgcctgcctcggcctcccaaagtgctgggattacaggtgtaagccactgtgcctggccttgagtagaaattttaaagagtagaaggagcaagtcaagtggaagagcattccaggagagggaataatcagtgcaaacaccttgaagtaagagtgtgctgagagaaagaatggatgaaatcaactaggggtgagtggagaatgagcccaagggtcgtctgtcactggggcaaggaaatgagaaggaacctgcaaaagaggtggaaaaggagtggccagtgagagaggaggaaacactctcccttcctagagttagaaacaccattttctcttagttttcctcctacctcatatctcttttgagtcctgtttgtggacttctctatacatcctctataataatatactgtatgtgccagttagtttccagaagaggattcgagtataatatgatactaggtgtgcatgcatgttagaactatgagtgaacccaagcccagaaaaaatagacttagtaagaatttaaggtagaaggagtagaactgagatactccacaggtcagggtccaagtaccaaaggagtgtggtagattccaggttaggcatcagtaaccaaagtccatttattagtataacagggcttgaggcaaaagtatgggttgcagaaaaaactatgaagggctacgtaaaaagccaggctatttcagattctttccaaacaatggtgaacagaacagggcccatttcccagggagagaagctgacaggaatcgggtaaaaagtagaccctagcattgacttgactacagaatgagaatcccactcctcaggcatgaataactatggacccaggtggactgaaggaggtatattcacctaggtttcctaaaaggactaggtgctcagtctagtcaccacatggggctattccagggtgtactatctgatagcatcacagaagtagaccaagatcttcatcctcaggcaagagcaatttcaaggatttctaggcagcactggtttgtaaggcaagaggtcttggtaccttgctcacttaggccctttgtttgatactgcagaagtggcatccctgcacactgaagatagctaggaactgcttccaaattgctggcatggggctgagacaggaggaaggactggaaaacttaaatgttactatcaactaaaattcttttaacttcattttcacttctcatccattctatatatatgtgggtatttttttaagatccaagtgctagactctgttaaccttcctcttattcagttgggaccctatctctagtctgtcgagaaaattaatgtttctgattatatttaatatattcattatcctttccaatgtgtatgttattcacatgctcagtgaacatgtcctctacaacattttcattgatagatgaagatgaacaagaagatcaagaacataaccctgtagtgtatcaccagaaacctctcagcaggtcaacatattaacccttagcctttggttatgagtcatttgaacagtttctaatttacccagttgttcttaagtaagcccatatttcctcaatcagtgagggagaagtgagggaaaagatcaagaggaggaagcagtaggcttggtaagccatgccaaggagtttacacactatctacagtcaatgagggtccatttaatggttttaaacagtggagggagatggtcacagtcttatattaatgggtctgtgcaacctccttagtttgttcttcattaattgctattctttcatcttttgaatataatttaaaatctgagctcataaagtaactagaagagtaaaacaaactaaagagatgtcaaagcctttctagttccacctacgtccttgacctgatgtgcttgcgcttccttcactactttcatctggcaaatttctatacatccttcacatttaacctgtagatcgccatatcaaatcatatgttcatactaaagtatttcatgaaagatacatacataccagtatacatttaacatgttccatgtccacctacaaacttcctttctttttcctatgagtattattggccttgagatgttggagttctgtcttgaaaagagtcatttgtaggccttactttgtggctaattcatccctgcttttcaataactattctttaggttttccacactctttggtctgtcacactttatcactagcagccccttcacagatacattttcgtctttttctttgcatctggcatttagcattcctttcaattgatgcttattaaatattaatataatatttactctagggggctacttgttctcatggtactattgtattaggagagcaattaaatactaattaatttttaactgattgttttcttttacaattcataggttccaactccattgggagctccttctctaatggcacctcaacccatgattcatacccagcaaggcctaaggaccagtagtccttccactccatccccagagcatcaggtacgtttgggctgttgttgctaagggccttggcagagataggcagtcactggaggcaggatcagtgttataatggagttttgcaacatagccatcttttgtatactgttggtctctcatagaagaaagcatagttctaacattttcatcatcatagaaagacacagaactgtgcagacctggtgcagacctctataaacttgtgttgttaagcctcaactggcttcttatatttattcagccatccttttattcatttatttgtttattcagtcaacaaacccaactgtgattagtattggagaagtggctaactcagtctggagatttcaaggatgacttaccagagaactgatatttaagtttaataataagatttaaaaatagacagagagttaacagagtgagaaagcgtgctccagataaacacagacacagagagggaagcacaaagcaccatgggaactcaaagaacggaataattaatttagcaaaggaagctttcaagtactgaatgataaagaagatttcaaatagtagatgtatagcggatagaagaagtttggcattacaggcagaaagaataggttgaacaaagaagtggaagtaggcagtggtaatatgagtgagtatagctgaagtgtatgggagagtgtcatgatccaggtgtccattgtctcagagtattgttttctagaagactttacaaggtttcttctttcagtcttcagctgatgtgctgagccccctgatacctgaacatttgttttaggaggagtgacaaagcttcaggtgttagataatgagaaaaatgacgagagttttgtattaaaatatttgtaatttatttcataactacaaataaaaatatgtataaatgattaaatatttacagatctgtctctcattcagacgcagtccaagtagaggtcccaaagcaaaaagattcagattcagaagtgaataaaaagatctttcaacaggctgaactgaatcctccacatcttccaagtaaaataaacgtttacttggaagacattcaatactcttgaaattctttaatttgacgtttggaggttatgtactctatttttcttattttaatggttaataattcacctaacccactctagtcttccaaccacaccccttccctaacaagttcctaaaagcacgtgtgtcagcccggtgcagtggcccaagcttgtaatcccagcactttgggaggttgaggtggcaggaggatgacttgaagccaggagtttggaccagcctgggcaacattgcgaggccccatctctacaaaattacaaaataaagaaattagctggatatagtggcatgcacccatactcctagccactcgggaggctgaggcaagaggactgcttgagcccaggagtttgaggctgcagtgagctatgattgcaccattgcactccagcctgggtgacagagagagaccctgtctctaaaaaaaagcacatatgccatgtgtcatacaggcgcagttctgggccctctgagtgccctcagtagccacagtacaagccttacttcataccaggtgttcttcagttgtttggcccctttagggactgctacagatctagtcatgactctcatctaatccagagccaggtccctaggtaaaatctcaggacttcatcccctgaagactgccatggagtgacaattcgcttccttcctgtcctcatagcaaggctgatggcatcattttgctgaaattgatttcctgagcagactctccagactcccagcatgtaattgctgtagctgctctctaagtaacagcaagagcaatggttgcctatgattccttgtcttgggcagggagtgtgatccctgagtaactaacataaactcaccttgccatgggaaatttcatcaagtattctggtctctgctggcttggctttcttgaaactgtaatgtgcccacacaccgttatttttgagccatcatctgtatcacaaataaacagagactacaatatgtgaaaggtgatgaattttctagagattagcaattccaaaatcctctttaggaagaggaaatggaggccctaagagagatgacttccaaggtttcttggctccaaatccagaattttttccaatgtgtaggcaaaagcaggtcttccatgcaagatggagtcccactacacttagtgtctctggcacttagcattaactgtcttgcccagctaggtggtttttcatgtgagtgtcttagtttcttaactagatttattatctccagttatacactgcatcggattcttctagtgtaatttatcttcactacctcaatgttgagcacattgtacatgctccacaaacatttgttgcttgattcacacagtcaataaataatgatcaagcaataaatattgatcaacttgatcaataaataatgatcagttatcaagctcagtgtgaggcccagagaagcaaaggcaagagaaacaagtccatacccttaagtatttataggctgatagaggcactcgtctcagcttctccttttctttggtactgacatcagacattttagagtcaagttgaaaagagttggtcgtatttttgggctttcatatttcaaggcatttcaacatatccacaaatagcaggcccagtgagctgtgcaatatcatggggctccaatgttttaggagttagtcctgagccagactgaatgctctctcttatctgtatatgtgaagaatagcccttcttcctccccaggaggctgtgagggatttaaaacagatgtctatctgagggaccctgcagatctcccatgctatgagcaggctgtgtgatttctccccatcatgaggccattatcatgacatgttatggctcatgtctcaaacccttgagtttcttattctgtgccatatccatgcctttcaattatcaggacagtagctgaaatttattgagggcttactaggtactgggcacagtatcaagtatgttattatgtgtaattccattcaatctacttaataatatgtgcccaaagccctattattatggttattttacaatggagaaaactgagacagtgttaaagtaactaacctaatatcccatagccaataaataatcaagcttgactgcaaagtgcatgctcttagccttaaccattgtgctggaaatgcaccatctctcccaattattatacaggaaaacttgtgactgggaatttaccatggcttatactgaaggtcttcatgtatcctaaggagtccggcccaaaggagattcaggaacatgaaagcagagtttgaacctttttacatccatgctttttattgggtttggttggaaaggaagagcttgggtggacatgggggcagagggatttggagggtgtaattactcaccttggggcccaagatcaggttttctaaattgagaattgcatagttacagaaggaacccggaggatccagtgggatctagtgacaaccatgggatgcagaattagtactagtgccctgatgactcaccagaggtcgtagtcaaaatgtattagcactagaagtgagtctggagatcctctagtccaaagctcacatttcacatgtgaggacactgagctagataggtgaagacacttgtctaatgaggcacagcctgttaaatgacagggttaaactagaacccaagttctagggcctattacacagtggcaagcctagaaatggattctggaaataaagcagggtaatgtctgggagtccccagggccatcattctggcagatgaggtggtggggtgggggttgcagaagggttagttccctgaacaaaggacctctccacatcaccttggataaataacatcagtcccaggaaaaaggaaatcacattgccacattttaccttgtctaggaaaatcctaccttgtcctctcttgtataaacagagcaaaaacactgaagatacaataacaatacacagtgagaacactaccagcacactcaacaacccagggtagtgagtatggaggcccattggcatgtctggaaatagaatacacatgtattctgacttactaggaaatagccccaagaggctggggtggcttagcatgcaggagcactatcacagttgagtgccctccaggggagttccaaagcccctaggggaaactgcactttctgctctcagaagtcaggattagaaactgaatcagaaggtcgagcagaggctgtctcagaacatcctgaaatgcttggcatctctctgaaggccttgggctctttcccagtgggcttcctgggaggaaatgaccccagtgaccaggctcaggaaaaaggagacacattcccccagcctcaggatttgcagctcttcagagtaatttcagaggcttgtggagattgggacagaacctgttacctgcacaaagcttccaggcaaagatggagtgagagttgttgtcggttcccggctgtacaaatttaagtcaactcttggttatctgggttctggaagttgctaaggatatcaccctcttcttccaggggactccaattgtatgtcacatcattttcttccttctctgcagagcacattagtgtgacatttacaggtactattcactgaagtcattaaactctggcttcccaaaatatgagccagtggtgcaccagagctggcttgtaccagcttgtgagaaccaattgttaaatttctagaaattctgcaagatggttgttaaacacagccatcatttaaaattaaattataaaaatttacaattaaattcttttaaaggcaaaggtaataaatattcaaaatttatcaccttctaattatttttcgacatttgaatgttacctatgctcttgaggttatttacatcgattgtatctgtgtgctactgggcatgtcctcccaactcgacatggattgaaatcagccattgtgggagtatccaggctacagaaattggtagatgctacaaactacggcttgatctatgtttgtcactctagacttgaaagcaatggagaaaatgttactaatgcagattcagcttaaaagtgagttgtgtctgtagccattattgtgaacagcaccataaaatgaggcaatatttttctggtatttgaaaaccattatccaattcagcaaataaatcactgacattgttgatgaatgatccaagtaccaatataaaaataattgttgaattacttttttcttattacttaacataaatgaaaatatcaagcaacattcatgtcagaactacactagttcatcaattgcaactgtaggttgtctagggagatatgtatttggcaaaaatcaaaagcatcctgtcagaattggttatacagaattaacgataaagagtattgtatattttattatcacttatgaaattgtgtgctatacaccttttacatcaatacaatttataataaatatataccccctttctaaagagaattagttgaacatttatcagcacaacactacgtgaaatgattgtttaagttgttctgtttcctgttgtatgcgtattttctttacattttgttttgttttgtttcaaaagtgtccatggtgaaaaactacaaccttttaaagtctgttttaaaaaatgcttttattaaagcaatctaaagataagctgtaaaaggtgtgggctactgaagggttgctaaagaccaatcatatttagtcaggtaatagctagatttggatctggcaagaggaagtttttttttttttcttttcctttttttttttgctaagagataagaaaatgaccacctatagagttgataaggttagtgtactcttggaaaagctgctgcagccatggcaggaaggaaagaattggtatacaactttctaattaagagaacactagaaaggaaatatattcagcagtataaataagggaatcttctgtttgtacctgtaagggagtaaaacatgagcgataagctgataaggcttttggctccaaaagaaaaacctggcccgaagtgtcaaatactatatctcttagagggatttattccaaattaaaattagtgataatttggagaaatatttcctaaagtttgaagtaagtccttgattggttctaacaatgattaatatagatagggatcagtgaagttgaacaaaatttgcatgtgtatctgatatctcaatgtttttctgtagaaacgttacctacttttcaaaaacaaaatttttttttggaaggcactgaggtgggggagagtggtgaagaatagaattcccatatacttttctctccaggaacagagacattatcttacaaaactgctgaccagaaaaggtcagagtcatggttagctaacatgtcttcatcctcccaagccaaatcgcatagaagccactggagaactagtttggaattccggcttcactactatgtagttgtaggattttggaggagctgtacaggttcactgagctttagtttcctcattcacaatatgacgataccaatttcttcctcatattatatctaaagacatatctatgtctatatgcttgatcgtacattatgtgcggagataaaccggtaacagtgattgcctctgagaagagagacttactttccattgcgtaattcttaggctcatggtagaatttgtgcaagtggatgaagcactgcctcactgggaaacactccagtgaaataaagcacagaaaagagcccgaagaataattacttggttctgtatgacacatgtgcttttaaagggttgtagtgtaggatgacattgggtaagtccatgggcctagaagcctaggtggagttcttaggattttgtatgtagactatgaagttttggaaacgtttgagctggagagaagacattctgatcaaaggtggctttcaggaaaggctggtgcgacaggcagggtatttattagaatgaggccagtgaccactctgaaacagacacaaagtaagttcccttcaaggggcaggaagctccctgggatggtgagaccagaaaggcacagaggctgaaccctcgtgatggcgctaggtcccaggttcgctagcatccgagagaggggattgggtcgctccagaggccattgcgaaggctgctgccagttctagggtcggggtggggtcaggctaggtccctattcctagggctttagcaccgctcactcacaagaccccttttcccaggaggacgtatgggtttttcctgtcgctccagcttctctttcgcggcccttccacgcttgtcacttacctgagcgcagccaatcagcacctagaggttgggctactttcggccaaaggagaacggggacttgtgggggacgctccctgcgcaccaatgaatgtgcatggagatggagaggcgggcctgcaagtgcgaacaagccaatcacggaatcccggcggccggcggcccgggaggcagtcgcgcgctcgcatccccaagatggcggccgttaaggacagttgtggcaaaggagaaatggccacagggaatgggcggcggctccacctggggattcctgaggccgtgtttgtggtaagaggcacgctgttccctggcatcttggcttgaggccttggactgcccctttcttcccggctcccacccaggcctcgactgttggaaggagctgagccaagtgttcagggagggggcgctcggtctgctctcacccctcgcacctggacagattgagctctgctgggggcccgcccggaagaaacgtagctcgagaaggccgtagaagagaacggggtgcggggccgggacgaggggcgaggggcgaggggcggcgggtggcagggcagggcggcctgagggacctccgggctgccgccggttttcgtccccctgctggttggaaaaggggaggtggtgaggagctctcgactcagcatggatgctggagacacagtacaatgaataggcagaacagccagtgctaagatgtgaaaaccgggaatatcactttgtctgttgaaggaatgcagtggtctcgggaatgttgcctcgggaaatggaagaagagaccgatgggaaaataggatgataggttgggagtgtaaagtccttctgtgtcttgctaaggaattgaggttttccagtaggcaacgggctgtcatcagaaggcctttcgttttaactacatcattctaacaacttagtggagaatgaattgttgagagaggaggctgaaccctcctgatggcgctaggtcccaggttcgctagtgtcctagaggggatcgggttgctccacaggccgttctggagggcgctgcctgtgctgggtggctttttaaaaattttattttatttatttaatttagaaatagtagttgaaaactatttgactaatgagagaaaacatctgactggccctccaggccaggtcatctgtctgtccccacttagctactataaaatcttcatggaagtttctcaatcttttggtttgtaccttaccttacctctgccttttttttactaactacgtcttatatccttctaaagactcatttatttataccacacttgatattgtatattcgcatttgctgattgaatttcgtaattggttattattttgtgtttttatgagctgtgtcatttatttctctacattgatctattatctaaccataacaaggaataaaatttgttgagtgccaggcactttcttaatgattttacaaaattcgaggtggtagctactactgttatgcccgttttttagatgataaaactgaggtacggggcacttgagtaacttgccccaggccacacaggatgtaagtgaggtatccagggtttgaacttggacaatccgtggaggtccagactggcagcttacccctcatgctctgctactgggaggaggtgaggtagttctcatgaatcgccctacttctcctggtcatagcatagtgcctcacacatagtataagctcaaactaagtgtctaattgaatttccatagggccttaaatgttacattcatggtgctcagctagagatggcgtcagaaatctaactcgggaggagacactttatctgagggctttataatgtcttgaaatgctttttccctacaatgtcgtggttatttttttctagaccttaaaatttctaccaacataatgtaataagcaacccaaattttatataactgtttatgtttccaaactattaataattgaagtgacatggtattgtagaaagattattggcctctaaatagaccagggtctgaatcctggctctgcttcccagttgctgcttaaccttaagcatattattttaccactttgagcttgagtttctttaactgaaatagggatgacaatacttagagagttgttatgggaaacagagaacatgcttgcagtattgcagtgtagtaggtgtcgaataggtattaatattcatgatgataggaagcaatataccatagtggttagaagtcagacccagtccattccccaaccccgctgaggcagtaatttgttttctttctctgcttgaattgttgtttcacccttgtccatttcatgacctcttcatctttccacatctagttcagatatcatctccctgtagttttctctgacctctaccccaaaacaaaatccctggcactttgtgtccctgtggcacattatgctatacataggtgtcacgtactcttataagcgtttcacatatgctaactcatttaatccctggtgacgaaaaggtacttgtacagatgatgaggaaattgaggcaaagagaggttaaataacttccctaaggtcaactcatctaatgagtggcgaagctgggattcaaaccaggcacctcctgtctcttaaccacagcctatgccgctatagttaattcttgctaaactccagcacctgataacatgtatcatgtgccagaaacttacacttctttctcttccctgcagtgacccttctaggaagatggcatctctctttaacatacagaactcagccattatctctcagcctcaccttttcaatttcctttactgtctagtttgatggcttcttagttcactcccttgctgtgtttctcttcctttttcttccttgtttcagctaagatattctctggtagctagtaaatatggataagaataatgatgtgaagatcttagaagctataagataattgaagttacttataataaagaactagagttctgtaaagtactagacgactcttgtagcatctcttttaagtttcatatattttcatcttgtttctgatccttatctaattaactagcctttcttcaaggatcagcatgtggtataaaaaatattttaacatcagttttactgcttttcttttgatcagttattactgttacaaaagattattctgtttgccttttaggtttactttgtttcagttatttgatactgaaggaagcatttgtggattgccttgggaacccagtaaccatatttagtatgatttctatggtaaaacttgttgaattaaaaataagtaataaaattgataatcttgacatgcaacctgtaaaatcattttgtgaataggatgcatgaataggcaatgtatttgattgttagtttcatatttactactagggatgcatgggaaatgcataaagtggtgggcaaggtcattcttcttttcctatttttgaataaaaaatgaagaggaaagtgaaagaataaattagctatataatatatatgtaccatctgaaattgtctctaactttttataactacaggttgagcatcctaaatctgaaaatctgaaatccagaatgctctaaaatccaaaactttttgaacaccaatatagtgctcaaaggaaatgctcattggagcattttggactttggatttttggattgaggatgctcaactggtataatgtaaatattccaaaatctaaaaaaaaaaaaaaaatctaaaatccaaaacaattctggtcccaagcattttagataagggtgcttaacctgtacttttagttaaaaacaaacctttggagaaaaacaaagcttttttttcttctatgttttaaaaacaaagcagtcaaaaaatctgagtggcatgaattctaaaatttgtaaagtattatttttgatattaaaggaagatgtagattccttcatgaaacagcctgggaatgagactgcagatacagtattaaagaagctggatgaacagtaccagaagtataagtttatggaactcaaccttgctcaaaagaaaagaaggtaagtgtaaaaatttctaagttttgaaaatcttatatgacttgaacttttaaaaaattgagatataatttacatataataaaatattcagatgtcaagtgttcagtcctccaaggtggctgtaccatatgaaattcccaccagcaacgtacaagagttccagttgttccgtatccttgccaacacttggtattgccagtctaaatgtggttttgaaaacataatagaatggttgttaaagactgtattccaaagctttcaaaatcataacgtcttatatgtctagttcatccttctaattttgccagtgagattagagacccacagagtctgggcataagacttaattagttatgaaatcccaagatttcataactaataggcataggaaaaaagctatccttactctcaactctttatttccctacattattttatatagcttataaagtcaattcactgtaataaatatttatagatctctgttttgtgcatgtgccagcattcttctgtaagataaatatttatggaatgccagctagatgccacatactgttttgggtgaaataacatccagtatctgctttcaacaaggacacaggactgggcatggtggctcaaacctgtaattccagcactttgggaggctgaggtgggaggatcacttcagtccaggagttcaagactagcctgggcaacatagggagacccccgtctctacaaataattaaaaaataattaggctgggcccggcggctcgcacctgtaatcccagcactttgggaggctgaggtgggcagattgcctgagctcaggagtttgaaaccaccctgggcaacatggtgaaaccccgtctctactaaaatacaaataaattagccagacgtggtggcatgcgcttgtaatcccagctactcgggaggctgagttgggagaattgcttgagcccgggaggcgaaggttgtagtgagccgagattgtgccactgcactccagcctgggcaacagagtgagactccatctcaaaaataataatagtaataattagctgggtatggtggcatgcatctgtggtcacagctcctctagaggctgaggtgggaggatcgcctgaacccaggacgttgaggctgcagtgagatgtgatcatgcccctgcactccagcctcggcaaaagtgcgagacccagtctaaaaagcaaacaaaccacacaaaaaactagggacacagtttggtggaaattataggtatataaataaaattagcacacaaagtagaacagtagaggtacagggggatggtaactcattactttgtaccaaagcacctcattaacctggaggggccaaggaggttcagaggaagcttctaagaggaacagatagctgtgtagaatttcaaagattagttgtgagtttggaggcagactaaagtgaggaaggggtagtctgggcctaaggcaccatttatgcaaaggtacagaagtttgtaggtatattttctcatttgattttggtgacagttgtacaaagttgaatatgtactgagtattagatgagatgaaaagtcattgacatggaaagatggagagtgttaatggacagaagcaagatagaaaacattaagaacagtgtgctctcgttttggaaaaaaatgtatgtatgcacaggaatatctggagaaatccacactaaaggcatattaacagtggtaatctctgggtagttagaatatggcatttttcttgtttttgcttagctgttttcttaattttttacaatgtacatgtactgcttttgtgatagtaaaagtttatttgaaaaagaaaaataaagccattggatttgagatcacctacagggaggttacagatagagaagaaaatgtgccttggggcggggtgcagtggttcatgcctgtaatcccagcactttgggaggccaaggtgggcggatcgcttgagcccaggagttcaagaccagtgtgggcaacgtggcaaaaccctatatctacaaaaattagctaggtgttgtggtgcatgcctgtagttccagctactagggaagctgaggtgagagtattgcttaagccagggaggttgaggctgcagtcagctgtgagtgtgccactgcactccagcctgggcaacagagtgatgataccccgtctcaagaaagaaaaaaaggaaaagaaaatgggccttgggaccaagtcctgggagagggggaaatttgcgtatcaaacttaaattgctcttctaactagtaaattaatgatagacaaaaacaaaaaaaagaaaaaagttatattgctaactctacaactgtggtatgtagcaggatactcactctagcttaacatatggtctaggcctaaatgtggggagaaggggtaaaaattcaaagcacttaggaaacatcagtgaacgttggtgttctggatgagaacagtgtttgtctagtgttttaaaagagaatggtagagttggagatagtgagttaggaaaattttcttgagttttacctattttaatagtgggttggtcatttttttgagacaggctttctctctgttgcccaggccagagtgcggtggtgtgatcacagctcactgcagccttgacctcctgggttcaagcaattcttccatctcagcctcccaagtagttggagggctacttttctctttttatttttctggaatttctctcactcctatgatgtcagctatgcaacaaaactatttttgtgtcatgatctagttgttttgcagcagatggctctatgtagtttacatgctagcctttttgttttttttttttttcaatttgctattattttatttaggatttttgaatttctgttcataagtgagttcagcctatttctttctttttttttttaatttttttagtattgatcattcttgggtgtttctcggagagggggatttggcagggtcataggacaatagtggagggaaggtcagcaggtaaacatgtgaacaaaggtctctggttttcctaggcagagggccctgccgccttccgcagtgtttgtgtccctgggtacttgagattagggagtggtgatgactcttaacgagcatgctgccttcaagcatgtgtttaacaaagcacatcttgcaccgcccttaatccatttaaccctgagtggacacagcacatgtttcagagagcatggggttgggggtaaggttatagattaacagcatcccaaggcagaagaatttttcctagtacagaacaaaatggagtctcccatgtccacctctttccacacagacacagcaacaatctgatctctccttcctttccccacatttcccccttctctattcgacaaaacctccatcgtcatcatggcccgttctcaacgagctgttgggtacacctcccagacggggtggcggccgggcagaggggctcctcacttcccagacggggcggccgggcagaggcacccccccacctcccggacggggcggctggccgggcgggggctgccccccacctgccggacggggcggctgccaggcggaggggctcctcacttctcagatggggcggctgccgggcggaggggctcctcacctctcagacggggtggctggtcagagacgctcctcacctcccagacggggtggcggcggggcagaggtgctcttcacatctcagacggggtggctgggcagaggcgctccccacatctcagaggatgggcggccgggcagagacgctcctcacttcctagacgggatgacggcctggaagaggcgctcctcacttcccagagtgggcggccgggcagaggggctcctcacatcccagacgatgggcggccaggcagagacgctcctcacttcccagatggggtggcggccgggcagaggctgcaatctcggcactttgggaggccaaggcaggcggctgggaggtggaggttgtagcgagccgagatcacgccactgcactccagcctgggcaccattgagcactgagtgagcgagactccgtctgcaatcccggcacctcgggaggccgaggctggcagatcactcgcggtcaggagctggagaccagcccggccaacacagcgaaaccctgtctccaccaaaaaaatacgaaaaccagtcaggcgtggtggcgcgtgcctgcaatcccaggcactcggcaggctgaggcaggagaatcagtcagggaggttgcagtgagtcgagatggcggcagtacagtccagcctcggctcggcatcagagggagaccatgcaaagagggcgagggcgagggtgagggtgaggctagcctttttctttgtatgtgttgtaaatcttgcagcctgtcatttaactttacccttcaagctgtgtaaaagttccttagtatttcatgtgttaatctctttttcgacacttgaatctgagatcttttatctttctttaattggaaattttgtgattatcactttttctatcgtctgttaattttttttcctctttctttctgggattcctgtttacagatgttgacacttctaattctgccttccatttatttatattatttcccttttttctgtctttgtcatttatcttttggcaattagatggatagccatgagttctttgtttcagctgttaagatttttatagctggtagttctggttggttcctcttcatattaccaatatcctttcttttctctttgtggtatctttaagtatttaatgtatagttttatcttttggtatttgttaattttgtttcatatggtagaggttgttgaatttattgtctttatttattataatgatcaaattataatgtcttttccctgtcagcttagattccctcagggatatcagctactttggccagtaatgtacgtggaggtgggggtaatttaagtcactcctggtgggtagcagtggcgctacctcggctcactgcaacctccacctcctggattcaagggatcctcccgcctcaacttcccaagtagctgggattacaagcatgcaccaccacgcccagctaatttttttgtatttttttttagtagagactgagtttcaccatgctggccaggccggtctcgaactcctggcctcaggtgatccacccgcttcggcctcccaaagtgctgggattacaggcgtgaatcactgtgcccagccaagctactttctcttcaggtgaagcagggtagggaggagtgtattgcttgggcatgtgctgtgtcattggtggtctggttcctaagttagctagggctgcatctgattgattcattaatatgctttatagcatattacatataatatttatatatacagaatgcatcttaaaagtcatttacatgacaaaaaatcttgatctgaacatactccttatgttgtgtgtgtatcacatattttacaaatgtataacatctttctgtttacctatatgaacatatcatgcaaaaataagcaaacttgagcaatctatggcatccagattgaattgtagtgaaaaaatgaatgctaggtgtttctagattattcactggactgtattatcaaatgatgacactatgtttttttcttaagcagcaggctcatttaacacatttcttgccaggtcagtagcacagggtgtagtaaatttgccctgccaacctgctgcacacatggagtgacttcttttatgtgacgcaataagttcattttcattgttgtgtttatattttgtttacattttggtctctaataatatttagtaaatttacctcgaaagaaccagagcttcgtttttatatccttagtctgttttgctagaaattacatttgacagagaccctagaactgttttgcatatatctccatgcaaaacacatgcatctaattaccataaagagctaaaccccagtgacaaaaacggtatcattgttttctctctttaattgactgaatgtttttagcatactgtttttctcttatgttcttgtcagtgaggttgattgcatttgggagtcacttactagcattttgctagtagctatcatataacttatccattaagtcggatcagttgtatcatgtccatcattgtttttttaaatttcttgtgtttaaatcagtgatccatttataattttaagaacgatcgttacctcatttgaaaagaagagcatttatcaacataaaagttaaggaagaaatacccaaagcttaaaagaatcactaaattatactgtatcataatgtggtgtgtttggcattcagatgattctgtacatttttcacagtgtgacaagtgcacatactgagaaggtgtcactgtgctttgcctggcatttagctgactgtgatgtacatgtgtgtatacccaatgcacacaccaggagtagctatgtgcatcactggataggggattggtgtcttctattttagaatgtaacttttgaatccatgttatttttaaaattagttttaaaattaatctatttaaaatttcattctaatcaaatgcagaacctatgaatcacctctgtggaatatagtctgctctagaaatgttaaatagccatggggtatttgacataatagaacagagctttgtcttcatggaatgggcattccataaacattcactagtatatcttaaatatttttattaagtatttatactttaaatattttatgaatattttactaaatatattttcttttggtgaatatttctttaaatattttatttttataaatatttatatcttattttatctcatatctaaaaatatcttaagtattttatatctataaatagtcctcaagaacacattagtagaaaatgcaaagttagtaagaccgtgtcctgttgtttatttttgcctgcaaaatactaagttactctttttcttgttcacaggctaaaaggtcagattcctgaaattaaacagactttggaaattctaaaatacatgcagaagaaaaaagtaagtgcatttttgtttgtaaatatgagcaagctaggatatgtcagcagaaactcgtcttctttgactctttggtcactgatatttgatctgtgctgtggaatccagtctgccttcttaagcacatacactaatgttatgatgtgcttctgtagcaaatgtggctttgtggccttcccccaaaagtcaagtttaattctagggcccacacttggattactttgcttatctttagtgcttgtgaaacttaaatgcaatttgaaattgttttaggtgtacaaagaaaatgtcttattctgtgctagcagcatctagggttttttctttgttgttgtctttctccctaagaataaggagttagtccaagatttatagagctggaacgaatcttagagatcatctgttacaggttctcatttcatagttgaggaaatggttatggagaggttatactcgaccattgtctatgtagttagttactggcagaactaaatttgagagtcttctaagtcttaatccagtattcattaaataaaagcaggttgtaaagattaaatctcataagcatattgtatttaaaagattgtgtgtatgcttatgattttgcttgactggtagaataactatttctagtacattttaatatgtggtgaactttgtaagacttcagcaactgattgattgggcatgaagcaccaatgaaataatagaagaatggctaattcttacaataatgccttctctgtatgtcaggcactcgggggtgtgtgtgtgtctgtgtatactcagtgcttaccactgacttcataggtgtagggactgttgtaatcctcattttacagatgaagaacctgagatatagaagttaagtgagatgccagatttgtacagctagtgagtagctgagccagagtccatacccagccacctgggtctagcattcatttcttttaccactacacttagcctgcatgatggtactgttttaaatgtcctaggttcaactgtgcaatctctcctttataaccttggtatcaaactggcctgtttatggtactgtcattttttttttttgttttgaaggagtccaccaactcaatggagaccagattcttgctggcagataacctgtattgcaaagcttcagttcctcctaccgataaaatgtgtctgtggttgggggtaagtaaatgttatagccacagctgatatatttgtaaaccagtgtgttttctgtagcaaacacactggttttgctagtatttgctagtattttagtagtattgctcgagatatgtaaagtgttcatctccttttgattgtggaagggacaaagggacagagtccaagtggttcatattagaaattgactagaatcagaagtgcgatgaagatcgcagtaaaaacatactgaagtctctcccaatcaagataaaactgatcaaacaaaccctgcttctcttccagttagtgctttatctctcttaaatataatggaggaagagcaatagaagtaaaatagaaggtactgctgaactttagataaacgcttcttcccataagagtttaataattctagaaagatccctctcaatttaaggggaaaaagagtattgcaaaaagtttgaggttagagtttattttttaaaaccatgtatttcagttttagatgatttcattgagcttatctgtgatttacctattttgctcttctcagtcctctgactatccagctacctgtctgtggatcttgttacctcaggcaagttctcatacaaagtagcaagccaagtgtacttctaccagctgtcctacggggaggatttcccctagctgctgtcctgtaggatcactctggagaggcactctagattagcccaaggaggtttgctcaaagtttgtacaacatttatatttcactctacaatctgcatttcagtatttatcttttataatttatcactaaggctttttaaaaaataactttgaagcatagcaactacacctgagtgtccaaggattcaatgattttctgtattcagtttttttgtagaaattgcatgaccttttgattcacaaattcaagtgttactttatttcaggaaagataatttctgttgtgtacttgaatgtgacttttgccccatttcttttattatcttttgggaataataaatatgcatatgttcgatctcctttatctgttttcagtacctatcatgttctctgttttcagttattcgatgtgtttcattctgtgtgatttcctctggctgcttccccatgactttgtgttttccctggtagttattctgttttgttgcttttactctgtctttcgtaactgttcttctgtttctctttctcttcattttctttgctgagctcttcttgctcttttcatgtttttcttctttcattcctcttgaatgtttaaatcctca

SEQ ID NO: 501 - DNA, 32744 bp, Homo sapiens; identical to SEQ ID NO: 157
  source 1..32744: mol_type = other DNA

SEQ ID NO: 502 - DNA, 9159 bp, Homo sapiens; identical to SEQ ID NO: 75
  source 1..9159: mol_type = other DNA

SEQ ID NO: 503 - DNA, 32746 bp, Homo sapiens; identical to SEQ ID NO: 283
  source 1..32746: mol_type = other DNA

SEQ ID NO: 504 - DNA, 27738 bp, Homo sapiens; identical to SEQ ID NO: 53
  source 1..27738: mol_type = other DNA

SEQ ID NO: 505 - DNA, 32744 bp, Homo sapiens; identical to SEQ ID NO: 160
  source 1..32744: mol_type = other DNA

SEQ ID NO: 506 - DNA, 3376 bp, Homo sapiens; identical to SEQ ID NO: 243
  source 1..3376: mol_type = other DNA

SEQ ID NO: 507 - DNA, 32744 bp, Homo sapiens; identical to SEQ ID NO: 92
  source 1..32744: mol_type = other DNA

SEQ ID NO: 508 - DNA, 32742 bp, Homo sapiens; identical to SEQ ID NO: 325
  source 1..32742: mol_type = other DNA

SEQ ID NO: 509 - DNA, 24917 bp, Homo sapiens
  source 1..24917: mol_type = other DNA
agtgttgcgcaggcgcatccgatcgactcggtaggtggggatctcttggagacggcgacccaggcatctggggagccacagaagtcgtactcccttaaaccgtgagtttccgacggtttgttccatggcgcgggattgtgagggattaggaacgaattctggatcgtgacttcggttttctcgccgtgcagttccttttcccgccccccttcggatccctccgacctgcggcgggaaagtcgcgcgcctgcgcactaagcatctggttcggtctctggcccgagggaagccggtccttcccggctgagctcgcggccagcgctggccggcggattcccattcattcacccttctcctcctccgcccagtactcgtggccagggtcgtatcagttctccgtcaacttgcttggggccttggacgagcctcctggcgcttcctgtcagtggcgaaaaggttttctccctcagttcttttcctgacttcaaaccgcccccggcgctcggcccctcccccacgcggtcccgctggctgtgccggactggcagcctcgccgtttcccactgcgcctgctgctgcgcgggtgcccaagccgggaaattctccctgcagccccctgccggtgtttctgataggtgaaaataaagcacatggaattccttagacaaggccacagtatgccctactgtggaggtttggacacatcgtgcgtttgaaaatgtttgcccctttggggggcagtagcatgtttttagtgcgtggtttagcgagtgatctaaatttctctagtgttctaattttcacagctgctttgctccccctgtggatgtaaccccttagctggcattttgcatctcaattggcttgtgatggaggcgtctttggggattcagatggatgagccaatggctttttctccccagcgtgaccggtttcaggctgaaggctctttaaaaaaaaacgagcagaattttaaacttgcaggtacgtgtttaaatccaaagatgtacagttataaagatttttcaggcaacaattctgtgttttcaattcctctcaaaaaataagattgaatcttataaagtgaattgtatgtttctataggacagtgttaaaacagagcttcgtatgatctaaatgtaggactgaattgcgatttggaagactgtaatacaacctgttttacggttgaagttgctatggtctcagtattggtaattaagaatgcagaaatttgatgatgcccaaattaaatttctcttttgtatctgtgttcttatctctactcaccacattgccttaagcttaaatgtagaaattgacactggagatcatcacttaagtattcaaaagcagaactcacagacaaaaaaatatgaaatgtttgtagcaataataaagcaccatatctcagtgtacagcatgaaatgttctttgaccgtaaaccagaccttagggtgaataagacagggtcaagcagtgcctgctcttgtacactcgcatgtgtaccttcatttctgctctggcacaggacctgggacatagtaggtatttgttaataataaatatttgttaaatagaggaattctagttgactgtatttttttttttctgaaagggtagccagatcatctttcccatctttgtcttaagtgaattctgtgcttgtctaaaagatacttattttgaccttttgtccatatattctttataaccccaccctagaaaaatatgacatcacatactttctgctttgatggaagtcagttatcccacttacctaaacttgaaactttaatcttcagctgatgctttttatttgttccccatatcgtcacctagctttatttctttttagtaagtatggcattgtgtcttctttccattcccatttccaccacattaattaatttccttacactttgttcctgatttacaacagtttctcacctatgctgcctgcttgcacttttccattcttcagttcatcttgtatgttggtgctagaataatcttaaaatgccactttcatccagtttcatggatactgttcctcttcctttccatttttccagcagttagctgtttttttagttcatctttcccttactagtcactggacacataacacagtaacacagtcattgtagtattctttttctattgcttaggactctgcattttgtctccactgtaaaccccttggcggcagtatctcctctggtttctaaagtatgttgtgacttcagcagagtatctgaatggatgactctgaattggttctagcatcatgtttaggagaatgccactattctaatattctgaaaatctgctgggaagtaatgaatggggtgaattttattacggatttcaaaagttttgtagcgtttatgtaacagaacattggacattataatatgataaattataaaacgtgctaaaactttactcttatggttcttttttaaatatgatcttaataacagctaaagttatataaacataacttcaatagggagcaaagctgatgaggtccaggcacataacagtctagtaatctaattgggaaagtaaatcaaattagatcatgagacaggtatatgcctgcacctcatcaactttactccttattgaagttatatttttgattggatgttttatatatcttagcattcccagagcttaacagtgtccagcacatagtaggtgcttgaaaatatttgaatgaatgatttaatgtaaggatataaagtaaaatacttagtgtaatggatgaatagcatgtctctttattttgagatatttgtcagatttttataacatttttctgataaacatgattattgaaatttttgaagtaaagaaagccaaaataaagtcttttcccattattgaaatattgccactgttgacattttgttatattcctttagcctttctaggcatacataggtacattttttagaaactaaattgggatcttgttttgtttttgtttttgaaaagagaaccagaatatgggatcttatttctgatctccattttttttaatatatatcttgaatattgctcatgtagtaaatattctacaactggatttaaggtccattgcatattatattataatatattcaatcaccttttactattgaccctatagattgtttctattttttcctattaagaaaaatgctgtaatgcacaaactatctggcataatattggtcaaatgtttattctttcactgttttggcaagcttttttttttttttttgagacatggtctctctgtcacaccactgtcactggagtgcagtggtgcaattacagctcactgcagccttaactcctgcactcaagcaatcctaccccctcagcctcctgagtagcttggattacaggcatgtgccgctacactcagctaattttaaatattttttttagaaacaggatcttgctatgttgcccaggctggtctcaaactcctggcctcaagtgatcccctcctatcttggcctcccaatgcactgggattacaggtgtgagccaccatgcctggccagtaagcttttatttttttttaagtatctactatatgccaagttttaataagtgagaaagatctgttcagtgaaagaatgatgtataaactctatattgaaagtctcctccatactggtgaactctactggaaggaaggcttgcttcattctgtttgctacaatgacacccttagccatgcttctaaaatgggctatgggtaccatctttgtttgcctgggacagatctagcttacggctattgtcacaatgtaattattattcctgctgccttttcactcaagagtgtcccagtttgggcttatattatgtattatcccctagttccaggaggtataaaccagagagtacatgaagccccagaataaccatgactatatgcctagagtgtcagttttaatccatgacaagatattgaaaacgtttcatttatgtgatgaatatttattgtctgttatatacatgtacttttttaggtgctagggataaatcaaaccataaaacagaaattaacactgtggtagttagacaatagacagagagtaaacaaaagaagtaaatactgtgctcaaaagtgattaatgttactaagaaaatgtaaaagggaaggggagataggaagtattggggaaggagattgtaattttagtgagtatggttgctcatagccttctgtaacatttgagctaagacttcaaggtggtgaaggagtgacctgtgcagatatttggggaagagcattccaaacagaggaaacggcaagtacaaagaccctgaaacggcaagtacaaagaccctgagatgggagtgtgcctagcattcaagaatagcaaggaggtcattgtggctagaatggggaaggtaattggaatgaagtcaaagagagatgtaaagaggctttctaatggagtgagatgtgaaaccattagaggttttgagcacaatagtgacaaggtgacttagctttatcagaatactctgtttaaactctgtttgctatgttgcaagccgactggctactatgttacagatagactccaggctggcaaggagtgtagttaaggagactattggtatattaaaaccaacttggatatattatgcagcagaaaacaaaagtgacttaaaatgtcaaaatagaagcctagaccttcatgtataaaatagaggcatttaaataatttttagcatattatagattttcgggatcctcctccagtcctcaaagtctgtttcatttgtctgtctttagtactgttttccagcttttgacatgaatgcacttttctgctttctgctgtcatttcccacttcagaatttgaggatattgcattcactttggttgccaggaagttttactgttgtttaaaattgttgaagttgttctgaagtgacaggaaaccttaataaacattttgatttttgtaaagaggagtagatgcataataagtgagtagtggtgtggaagtacccttaatgtttctcctccctttcacatctgttctccacttgtcatttttctgcttaaaaacttcctatagctttcatgtgcattctctcttgtcttcctcagccacattctatttctattattgttattattgttattattattgagacagggtctccctcttccatcacccaggctggagtacagtggcacgatcatagtttagtaacctcaaactcctgggctcaaggtatccttctgcctcagtctctgtagctgagactacaggcccgtgttacaaagcccagctaatttttgtttgtttgtttgttttttagcttttttaagagatagggtctcaaacacctggcctcaagcagtcttcttgccttggtctcctaaagtgctgggattacaggcctgagccaccgccccaggccacattgtatttcattgtctctcagccctccccctaccctaatcatccaagccttttttttttcttgttcctgtctttacagacgtagttaatttttcctaaaatgttttcttccactttcactacttggtgaatgcttcagaacaaaacttagctgtcaactgaaggcttcctatcaccttcagaaatcctccccaacctagtagtatatacattcttttattacaggtgtcaccttgtattaagaatgataacatgtttcctttactagaccaagctcttagtggctgcatcaaatttattggttttttttacatacccattgctgagcattttttaagacagcgtttatttaaatgaattagttctagccaggtgcggcggctcacacctgtaatcccagcactttgggaggccaaggtgggcagatcacttgaggtcaggagttcaagaccagcctggccattgtggtgaaaccccgtctctactaaaaacacaaaaattagctgggcgtggtgttgcgtgcctgtaattccagctgcccatgaggctgaggcatgagaatctcttgaacgcaggaggcagaggttgcagtgagtggagattacatcactgcactccaacctgggcaacagagtgagactccatctcaaaaaagaaagaaaattagaaaatatatataatcagcaacacctctgtgaaattgggcaaatgatttaacctccctgaattgagtttccttatctgaaaaatcaggataatcattcctgctctgccaagttcacagtactgttaggaagacctcaaaagatactgcatgtgccggtgctttgaaaatgtcttaaacttatgctatatagggctagtagagcctagatactgtaataaaatctgaagacttatctagttctcttctgtatccagtagtttactgggttttgtattattgcctccccttgttttaactatgtacatttttataaagaactgatacttatttaaaagtagcaatttatctgcagtcaaggatagaggatactactggcaattgggacaaatttttaaaaatacttttttacatgcttgagagctttagtaggccttctctctgaaaatatagtgtgaatatttaatacataaaattttaccaagcctttaagattttgtatctttacgggaaatagttttcaagaacatcgcaatgtgtccttgtcatgccatctagtgatcacagcacaaattgtttagttattttaaaaatttggtgctttttcatgttgtaatctctacagtaacaatgtatctcttagtatataattccagtatagtagaaatttggtgtatttaattctgggactgtcatttttgtctgttcaagaggtgtgtgtgagttatagcaacttgatgggttttaatcttatcacaatgttattaaaacttatgtataattaattactcatattttataatttatttcattgagctttttaaattttaagaaactgtaaaatatactgtcattgattaaaactctaaatttttgtttccttgaaaggtgttaaaaaagatattgagaagctttatgaagctgtaccacagcttagtaatgtgtttaagattgaggacaaaattggagaaggtaatctggggatatgcttttactatttttacgaggtcttttttccattctattttccttttttagtcttggttttcattactatttcttattgaaaaatataccactttttagactattaagaccatagttttattactaattatggtaacagcttttctttttcaaccttaaagaaagaataaataataaatatttactgtaaaatgaagtcctgttttaatgtattatgccattgaaacagtttttacaatctatcttagaattgtttcattaacatttttaaaaaccagatattgaaaaatttaataaattgttttacaggcactttcagctctgtttatttggccacagcacagttacaagtaggacctgaagagaaaattgctctaaaacacttgattccaacaagtcatcctataagaattgcagctgaacttcagtgcctaacagtggctgggtaggcaatttaaacatattttaattgaacttgtatataatttataagattttaaagtagatatttagcagggatgaggggattatatgtgaattaaatacatttttcagtcaagtgtttgcaatttgctagcactttccttctaaccttgcaatagttagttaaatttatagtaattcttttagattggatttcccttgaggctcgacctgatttcctgtcttttatcactgctttttgtaaccttcctgccaaatcataaaccttggctttcatggtttacattattttgtaaatgtagggaactcacatttcacatttccccagctattgacgacctcatctaatattttatttagaataacagaatcatctggtatggtttctctctgctaggtcatttctgtcaacatatggacatgatttagaatcttaccctcctaaactgccctccttcttccacctgctccatcatttctttgttcccccttacagccagacttctcaaaaattatctgcatacattgttttcattccacacctctctttcactaaatacctattgcggctgttcttctctatgctaaactggaaactatagagtcaatcattactctaggcatcatttaacacaattgacgtgaacccttgtcttgacttctgtcctgccacaccctccttgttttcttcttccctcatttggcctttcattttcagtgtctttgctagctcttccacttctatctgacccctaaatattggagttcctcgtgcttgctcttaggtttctctgtattcttagtgtcctccatttccacatgatctaaagtaatgattcccaaaagtatatagttaatctcagaccttttatcttaactacaggtttgtgtatatccacctgcctatttaacatttccacttggtgcctgataaatatctcaaacctaaaagacaaacctaaaccttaacataccaaaaaaaaaaaaaaaaacaccacaacaaatgttcttatccacccgtctctgcaaatggcccatctacacacttgtttgggccagaaacctagaaatcatcctcattttctctatttctctcctaaaccacattaatcactaagtcctagccattttggctctaaagtatatctagaagttcatccatgtctttctgtcttctctgccactacctcagatgaagcctagactacgactgtagcctgcttcttccttctccccttaattctgtctttacacagcagccagaatgatctttaaaatataaaatatatatgtatataacttaaattgggtcattagttccaccacttaaaatctttcagtggtttccctatgtactttgaaaaaaaaattcaaccttctcatgcctatcttcccacctccctcactgtgctccatttctttagtttatcaaatttgtctcaagagctttcttacctcagggccactgcccagactgtttccccattcaggaagacctctcccagtcattgcttgctgacccttcatcttctgatctgagcaagagtgaaactggacgcagtagttcatgcttgtaatcccagcactttgggaggattgcttgaggccaggagtttgagacctgcctgggcaacctagcaagaacccatctttacaaaaaacttaaaaattatccaggcaaggtggcacacatctgtagtcccagctacttgggaggctgaggtaggaggatcgcttgagcccaggagtttgaggctgtaatgacctgcgatcactccattgcactccatccagcctggtcaacaaaacaagaccctgcctctgagaaaaaaaaaaaagagtgacattgcttgaaagatgtcttctctgaattaaattagattctcctatttttttttattgtcatagcatctttagatttctttcaaagcccttatcgtattctgtcattataagttaccttgttattatctgtattgtccactagatagtaaactccatgaggacagaaattctgtaaattttattcactattgcatcactaatgtctataatccctaacagcaaataacagtgccaactaaatactgaatgaatgaataagcctgtttgtttcagccttctgtgtattatagaagacaagaaaatgagatggcctctataaagaatgcttgcatacattcttgtaccctaaatatgatcatttctttttctatatttttaactgtctccctctaccactttttctttttctgtgcttaaaaaagtacatgctaaaaatgccttcatctgatcttacaatgcagtcaggcaaattgtcttcaggctcagcttccattgtgttatattttccttccttctgttttgtttcttcctttccacttaaattgctgtcttaaaaattaccagttaattattctttgcctaactaaaagccttccctcagttgttattctctttgacttccatgctaataactcttccttcaaaattcctttcttatttggctctctaacttggcttcttccaagctcagttttcttttctcgctattaattttcatgtctgtaggtatcacttctctgcaggtactctcactgacttctcacttgtcttctcacttaaggcttagtcccttgtctagataactctatcaaaatgatgaggtctggttttagatgcttcttttactggcttctctactcattttttggtatctctattgttttcttactcaggctcaaaatcatagaaatcacctttgtcctattttcctcttttatgaagcagtgtaacatagtgattaagaacatatatctggagcaaaatgcctgggttcaaatcctggctcattgatctattagtttagtgaccttgatttatttattactgttaccatcttatctgctaagtcttattaatcttttcccttttttctcattctgctgcttccccagtcacaactataattacctcgtttgaattattatagtaacttcaaaactggtgccatttttgttttaaaagaaaactttaacacgagaacacaagtcacttgtgtttatattatgtgatgatgatttaagtcagttttctagcaatatgtatgcattgctaaaattgcggtttttaaaattaggcataaagtttcagtccctctgacctttcttctaaaagttccttgtgcatttttccactagggggcaagataatgtcatgggagttaaatactgctttaggaagaatgatcatgtagttattgctatgccatatctggagcatgagtcgtttttggtaggttttaatatttcttgaatttttattagctaaatatttaattgcaaacaatatttgtaactcatttcatttgtaactttgttttaggacattctgaattctctttcctttcaagaagtacgggaatatatgcttaatctgttcaaagctttgaaacgcattcatcagtttggtattgttcaccgtgatgttaagcccagcaattttttatataataggcgcctgaaaaagtaagtatgaagagttactagaaaatatttatcctatttcttttaaaaaacaattttattgtctatatttaaggtattgaacatgatgttatatatagtacaaaagttactattgtgaagcaaatatttatctcagttacccatcttatttttgtttttacggcaagagcagctaaaatttactcatttagtatgaatctcatatacagtacagttttattacctgtaatcttcagagtgtgcattaggtctagatttatttatcctacatatctgctactttgtatcctctgacttatatctcttagatataatataacatactgcaatagccatgcacagattatttctgtttcagtttctttgtgattggaaagggaaatttggtgatgaagaagataaaattgtattagtggaataatgtacattattagatgtactatggttcagtggaaatagcatgaactaacagacttagagtctaataatttttgaccttagacatgtctcttatctctggacttcatttttcttttctagtaagtgaggggattggaccacatgatagccaatttcctgttttaacacaaaagttttatttttatgtatactttttaatgctgattataattatagagaaattataagctaaaaataacataaatacctctatataatggatcatattaaacataataatattataacttcttttttgagcttttatatgcctgactttttaattttctttaattggatcagattttaaaaccatgattttaatttttttaagctttcttaactagaaattatctgctatgatgccatctctgccaccatcagagaacaacggactgtgtttatgttatgtattcctcttctgccttattaacacagaccactggaaaaagaaaatttgattgtgggacaactcttaattttcaatcctggttagctgttaaattcttactttgtctggaaaacttatttttttttcttttttccagaatgttataaattcctaattgatcccaaaaagaattacagtttttatgaggatggtttgagagtattacaatgttactaagctttaattgctacagataagtaaaaatgcttaattttgtctcttaggtatgccttggtagactttggtttggcccaaggaacccatgatacgaaaatagagcttcttaaatttgtccagtctgaagctcagcaggaaaggtgttcacaaaacaaatcccacataatcacaggaaacaagattccactgagtggcccagtacctaaggagctggatcagcagtccaccacaaaagcttctgttaaaagaccctacacaaatgcacaaattcagattaaacaaggaaaagacggaaaggttctatctcttttatttcttaagtaccgacactgttttagaaatatactccttcaaccaacagagggagatagaatactaggatagtacttataatttaaaaaacttttttttgcatttgttatatgtattcatttgattaaattttcactaagatttgtactgaatcattttggttactattttaaaactaaaatttactttgtcagtttataacatctgtcattaactattatgaaatcatattttatgacaaaaatggaaaatattaaattttccctgcatgttaaaaagttcagattaattatcctttttaaaagaaagcattagttataggggaggaattctgaagtgtctatctccattttagctgcacagcaaaatgtaacatccatgcaggtggtttttgaatttttttttagttatatatatttgtggactatgataacattgtatgggtgttgagttctgtctagactattttctcctttcacagaagtggtttggtgcctgagaatgacttggatgcagctgtttttgtttcatctcacttaactctttcaaaactatggcagagtacagctggcagaaagtgttacagatataatccttattttccttgtttttgttggtattgtaggagggatctgtaggcctttctgtccagcgctctgtttttggagaaagaaatttcaatatacacagctccatttcacatgagagccctgcagtgaaagtaagtaatgtagcttaatagcataatggtcagtcagtcatacactgaagagaatttaggtaataactagattaacatttattatcagaaatttttttaaactagagtttggctttggcagaaggtattactgctttaagcatttagtcaaaacttgttttctccagtttttttctgaacttttctggtggaattttttctcatttttggttagctattactgtctttctctagaggaacatttagaacattaagggctttctgtcattgctagagtgtgagctccatacagttagctaactattctgacacatagttgatagtgtaaagatgtttgtaaagttaacaaaatcatcatcaatgtagatgatttcagattgacttatgatatcttgtgacagctagacagcatgagcaacaaattaaaactgtgattttagccaacgtacttgtgcagtttacagttctgaaatggagttagacactagaacataactgttttatacttctgtaatatatcaggaaaagttctaataaagtataactcaaatattggccaagctaggactaattagtaaattttaatataaggtgactttacagaaaaacccaagaagaccttaaacattttaatagacaacagtttatttacagtccaatagccattcagcagtttttaaagttatgcttccgctattgctttttgccatactagcattttaggacatcatgtttaatatcatgaaaatagaaaaatgagacttttcttttacagctcatgaagcagtcaaagactgtggatgtactgtctagaaagttagcaacaaaaaagaaggctatttctacaaaagttatgaatagtgctgtgatgaggaaaactgccagttcttgcccagctagcctgacctgtgactgctatgcaacagataaagtttgtagtatttgcctttcaaggtaatgtgttttgatggtgttataaaatcaccagcatgctgccattagaaattgcattgacttgggtggataattttgtgagtgcaagggatcagttcagatcagtgaactgcaatgggccttgatgcagagcagtagtatgttgaagagcaaatgataacagttttcatatattatttatttaatatggatatactctggaaaacacatttgctcttatatgcaaataagtgggacggggtggcttttagaagcttagaatcacacattttgattgctgatgtagtcttttctgttttctctttttattcccgcttatgtggagtaaccagaaccaaatagtagagctcctcttttactcccacctccaactctttgactcataaatttcttcctttccttcaaggcttggctttcataaagcctttcttgattaactcaaatatataagtgtatctgtgatcaattactccaaacaaatgaatttttatacctgtgaattgctattgggttctattttttctattatggctcttattatccactactgctttttattcttggaggttattttaaacctttctggagtaagtccggggaactagtagagggggtaaaaaacagaagaagaaaaatctaggatttttatcacactagattatcatttactttatagtaacacttattatataggtatcaaggcaaaatttactgtgaactaaattgatgaatgttattttttagacttacatagttcaactttaacataactagagaaatcttatttcatcataaggcgtcagcaggttgcccctagggcaggtacaccaggattcagagcaccagaggtcttgacaaagtgccccaatcaaactacaggtatgttgtactggaaatacagaacctagttaaaatggattgttccagacgtattttattttatgatctttgtctatttataactaatatttgagttcttctgcttttaattatgtaagcagttcttgcagtgtggcattcctatttttgagctaatgctattctttatgaaagtttttaatcctaatgttgcctctctttttttgtttaaacagtttattccatagattacattttgcgtatttatttacaagatgatcttaccatcttgtaaataaatacgcaaaatgtaatctgtggaattttgctgacatcacctttgtgggggaaaaaattatgtttaatagtttttgccagccaaagacttaaagcattttatttgcttgcttaatacctcaaaagtttcctgtgatgtagatatatttgtgtttgattaaaattacttttgttattatataaacaatataatagcagttagaaggttttgaaaaagaaaaatgtcttccgtaatctaaaaacttaccatggagctggaatccaggaaacatcttgaatgaatagatgaatcctgctattcacttggattatgggctttgaagaaatgtattcattcattgaatgtctgttcttgcttgctaatgataacaaataaataaatgagaccatctgttcacactctagtcaggacaccatcaaataattataaaataacctgttgagtatggtaataaaacttattcagggtatttaaggagtatctaactatcctaacccaaagagattatgaaaggcaattcatgaaagaaatgacctcttagaatgtaaattgggctgagaagttagcatagaggcatgagccaaggaactcaagaaacagcatacaggaaactaaaaaagtttcattttggccagacgcggtggctcatgcctgtaatcccagcactttcggaggctgagatgggcggatcacctgagatcaggagtttgaaaccagcctgaccaacatggtgaaaccccatctctactaaaaatacaaaaatcagctgggtgtggtggtgcgcacctgtaatcccagctactcaggaggctgaggcaagagaatcacttgaacgcaggaggcggaagttgcagtgagccaagatcgcaccattgccctccaacctgggcgacagcaagacttcatctcaaaaaaaaaagtccaattttgctagaatattaagatgcaagttgaggaatggtgagagataaacctggaatgaggtagacaaggtcagaccacagttgttacagtttggactatatactgtagatattggaaagttaagtgaaaaaagtgacaatggtatatcctagatggatcattctggcaggcgtgcaaacagattagcttttggagagtggtggcatgaatttgtccgggtgagaggatgaaaatgtgaatgagggtattggtaataggaatgaaaagaaaagtgaagggttagaaaggcagagcttggtggataattggatgtagaattagggtgtggtatggtgagggaaaaaggcattcaggatgtttaccagattcctagcttgggagacttggatgtgtaccagtaaccaaggtggagagtaaaggagaagtaactggtttataggggaaggtaaggttagtttggggtataattggtttgaggtatttgtgggacatccaaatagagatttccagcagaatcaaagttaagtctgatgctcagcgaaggagctgggctagaaatacagatgaatgtcatcattatataaatgacagttgaagccatgaagtggatggaccaatcagggagagtatacagagggagaagttaaaactctgaggaatatccgtcagcacttaaggcttggagaaaacattgaaggagcaggcagaggtaccaaaggagctaagaaaggcaagtagggccgggcacagtggctcatgcctataataccagcactttgggaggccaaggcaggcagatcactaggtcaggagttcgagatcagcctggccaatatggcgaaatcccgtctctactaaaaagtacaaaaaattagcagggcatggtggcacacacctgtagttccagctactggggaggctgaggcaggagaattgaacccgggaggcagaggttacagtgagccaagatcgcaccattgcactccagcctgagcaacagagtgagactcagtctcaaaaaaaaaaaaaaaaaaaaaaaggtgatacagtagcccaaggaacagagagcagataacctggtgatactaggaagtcaacaattaagagagatgtcaactttaagaaaaaaaaaaaagagctttttaacatcaagttgagctagtcgtaatctttaactaccagaattcagaagattaaagtttctatagtgggaatgtaaattagtacaaccactatggaaaacaatttggacgttcctcaaaaaactaaaaatagagctactacatgatccaacaatcccactgctgggtatatacccaaaagaaaggaaatcaatgtaccgaagaggtatctgcactcccatgtttgttgaagcactattcataatagccaaaatttgaaagcgacctaagtgtccgtcaacagatgaatggataaagaaaatgtggtacttacacacaatggaagtactattcagccacgaaaaagaagatcttgtcatttgcaacaacatggatggaactggagatcattatgtcaggtgaaataagccaggcaccgaaagacaagagttgcatgttctcactaatttgtgggatctaaaaattaaaacaattgaacccatagagagcagaaagatggttaccagaggctgagaagggtggtgggagggtgtgggggatgtggggacagctgatgggtacaaaaaatagttataaagaatgaattatccagcactttgggaggccaaggcaggtggattgcttgagctcaggcactcgagaccagcttgggcaacatggtagaaccctatttctaccaaaaatacaaaaaagtagctggatgtggtagtgtgcatctgtggtcccagctactcaggaggctgaggtgggaggatcacttgagcctgggaggcggaggttgcagtgagccgagatcacactaccacactctagcctgggtaacagagccagaccccatctcgaaaaaaaaaaaaaaagaatgaattaagacctagtatttgatagcacagcagggggattatagtcagtaatttaattgtgcagtttaaaataactaaaagagtactttgaggggctgaggcaggcagatcacttgagcccaggagcttgagaccagcctggccaatgtggcaaaacctcgtctctactaaaaatacaaaaaaaaaaaaaaaaaaaaaaaaaagagctgggcatggtgacatgcctgtaatcccagctactcaagaggctgaagcatgagaattgcttgaacctgggaggcagagattgcagtgagctgagactgtgccactgcactctagtctgggccacagagggagaccttgtctcaaaaagaaaaaaagaaaagaatataattggattgttcgtaacacaaaggataaatgcttgagggaatggataccctgttttccaggatgtgattattacacactgcatgcctgtatcaaaacatcttatataccccatcaatatatacacctactgtgtactcagaaaaattaaagtcttcacagtcacaaaaaaataaaaaagtaattttttaaaagtttctatagcagtagttggtgctagtgtcagctgaagaagagcttctaatgttcattacttttcactaaaatgaaagcactttgaccagtatggtatgtaattctcaaggatcattcagattttttcccacatagctatttttggattccttttgatcctataaaatgtgcgtttacttagtgtttcctagtgattaaatatccttttaaatttaccaacacgttgctcaagaaagaaaacatattttgcagtgaggattctcagtcctggttgtacattaaaatcacctgaggaacttttttaaaacattgatgcctgagccctacttcagaactgttcaatcaaaatctttgggtctgggcatctgaaatttttaaggctcccaaggtgattctaatgcataataaatgttgaggactattgatttagatgataaaattatagatttgaaatttatttttaaaatttgtcttctgttgcagcaattgacatgtggtctgcaggtgtcatatttctttctttgcttagtggacgatatccattttataaagcaagtgatgatttaactgctttggcccaaattatgacaattaggggatccagagaaactatccaagctgctaaaacttttggtaagcagttttgtattatagaaccaaacaaaatgcctttgattatctcctacaaatcacttaataaattattgtgaaattttctttacaaataaacattcagtcttgataaagttctctaatattaagtagaaaattcttcagttgcttgaaaataaatttatcacctctctatacatataatcatttaatcttattaagcacaaagtaatacactgttgcagtatttaaagtttacctttataattttataagaataaggagtaaaatcttaactccttttagttatggtttgacttttattacataaatttaccttttattaaaggcatgttttactttgtaatatgttttacttttttattgtcttttaaacatcagatgcactatgtcttggtacttagagtgtccttgccttaaatgatcttaggctatactaacaagtaaacagttaattattaatacagtgtaataaggactagggaagagaatggaaatgtgtgttgtcaggttgtgtaggtttacggtagcagagaagcagaatgcatagaaggccttaactgatgggatattattgtaagcatatattggacttggatgtcatctccttagccacgcaagttcttcaagactgggatgtgcagtgtacttcatagggcacataagaattatctcagccttgctctggccaacaatctgaactcaagtgcccatttaatgtttattttccacgctcagttatagttaatactttccaaggaataagtgggattgactcagcttactaccatacaatacagaacacctcaggagacaaagtttcagccagcctacctcaagagtagctgggctgtcttgtgctcaaccccaggatcagtgggtcttaaccagagttgcatgtcagaattatctgagaatctttaagaaatacatatgcctgcccactcagcctattcttggaaaatatgattcagaaaaacaagatacttaggaaggctccagccttgttagtttgaaaaagcaagtgattctgactaagaaactatgggtgtttaagaaccactgcaaaaattactgcccttgcttatgcactagtgctatagtctaatctacaagaaaaacttagtggtggttgtgaagaaagcctcatcttaatagaggcttgccaaaatatgtttctacagtaaagtcagtccacgatttgtaactatcttgtacttattgtaagaaaattttatttgaagataataggatgaaataatacaagggaaaaaaagtgaccatgagtggaaagcaagattgatatcttagaaatggcattcttacataataatataacaagtatgtttattctcaactgagaaaactttcatctactattgaataacttcgtgagaggtttatgaacatgaagtttatcagccaataccaacatattttattgaagagcttgaatctcccccattgtaatccaagttataatcagggccaacaatggaaatacaacatctgacccaaaaatactctagatcaagtgccatgatagcaagcaagagcttttagagatttatcattgtaatacttctcatattaaaaaaaaaatagggccagccgtggtgactcacacctgtaatcccagcactttgagaggcttaggtgggcagatcatgaggtcaggagaccgagaccatcctggccaacgtggtgaaaccccatctctattaaaaacacaaaaattagttgggcatggtagcatgcacttgtagtcccagctactcgggaggctgaggcaggagaaccagctgaacctgggagatggaggttgcagtgagccaagattgcaccactgcactccagcctgacgacagagcaagactctgtctcaaaaaaacaaataataaaaataatgccataggacttgtctcagttgtattagtatgacatctgtagttattttagtcttgatcttactataactttggactgagtataaaagcctcaaaatttcaacaaacacaactgtgttcccctttgtaacctaaagaaatgacttggctgagattagcagtgagagcacctttacttctcttatctgtcctcaacccttaaacctggctccattgtgggttgtcattaagtactcagtgaattgtgttgaataaattaaaaagaaaagtcttgagctgaaacaaattcctgacacatagtagtctgtaataaaatatgttgactgatagtgttacttgaagttatttttcctgaatattgtaaatgaaccctctttttggtcatataaaaaaaagcatattgtataacttggggacatgctataacatatactattagttattttatgacttcagaacaagctaataaaggaataaaactatatgaatattcccccctggctataattttctagagagaataggaatgatagaatcagtttaaaagtaaaaaagcattggcatattgtactctcaaagaatttggtcttcagtaattgtttgtttcctccctttccctcccccatttttttccctggcttagtacaccagtccagtagttagttcagaatatgtaaaggtaactttttatcatccacagtcagattaatgactttgttgacaatctacattctcagaaaggcatctaaatgttgtggtacttgttgtttcgtacatttagtatatttctgtttaataaggaaatgtaaggcaaaaataatacatgattgccatttgtgtgattaacttttttttgcacatctgataataaacccatcaggaagttatttcaaatacatttatatttttaaaaacagatctagtttgtttatttgttcattcagaaacatttattggggctttatgtgtgccaagtactattgcgagtctctgctttcacagagcttaaattctagtgagggagagaacataaataaatactatgagaaatgagtggtactgagataaaaggaaaaggggagggaagaggcttatttaggataggttggtcaagaacagcatctctaaggatgtatgtgtcatttgaacagttgttgaaaagaataatgcctttttgtctagtccaacagacattaactgactacctaatctgtaccaggcataggctgggtttggggggttcaaagataaataagacagttcctgccttcaaagagctcagtctactaggtgggacagacatatataggatagcaaaagtaatagtagaactctcaagatacagtagaaactgaaattgatcagttctctctgagggtgtcaagcctcagaggtgattcttgatctgagtggtgatgtcagtgagagtgtcctgggcacacaaggggtgcagggcatcctaggcaaagacaggagtcatgtagtcaaagacatagaagcatggaaaggaagtagagtgggggcgtgggagctgcagctagttaaagattatagaagggtaagatgaagcttgagaaattggcagagtcaagtgagtgcctggcatagcttagtaagtcactgctttgtacttactatctcccactttatctcccactatgcaattcaaatacaacttaaatatagcatgtggtgctctatctcatactgtgtgtgtgtgtgtgtgtgtgtgtgtgtgtccatgtctataaagcatatgtttgaactttcatgtttctcatgagagaggcttctgatatattcaaataataaaatgtttttttctgtttttgttttttcttcttttgcttttagggaaatcaatattatgtagcaaagaagttccagcacaagacttgagaaaactctgtgagagactcaggggtatggattctagcactcccaagttaacaagtgatatacaagggcatgcttctcatcaaccagctatttcagagaagactgaccataaagcttcttgcctcgttcaaacacctccaggacaatactcagggaattcatttaaaaagggggatagtaatagctgtgagcattgttttgatgagtataataccaatttagaaggctggaatgaggtacctgatgaagcttatgacctgcttgataaacttctagatctaaatccagcttcaagaataacagcagaagaagctttgttgcatccattttttaaagatatgagcttgtgataatggatcttcatttaatgtttactgttatgaggtagaataaaaaagaatactttgtaatagccacaagttcttgtttagagaccagagcaggattaataatttattttaacattttagtgtttggtggcacattctaaaatatagattaagaatacttaaaatgcctgggatagttcttgggactaacaacatgatcttctttgagttaaacctacctaagtagattttaggtgggttcctattaggtcagatttttagcttccctaattacctttcactgacatatacagaaaaaggagcagttttagttttaattaattaaaattaacagatgtgatgaggattaaatgaatcaaaagacttaatttgtagattcttttagagttatgagctaggtatagtttggggaaactcaacctggtgctggtgctcttaacaattttgtaaataaagaagataatttccttttctagaggtacatattaggccttttatgaacactaaaacaatgaggaaatgttggtcatggggcaaagtatcacttaaaattgaattcatccatttttaaaaaacacttcatgaaagcattctggtgtgaattgccatttttttcttactggcttctcaattttcttccttctctgcccctacctaaaacattctcctcggaaattacatggtgctgaccacaaagtttctggatgttttattaaatattgtacgtgtttacagttgggaatttaaaataatacatacactggttgataaagggaagctgcaggaccaaggtgaagattgatagtccaaatgcttttcttttttgagttgtatattttttcacaccatcttagatataattaggtagctgctgaaaggaaaagtgaatacagaattgacggtattattggagatttttcctctgcgtagagccatccagatctctgtatcctgttttgactaagtcttaggtgggttgggaagacagataatgaagtaggcaaagagaaaaggacccaagatagaggtttatattcagaaatggtatatatcaatgacagcatatcaaacttcctatgggaaaaagtctggtgggtggtcagctgacagatttcccatttagtagtcatagaatacagaaatagtttagggacatgtattcattttgttattttgagcattgataggtcagtatatctacctaatctgtttggtaagtataggatatataaaccattaccattgatctgtcttatgccataatcttaaaaaaaatttgaatgctcttgaatttgtatattcaataaagttatccttttatatttttta

SEQ ID NO: 510 - DNA, 32744 bp, Homo sapiens; identical to SEQ ID NO: 342
  source 1..32744: mol_type = other DNA

SEQ ID NO: 511 - DNA, 12660 bp, Homo sapiens; identical to SEQ ID NO: 485
  source 1..12660: mol_type = other DNA

SEQ ID NO: 512 - DNA, 21263 bp, Homo sapiens; identical to SEQ ID NO: 234
  source 1..21263: mol_type = other DNA

SEQ ID NO: 513 - DNA, 32744 bp, Homo sapiens
  source 1..32744: mol_type = other DNA
agatgacaggattttcccgcgaaggagaagcgcgcttttttccctggcgggggatttggctagaaggctgggccggcagcggttgtgaggagttagctcgcggcattgcaggctctgagaggaggggacccggttcccgggtgagtgtccaggcatgccagcggaacggcccgcgggcagcggcggtgagtgaggaaaaccttttgggcgcgggtggcagcctgcggggctgaggtgggcaagcatggaggctgcggcggagtttcggggagggagccgaccccgggcagggactgaggaggaaaggagggttgggaaactgcaacggtgagtggaggacaccccggaatcgcacgtattagcatgccggtgaagatttcacataggcaactgcattttcccgagcatcccgagttgtaaactgtggtccaggcgacttgtagacattgtgaagacttacggtgtcttctgagaggtgatgctggcgtcccctcggtcttcagcttttgctccagtgcatctcgggtgggagaaaggctgtttcttgttggagttgagtagttggtaatttttttaaaactgcaatttgaaagctttctcccccgtcaggctcggaggctccagcaatggttgaacaactggacactgctgtgattaccccggccatgctagaagaggaagaacagcttgaagctgctggactagagagagagcggaagatgctggaaaaggtaatttaggcatcaggttcgtcgtcgtgaaagcctgtggtaacctcggctttaacccggaggtgtggtttgtgttctttgctttcctatttagtgggctttttaataactgaaagaaaacagctttattacttgtcttttttgtatgtttacagatattgcctttgagaatcctttcgcaagtgctttgaatggtgtgtttctatgagatgtagtcttggtagtcccatcacttttaaatgagcatttcagattgcttgtttagccatgaaaagtctttcaaagtccatagtgagttttttcgtttgtcatccttatttcctttaaaaattaccttaaatgtatgtctcatggcaaacaggaatcgctaaaacctgcagaagtaatgtactagactgagggcaggagaagttagcatcaatcaaaggctgggctggaatccaagtctaatgatttccttatactgtagtgctgttttccacctaagtgatcaacttgctgtttgtttttcttttggtttcatggcctgtgtattgctacataagattctttagctaaaaatgtgccgtactttttcaatgacaagttgctgtagttttcttgtagagagcattttgtaagttactaaaaacagtttttaacctgaaaaattcttgtttattctaaagccccaccctgctgcttgattcatatgcaagaaaaagaatgatcgttgactcttaagtactgcctagtacgtggttttcttgtgctttattaatttattaaactctaccgatattatgatataggttattttttgttattttcatttacaaatgaagaaactgagggagaagggcacatagtaagtgttgaagtcaaatttcaactcaggctgcctgcagaatttctgtccttaataatagtgaattaactcatgattataaaactacttaagttggaaaataatgcattccaaaaacgagtaatgaggccgttggttccctgttatgtcaacaataatttttttgtcagcattgttaatacttcttgaacatttattaggagtcatgcattgttttgaatgctttatatgtatttactcattgaatcctcaactattctgtaaagtagatgttcattattactattactgctattaaacttactagtttaattactagtataaacaattgctattattgaactacacaaccaaataggttttattagtcatcttattttacagatgaggaaactgaggcacatagaggttgtttgggtgccacagttggtaaatggcagagctaacattccagtgtaggccatgtggttctagaatgcacattttttaactaccatgctatagttccactccagtaatactccttccgttattactgatgatctctggttgactataaccagttaaggtaatatattaacaaattttctttaagtaacatcaatactttttgcttcagggtagatgtgaattaacagaattgagaggtctgacctgaaccaccttttctcattctttgaattttcatagtactttattacacagaatttaccatgaccaaataagtaatgataaatacttcatactactttttgattctttctcactttgtttcttgagggtgcatcacttgctgttttgtttttgtaggctttgcacctggcacatagtaggcaatcagtaagtgcttattgaatagctaacgatgataaaatggtattttataatatacaagattatatacatatactaaatatacttattagctatataaccagatgaattataaagtataaattctggggcaagtgcccagaatggaatcaactgaagaagtctaagagggatgtgataattttgtcttgagtaatgtatcttcagttttatcttgtttcttcatatacccattatgagtgttgggtagggaaatagcatttaaagaaagatatgcctgagatatgacaacagtacattttcagaaggtattattcattcaaggaagaaacacttcacatttaaaaaagataagtcaaatatgtagtattttatatatttgctgaggtcaaatgacctgctacttttaatgacatttttaagcttatgaacaaacattttgcagttagtcctaaatttaataattatgcatcatagaacctaaagagtaatttttaatccttccattaaaaaagtatatggctgttttcatggcctggcatggtggctcacgcttgtaatcccagcactttgggaggccgaggcgggtggatcacctgaggtcaggagttcgagaccagtttggccaacatggtgaaaccccgtctctactaaaaatataaaaattagccagatgtggtggcgcatacctgcagtcccaactactcaggaggctgaggcaggagaattgcttgaacccaggaggcagaggttgcagtgagccgagatggcatcactgcactccagcctgggtgacagagcaagattccgtctcaaaaaaaaaagtatgtagccgttttcaatcttaatataagtgtgtaatttgctaaaacattagtgttgtggtttcgtattacattgtcttgttatgtacagataaggaaagtttttgattattttttgcactggaccctcataaaaagtgattgcctagatgacactagaaaattctaagaaaagttttcagagtctctacctacttgagattaataaacatgtctttggaggccaaacaattaactatgcacaggtagagattccttttcttttgggagaatacagtctgtatgggcatgtatttagaagtacttaacagaggaagagctagcttaagttccttaatgagaagcatttggctttaggaaatcctaaggtttgtgaggaacctagaaaatgactttgacattcattggctacagttattttctttgacttttcacatgtatttccctttaaaagaagtcattgttagtctaggagatttgagtactgatagtgcctgtgaagtggaggagggggaatagttggagtcaggagatttcttggagaggtaaaaggatcatgatatgtgtaggctaaaatagaactcctcccaccccccaataaaaaatctgggattggtgttgggagagataatggggtagataatgaggaatttctgccctcggtgtccattggcatactctgtactgtagttacccagagttgtttcctgccaggcactcagtgcttttaatagatggagttgcaatttaccgtaatataatcatgaaattgataaataaagaaaaaacagtgataggaagatttgaaatacagaagaccaggtttaaggattaaccacttacatggtattattttaatattaattgtatattatttttttccatgatggcatcttaaagctttagtgatttttatttttatttttatttttttgagacagagtttcactcttgttgcccaggctagagtgcaatggcgcagtctcggctcactgcaacctctgcctccggggttcaagcaattctcctgcctcagcctcctgagtagttgggattacaggcatgtgccgccaagcctggctaattttgtatttttagtagagatggggtttctccatgttggtcaggctggtctcgaactcccaacctcaggtgatccgcccgtcttgacctcctaaagtgctgggattacaggcattagccaccatgcccagctgatttttttttttaggaaaaatttttccaggagcaccaggcaagtatttaggttttttttgcttgtttgtttgttttgagacggagtctccctctgtcacccaggctggagtgcagtggcgtgatcttggctcactgcgaccttcacctgccgggtttaagcgattcttctgcctcagcctcccaagtagctaggactacaggcgcgtgccaccacgcccagctaattttttttgtatttttagtaaagacggggtttcaacatattggccggcctggtctcaaactcctgacatcgtgatctgccttcctcgacctcccaaagtgccaggattacaggcgtgagccaccatgcctggctgtatttagttgttttaaaaatatgtgctggccaggcgcggtggctcatgcctgtaatcccagcactttgggaggctgaggcggggcagatcgcttgagcccaggggttaagaccagcctgggtaacagggtgaaaccccatctctacaaaaaattaaaaaactagccggcatggtggcacgcgcctatagtcctagctactcaagagggtgaggcaggaggattatcgcttgagcctgggaggcgcaggttgcattgagccgagatctcaccactgcactccagcctgggtgatagagcgagaccctgtctcagaaaaaagaaaaagtgctaattctgtacaggatttaaggtatcaactatatctaagttaaacccacgttattttaactgaacttaaattttaaaagttaaaaatttaagaatccatatattgtgtaagtaattttcatctccctgttttcatattcacctcagtagttgcgtattgtaaccacagtagtatactggtaatagtaaaagaaattctgtcctaaaagaactgaaaattgagttcaagatattaagaattatctgtgtaggtgggattatgggtgatttatatattttttgacatttagtttttctgtaatgagtatgcattacttttgttaggtccattcttagaatcttactgtagtcactgattttataatagaaatatattttgatgccgggtacggtggctcacacctataatcccagcactttgggaggctgaggcaggtggaccacgaggtcagttcaagagcagcctggccaagatggtgaaagcccgtctctactaaaaatacaaaaattagcggggtgtggtggcaggtgcctctagtcccagctatactggggaggctgaggcaggtaattgcttgaacccgggaggcggaggcagaggtgagccaggattgtgccactgcactccagcctgggcaacagagtgagactccatctcaaaaaagaaaaagaaatatattttgaaagaaagctatagtgatgatgtaatagctaggaaaatgtaaggcaatataaaatgatatcttagagatattgataagctggagcagcaaaactacccaagtgctagggcattatttagagtataaaaatgaattcatacccccatttcttttcttttttttttttgagatggagtctcgctctgttgcccaggctgaagtgcagtggcgcgatctcggctcactgcaagctctgccttccgggttcacgccattctcctgcctcagcctcccaagtagctgggactacaggcgcctgcaaccacacgcggctaattttttgtatttttagtagagacagggtttcaccgtgttagccaggacagtctcaatctcctgacctcgggatccgcccgcctcagcctcccaaagtgctgggattacaggcgtgagccaccgcgcccagcctcatatcccccatttcaaacacgctgtaaacaatgctcaattactttcctcttaagttgaaaccaccaattactggggaaaggggcagttagattttattggttgactttgtgtttttactaatccttgttgaaaagtagaggaattggtttagttgagaaaacaaaatactaaaaaatctgccactagactttttaagtcaagagtttgtataaaatgaaacatatctactatctaatctataaaatttagaatctttttaattctaaagttaacttaagtgtgatttttagtgctgttgctgaggccagtgttgcttaaagcaggaacttctacagtaattgacaaaacttgagtttttctgctctcatttatccatccttcagacccctcagatgtcatctatttcctgaaatctgacttctccagttttagtaattcttacaatttttcaggatttagatagtactgtacagtttactgctatgtatatgtctttaatacttgttgttttcagatattacactaatgtctcatctgtagtataaatcagactttctgtcttctaccagttacataatttatataattgttgcagtacatgtttgttgatttactaggctggattcatgttacagaattggtaatcttggttgggcatggtggcacatgcctgtaatcccagtactttgggaggacaaggcagacgaatctcttgagtttaggagttggagacctgccttagcaatatggtgaaaccctgtctttacaaaaaaaaaaaatacaaaaaattaacagggcatggtggcatctgcctagagtcccagctacttgggaggctgaggtgggagggtggtttgagcccgggatttggaggctgcagtaagccacaattgcaccaattacagcatgagaccatgccttaaaaaacggggtgggggtgttaatcttggctagatgtctgttttgattgttaggatgaattgtgttggtagtatttttctaaaatgttctatccaaatcaacttgtttattaatctcaaatagggagagactctgaaaacttgtcttagaattctctagtgtcacctaggcaatcactttttatgagggtcaagtgcaaaattaatcaaaaattttccttatctgtacataacaaggtaatataataacacggaaccacaacatcaatgttttagcaaattacacatacctttttttttttttccggacggagtctcactctgtcacccaggctggagtgcagtggtgccatctcagctcactgcaacctccgcttcccgggtttaagcaattctcctgcctcagcctcctgagtagctgggactacaggcatgcgccaccacgtcctgctaatttttatagttttagtagagatggggtttcaccattttggccaggatggtctcaaactcctgacctcaggtgatccaccctcctcggcctcccaaagtgctgggattacaggcgtgagccaccgtgcctggccccaatttttttttttttttttttggtacggagttttgctcttgtttggagtgcagtggcatgatctcggctcactgcagcctctgcctcccccgggttcaagcgattctcctgcctcagcctcccaagtagctgggattacaggcatgcaccaccacgcctggctaattttgtatttttagtagagatggggtttctccatgttggtccggctggtctcgaacccccgacctcaggtgatccgcctgctttggcctcccaaagtgctgggattacaggtgtgagtcaccgcacccggccttcaattgttttttaaatggaccttccaactcagtagtgccagaaaccatgtgttcaatatttgaaattataatattttgatatacgaattgcatctatcagattgcctgttaaacccaaaaactattttttttttaacagttatttgttccagtttttggtttgaaagtgtttggtttaaaaaatgttattttagccatttttattaaactttatgccaaaaaaattaaggtatgtcagaaagtgttcataattatggaaattttctctttggataggctcgcatgtcttgggatagagagtcgacagaaattcggtaccgtagacttcaacatttgcttgaaaaaagcaatatatactccaaatttttattgacgaaaatggaacagcaacaattagaggtatgtatatgtaactgactacaagtgaaagcttaaaaaaatttaaaaatagctttattgaagtgtatattatatacagtaaaatggacagattttaagtgtacggtttgctgagttttgactagtaaatatatagatctgtgtaaccaccagcacaatcaagatacagtgcacttccatgaactccaaaaaattgtcttgtgctgacagtaatccccatggctggtgtccagcaactactgatttgctttctgtcactatagaccagtattgttttttcctagaaaattgtataaatgaaatcatggtattgtgctagtgagtaaatagttggtcttcatcaccatttcctggtatacaactcttgaaatccttggaatcttcaaagtaatagtgtttttttttttgtttttttttttttaatgctaatgatcaatggctagctgcccttaggtagcttcaggatgggagcctaagaaagacaaaacctggattagagggttgggatttagcctcaccctcaactttgaggaaaagagactgaaagttaacttgttcaccagtggtcacgattgaatcaatcacgtctatgttatgaggtcttcattaaaaacccaaaagggctgggtgtggctcacatctgtaatcccagcactttggggagcctaggtgggtggattgcttgagcccagaagtttgagaccaggctgggtaatatggcaaaaccctatctctaatagaaaaattagctaggtaaggtggcatgtgcctctagtcccagctacttgggaggctgaggcaggaggttggcttgagccaaggagattgaggctgcagtgaactgtgatggcaccactgcattctagcctgggtgacagagcaagaccctgtctcaaaaataaaacaggctgggcgcagtggctcacgcctgtaatcccagcactttgggaggccaaggcagacagatcacttgagcccaggagttcgacaccagcctgagtaacatagtgaaaacccgtctctaccaaaaatataaaaattagccggtcatggtggtgtgtgcctgtaagcccagctactcagaaggctgaggcaggaggatcgcttgaacccaggaggcggaggttgcagtgagccgagattgcacccctggactccagcctggatgacagagtgagaccctgcctcaaaaataaataaataaaaaaaaccccaaaaggggacagggtttggagaacttctggatagctgaacacatggaggttcctggagaggatggcgcatccagaaaaggcatggaagctctgcgcttctttctccataccttgttctatacatctctttctctggtgttcctctgaatatgttgtaatctttctttctttctttcttttttttggagacagagtcttactctgttgcccaggctggtgtgcagtgcaccatctcagctcactgcaacctctgactcctgggttcaagcagccctcccacctcggcctcccgagtagctgggactacaggagcacaccattatgtctgtcttatttttgtattttttgtagagacagttttgccatgttgccgaggcttgtctggaactcctgggctcaagtgatctgcttaccctggcctcccaaagtgctgggattacaggggtgagccactgcgcctggactgtcatattctttataataaaccaataaactttaatgtttctttgagttctgtaagctcctctagcaaattagtcaaacccaaagaggggcttgtgggaaccctgatttatagctattcagtaagaagcacaggtaaggcgacttgggccttgcgattggcatctggaactggtagttaaaagtcttggggactgaaccctcaacctatggggtatggtgctttcaccccgtagatagtgtcagaattgaattacaatagaggacacccagctggtgtcactgcagaaatgcttgtttggtgtatagggaaaacccccacacattgggtcacagaagtcttttgtgttgattgttgagtgtgtagggagaaactgagtttgtttttttctcaatattcttgcacatatgcactctttgtcttgttacttttgctcagtgtatttttgagattcattcatgtcatgtttttctgtaggttattttttttattcctgagaaggattccattaagaaatgtcgttattggggtgtaattgacatacactaaactgcacatatttaaaatgtacaattccctaagtttgatatatggatatacttgtgaagacataacaatcatgatagtggacatacccactgattccaaaaaattctttctgcttatttataattcttctcgcccgtccctaccccatgttctatccacagatagccaattgatctgttttctgttattataggttcatttgcattttctgttggtgatgggttcttttagctttcatatgtctgaatgtcttcacttaccttcatttttgaaatacgtttttactgggtaaagaattttttttctttagtactttatttcttggagtactttaaagatgtttcactgtctcctagcttatgttgtttctgaaaagtgaaagtcctgataatgtctatatgtctgtaagcaatttgactgcctccctcaatcccattacctttcagacctgtctccagatgtgtttcctgtcttgggcttttgcccttgctattttatgcctggaaccttcttcctctaaataactgcatggcttaacttcatcttcaagccctgacttaaatggtttctagatgagacctgccctcacaattttaagaaagttgctaacacacctgattctctttaccttgttctgttcttcccattgcacttttcatctgatatacatcatttattgtatttattgtttgtctttccactagactgttatgaagatttaaaaacttgtgcaaattgagagaatacagtaagtcccggtgtccccatcacccacatttaaaaattatcaatttaaattttgctgtatttgtcaaatctcctttttcctttgtttgaaacccttttattacttttttatggtaaagtaaaacaaatggaaaaacaaatattcaacttaatgagttacacagcatctacccctttcatcacctcttggaaatggtttgaatttttggtgtctttaaaaaatttgtaagagtatgtctagaatagcttttagtctaggaataagttgatcccttttctgagcactctacttgatgccctttatattaagaggactttctactttggctgagagaatgtgaggtataccttattatgcctgaccccttggaacatgagaggttccacctgcttctttctggtgactcttctcctggccttggttaccatgcacttaccagtactcagcctgagagagagataacagctgcctttgtgcagctttgtcctctctggtacttgaccctgggaatgctactgctcttaagttttggattctgtctcctcaacacaaagagactgttgggctctgtttggatttttctccattatttgtactttaaaattgtatcaggcagtaagctgggcagtcagaagattaaccttgtttccgttttgtcagtgtttacagtccgttactgcatgttgtctgaaaaccattgtttaataaattttatctggattttagttgtttaaggcaggaggctaaatctgtcccattagtccataaaggcttgaagtacaagttcctccctggtttttaattatgatagaccttagtttctcattgtaaacataagttatttgagaattgatatgcgttttttttttaaatgttgcactttccacttgtgacataagaaaaaattgtcttacaggaacagaagaagaaagaaaaattggagagaaaaaaggagtctttaaaagttaaaaaggtaatatagccagccggaatattttttatgtcatttaaatattgaagaaatacttttgtattcttctgacttttttgatcatctgtttaattttaagtttctttagtgataaacctaactttgttacaagcaatgcagaaacatgtaaaatctgttcctcactatttaagaaatggagaaagagccaaagtatggtccactttagtttcttattctatggattattttggacgttggcaaaatttgactttcttaattggaaagaatctgcaaatttaaacttcaaggcattttgtaagtggccaccttctttgaaacctgtaatgaagttttgctagtgaaaagagaaataatttattgaatacatactgtgggtcaggtgtgctatcatgtcttctcttactctattttttttttcttttttgagacggggactcgctctgtcacccaggctggagtgcagtggcgcaatctcggctcactgcaagctctgcctcccgggttcacgccattctcctgtctcagcctcccgagtagctgggactacaggcgcccgccaccatgcctggctaattttttgtattttcagtagagacagagttttactgtgttagccacgatggtctccatctcctgaccttgtgatctgcccacctcggcctcccaaagtgctcagattacaggcatgagccaccacgcccagcctgttttcccttactctcacaacagttctttttaggtagaggtacttttttcccccattttacataaataggctgatgcaaggagataaagaacaatcatattcaaggattctatatttgtgaattcgcctactcacttacatttatttgtaaccccagagtcaagattcctgacaccgtcatggtcatttttggatatgcttatgttcagagcagcaaagaattttagtcctccaatacatatgttccaagctcagctcaaacatgggttgctgttctttgttttctgctaccatatgtatgtcaagcatatatccttttcatggtctttatttagcaccataacttttgcgtttttttgtgctttttcatggtgattttgctgttaaaatggcccccaactattgtaccaaagtgctgtctagtgtttctaagtacaaaaaggctgtgccatatggagaaagtatgtcttgggtaagcttcattgaggcatgaggtacagtgctgttggccctgagttcgatatttatttatttattttattttattttattttatttttttgagacagagtcttgctctgtcgcccaggctggagtgcagtggtgcaatcttagctcactgctacctccacctcctgggttcaagcaattcttctgcctcagcctcccgagtagctgggactacaggtgcgcgccaccatgcctggctaatttttgtatttttagtagagacagggtttcaccatattgggtgggctggtttcgaattcctgacctcatgatccacccgcctcagcctcccaaagtgctaggattacaggcgagagccactgcacccagctggccctgagttcaatattaatcaacatatatattaaataagatatctttaaaaacagaaacacaaataaaacagggttgtgtatcgtttggttgaaaatgtcataaccagagtcagagacccaagcttgtatttttcctaggggcaataagtcaatagtcatagtgattttatcgaaccacaagtactgcagataatgagagctgactctaatttgctgaaaattacggatttgaacccaggattagtttaagagcttctacttagcttctgtgctaaactgccttttatttatttattttttttttgagacggagtctcgttctgtcacccaggctgggatgcagtggcgtgatttcggctcactgcaacctctgtctcctgggttgaagcaattctctgcctcagcctcccaagtagctgggattacaagcacctgccagcacacccggctaatttttgtatttttagaagagacagggtttcaccatcttggccaggctggtcttgaactcctgatcttgtgatccacttgccttggccacccaaagtgctgagattaagtccagttatttgattcttagactagttaatggtgatgttaaaatgcctgataaagtattttgcagactgttttgcaacaaaacccattatttaaaactggtaatactgctaggtgtggtggctcacgcctataatcccaacactttgggaggctgaggcagatggattccttgaggcaaggagttcgagaccagcctggtcaacatgatgagaccctgtctctgctaaaaatacaaaaaattagctgggcgtggtggtgtgtgcctgtagtcccagctgcttgggaggttgaggcacgagtattacttgaaccacggtaggcagaggttgcagtgggccaagattgcatcaccgcactctagtctgggccacagagggagactctgttcctaaataaataaataaataaatacataaaactggtaatactgagtcactgagagagagagtattaaaaaataaaaatgggccaggcacggtggctcacgcctgcaatcccagcactttgggaggccaaggtgggccgatcatctgaggtcaagagctggagaccaacctggccaacatggtgaaacccagtctctactaaaaatacaaaaattagccaggcatgatggcgggtacctgtaatcccagctactcgggaggctgacacaggagaattgcttgaacctaggaggccgaggttgcagtgagctgagatcatgctactggactccagcctgggtgacagagcaagactctgtctcaaaaaaaaaaacaaaaaaacaaaaaaaaaaccctctgatccttgactcacttgctaatttcagagacttacctagggcttttcagatttttattttcatagagacagagcttcactatgttgcccaggctggtctcgaaccccttggcttaagctatcccccacacccacacccataccttggcctctgaaagtgctgggattacaggcatgagctagcacaactggccttacctaggggttttgaagaacatgtttttatttatatgacaattttactggcttagtcatttattccctgctctttaacctgttaatttaatatatccttcactttattccacctaactttttataccagggttttgatttttttcccctctgcttttttcataagggcgtcaactattttgaaacttaaaaaatttttttagaggtgatgtctcagtagcccaggctagagtccagtagcaccatagtagctcactacagctttgaactcctggggtcaagccatcttcccacctcagcctcctgagtagctgagactacaggtgcacaccaccatgctcagctaattttcgcattttttatagaggtggggatcttgctttgttgcccaagctggtcttgtactcctggcttcaagcaatcctactacctagtcctcctaaagtgctgggattataggtgtgagccactgcacctggccagaaactgtttcttaacatctcatttctcttaccttcctcactaataattttccattagtattctcttttatttctgctttgggttatatttaatgtatgaatttcattcacaatgaatattccttcaataccctacctattgaagggtattccttcaataccctaccctacaaaaatacctatttttgtatttttagtagagacagggtttcaccatgttagccaggatggtcgtgatctcctgacctcatgatctgcccgcctctgcctcccaaagtgctgggattacaggcttgagccaccgcgcccggccaagatgtacatggtatttctaaataaaaatgccaactatgggctgggtgcagtggctcaacgcctgtaatcccagcacttggggaggcctaggcgggcggatcacctgaggtcagaaattcaagactagctggccaacgtggtgaaaccccatctctactaaaaatacaaaaattagccgggcgtggtggcaggtgcctgtaatccccactactctggaggctgaagcaggggaatctcttgaacctggcaggcggaggttgcaatgagccgagattgtaccagtgcacactatcctgggcgacaagagtgaaactccgtctccaaaaaacaaacaaacgaaatgccaactatgtttaattttgaaatttctcttctaaatggaaaaaaatggacagaagtagagcccttgggaaaaagcagagattatgaacaagttatagtagggaaatacagaaaaatattacatgtaggtaagtataatagtgaaaaattgtggatgtggctcaattgcaggaaacatattttttctcaagttaatcagtgccttttaacgtataatactatgaaggtccttaataaaatcaatattctgaatccttgttttgtagggtaaaaattcaattgatgcaagtgaagagaagccaggtaaatatccttattctagttttgaagaatatgcgtttatatttctattttaattgctatcaaaaataaaatttttttttatagttatgaggaaaaaaagaggaagagaagatgaatcatacaatatttcagaggtcatgtcaaaagaggtaaaaataaaagggagagggcacctaacatttgatgttgagtaaaatgtaggttttaaaccaccttaaatctgtaaagattgaatattcaatatcacatgaaatatgttttgaatttaatattatatatcatttataggtgaagctgccaaaatgtttgaagctatctaccaacctacagtagacttgagactaatctgaaactaatgtcatctgaccttcatagacttttttttttttttgagatggagctctgtggtccatgctgccttgcagtgtcactatatctgctcactgcaacctccacctcgcgggttcaagcgattctcctgtctcagcctcccaagtagctgggataacaggtgccaaccaccacgcctggccaatttttgtattttcagtagagatggggtttcaccatgttggccaggctggtcttgaactcctgacttaaggtgatccgcccgcctcggtctcctaaaatgccacattacaggcgtgagccattgcgcccatcctcacttaagtggcaaataggcttacacctttaggttgttctggttttcttttctttctttcgtttccttcctttctagcttccttcttttttttcttcttttctttttttgaggcagggtatcactctgtgactcaagctggagtgcagtggcacaatcatggctcactgcagcctcgacctcatgggctcaagtgatcctcctacctcagccccctgagtagctgggactacaggtgtgtgacaccatgcacagctggctaatttttaaattttttgtagcaatgagatgtcatatgttgcctaggctgctcttgaactcctgggttcaaatgatctttttgcttcagcctcccaaactgctgagagtacaagtgtgagccagtgtgcccagctttttgttggttttcttttcttttttttttttttttgatgagacggagatttacccttgctgcccaggctggaatgcaatggtgcgatctaggcttaccgcatcctccgcttcccaggttcaagcaattctcctgcctcagcctcctgagtagctgggattacaggcatgtgccaccacacccggctaattttgtatttttagtggagatggggtttcagtgtgttgcccaggctgatcttgaactcctgacctcaggggatccacccgccttggcctccaaaagtgctgggattacaggcgtgagccactgcacccggcctttgctggttttcttatttgggttattacagataacagtaatagctttgactctacctattatcttgtgcttgttaagtacctagtggacttgtatagcattttgcaaggaactgtggaaacaacaggcatgggcatagagcttaaaattacatatatgttgcggagagttggggggaaagggtagggtagtaaagacactgtctgaccagagcagataagtatttcagggaaaaagatggtaccagctctttgttaaacgagtctgagcctggcctagtcagaaattgtcactataatttaactttttgtaacccctaaccttgtcttaagaactttattcttgttttttgttgaagacttttacgaaactgaaatcatatgctcttttctaaaaccagcttctttttttcatttctcactttttacttaaaaatatgaatgaattagagcatcttcagttctgacaaaccagttccttagcatgtttttaatgtgtcacattcttcctttttttttcttggagacagtcttgctctgtccctcaggctggagtgcagtggcgcgatctcggctcactgctacaagctccacctcccatattcaagcgattcttatgtctcagcttctgagaagctgggattacaggtacctatttgtatttttagtagagacagggttttgccatgttggccaggatggtcttgaactactgacctcaggtgatcctcacgcctttatctcccaaagtgctgcgattacaggcatgaggcaccactcctggccacattcttatatttaaaaaaaaaagcacaactctattgtctactgttgttcttttacctgaagttcaaactctagctcttcagaagaaaaatttacataatagttttccttttctctagggatgcaatgatagtttttcactgaaaaataatcgtcagggggccgggagcagtggctcacgcctgtaatcccagcattttgggaggctgaggcgggtggatcccgtgaggccaggagttcgaaacctgtctggccaacatggtgaaaccccgtctctactaaaaatataaaaattagctgggaatggtggcttgcgcctgtagtcctagctactcaggaggctgaggcaggagaatcacgaacctgggaggcagaggttgcagtgagctgagatgatgccactgcactccagcctgggcagcagagcaagactctgtctcaaaaaaaacaaagttagggtccactgaaattcattatggtatctattcaacttgcagtttaaaacacttttaggctgggcgtggtggctcatacctgtaaaccccggcgctttgggaggccaaggtgggaggatcacctgatgtcaagagttcgaggccagcctgaccagcatggagaaaccccatctctactaaaaatacaaaattagctgggcttggtggcacatgcctgtaattccagctacttgggcaggctgaggcaggagaattgcttgaaccccggaggcggaggttgcagtgagctgagatggcaccattgcactccagcctgggcaacaagagtgaaattccatctcaaaaaagaaaaaccacttttaatatgccatactgaagtttagccagtcatacagctgtttatttaatttgttaaatggttgtggaatatcggttttgggcaaactttgtcataggtggatgaaatccattagtaaagaaaggtaaatgctgtcttcaccttagcctgcatacagagagagatataggagtaagtagtcaatgaaattgaatttttttttttttgagacagtgtttctattaccctggctcgaatgcagctggcacaatctcagctcactgcagcctcaacctcccagactcaagtgatcctcgtatctcacactccccagtagcagggactacatgcctgtgccaccaggcctggctgatttttgtattttttgtagagatggggttttgtcatgttgtctaggctggcctcgaatttttgggctcctgcctcggcctcccagagtactgggattacaggtctgagccactgtgtccggttgggaattggatgtttatacaccatattagaggggctcttcactctggcatgcagttcctgaaccttttcatctatgaaaaggaaatgatatctgtgttgtgacttgaaggataaaagttaaattatttaaaggtgggattaatagggaaagagtaaagtacaggtaagatagtgggggaggtgttttaggaagaaataatagcattgaacaaatatccagggtcaagagagactggcagtttcaaaaaacttgaagtaaattatatttgcctccaatttgtatataagtgaaaagagtgatgaaggaaggatgaagctgtcgatgtaagcatggtcaggagtttaaggctgccataagtaaagtaggaagctattgaaagattttaagcaaatttccattttggtaaatcacttggctagtttattcagagatctgtgggcatagtagtttttctttctttctttttcttttctttttttttttttaagacagagtttcactgtgtggcccaggctggagtgcagtggtgatctcggctcactgcaacctccgtctcccagttcaagcaattctttcacctcagctccctgagtagtccagcgcctgggactacaggcacgtgccaccacgcctggctgtttttgtattttttcatagagaggtggtttcaccatcttggccaggctggtctcaaactcctgacccgaagtgatctgcttgcctctgccttccaaagtgctgggattacaggtgtgagccaccatgcctggtcccataccagttattctttcatttactgttacttctttcttctgtatatttactgaatttcctgctctcttttcctcttcgcctaactaaattctttccattgtttcattctcaccttacttgctgaagaatctctaaatctgtgaatgcatttggaggggtataacccaattgagtgttctgccactgtggaccctgctcctccaagttatcccttctgtttcttcaccttttccttcctcactgggtctttgcctttcaattatagatacattgtgttttcctgtctgcagaacaaaaatttttgatccagtctttctagattgccctgttttttattctttatttccaaggttttttttgagacacagttttgctcttgttgcccaggctggagtgcaatggcgccatctcggctcattgcaacctccggctcccaggttcaagcgattctcctgcctcagccttccgagtagctaggattacaggcatgtgccaccacgcctggcaaattttgtatttttagtagagacggggtttctccatgttggtcaggctggtctcgaactcccgatctcaggtgatccacccaccttggcccccaaagtgctgagattacaggcatgagccactgcaccggcctatttccaagctttttaagagtaggctggactggacatgatgcctgacacctgttatcccagcactttgggaggccagggtgagaggatcacttaagcccaggagtttaagactagtttgggcaacatggcgaaatcctgtctctacaaaaagaaatacagaaatagccaggtgtggtggtgcatgactttggtcccagctacacaggaggctgaggtgagaggatcacctgagcctggggaggtgaaggctgcagtgaggtgagattgcgccactgcactgcagcatgggcaagagaatgaaaccctggttttttttttttttttttttttggagagagagtctcgctctgtcgccaggctggaatgcagtgctgcgatcttgactcactgcaacctccgcctcccgggttcaagtgattctcctgcctcagcatcctgagtagctgggactacaggcacacgtcaccacgcccagctaatttttgtatttttagtagagatggagtttcaccattttggcctggatggtctagatctcttgaccttgtgatccatctgccttggcctcccaaagggctgggattacaggcgtgagccaccgcgcctggcccttttttttttttttttaaagagtagcctgtgcatatttccttacacattatgcagttgagcagttttacgcctaccagttgaatttattggtatctttgaaattgatacctagcacaaagcaaacaatttatcttttcctctcttccgaatcttgctcttttgttttctctttttttggtgttaatatcagaaccagtatctactgtgtcatctaaaacaatttaggaggttatctgaatttccttatatatctagatttttatcgatttctgtgagtcatttcatttgctgctactctggtgtttatgcccttactgtgccctatttatagtagtttcttaattgatttttataatcctagtctagctctcattgtcaagagtaccagattggtttttctgaaactcaaatataattactcataacctccattactttttatggtttcacaaggaattgcattttcttgtagaaaaatttgagaataaacaaaatacaaggaaatcacctgaaaagctgtcacacagataatcactaacattttggtatatgtatgttctttttctttgtattacggaaaatctcaaaaattacaaatgtttagaggatagtaaattgaatgtccacctttatcactttttttttttttgagatagagtttcactcttgttgcccaggctggagtgcagtggcatgatcttggctcacagcaacatccgcctctcaggttcaagcgattctcctgcctcatcctcccgagtagctgggattacaggcatgtgccatcatgctcggctaatttttagttttatcagagatggggtttctccatgttggtcaggctggtcttgaactcctgacctcaggtgacccgcccgcctcggcctcccaaagtgctgggattagaggcataagccaccacgcccagccaatcgctttttaattctgggatattttaacaaaaagctcagcaagactttttttttttcttaaggtggagtctcgcactgtcacctgggctggagtgcagtggcatgatctcggctcactacaacctttgcctcttgggttcaagtgagtctcctgtctcagcctcccaagtagctgggattacaagtgcccaccaccacgcccagctaattttttgtatttttagtagagacagggtttcaccatgttggccaggctggtctcaaactcctgaccttgtgatttgcctgacttggcctcccaaagtgctgggattacaggcttgagccaccatgcccggccaagactattttttagaaccataaccacaatacagttaccacacttttgaaagtcgatgggaattccttaatatttaaatttctcaataggctaatttttatttttagggatgggggcttgctgtattgacgagactggagtgcagtggctattcctgagtattgtcatagtgactacacctcaaacacctgggctcacatgatcctcctgcctcagtgtcccgagtagtagtgcagggactataggcacttaccgctgtgatctgcttagctcatacattttaaaaaaatagttggttcaaatcaggatccgaaaaagttacataaattgtgtttgattaatgcgtatcttgggtctcttttagatctagagtgtctctcatcttttttaagaaacattatttgttgaagaaaatgagtaattctgtataattccccacattctagactttactgattgtatccccatgatttctctgcctcttgtgtttcctgttaactatagtaactataagttaaatacggaagtttgtgattaaggtgtttttttatttttttttttatttttatttttttttgggagacaagatctttctctgttgcccagggtggagtgcagtggtgccatctcggctcattgaacctctgattgctgggctcaagcaatcctcccacctcatcctcctgagtagctgggactacaggcgtgtaccaccaagcccagccaacatttatattttttgtagagatgggatctcaccatgttgcccatgcttgatttttaataagaatacttcattggtggtatttatagattttgatttatttccaaattgttctttcaaaagtttcattttatctagtcattttacaggacagcttttatcagttcctggtataaaatccttttagcctcagccttataatatgaatatctatacatacataatacttcatacacacacgatatacatatattcccatgtatatatatgtgtgtgtgtcagccacttacatgtcctgttactcttctatgaatcttaaatttgatattgctgttttgaatctacttcatcccctatgccttctatattctctctgcttgaaatctaccctcactatcttgaatgatgaagcctggtgacaactttttagataattttatgtaagataattatttgctaagtcatccagtgacatactcgggtattgtttgtctccctaccagcagcatctagtaggtacttcaaaatcagagcactttattctgtatttttaattttttctgtctttgcctcttacccaggaatgcaaactcagatgtctatccacagaggcctaaagtgggctgtaacatggtttggcaaactttttctgtaaatagccagatagtaaatatttttagcttttgagtagttttgtgggcaactactcaaccctgtactctgctgttgttgcttgaaagcagccatagacaaaccgtaaacaagtgaggctgactttgttccaatttatcccatttctttgcttttaaaaaaatacctgtgtattcgcttagctggagttggtctacaggctgtagtttgctgaccccaggactagaggtttgttgccatgtgtgaatttgtacttaatctactcagattaaaagaaagaaaagctggaaaatcactgtatttgatgaaatatcccattgtataagtgttcccaaattagcctagaatgttatgaaatattatgagccagtaatgtctataggcttatttctgcctgaaggctactagttttatcttgagaatctcatcctcatttcctggcaaaatgagcacagaataaatgcttgttgaataaataaataaatgaacttcatacattattaatttgtttttgttttctcaaactactaggaaattttgtctgtggctaaaaaaaataaaaaggagaatgaggtaagaaatttataatgtaagattaagtttagaagtcatatttactcctcagttactagtcctttttctttaatcagcagtatacgttcttctcactattatcctgtttctttgctttaaaaaaaaatacctatgtattcacttcttccatatccaacattcttcttttttatgtatcaactttagttagttgttttattgcatgattcttgatgtataaatgttaatttatgggtctagcaatgttgcttttaacttgtgaatctggcagtgatacaagtgctcgtaaccatgtggatataaaccgtgaatcatcttatggaagctgtgagggatgccttaatcttgcttcagaccttaaagattttttaagtttcttaaaagttctgtttgagaaggcttgatttccgagccacctcttcacttagcccatttcatgtagagaggttccttgttatctgactttttattgttcaagtacttaaaattacaaggttgcctagggaagcaaaataatcatgacatgaaaatattcatgaatggatatgaacttcaggtagttaatttacatattaaagatttttaggcctttgggaaattaatgttatgtttataaaatgagagataatctatttggtcatataattttgtccaaaatttatattgtaaaagtgtcttggtttttattctttgttaagttattaaggactggtttatgggtgcagtttagttggatttttaaagatttagttagataaacatttagttggatttttaagataaagtctagatgtaatcttctgtaatttactatgggattttggcttcattttataacttacagtcagtaagaaatagttgttaagtatggtattttaatgaatttcgacacttgcatacacttgtgtaaccaccatccaaatcaaggtatagaacatttccattgtaaagggatctcttctatgtctttccacccccaaacccagaggaggccactttttacaccttttataggatggcttattatttcctttccactcaacatgtctgtgatactcatttatgttgttgagcatattagtaaccggtttcttcttattgactagtattctgttgaatgaatgttacaattttctcatccatccccttattgatgggcatttgggttgtttgcagtttgtgacttttatgagtaaggttgctatgataatttgcacacaagtccatgtgtagacatgttttcatactttctgcctgtgtacctgggaatggtattgttgtgttacgtggcaaatgtgtgttcataagaaagtacagattttcccccccaaagtaaacacatcattttattctctcgccagcaatgtttgaaaactccagcttacattattgtcagcatttgatagtctttttaatttcagccattttattagatgagaaatggtaacttgtgtggtttttaacttgcattttcctaattactactgaagtagagtatatttttatgttctttgataactatgttttctttctttttttttcttttttgagatggagtgtcactctgtcgcccaggctggagtgcaatggcacgatctcggctcactgtaaactctgcctcccaggttcaagcgattctcctgcctcagcctcccaagtagctgggacaacaggctcatgccaccatgttcagctaatttttgtatttttagtagagacagtgtgtcaccattttggccaggatggttttgatcacttgacctcatgatctgcctgccttggcctcccaaaatgctgggattacaggcgtgagccaccatgcccggcctgtatgttttcttttgtaaagtatctgttaatatcttttgcccgtcttatttatgcgtactgtattttctgtgtaacagtttaataaattattgagtatcacaatattagaagtttggaagagagatacaattctaatgatcttttcaaaagtatgtgcctgattttaatttgtaagggttattctcagatttttatattttattttattttattttattttattttttgagatggagtcttctgtcacccaggctggagtgcagtggctgtgttcatggctcactgcagccttgacttcctgggtttaagtgatcctcagcctcccgagtagctgggatacaggcagttgcgtgcaaccacacccagctaattttttgtatttttagtagacacagggtttcgccatgttgtccagggttgtcttggatacctggactcaggtgatcctcctgcctcagcttcccaaagtgctgtgattgtaggattagccactgtggcagcctgttatttttttttttagtagcttttcatttgtagagggatggcgatgtctccagttttttaatccaggtgtgatcttagtcttctatacttaatgattataggactcagtagattttgttagttgcattttctgataaatggtggcatacagcagcattttgtataacacatcttattaaactttttttctctacaggatgaaaactcctcctctactaatctctgtgtggaagatcttcagaaaaataaagattcgaatagtataattaaagatagattgtctgaaacggttaggcagaatactaaattcttttttgacccagtccggaagtgtaatggtcagccagtaccttttcaacaaccaaagcacttcactggaggagtgatgcgatggtaccaagtagaaggcatggaatggcttagggtaatgaattggaatttttaatacaagatactggttttatttctatagtagcctaatgatttgaggtaccacaacttgagtcatttctatcatgtttcactattatacatttgtatgtggatacttgctttctgatttctttaccctgaatttttagaagtagaaattaccttgttaatggcttccagcacttttatggctttgataaaggactttccagtgttgttataatttatggtgtgaatatatcagctttaacataattctcatctttgggtgtgattttttaaagagaagaaataaaatattgtaatcctgtagttgtttatatccaagtttaaatacagtatctattattttgtccagatgctttgggaaaatggaattaatggcattttagcagatgaaatgggattgggtaagacagttcagtgcattgctactattgcattgatgattcagagaggagtaccaggaccttttcttgtctgtggccctttgtctacacttcctaactggatggctgaattcaaaagatttacaccagatgtaagacatgcttccttatgttaaaattataattttacatgttttcttatgctttgttgtagtaggaattaaattgtagaactcttataattatattggtttctgtataaatattttgtctgatttgacttactcaatctgcacaataccctaatttaaatttatatagtataggttttggaaatccctgacatctttcctaaaatattcctgaatgattttcagtgcattggtaatttgattcgactgagacagacttaggtagagattttattaaaaattctgcttgttcttcacttgatctttgccaaaaggctaagaagagagttttctgttttttctgtacttgttaccttctgcaatttttttttttttttttttttttgaaatggagtctctgttacccaggctggagggcagtgatgcagtcttggttcactgcaatctctgcctcccatgatgaagcaattcttgtgcctgagccaccggagtagctgggattacaagcatgtgccaccatgcccagctaattttatgtttttagtagagacgatgtcttgccatgttggccaggctggtcttgaactcctggcctgaagagatctgcccactttggcctctcaaagtactgggattatagacgtgagccactgtacctcccgggcccagcccttctgcacatttttgccttatgagaaatatatatattctagacgtagtatcaccatctgtctcattttatatatttatatatatattatttatttatttattttgaaatggagtctgtctctgtcaccatgctggagtgtagtagctgggactacaggcgcacaccacaaggccaggctaattttttgtattttggtagagacaggatttcaccatgttggccaagatggcctctatctcctgaccttgtgatccgcccaccttggcctcccacagtggtgggattacaggtgtgagccactgcgcccagcctatatgtgttttatgtatttgtaggttttttgttggggggggggttgtgtttgtgtgtgtgtgtgtgtgtgtgtgtgtgtgtgtgtgtgtgtgtatgacagagtttcactgttgttgcccaggctggagtgcaatggcacgatctcggctcagtgcaacctccgcctcccgggttcaagcgattctcctgtctcagcctcccaggtagctgggattacgggcgtgcgccaccacgcctggctaattttgtatttttagtagtgacggggtttctccatgttggtcaggctggtctggaactcccgacctcaggtggtctgcccgcctcagcttcccaaagtgctggggattacaggtatgagccatcccacctggcccgtctatttgtttttatgcctttttttttgtcttcagacaggatgttgctctgttgctcaggctggagtgcagtggcgtcattctggctcactgtggccttcacctcccaggctcatgtgagcctgctatctcacacgcctgagtagctcatgtgaacctcccatctcactccactgggtgagtagctggcactacgggtgcgtaccaccacaccagctaatttttgtattttttgtagagatgggatttctccatgttgctcaggttgatctcgaactactggactttagagatcggcttgccttggcttcccaaagtgttgagattataggtgtgagccattgtgctgggcctgactttgtttttttgtttgtttttttttcattttctcccataatagttcaatgatttgttagaattgcttggcttattttgctatagaaaaatagaaataaaattttttaaaattatattttttccctcagaatgatttatattttctaaatagtcaatatttacattttgttcttaagtctgataaaaatcaatataaaatttttcagatccctacaatgttatatcatggaacccaggaggaacgtcaaaaattggtaagaaatatttacaaacggaaagggactttgcagattcatcctgtggtaatcacgtcatttgaaatagccatgagagaccgaaatgcgttacaggtacaaatgatcttcattggtttctttgtaatacataaaacatgcttttcttcatttatatcactttctcaccatctgggagcatttgtctaatttttttttgttgtcgaaataatagattatattgtgcatatacctgtagaagctggaaacttttattaacagaatgattgggatgaaggccatcatttgtaacaatataattaaagcttatggcagtttaacctatggcttagaatcatccagaaatagacctaatctcggaatgtattacagatatatttgtgacaggtactttgaatatatggaatttacttatcgtattttaatcaaataagagtatttgaagacaagttatttttagagtatcttattggactatttggtagcattttcgtttctattttcttgatgttctagctacttatttaaataatttccagttagcataacagaattgaaagattgaccttttttctttcatgccttctgttttcatttattggtgttttgaacttcttcctcactgctctacctcattcatttataattcttgactgctttttttttcctttctctggccatgtgagaaccctcttagtgcagtccccttaggtttatcttgcttgcttggaaataggaaagtatttaatggtttcaacataaaatcaaaacacataagtcataaatagaataattatgacttgcataattatgaccagtattgtcaggttttatgtgtctgctggtaaaactttggaatatgatttgcagaaatctcagttcaggagtttagcaaagtttatgaatgtgtacagcattaaaaagtatttaaaccaggccgggcatgaaggcttatgccagtaattccagcacttgggagtctgaggtgggcagatcccttgaggccaggagttccagaccagcctggccaacatgacgaaaccctgtctccactaaaaatacaaaaattaggccggacgcggtggctcacgcctgtaatcccagcactttgggaggccgaggcgggtggatcatgaggtcaggatatcgagaccatcctggctaacaaggtgaaaccccgtctctactaaaaattacaaaaaaattagccgggcgcggtggcgggcgcctgtagtcccagctactcgggaggctgaggcaggagaatggcgtgaacccgggaagcggagcttgcagtgagccgagattgcgccactgcagtccgcagtccggcctgggccgacagagcgagactccgtctcaaaaaaaaaaaaaaaaaaaaaaaaaaatacaaaaattagctgggtgtgatggtgcacatgtttaatggcacaaggattgcttaaacccaggaggtggaggttgcagtgagctgtgattgcgccactgcactctagcctgtgctacagtgagagtctgtctcaaaaagaaaaaaaaatttaaaccagtagtccccaaccttttggcaccaggaaccggttttgtggaagacaagttttccatggaccatgggtgggggatggtttcagaatgattcaaatgcattataattattgtgcactttatttttattattataaaattgtcatatataatgaaataatagggctggccgtagtggctcacccctgtaatcccagcactttgggaagcttaggcgggcagatcacttgaggtgaggagtttgagaccatcctggccaa

SEQ ID NO: 514 - DNA, 2635 bp, Homo sapiens; identical to SEQ ID NO: 231
  source 1..2635: mol_type = other DNA

SEQ ID NO: 515 - DNA, 20194 bp, Homo sapiens; identical to SEQ ID NO: 392
  source 1..20194: mol_type = other DNA

SEQ ID NO: 516 - DNA, 32744 bp, Homo sapiens; identical to SEQ ID NO: 55
  source 1..32744: mol_type = other DNA

SEQ ID NO: 517 - DNA, 32744 bp, Homo sapiens; identical to SEQ ID NO: 456
  source 1..32744: mol_type = other DNA

SEQ ID NO: 518 - DNA, 32744 bp, Homo sapiens; identical to SEQ ID NO: 306
  source 1..32744: mol_type = other DNA

SEQ ID NO: 519 - DNA, 32742 bp, Homo sapiens; identical to SEQ ID NO: 499
  source 1..32742: mol_type = other DNA

SEQ ID NO: 520 - DNA, 32742 bp, Homo sapiens; identical to SEQ ID NO: 371
  source 1..32742: mol_type = other DNA

SEQ ID NO: 521 - DNA, 12304 bp, Homo sapiens; identical to SEQ ID NO: 410
  source 1..12304: mol_type = other DNA

SEQ ID NO: 522 - DNA, 17553 bp, Homo sapiens; identical to SEQ ID NO: 411
  source 1..17553: mol_type = other DNA

SEQ ID NO: 523 - DNA, 23261 bp, Homo sapiens; identical to SEQ ID NO: 143
  source 1..23261: mol_type = other DNA

SEQ ID NO: 524 - DNA, 28144 bp, Homo sapiens; identical to SEQ ID NO: 74
  source 1..28144: mol_type = other DNA

SEQ ID NO: 525 - DNA, 32744 bp, Homo sapiens; identical to SEQ ID NO: 216
  source 1..32744: mol_type = other DNA

SEQ ID NO: 526 - DNA, 32744 bp, Homo sapiens; identical to SEQ ID NO: 297
  source 1..32744: mol_type = other DNA

SEQ ID NO: 527 - DNA, 32744 bp, Homo sapiens; identical to SEQ ID NO: 172
  source 1..32744: mol_type = other DNA

SEQ ID NO: 528 - DNA, 32747 bp, Homo sapiens; identical to SEQ ID NO: 181
  source 1..32747: mol_type = other DNA

SEQ ID NO: 529 - DNA, 11122 bp, Homo sapiens; identical to SEQ ID NO: 205
  source 1..11122: mol_type = other DNA

SEQ ID NO: 530 - DNA, 21305 bp, Homo sapiens; identical to SEQ ID NO: 303
  source 1..21305: mol_type = other DNA

SEQ ID NO: 531 - DNA, 32742 bp, Homo sapiens; identical to SEQ ID NO: 334
  source 1..32742: mol_type = other DNA

SEQ ID NO: 532 - DNA, 4266 bp, Homo sapiens; identical to SEQ ID NO: 230
  source 1..4266: mol_type = other DNA

SEQ ID NO: 533 - DNA, 23170 bp, Homo sapiens; identical to SEQ ID NO: 116
  source 1..23170: mol_type = other DNA

SEQ ID NO: 534 - DNA, 19305 bp, Homo sapiens; identical to SEQ ID NO: 299
  source 1..19305: mol_type = other DNA

SEQ ID NO: 535 - DNA, 32744 bp, Homo sapiens; identical to SEQ ID NO: 70
  source 1..32744: mol_type = other DNA

SEQ ID NO: 536 - DNA, 32744 bp, Homo sapiens
  source 1..32744: mol_type = other DNA
ctcaccgggttggggacagggatggaaaatggtggttccatgcaggtcagttctcatgacccgaggggccgggcctcttccagggtcgctgcaggaccaacccgcaggggtctcccgcgggtaaggagctcggaccaggagggggagggaagctccaggaaaggaaggcacaggtcaggacagaggagggcggggagcggggaggtgtgtggattaggggagagacccaagggaggatgggggaggaggcggaggagaggaggaagaaagggtgagggcaatacccggtggggacagagctaaacagtcgggcagacagacaaatcgaagaaggggggatgggagggaggagagtcccagaggggccgaacagtccgaggcaggctcgggaggcaccaggctgaggacttgggggcccggagcgggctgcgcgaaggccgaggggacccagggggctgcgacgctggactcaccatggctcggcgccgggccgcgtccgacgcttggtcgggcgggcggggccgggcgcgccaccgcctccctcccgccgctcgtgtctcgccgggtctggctaagggacagctccggccgcggtggcggctcggcccgctccggcttccaggccgcggggccccgccagggagggccgagacggccgcccctccccgccccgcccttcagcgcccgcccccgcctccgcgcgggaccccttgccgggactctgtctcccgcgccgagatctctgccgttccccgggcgtccccagcctatccgtcccgttcaccggcaaccttctttcttctccgccccgccctccagcgggtaacctcgaccctgaccctcggaggcccgcccagccgaggatgcccctcttttcccgccacggcctcgctccccgcgggatcagtttagcctcggcaagggatgctccaaaggctggggcgtgcgtgaattcccttgggccgccccttcccagaactggggtcttcctgcggctggaaagcctccccgctctaactcgcccgggatcctcttctctcaacggtttctagactttggcaggacccagggctcaaatgagaccttcaggcccctgcctgcctagcagagagcggagggccgggaaatcaggggattccccaaccccccgggggcttgcccgccctcctttccctccatctcctcgggcctggaatctctgggctgacaatgggctcctctgtgttgcctggggaaggcgggagtgtgcgggagttagggagcagcgaaggcttgggatagggggcggacatcctggccaagggggcagggttcccggatcgggatgcttatgtaggggcgtgcatttcgccggacattttctgagttctctcctccgtggcccttcccttccgcatccctacctctctattcggctagaagagggaaggcaccaggcctccagttcgaggattcggtactggatgccagccccttccttctgttggggtggctatagagtcccgcagggccgctagggctcgtggccatgggaatgggtgggtatctggcgcaggagacaaagcagggtgggctagttacgaaagttctagcctcactccctcatcaaaccccgagcgtcccccgacagtgtctgaatgagaaaggaaggccagatggggggtctcccaggagcccggggggaggcacgggcacggcggggagatgccctgcctggcctctgagcaggcaccgggaagccccgcagctccgtgagctcttctaaagggtggacggaagggagaggagaggagatcggaaagccgaatagtccccggaggggcgtgaacgcgtgtgcccctgcagctggagggcgatgatgagaaaacgtctggcctcgcctgcagttcctcggaggccggagcctctgggcagttgttggaacagcgggaggggaggcgggggtgccgccaaggtgacttgctcttctctcacctcctctggacgctaacctccacctttttctccgctccgctgagcctggaaaaggacagagcaagtgttcatccttcttagaggcaagaagaggcctctgctccatgcgtcaaaaaagaacctatggcaacaagccccggtaaccatcttccccgcacagttagagccgtggagttggagctctttctaacacccggctaggggaccctcgagtcaccgacactctccaggttctctattacgagggcccgcgagctaggagagtgagattttgctaccccctggtgtccattccgtaaatactgcccaggggcgggttacaggggccagtgtttaaaaaaccttattcacctgtctcaaacctagctcatctattctcggtgttgagagtgtctgaacctttcctcaccaggccttccattccttaaactgcagcaaattgtttagggaacacttggtagggtccaaggttgtccattggactccaaggctcactactcttaggtagtggaatataaattaatctggctatgggggtccacaaactcctggaaaaagggagtggatcatttttttttttcatggagaaaaaggggagccggccgggcgcggtggctcacgcctgtaatcccagcactttgggaggccgaggcgggcggatcacgaggtcaggagatcgagaccatcctggctaacacggtgaaaccccgtctctactaaaaatacaaaaaattagccgggcgtggtagcgggcgcctgtagtcccagctactcgggaggctgaggcaggagaatggcgtgaacccgggaggcggagcttgcagtgagccgagatcgcgccactgcactccagcctgggcgacagagcgagactccgtctcaaaaaaaaaaaaaaaaaaaaaaaaaaaaaaaaaaaaaggggagccactgaaagtttttgagctggtggggtaagggagtttggatagagaatcagggatgcagttaccccttctttccaggagttttaaaatctgtgctaaattacaatggtttattttaagtaagtaagtgacatgtggttgcagcagttaaataccactttctccaaagaatgcaggctcttacctaaaagtgtgtgtgtgtgtgtgtgtgtgtacgtgtgtacacaacagagtatgtgttgatacgtgtgtttttagtgggggaatatgaaagggtaaagttataagggagaaattagaggctgggaatagaccagacttagaagccttctcattcacaaacagttcttaccatatttcacccatttaagactctttggggcttctcaaactcctgttttacagaagaaattgcagcttattgaagttaataaactctctctaagctacacagtaaatgagcaaccaggatgtgaacccaggctgtctgacgccagaggcttcagtcgcaaccagtaagttatagggtctcatctaagctgtcaaagttcataaaagaagagttttaaacaccacatcaccatttctgccaccaaaccatcaggctaaaaaagttaaatttgtttttgtagaagccagcactgaggttctaaaagtgatagatatgtccccgtgggtcagagaaaaaaaaaacctacctttttctagacttgttatagactaatagttaaaataattccgaagacatttccagtatggttcttatggaaaactagtgctatcctaatacgggggaaggtggaagaaacacctgtgtctgtactgcttattgcctggtttatgtgcaccaagagctatgactgccatcttatggagggttggggttttaggctgctcactatttctccctgggagagtagcagtgactagggctgtgcctcagccccatgcctcaagttagggggaattaatgaaggaccacaaagggaattttagggacggacttgagagcacgtgttcttgttagctctgccttccaaggaatctggggatcaatatcccagttattttagggtaaaaaatctgtgtgatatgtaaatatatatcagttctatttatggtttaatttttcattggttttggttttatttgattggtaatattttttcaaaaattaacaacttgtcttctccgaactaagtgtcatcaaggtccataccaccagcatcttgcctgtgctagcacattagtttccccacttgtctgcctgttccactcttaccttctgataagccattctctgcaccatagccagagtaatcttaaaaatccaaataaatcaggctgggcacggtggctcatgcctgtaatcccagcactttgggagaccgaggcaggtggatcacgtggtcaagagagcaacaccatcctggccaacatggggaaaccccaacatggtgaaaccctgtctctactaaaaatacaaaaattagctgggcgtggtggcacatgcctgtaatcccagctacttgggaggctgaggcaggagaatcgcttgaacctgggaggcggaggttgcagtgagccgagatcgtgccactgcactccagcctggcgacaaagtgagactccgtctccaaaaaaaaaaaacaaaaaaaacacaaccaaaaaaaaaagatccaaataaatctcatcaaccccgtctaatggctttccatttgcatcatgattccttttctgcctatctctccttttcttttctgcctcatcttttaccatagccctgtggtgacattatgctaagccactagtgaccctgcagccacagtggacttctttcagcttttcaggtttttgttgttgttgttgttattgttgaaaaaaagtcttgctctgtcgcccaggctggagtgcagtgttgcaatctggactcactgcaacctgtacctcccaggtgcaagtgattctggtgcctcagcttcccaagtagttgggtttacaggcttgcaccaccacacccagctaatttttgtatttttagtaaagacagggtttcaccatgttggccaggctggtctcaaactcctgacctcaggtgatccgcccaccttggcctccctaagtgttggaattacaggcatgagccactgcattcggccccttctttcagttctttaaacatgccttacttattcctaaagatgcttaatttggcacctttttgctcttctttccttctgtctggagctttcttttcattcacgattctagtgactggctgtcatccttcaggtcttaactaaagtgttacagtctcaaaggtcttcttccctggccacctggtctaaagtggtctctcacccattgtctttctgaataatgttattctgttgtattttcttcatagcatttttctctattgattatgtatttattttctgtctatcataatagactcacctttctaccacatataatttaaaaataaactttatgaaatgagggaccttgtctattttgtcactgctttttcagctagtgtctgaccagttcccaaaagagatcataaatccaagtgaagactgaaaggagggcagaaagctccagagaacaggaatggttttgggaacaagtgagaggtgggaatggcaaggcagaggcttggggtcagctgctttcctgtcttcctggaatcagtcctcatgaggttttttttgtttgtttgtttgtctgttggaggatatttgcaagtggaaggcatgcaggacagaatttttttgttgttgttgtttgtttttttttttttgagatggagttttgctcatcgcccaggctggagtgcagtggtacaatctcgactcactgcaacctctgcctcctgggttcaagcaattctcctgcctcagcctcccaagtagctgggattacaggcacccgccaccaggcctggctaatttttgtatttttagtagaaatgtggtttcagcatgttgctcaggctggtctcgaactcctgatctcaggtgatctgcctgcctctgcctcccaaagtgctgggattacaggcatgagccaccatgcccggccacgggacagaatttaagacagatgtggaccatcatctggctcagatgtaggcttattgtagtagaagagtctggaggaagcatggtttggagggggacttctggaaaggttccaaagtcgcttatggactttgttgatgtacaaacccagaaactctttcatgtagttgtaacccatttgaaaataacagttttgtgttctgctttcttcatgtagcattgtccgtatatatttccacgcataagtataatttttgcctacattgtctttagttaaagcatcaagtaggctgggtgcggtggctcacacctgtaatcccaggactttgggaggccgaggtgggcgggtcacctgaggtcaggagttcaagacgagcctggccaacatggcgaaacccagtctctactaaaaatacaaaaattagctgggtgtggcagtgtgcacctgtaatcccagctacttgggaggctgagacaggagaatcgcttgaacccaaggggcagaggttgcagtgagccaagatcacgccactacactgcagcctgggcaacagagagagactctgtctcaaaaataataaaaaaaaaaaggcatcaagtggttgttcactattcatttagtcactctcaattttagggaatttatattatgtttaacttttctccattgtatgaagaaaaggtataaaaagatttgtagaaatgtactcctccgcactttgaattattcccattcgacatattttacaaaatggaattattgggtcaaatggtaggagccattttataacatttgttactgccagatgtggcaatatgtggagggcaggggtcatgaaacactcttaaaatattaaaaaggttgattgtgaagaggaattgggcttactctgaatggctcaaagcggtagggcatcagtgaattgttgcagttataaagaagcagattcggttctatgtaagggagttttgaatacttagagttgcctgaaaatgggacaagctatctccataggtaaattccctctcactgaaaaattttaagcataatgagagagcttttaaagaaattgtttataagctttccagatttgtgatctgtacattttcctacccccagccctttgctccaaaaccacattttgttaaatgaacatttattaagacataacctgtgcctgttatagctagcagtggcctcagctctcattggcagacccccagcagagtcagtcttctggagcagacaatctaggaattccaacagcgtgaagtcattcccatcctccagacttcagaactgccaagcagcggataaaactttgtctctagttccttgacatttcctttttttttgtacttagtgtctacctccaggtctctgcccatgttgaacatacgcataagaccccccaattacaaaacctatatccttgccttgcctccaaataaccccaagccaaatccaacacctaagtgattgattccaagtaattgttacattatcttatttgtgccaatagatatttgcacttcagatgaggagtttggaatcccaaaagatctgtaattggcggaatatagcactcctaattccattaacagaactttacttcctcaccctgaacacgtgtgtgtttatatacacacacacacatacacacacacacatacacaccacttttaggcaggcactctaatttactgaagaaactggttgcttaaaatccgttttttgtttttgcttttgtttcctttttgagacagggtctcgctccgttgcccagcctggagtacagtggtgaaatctcagctgactgcaaccaccacctcctgggctcaagcaatcctcccacttcagcatccccagtagctggaactacaggcaggtgtgcacccctacacctggctaattaaaacaatttttttttttttttttttagagacaaggtctcactatactgcccaggctggtcttgaacacccgggctctattgatcctcctgcctcagcctcccaaagtgttggaattataggcatgagccactggaacctgggaggtggaggttgcagtgagctgagatcgcaccactgcactactccagcctggacaacagagtgaggctccatctcaaataacaaaacacacacacacacacacacacacacacacacacacactgtgcccagcctgttttgtttacattttaaaagctactctacttagtaaaagtagtctcaaactccaagtttggccaaggaggaaaagtccctataaagggtggagacctgaccacagcctttgagttttactttttctgggagtatattttgctgaaatcctctgccacccctacacgggcctcaggcaaaccctgctcacctttctcagtttttctaggatataatactcccattcccaagtcagaaaaataacccaactgaaggcagcacagtgcagagggaggagaatgctgaggagagacagaggtccaggttccactctgagggctccactgccagtcgcatgcccttgagcctgagccttgagcttccctccctactaaacgccccagcaaaatcaacaaacatattaacaccggaaaatataatcaccaaagcccactgtgcagtacagatgaaaatatcatagaacatgaatcggtcttgtagtgtcaatgtgagtttttaaaatgtttcttttgtgtccaacaaagagtatttagaggctacttggctttttaacacttatgtttcctatgttaaagttataaatcagcttccttaagcttttatgtttaacttacatagaaataaattctaataatcactttaaagaattgtattcaccgactatttgatcttatttgtaagtagttaatgaaactctttaaacattaaaagagatattttataaattcaatatatattccatgtccttataaagtaatttgggcatttgagctaaccagcaaaacattcctgaatacttaaaaacctttataaatctaacaatttctaaataggatgattcaatttctatgttttcttacatgatccaaaactaattttaaaggaaagtttcatttcaaaccatgtgcattttaaattagaatgacaagcctaatacaaattccttaatacaaacatgttaacgctatgtgttgattcttttaaacatttctatacttaattctaaattttctggatgttagaacatacttacccactggaaaatatttatgtcctcccaaatggctgaggagccccttctcaagtgattttttggaaacacgttctcaggggcccagagaacacacccagtagagattcggtcccaaggctattgggcagctcttctgtggtcccagcttcaccactgagccctgttttatgggtgctgtgtcattaccctcagagtgggccagttttacagcccatgacccctagattccagttacacgccatctaattcttcagcctacacaaggaagtcagaaactcctacccaggttgctacccccacttgtttggatataattagtctccttaacgattcattctactctgaatgcttttcacactcttcccagcttccggggccacaactcttacagatattgaatggttgaacttctcctggtgttgcctaaccctggctacagacctaatgctgtgccagaaatatccaacgggaaaattaacattcaacagagaatgaactttgggatgaatgaaaccctaggggagatgggagaaaaacgttacagaatccatttggtttcttcttcttttctatcttattacttgatagtttcgtatgtactctttaatctcgccctctcaacaaggtagtgaatctgcggttgtaccaacctaggtatatttgcctagctccaaatcacggccccctccaaggccgtaatgtgtattgagcacacgttaggaacccagtgctatttggacaaaagaaaataaaactcagtaacttttatgtcctcttgaggtagttcctgggataaggtgggcaattactggagaaacagacaaacaagcacgagttgacacaggtgtgtcttagattaggactttgaatgatcgagtatgatgtttccactaacgaacactgagaggctgcaggagaagggaggggcaggtttggaagccaggcagattatgaacttagttctgagtgttttgggttgagatgcctgtgggacactgactgggctagtaacagtatgaagatggacatgtatgactggactttgggagctctgggctggagatatacctgtctttgggagtaggttaatggtggttggagccatggaagtaaatcaagtcactcaagtagagtacagtgtgggaagaaaagagagctcagaacaggaccctgggaaacaccgtcatttaaggcgcagccgcaggaagtggagcctgcccgcaacactgggaagaagccaggggatggaagaatgctgcttctgtctcacttccagatgtcttccctggttataagcacgagggtgggcagcatagtggtagtgatgggcagggcaatgtggagggggctggaggctgtgggggaaactacgcttggggtgagatggtgttggtgtgagaggctgcattgagttctagttctagaaagcatagaagggggctgggattttgaatttctggattctatgctttctctgccacttcacgtttcaccagacatcctttccttactctgaatcatagcctgtgtaggaaactctctttccaaatatgggaagggaggtgtaataaggaggcagagatagcatggggaagaagagggggtgtcttgttgagtgtgagtatatgagtaggtgtgggtgttgtgcacacaggtgcacgttgtgactatgtgttcctctgtatgtatatgcatatgggggtgtgtatgtgtgtgccttatgttggtatgtaggtatgtgtgtgtgtatatgtgtataatatgtgtatgtttttctctctgtgaatatctatcaatacaagtacagaaattgagaggaaacattaagaaacttttatgggctgagcgccatggctgacgcctataatcccagcactttgggaggtccaggtgggtggatcacttgagcccaggagttgagggatcgcttgagcccaggagtttgagaccagcccgggtaacatggtgaaaccctgtctctacaaaaaaatgcaaaaattagccaggtgcggtgccatgcttgcacgtgtagtcccagatactcaggaggctgagacgggaggatcacgtgagcccaggatgtcgagactgcagtgagcagagattgggccactgcactgcagcatgggtgacagagtgagaccctgtctcaaaacaaaaagcaaaagaaaaaaaaaacccaaaaaaacccagtaacttttatggcaatttgacagagtattttatataaattgaatctagtaataaaacaattgagcttgtattttctatagttatatgttctatttcattttctagtaattcattgtattgtattttacaaaagtattggtctatggccgattgcatataaaactgctcctttaccacagttagtcttcagcaatgattaagaccagatcaggactcctagtaggtcctgattctgaaattccccaaggagggaagttcactccagaacgctgagggtcctgctctgggtcacgtcgatgaaacatgaactctggtcttgcgcacacacaagggggtcaggcctcagacctgactggcatcccagggctcagcctgtccttcctgtcactctaccccttcacatgagagggggccaccagagagccctcaaggggctggaggacagaatcaagccagcttcccagactgtgcctgctcagggtgctgctctccctccggcctgcaaggcaggtggagctgatgcctcacagaagtaagtgtttcagggccttttcagggccttggaattggagctccaaacctctccacttaccccaagacagtaacacacactccatcagcaacagcagagtctttattacagcaagatcagatgcatttctttgcccaacacagggaacacagcagagattccccttccttccttccttagataattacccctgtctgggatctccctggactgtccagccacagcccttccaaggatctgacttatttacgtttgtaattttatattctttttctttaagagggtctttggtgagccacaggcctcaccaaacccagatccatccttgtggggatcctgagtgcttgactctggaagggctgcaaagtaagctacaatgaaaggctgaagagaatctgccctcttctttcatcgtttggagcgtctgtaaaactccctaagaaaccaagagtatgtgaggttgagtgtgtgggagggaaatggcatttgcagtggggagcaaggattaataacgaactggagggaggaaaagcagcagcatacagtctgcagagtgtgaggtggaacgtgggcaccagggcttagacaactttatccaagtgcacaggaacaagtgggtaccctgggtcaccctgttgtggagggtcacaggccactatgtaaggtgtgttcaggtgcttctctttgtacctgcagtttgggtacttccctgaggtgagctcacccatggtcagggacatgggcccgtggctctggtggcagtttttacagctattcttgcaggctatgttgggggtctggcaggtgatggccacactggagaagggctcgtgcaggaaggtgttgaggtctttgcaccgttctgtgtacttattgatgatgctcatggctgagttgcatgcttgagggctgggctgcacatgctgagttttaaaccactgagatgatgtcatgtccttgggcttggctctgactaggacctctgccacccacagccccagaagcagcagcagcagggggcagcatcctgctctggccggtgccatctctcttaagggagacagtggaacagagtgaggaggtaggtggatgaataggtcatcatgggggagtcttgttagtccttctaagaatttcataccctaagccagttattgcagggcaatgtgcagcctaagatattgaacacccctggcattctattgtttagtaccagcagataatgtgcctttttgtgcctctaataaacacttaccttctttacctctcacaatagttttatgggtatgattaccttctcacatatatatatatatatatgaataaaatgaggctcaggaaagttaagaaaattcctattatcccacagctagagcgtgtcaaatacaagattttaaccaggacctctcaagttccctaactcctattcttcccacactcccaggtatcttttctgagactgtgagaaatcacaaagagaaactaaatctttttttttttttgagatggagtttcgctcttgtcgcccatgctggagtgcaatggcgcgatcttggctcactgcaacctctgcctcccaggttcaagcaattctcctgcctcagcctcccaagtagctgggattacaggcatgcaccaccacgcctagctaattttttctatttttagtagagactgggtttctccatgttggtcaggctggtcttgaactcctgacctcaggtgatccacccacctcagcctcccaaagtgctgggattacaggcgtgagccaccgcgcccggttaagagaaactaaatcttgaagaaaaacatgtgaaaggtcaataccccactctgctggactagcttaggtgtccctgaaagagttgttattaaggtcgtggagtcaaatgcattcctccccattctgtggcccagtttctcactgaagttagaaaaaatgatcactcctagtgaagggatcgcagctccagctgtcaaagcagcatggcgagttgggttctttccatgcctgacattttgccctgctggagaatgtcttggaaggatagagggtcagggctggaagggaccttagagttcatctcagttgactccctcattttaaagatgagggagcttgagttcctgcaagggcaagtactctttccaaggccgccgagtgagtggcagagctggggctaagagcttcctgatgttcaacccatccctttgggctggcgccaagctaaaaaggaaagaggaaagagtttcccataggagcagagcagagtgagtgtgtctctgtttgtggttttaggtggtgtgtgctcattgccttaatttcttcagacccttctaaaaacatttaagagaaagtctcctcttagagcaagaaggtgaattcttttacactttcccgtgtttgtttctcctccttttcaataacgacaacaggcctcaggctgagttttcagctgaaaacaatatctggatagaatttttaaaagttagatgatattcattacatttatttttacttctgtttacaaagtaacactagtattctttgaaagatggcattactcagtttcattgtaaaagaattatttaaaataaatgagtaaatatatatttagcgtattattaaaataataggggtggtaagcagatattgtgaaaattgtcaagggttaaagcaaatgactgcagttggggaactggctctgcactgcagtttctcaggtcggcgatagtgtgttggactcccctcagtctctcaacctctgggatttgtgtaacttctccacctttgggataaagtgctctccaaaatggcaaaatttgccgaggctcctagtatctgcatttctgaatgtaaaaattctgagatgtttgtcatctcaggcaaacatggtggaggagccttgtttgccagtagaactcaccttttccacagcagggatcccttcgtgcactcctccccacaaagcaaacaaaacattgatttttgaacccaggaaaacattacccagaaagcagttgacttgggcagcagggaacaaatctttccctccctctgcactactccctcccaccaccctgtcccaggaagtcatttctctcttgcaggccctcagctgagcctctcccattgggatggaagggttaccaagtgattattcattaacggttacagacccaagctgccaagctttgaaatgagagggtggggatggtagcaggagcccagggctggcctaaacgtttactgccaaccaagatgactgaccagagactttgcaagctctgattccaaatacgttgcaaacatgctttccctgaagtaggtactggcccatgcagctggccagcctcactcagggaggcctgggaatggggttcctttgattgtgtgttttgatcctagtcattcatcatgagttttccccactgccacagcctcagggctgttttatccattaagcacttgaggctcagtgcttagaatctgggaggtttctaagggcctacaacatttgagactgggaaaaatatattggctccaatacaggaaaagtcaaatatagaatcaaataaaaaatatttacttacctgctactaaagtagcatgaagttgatttcacttattttgaaatttgggacacataaaaatctcactacattggaaaacaatctttggttagttttctaattttgtaggaattcctaagtacctggaaaccttgaatgcagaaggaacagtgccagtcacaacttacttgcagtcaaataatttcaaaagtaaaactttaaaaatcttttcagatacatttctgcagaaacaatattgaatgaggaatatatatcttacatattcaaagtagtgtggcgagtggtaaaatgcttaggagtatggtaggatagagtatactatttactacctactaaaggcagccaggataacatacaccgcattgcttatggttcaggtcagcacagggctgtacagcagcagcaggaggaaagagatgctaccaagcatcatttaattagcatctaaaatgtgctcggtacagttctaggttcttggtggaaagtaaagaacctcattttaaaaggtgcttcacgagccaaagcattgtgctttgtgtacaactttatatataaactgtattgtgtgttccacaatattatcccaattttacagaaaaggaaactaaggttctggcaggttaagatccacagatttagtaagtggcagggccgggatttgaaattcggttctgtttggctccaaagttcatgttatctttccttgccacactgctttcctgtttattgataattcattaacagttacagacccaagctgccagcctttgaagtgacagagtggggatggcagcaggagcccagggctggcctaaacatttcctcctcttgtgggctaagagtcaccttgtgtgcactggtatggagatgagccagtcttggctctgattggtcaatgcctgttcccaccagatcacaagagaagaagactgaatgccatctctaatgtctactatgttcttgacactgaactcagcagtgtgtgtgtgtgtgtgtgtgtgtgtgtattatctcttttgtgatcaatctatctaaaaacatctccttacttatcttgcagcatccccatgagatagaaatatttatgcttattttgtaggtaaggaaacaatgtctgtgtgtgtgggagttgagtaacttgcccacagccatacaggagtgagtgacagagccacttcgatctgatcctcaaatttacactctgtacactgtgtcaggccgtgctgcagctttgtttcatttcagagccaatttttactgatcttgtttttatatggggtttctggtcacccctgagagtacaactcagactacaatcaaagttaaaatagtctagtggtaagaatactgaaccagacatgaatagccctgaattctggtcccacctctttcactaattagctgcatgaccttgggcaaggctcttcactagcttacatggacccagtttcatagaatatcaaagcaggaaggcacttccgagttcattgaatcttagctcttgctctgatcagaagtgtattttttttttcttttttaaggcagggtcttgctctgtcacccaggctggagtgcagtggcacgatcatggctccctgtagtttctacatcctgggatcaggtggtcctcctacgtcagcctcctgagtagctgggactacaggcctgcaccaccacgtgtggctaatttttctttttcttttctttttttttctgagacggagtcttgctctgccgcccaggctagactgcagtggcgagatctcggctcactgcaaactctgcctcctgggttcaagcgattctcctgcctcagcctcttgagtagctgggattacagacacccactgccgcgcctggctaatttttgtattttttagtagagctggggtttcaccatcttggccaggctggtctcgaactcctgacctcatgagccacctgcctcggcctccccaagtgctgggatgacaggtgtcagccactgcgcccggccaaagtgcggctaatttttctattttttgtagagatgggttttgccacgttgccagcactggtctcaaactcctggactcaagtgatccactcgcctcagcctcccaaagtactgatattacaggtgtgagccaatgcacctggcaataacgttaccaacagatggtttttgggcttgaataccttcagtgacatgaatcttcactacctaccagttatatcaggcacccagttctgttgtctgagaattcaacttttctcaaaacctgattatccccttgtaaggcccctgtttctgtttttggcgcttccagttgaaaatactggtctcctttgactgtttctaatctttcatccccatatcgattagtaggctaacagactgaatacttagcatgatcaaagtatggaggggcacttgagtcacttagtcttattggttctcttgtacgtatttctctccctttccactgcctgtctggatgactctcaccaccttctaactgcctccttgcctaccctttctcctgagtttaattgagcatgtataataatgttggatggatcttgttaaaatattccttttcctgcatcatttctctaaagatcatctgtttatctccagtggttctcttgcttgcaaggtaacatccagccttcccagcctggaatcaaagccttctcctactcaccttgcgtccagtctacccattccgtatgagtggcctccctatcttccctccgaacacaaactattctaaccaaattctatcctaataacctgattttccttttgtctccagcacatgttttgctctcttcagctttgcttctgtttccctcttccctgcaagtcctccctcaaatattatccatcctttagaactcatcttgaccatatgagtttgctcaggatcacatttacgaaccttgccgtacaaatcctaacctcctttagcattaactgtttcatagtatcactcatttgggttctaaatcgtgtactaccttgttttgctatttaactctttcatccagtaagagcatccagtcttcccaactagacggtaaactcgtgggacaggaatcaggtccttccgtgcttctctgtcttcatagtgccaggcacatggctagctcacaggagcactcagtaaccgtgcattgaactcagtcatcactctgatcctctcagtcttcttactatttataacacaaggagtttcagttgaataatgtctaaaatgccccctggttctgacacttgtgtgacacaagaaaaaacatcaaagtgctagtaagtagccagcaccttactagtatgaaggagaggcctaatagtagactctgaaggtgccttgaaagaaggggagcagagaataagcaactatctcccaaagacccattctttcaggataccccaggagggctgagcgagggtgccagagaagtttgcctggtttgctggcctgaaggacagcagtaccacgagggtcgtctttgaactacaagtgccacccccatagggtttttcaagcttcaaccttcaaacagcctcctggtggtgacagacctgtggtctgggccctggtttatggctctgagaagcagagctccatcacatggaatccagtggccacattccttttgggaagccctcctctgtttccagtggctaaccctgtctcctgccaggtccatttttcttttctatgtagttctttgaggccttcctatggtgcccatttgcactatgagcttgtctctgcgggaggactgtctccctttgttcctcactcctggattcatcttcatgagggagaggatgtagtcttcaacccaaccagagctgaggcatatggctccctggatacgccagttcccctcataggccggctgccctcctgagacctctgacttaccacaacaaggctgcgtgcagccttcagccctgctaggaatgataggggtcataacgataaaaacaatcatagttaacatttactgaggcttttctatgttccagtcactgttccaagtgctctatgtctattttctcatttttcagcatgaaaaggacctttccaatgccctagccccatgactaccctatcttcctcaaccagttcttgaaaagaaacactggtcagagacagaaatccacaaagagcaagttaaggaaaacattagagccagtgtactgctaccccaggtggaacacagatgtgtgcagagggtacacaaagtcacaagataaatgtgttctttacaattttactaaaaccatctttttaggggatggggagtaatttaaggcattatttttacagaaaataactttgtatgatagaaaaattcaaatgagttacattaaatttttttagcattttcactttgaaataatttaaaacgtatataaaagtttcagaaagcatacacagagctcccctatatgcttcacccagttccccaattattaacatttctgagctatttcagaacaagttacagacatgatgctcattaccccttaatacttcagtgactatttcctaattacaagtactctcgtgtgcataaccacagtacagccaccaaaaaggggaaattgacattgatccattattattattaccacaaatgaaatttaaagatagcatataaaacactcatatgcacggctattttataaatattagttaagtgaaagaagcttcagagaaagcccaagctcattgggcactactttaggtgttttagttcatcttcctctgtggttactagcacttcaggggaaattctgggaagcattgctctgcaggttctagttgaccatgaagatcctgttctggatatgccaaattcaagggtaaaaagtggtaacccttaccaaagataaatgcttgggatatctcaggcccacccggagctccaccaaacaggatctctgtaatgttttcaccctggtccggagtagcagatgggaggtccaggccctttttcttgttgcatatccttatttatgtttccagcagccaatggcacggccagggacatgcttgactagtttgccatcaattcctcatgtactgtttttttcccatctcaatgatacaatatgagcattcaggtgaaggtcagaaatgcaacgtgtcaggattacgggcacttaatactcttttggatgaacatgcttttgtctcaaatccgggggtctgcccatttgcagattgatttgccagtccatgtatgatttgatcttgaaagatatctgggctgggcacagtggctcacctgtaatcccaacactttgggaggccaaggcaggcagaacatgaggtcaggagttcaagagcagcctgaccaacatggtgaaacccagtctttactaaaaatacaaaaattagccgggcatggtggtgcatacctgtaatctcagctactcaggaggctgaggtaggtgaatcgcttgaacctgggaggccaaaaagctcaacaaggttgcaatgagtcgagatcgtgccactgcactctagcctgggtgacagagcaagactctatctcaaaaaaaaaaaaaaaagaagaaagatgtctgagatccatttgatattgaatgccactttgtaaatatcacaaggcttgttcaaaaaagcccgagttcttgcctaaattattcatgtaatcttgggcaaagtgtttaagtcctcagggttattttgctcatttgcaacatgaggaaggcatgactagatgatctccgagaacactggacaagatgtcttgcagcattataatgttatgattactactgggagagccctaaagccatggagataggaaatttcatcttgtgctaaatgccacgacccaagcaggaatttgtactaattcacaccacagttagtttatgttttaaatgtgtaagttcaactaagtttctatgaaaaaaccatagaaagtaatgaccacaatgtttttctgctataaccaatccactggacatgagtcacaggcgttggtggaggttttgagtgatgaaaaatgaaccagaaaatggagctgaatcagagggtgggaaaaatataagaggcttccacgatggaagtgaggggatagtaagccttcctaaggactaatttaaatatctcaggaggggaagttggaaatgtcactagagccctgtctccatcaattgctgcaataatcaaatcctttggatgggagggaatacagagggcaccctcaaaagttagtggtcctaagtcctccaacttattttcatatctttggattcataaattcacagaggttgcagaggagaaaaacttcccttaagtaatcttaacagaaattctccaaagcccccttttacttctccttcaactcaaagtacccatccattcctcccaaataaccttatctacagaaactaatacatattgtcctttttgtctgaccttgaaccttcccttatctactcttggctaggagctttttggcaagaggcggatgaggaggagtttggcctcccttgtttaaatcctttgttcttctgtcacggaagtcaggcctgctccattcatcacaggtttgaccactcaacatttgacaccacaatgataaatagaaatgctaacaccattcaaactttccctacatgctagtcactgtactaagtgctttatatgtattgttacttttaatccacattatactcttgtgaagtggtagtgaagatccatgtccctgaaggtattcaagcccaaaaaccatctgttggtaacattattgccaggcgcattggctcacacctgtaatctcagcagttttgggaggctgaggagagtagatcacctgagctcaggagtttgagatcagcttatatagatggggaaactcccacctccctaagctaagaggcgttctatcacagtgtgtattttcatcacgagcacacatttttatttacctttcctcttatgaactgtggacttcttacaagatctcattagcaatgtgggctttctcatgtccctgtggctccgtggatgttcccaagcttactggttttggagtcttgcacaggtaagcatcctgataagagctataactgctcttctttttgcccattcatggtggggtgggggtagggggaggacattagaatgaagctctgaagtctttgaagcacttttggaagcccagttgtgcaggtgcatggaagaaatgtgatgaaatgagttgaagctctcccaaggagaagagaaggccccctggatgttgttgctactggtatgttttttggtgccatagctcaagggttatcccccagagccccagacactatgaagagggccaaagggtcctgatcttaagggcagggtgtaggcagaggaaatccctggagctgaggatccttctcttcacagtgattctgttggccctcttcatggtgtctagggctcatttacttcagtgtgtggagacttctgggaaccagagtcatgtagaaaagtctcctccccagtctacctcagatagtctcccttctaggagagccagctcatctagctccagttcttggtttactttctttactgaactccatttccgctcctttactccatgttgaaacaatttaagtccatctgcacaagactgggcaaagctcccctggacaccatcctcctctctccaagctcccagccctagaaacataaatatctcataattaagcattctccttttcccattcttcagctttcaagtaggaatgcatcacagttcagccagccttggtatttggcccaaattattatcttcttgtatctcagctttggcttttggaaggctgaatagtcaaattcctatttcatcactattcctggcatcctttaacttggctgtgatcaaggtcacacgaaggattgagtgacaaatctattcaggtagggcaccactaataagaataggccaggccatttggatttattgttaatatctgaatagttacttccaaatattggtgagtactctagatgtaacctggagtgaaattttccttgtgagcttaaaaaaaaattattatattgaaattctaccagccagtggaagtataaatgggtatttattattatttattatttttaagaaagatgctattattaattgttgtgaaagcttatatatgaaacaattatttaaaatttccacatggttaaaaaataggaaattagttgaccgataatataaataatagaagagagtgtgttagctagataactttagggagaaccttatgtcccttgatcaacaatgatttgaactgtgcaagtccacttacattcaaattttcatctgcttctgccatccctgagacagcaagaccaacccctcctcttccttctcctcctcagcctccttaacgtgaagacaatgaggatgaagacttttatgatgagccacttccactaaacgaatagtaaatatttttttcttccttatgattttcttaatgacaccttttttttctctagcttactttattgtaggaatatggtacataatacatatagcatacaaaatatatgttaactgaacgtttatgttattggtaaggcttcaggtgatcaataggctattagtagttaagttttgggggagtcaaaggttatacttggattttcgactgtacactaggcacccttaacctccatgttgttcaaaagccaactgtactttctgagaccaaggtatgtatgtatgtatgtatgtatgtatgtatgtatgtatgtatgtatgtatttgttttgagacaggctctcattctgttactcaggctggagtgcagtggtgcccaggctggagtgcagatcatggctcactgcagcctcaaccttctgggctcaagagatccgccacctcagcctctggagtagcagggactacaggcatgtgtcatcatacccagctaattgtattttttgtagatatggggtttcactatgttgcccagactggtctcaaactcctgggctcaagtaagctgctctggttaggcctcccaaagtgctgggattacaagtgagagccactgtgcctggctgagcccaatgtatttacaacaatttaataaacaccacaagtagtatttaatttaacaaatagtacagaacagaacaatagaaattagattatatcataattctatctatgatttaattactctttttagaattgattggtgtattatgatttattatgtaaataaaataatcccttaagaagtatacatatttgaaagacttttttgaaaatgagatataacttacataaaatacacaaatctttttttcttatttatttttatgaccacctgctgccttttgaaacaaatcttaagtatacagttcaatgagctttcacataggaaacatatccagaccaagaatagaatatttccaggtcctcagaaggctcccccatgccccttcacagttatacttccccaaggctacaactattctgacctgtatcaccacaggttacttcagaactttctagttatttaatgctatttaggtcaacttttaatgctatattaggtcaagtttcaagaaaaagttttagttggaaattcttcttattttgggaggatgcattgaaggcataattttagccactttaaattttgtgaggagaatgtctctaaaaccatattatccataagaaagatcatcaataaagaagatagagttgtgaaaaaagaataaaatgaagagaaaaatcggctgccccaagtatcttgcttttctgtgcaccacaagtgaaaatcatctctttaggatggtaaatgtagtatactgaccacaagagttcaaaacaaattcagattttggataaacttcagatttattcaagaatcccagaagtccattcgatgatggcaatgttctgttttcaggtaacatttgtttttacactcagtcgtttggctgttgtgaccaactcatccacttattggccctcattctgttagaactgtttaatgatctgctctcctttcctttaatcatcctttccttactttctctcctcatcatctcagacaacctggctgccctcccaggactctgcctgcgggcttgtcctctaacccactcatgatcatcactctggcagaaggaagtctctcgggagaccttagtgggggtatttgccttggtctgcgtgttttccaaagatggatattgctactactagttatgatctaacacctgtcagtacttggggctgacaagcgtttcatagatagcatttccacatctttacctggaatcctatttggcaggtaggattcctcacattttgctgtagagaaacagacaagccaattgttcgaggtcatgtagacgggagtcaggatttacacctgattctgtctggctccaaagcttactctgactctggtcagtagtaaaaaagcacaggagttgatggggagggataggtagagtggaatcctcagcagggttgggaatgtcttataatgaatttgggtttgaaatagaacaggcatgggacacaatgcagcttgtttgggactgagataaaggaagaaagaaggggatggtgctggtcaagcaatgttggagagaccatcaggactggccaataccaagccataccttctccagctccagtccccagaacgagagaaatggtatctgtagcccagggggacagggaaatggcattttcgcatctcaacccctcaggcctgggcagactgccagagtggagagccagggtagcaatgaggcaggggagatcattatcaggaggaaggaagctctggcagctcccaccagcctgtttgtgacaagcaggctcagggccacggaagtcccttaaggtcaaaggaaatgtgatcctggatctgggggatgaagctcagacactccctttaccttatgtcttcaggccaaggggatctggccagagccaggtccagggcctaggttggaagagcagtggtctagagaaacgggaggggcagttagagaggaagagagagaaggaataaaatgccagagcacctcataaacaatctcttggctagagaggtaatgacctttattgcagccaacacagggtaactggctcttcagagcactcgtttcttcatgagtgaactcttacctagttcaccgcttgcctctgtaacagtgacttctttcttgcgcaactggtagagtagaaggtacactgtatttagagcaaggagacctaggttcaagtccaggttctgctactaactaattagacaagctctttaattcattaagctttctaaaaccttaatttcctcatccataaagaaggcatacaatccctgtcaagtctatgtcacaagggattagaggattctatacaaatatgaagtggtatttatttatatttttctttccttcaggtcacctcactgccacgtcagagctggggaagacttctagttcaggaacagaaacagctgtgtccacaaatcccatatgccccctttccatttatttcctctccttgtcatgctgccctaatgccagggggcaggggagacatgtgcaatggcatagaccagggaacccacagacctgagcttgctgtttcttggggataagcatctgggaaaacagcaacaaaaagatgaaaagccatccctctagagctcagctcaccagagtgtcagcttcagcctcccagcagaggctgaaccaggaacagccccaagagatgaggggaagagaatgctctgggtgtaggggagtggtgcggagtcctggagagggaattgaaggtcagccaaagagcaagccagtctggaaacctaaaggactctgtccaagtgtacaggaaccaggtggaattgctgagagtcctttttctggggaggcttacaggccactacgtaagacttgttctgtcgcttctctttgtacctgcagttcggatgcttccctgaggtgagcttacacatggtcagggacacggccccgtggctctggtggcagtttttatcgccattcttgcaggctattttgggggtctggcaggtggcggccacactggagaaaggctcgtgcaggaaggtgttgaggtctttgcaccgttttgtgtgcttgttaatgtttttcatggctgagttgcatgcttgagggctgggctgcatgtgctgaattttaaaccactgtgatgaggtcatgcccttgggcttggcactgactgggatctctgccacccacagccccagcagcagaagcagcagaagggggcagaatcctgctctggccggtgccatctctcttaggaggagcagtcaggatggagggcaggggtcgctgggacagaggtgttcagttgagaaattagtcctcttatacctgctcatatgagctagtcacccatctccctactcggttgtctcctttcctcactttgtgtctcatctctgcctcttcttctgtgtgtccacatccactgcagccccaacaacaaccctgtggccccatctctcatcttgtatttctgttcccttcattctgtccctgttgcctgtcactctttgtcctctcccctttcccttaagtctcatcccttttgtgtctccatgttcctgtgtctgtgtctcatcctctcccgattcccatctcgtctgtgttcccattctttttcattttttgcctccatccccaacatcactctcccctttccccaatgcgtgtcctcatctcccctaaatccagtccctcctttatccattttatcgctcacctgagtgtactctcaggatcagaacccatccctccttctctgtcctcactcctccccagatcctgccacagcctcacctttgcgcttggtcttcgtgctgtgactcctgctcagtgggctgaggtggtgtccacgcactcctaggctgtcagatctctgagggcctcttctcactcctgaactccttaagagctggcccgggctacgctgtgtctgtttgggggtgggctgggagcatcactggatcaggaaatgaatcaggttcatgcctctccacttacatgtcccaaatacgtggacacctaaggatgcctgtacctgcctaaacatgttcagcaatgaggaagcttgaatcgtcacattcgaagactgtatttgttccctggccacatgattttaatgactctttaatagagcacctgacccaggtgtcaactgaaatcaatttcaggaagagttgtcattcatatcctctcatatacacttctggcccttgatcctgggaagagtcaatcactgtggtgttaagggttgcttcttctctgacctgaggcacagataggacagcctagaaagatgctttgtctggttccttgtcatctggagatactggttatctttcggaggagatggaacagacacgagggaagtgggtgaatgaatcatcactgtcacgaggcctggcaccatccccaatagcgaagccattccacaatgattcacaggcctctccagttccaggtaccaaccaaggccacatggctttagctggagaaggcagccaacacctctcaatttcacttgttccctcccttttttattgaaaattgcaaaaatttaatactgcccaaatgtttgtgtttaaaatgctgttgctgctctcgacatcctgccttagtgcttccttcaccttgtatgtcctgttccttgtggtggttacagctgtgtggagcatctgggtcagtgctactccaagctcttgtgagcttggaatatgacactcaggagaaccgagacaccaaggcagagaagcatcaccctctgtgggtgagaaggcctgtaaaactgagatgaggaatatttttgttttcagaatttacctgtaagtagtaggcaatctcagaatcttgggcatgcttcattcatgtggtcaacaaacatttatcgagcatctactaagtgtcaagatacttgggatatatcactgaacaaaaaaggcaaaaatggccaggtacggtggcccacacctgtaatcctagcactttgggaggccatggcaggaggattgcctaaggccacgaattcaagaccagcctgggcaatgtggcgaaaccctgtctctataaaaaatttgaaaaattagccaggcatggtggtgcatgcctgtggtcccagctactccagaggctgaggagggaggattgcttgagcttgagagataaaatctgcagtgaaaatcatgattgcaccactgcactccagcctgggtcacagagtgagaccctgtctcaaaaaacaaacaaacaaacaaacaaacaacaacaaaaaacaaagacaaaagtccctgcctttgtagagcttacattccattggagaaagacagtaaaaaaaaatacgtatactttgctcaaagtgataatggctagggaaaaaagtagaacagtataggggttggtggtcagtaattttacgtaacatcgttgaaatcgctgactctggggcagagacttgaagataagagtgaacttgtgattatccggaggaagaatgttccaagtgaagagactagcactgcaaaagccccagagcagacagatgcctgaggtgttggaggaacagcagtgtgtccagtgtggctggagcaggtaactgagagttcagagagggaccagagaccaggtcattgggaagacttacggaccatttgaaggcctgtggcttttactccaagcacagtagggaaccctggaagggttctaagtagatgaataaagaacgtgtcagcttaaaggattacctggctgttgtgtggattataactgtggagaagtcgcacaacccatcctgatcataaagtttgtgttctggtccagaatttatgattctaagtcaggaggatggggagtttgttttgaggccaggaggacattattttagtagctggacagcacagctgtgggttgggggtcaggatgaaggatctttagaagcaaaagtggtgctggagatgagaaatgccactagatggcaaaagagaatcaagaacaagttcacacaggcctctggctcttctggtttgtcctcagcgaggccttggttgggggagcagctgttcacttctttgttaaggtatcccaaactttgcaggctgaacttctggatagaagttctggatagagaattatgcccctgctgccgtagaaacatgaatgttaggagataaaatccacggtttaaaccaggctgtgtatcaaatgtgtatcagcacaggccagtctagcctttggagtggaggctggatggaaggctgcaagctcatttgaatgcctagcttggtctcctttctacttctcattatcctagagtgggatgttttcaagccatgatttaaatttccctctacacttgtgttttcctgatattataattatcctagtttgctcttcaactcgagtatgctgggctgcgtagaaggctgccttaggactgtgtgaaagtgaaataaacatggccctgctgcttcagtccaaagggaaaagagagtaaggttttaagtttgcacatgaaaatcgaaattgagtcgtacctaccatacgtgcaattcaactgaaatctttgttttgcctcaattatttggataagggaggtgattttgtttgtgtgcccaaattatccagcttccaagatctgcttcaccttgtacttggtaggctgattttgctattttggcttcactgcattcatggggcaacagaaaaagatggaggaagggggacaagtttaggaagaacaaaaagattcaggcatcaggccagggactggttcaggagtttcacaggaggagaagaaagactctgagagagagagcaagagcagaagacaaaacagtgggagagaagacagaagggaagaaaaagtcccttacaccagcaatctctacccctgcttccttctcattctatcgtcgaagtcacttctgttggcccagcttctccttaggctgttgtgtgtgtgtttaagttggggcgggtgttgtgaaaatcccaacagtgccaggtggacctctgcctgtcttccccacaggacaacagctgctgcttcctctcgcctgtgctgggagggagtgaagggggaagggagagaggagggccgggcctggattggtgcctacccttcagagccaagcctctctgccttccggagttccacacagcctctggataccaatggaaagcccgtgagagttcccttccaagcaaaagcagatccaagttctgttatcctaattttgttggtcctttgataaataaaggtaatgggctcatttttgtagactgagaaagtgaaacatacagcaagttgaggtcagatgtgggactttcttcaggtccttgaattcccatgacctttcctggaacagctgtgggtcaggaggaggcagcactgacagaaatttggaatccttggctcccagaccaatgcgtttagacaagccaggatggaggaaagaggaaactgatttgggggttcactggggccttgtctcacaagccctcccagctccccatttatctacagagcaaagtatcatttccttagcctggtaatcagggtctgtcacaatcgggcaaacctgtctttctaactttatctctgatttttctcccactgagtgcctcaaccccagccagaccggtttccccccatttttcaagcatgtctttcataatcctctttatctccactgaacttctaacttcaccatgagatccatttccaagccagggtgacccttcaggaaaactttctctgaccctcccaattcagagacatctttctcacctctaaattcctacagcatttactgtcttcagaatgtataattttctgccttgaatcactggttatttcttcatgtgtatgtattatttttctcttagactgtcaattcccacaagatgaggaccacccgttacatttcttttgcacatttcacagtatatagcataatgccttgcatataagtgaccctaactgattcaacttttagaaggcattccgtctgctcctgaatgatcccagtctgaggtgggattgcctccagcccacagagatggttaacagatgaggaagtgacaatgcggcttctagacttcagccctgggtttgag

SEQ ID NO: 537 - DNA, 14290 bp, Homo sapiens; identical to SEQ ID NO: 136
  source 1..14290: mol_type = other DNA

SEQ ID NO: 538 - DNA, 9716 bp, Homo sapiens
  source 1..9716: mol_type = other DNA
gagggcgagggcgagggcagagggcgctggcggcagcggccgcggaaggtgaggcctggtgtagacgccaaagtcttgtcaggagtgggcggggcagggtgatgtatgatctgaaaggccgggagtgactaacgactgtcagtgtgtatgtgcctgtgaggctgtgtctgtgtgacagtatcattgtgtgcgattctgagtgtcacttggtgcagctgtcagctaatgtgactgcgtgtgtcagtgtgcatggagctggaggtgcatgtggctgtgcaagtgtgggattatgtgtgtatctgtcaatgcacatttttggtgggactgggttgtgtgtttgtgtgagagggactgtgaccacatgagggaatgtgttttgggaaggtctctgtggggtttgagaccatgtctgccagcgtgagagtgggtggctggctttgtgtgtgccaatgtgtgacttcagcagtagcagagcaaaagtgaggtttgtgactatgtgtgtgtcctgggtcctaacttaaaccgtgtgggagtacagctgtattcatgtattgggggacctacctcaagagcccatgggactgacctttctcttaagtgtccagcattgacagacacacccacaacacacgtggcttcccctccttcctctgctcaagaatccccagcatcaggtctactgctccttattttctgtttccctgcttggctcagtttcccttacgtgccgttttctgtccctattgctgtcttactagagatacctctgtgtgtttcttcacagctttgttcccctggtctctctgtgtgggtgcatttccagttttgcctttcctttctctctgtctctctctgtgcccctatgcctgccttccctgctgatcttgatctctggctagttgggggcctgtaacagtgatgagatgcgggtctgccccggctaagagctccctgagagagggggcttagaccatgatgaagagttgcttttaggcggtgctgtgagccctggtaggggctgtgtgcgtgtgtgactgcgtgagtgtatgaatatgtgtaagtgtgtctgagtctgaggcggtgtggctgtgcccgtgtgactgtgagtgaccgcatgtgagagtgtatgagtctgagggtaactgtgggtcttgtgtatctggcaccaagggaccaaaggcatttcctggtgctggggcccaaagaatggagggggaggtgagaaatggctggaacttccaggggagggggaactggactctttggcctctccttatatcccccaacctggggcctcccttcccctggaagcacagccagctgtaccctaaggaaacatttggtgaggagtgaaaagagggggagtttgtatctgatttttcatttgattgtgtccacgtgtgttcaaaggcatgcccttttgttaactgtgcctcttgagtctgtgtgtgaatgtgactgtgtctggctgtgtgaaaacacagggcatctctcactgacagggacataagtattagccaccctcctttccctcttgctggccttggctgtgtctgtggcttcctttccagacttgggggaggcctcttcccttcccagggccttgggtgggagggaaggagggaggaggcaggagcagggagggggcctggctaggggcggcagagctccagggcttagagggggcggggcagggaaggggaaggaggggatggctctggggtcccagaactgagtggagtaggagacgggggctgtagctggtgagaggaagtcctagaggctatggacactctgctgctgggatcaccgaggtagggtggggctaagcagggtaagtgtggctgggtggccaggggtgagccaactggacacactcagacagacacacagacaggtggaggccctgctctgctctactcctactcctgaagggtccgtgctcttcctcttctggtcttgttcccagagccctttccccgcctgccccttcgttctccatccacttcaccactgccttcctccttctgctcccccttgtccagaatctctctctcctagcatcccccacctgccatatagacacactgttagctttttgagtttccgctgaccccaatccagtctttccaacacttcccacactgccccatcacctcctagtcctgatctctgagtatctcttggtgctgtggcccccatgcctgtccctgcaggctcccagttcctctcagcctctcatccccttccctcccctcccctccccgccaccctgtctccatttccatctgctggctcctcgcccacccccagcctctggcagcagccagggcatctggatctgcttaactacacagccccagcctgcaccctagccccatccagcttcacaaactggagaccaacgaagtgtcaagagccaggcccagctgagtggcccaagtagccagaccaaggagccaggttcaggcgagaagcctggcagccagggcaggggtgggcctcagggtgggagtgcaggatgggctcagatccatgatgacacccttcccccagggtgataaggtctgcctaggttaatcagaggcagtgataagccctggaccaggtgggggtaaataccagaattcccaacagctggactggaggggttaatgggagtggctgagctggtgccagtgcttggtgccaggggtgggcgccaagggcagtggagggggagttgctggcacagtctgttgcctccggcttttgttctgggccctaagcccaggactgagatggagggtgtgagggggtgtgtgtgtccgtgtgtgtgtgtgtgtgtgtgtgcgcgcgcacgcacatgcaaagcactgggtatacagtgggaaaggggacctcaggtcagttcccgcagtgatttctaacagccttaccccacttggtgcatcaatttttctcctaggaagcctcagttttggagaggaagagccaggctttagcctcccatctcaggggtcggggatttttgactctacctctccccacagatgagcagcagctgctcagggctgagcagggtcctggtggccgtggctacagccctggtgtctgcctcctccccctgcccccaggcctggggccccccaggtgagaagaaccctgctctacaacctcccaactctgacttgtgacttgccaccctcactgtggccccttcccatgcctaacttgtgacaccacccctgctcctgtcatccaacctgggtcctctctctaccctgttctctgacctctgtctccagattataacatgatgctttgatccagtgagccccccaccacccaggttttaacagtctgcttcttatctgtcattctcacaaagtggggaggggggtaaaggaagagccttacctcagaagtgccctccacaggggtccagtatgggcagccaggcaggtccgtgaagctgtgttgtcctggagtgactgccgggtaagtgccccacctgcctgttggtctgacactcatgaccctttcttgactctgcctagtcctcatgtcccgcccctcccatccttgcccgctctgtccgtaatcctcacctctctatctgtcctaaccgtctaactatccttattcaacagaaaattcaactggtatgttttgagcatctgccaagtgccaggtctattctaggctctgggatacagcagtgctaatgccaggcaaggtgcctgccttcaaagagcttacatcttagtggggaagacaataagcaaaggagaatcttgccagatagtaatacctgcagggcagaaaaaccaaagtgagggatgtcgaagaggacaactgagtggttactttttttttttttttttccgagagtctcactctgttgcccaggctggagtgcagtggtgcaatctgggctcactgcaacctctgcctcctgggttcaagcaattctcctgcctcagcctcccaagtagctgggattacaggtatgcgccaccaggcccggctaatttttttttgtatttttagtagagacggggttttaccatgttggtcaggctttgaactcctgacttcaagtaatccacccacctcagcctcccaaagtgctagattacaggcgtgagccaccgtgcctggcccgtggttaccttttaattggtagttaggaaaggtctctctgaggagatggtgttgaagctgatttctgaaggtcaggaaggaggcagccatgcacacattaaggtataagcgctcgtgacagagggagcagctagtgcaaaatgtcctgaggtgggaatgagctcaatacccccgaggaatagaaagaagaccaatgtagctggagttttcagtgggtgagggggagagagataggagctgaagaaggaaaggaaggcaagggctggctcacaaggggctttgaaagccagtaaaaggaatttgggttctattgcaaatgcagttagaagccaatggagagctgtggcatggtctgacttatgcttgacatcttgtctttgtccattgtcacctcatctcacttccagggacccagtgtcctggtttcgggatggggagccaaagctgctccagggacctgactctgggctagggcatgaactggtcctggcccaggcagacagcactgatgagggcacctacatctgccagaccctggatggtgcacttgggggcacagtgaccctgcagctgggctgtgagttggggagggtggcactgatgacacatagggatcctgagggagtatgggacctaagtaagccctctgggaccaggaggacctgaggactgctcagtctccaggtgtaccctctgcctctagaccctccagcccgccctgttgtctcctgccaagcagccgactatgagaacttctcttgcacttggagtcccagccagatcagcggtttacccacccgctacctcacctcctacaggtgtgtgtgtgattgggtgtggatgcctacacatttgggtatgctggtgcaatgtgggtgtgggaggcagggaggtaggttctgaggaaagcctcagagagggcagaaggccctcttttccttcctgacttcagatggccccctccccaccaggaagaagacagtcctaggagctgatagccagaggtaggacgtgagggagcatgtgggggctccagctgggtcccacagtaggcattttcaaagccaaagaccacatcctcccttctaggaggagtccatccacagggccctggccatgcccacaggatcccctaggggctgcccgctgtgttgtccacggggctgagttctggagccagtaccggattaatgtgactgaggtgaacccactgggtgccagcacacgcctgctggatgtgagcttgcagagcatctgtgagtacccaccccagacctcccccagacccccatcacagagaccccaaatggactcagatctctccactcccagagttcccagtttcctcccaacctagactccatttcacacagagaaggccctgtggagcctgagaaggcaaagggatcagagcccaggaggcatggttatttcagcacacactctagaggctgctgctgctacccacactgcctgattggctgcctagcctcagagcaggccctgtaccgaatgcagccatatgtcatgtcctcccttgctggcccctccttccttgacctgtgcatgggagtgggacactaaaactctagctggaatttgggccaattcatcttccttggatgaaaataggaattgctcttttattcactcaagaagcacttcaaaagtccacccgcagatctcaggtggtttctttttttctttctcttcctttttttgttgagatagggtctcactttgtgcccaggctggatgaagttcagtggtgtgatcttggctcactgaagcctgcaactcctgggctcaagctatcccctcacctcagcctcccaagtagctgggattacaggcatgtgccaccatgtctggttaatttttaaaattttttgtagagacagggttttgctacgttgcccacgctggtctcaaactcgtggcatcaagtgatcctcccgcctcagtcttccagagtgctgagattacaggcatgagccaccacacgcggcctcagcccatttcataatacagatgaccggtctgagtctaatggatgatcaagtttaagatttcccctcccctctcaggagtgtctggctaaggctcctttaaacacacactttgggaagtggtggggaagtgatggagacccatagcctaccctgactttgtgtcttgatgcccttagtgcgccctgacccaccccagggcctgcgggtagagtcagtaccaggttacccccgacgcctgcgagccagctggacataccctgcctcctggccgtgccagccccacttcctgctcaagttccgtttgcagtaccgtccggcgcagcatccagcctggtccacggtgaggcctggagtgcgtcccaacccacggctgtgggtcctgtctctgatttcacgatcctgggtgttctgtatagctttccagtgctggcaggtcactgaagacccaacacttccctgtgggccaggctttgtactgggtgctgggttgcagtggtgactgagagactgaatgtctgtcctgtggggctataactatgaggtaaagcacatctgtgggaagatagcaatggcttttaaaaaaataactttttttttttgagagggagtctcgctctgtcacctaggctggagtgcagtggtgcaatctcggctaactgcaacctccacctcctgggttcaagcaattcttctgtctcagcctcccgagtagctgggactacaggtgcccgccgccatgcctggctaatttttgtatttttagtagagatggggtttcaccatattgcccaggctggtctcgaactcatgacctcacgatctgcccacctcggcctcccaaagtgctgggattacaggtgtgagccacggcgcccggcctaaaaataactcttaggaaaaggagtgcctttcacctagaggcacattctcctacaaacactcatatacccagctgaggatagcagtgaatttgtgtctcaggagatgttaaagattggctggtatcaggactagggagcagcagcatcagataataactaatatttacttagtgctgcctgcctgtggggtacctggctacactttttgcatacattgttttgtttaggtagattcacctctattttacaaatgaagaaactgagtcacagagaggcccaaagggtcattcaatatgtggttcaccaaagatttgaacccaggctgcctgatgccacagcctctctaagtaatcactactgccgtcttacaaacactaggtgtagactcagctccaccagacacccaacatgagacctagacagctccactaggctttaggatgagactgggagcaaggggtgctctttgtagatggtggctgggaaggccctgcacttacaagctgggtaacagtgagtcatgtttacccccaggtggagccagctggactggaggaggtgatcacagatgctgtggctgggctgccccatgctgtacgagtcagtgcccgggactttctagatgctggcacctggagcacctggagcccggaggcctggggaactccgagcactggtgagagacaaagccaaagaaaagggcagaggccccatcccaaagcatctatcagctgaaccagttccaaaagacaggcaggtggcacatgccctgcccacacaggcacggcaattgctgtcccagacttcagacttgtttgcctacagccctgtcttagcttaagtcctgccccttggcctccacccctgcagttacaggctccacttctacaagcttggagcttgccatgctccctaggagctggccatgccctatcaggctcctcctcctaggtaccttgacttccaacctaggccttggccttgagcacaggacgtgacccccgtccccaccagcgtatggacacttattgggtcttgccttcctttagggaccataccaaaggagataccagcatggggccagctacacacgcagccagaggtggagcctcaggtggacagccctgctcctccaaggccctccctccaaccacaccctcggctacttggtgagcttgggcagatgggcaagacttgtaaaggactgaaaaccccagagaaaaggggacaccgagcttggtcaggcttgctctcagtgacatgtggccctccccctcagatcacagggactctgtggagcaggtagctgtgctggcgtctttgggaatcctttctttcctgggactggtggctggggccctggcactggggctctggtaagtgactgccattggtccctcagcctctgatcctcacacatgctctgatgcccatagaccacattcatctccacccttcatgactgcccgctgaacctgtctgattctggaactacctccccatacctccatcccccatgccccacttgattttaactgattcctctcctgaccctttactaataaaccctttggcggagactgagataacccacattgttggagagacagctgcctttctatgccccaggctgaggctgagacggggtgggaaggatggatccccaaagcctgggttcttggcctcagtgattccagtggacaggcgtccaggtgagtaggacatccagaagatttggacttggagatgtttgcccctattttgagtgtccagattaagagctggctgccctagtcattttaaaacatgctgggaatccaagttgggtctcctcattttaatgatgtctaggctgagggctgggcctttcattcttgagtccctgggctcagaagtgggtctctttccctcctctcagggtactgaggaaggaccccaggtggacttcccttcagggtattagtattagtactaatactcttccagggtattagactcagagctggatattcatccttttttttcaaggtgtcttggatcagtgctaggtcccctccttcattcttaatgtgcctgggcccagagctaggtccactcccgtatcttcagtgtgttgaagaggctccctcagagctgggctcctctactcatcttcagagtgttaagcttagaactgagtcacctccctcattctcagggtgtctgggccaagatccggtcttactgtctctcctgatttgcctcctgcttcttctaggagctccaaacctgtagaggacccaggagggcttcggcagattccacctataattctgtcttgctggtgtggatagaaaccaggcaggacagtagatccctatggttggatctcagctggaagttctgtttggagcccatttctgtgagaccctgtatttcaaatttgcagctgaaaggtgcttgtacctctgatttcaccccagagttggagttctgctcaaggaacgtgtgtaatgtgtacatctgtgtccatgtgtgaccatgtgtctgtgaggcagggaacatgtattctctgcatgcatgtatgtaggtgcctggggagtgtgtgtgggtccttggctcttggcctttccccttgcaggggttgtgcaggtgtgaataaagagaataaggaagttcttggagattatactcagaa

SEQ ID NO: 539 - DNA, 32742 bp, Homo sapiens; identical to SEQ ID NO: 500
  source 1..32742: mol_type = other DNA

SEQ ID NO: 540 - DNA, 32742 bp, Homo sapiens; identical to SEQ ID NO: 330
  source 1..32742: mol_type = other DNA

SEQ ID NO: 541 - DNA, 29429 bp, Homo sapiens; identical to SEQ ID NO: 201
  source 1..29429: mol_type = other DNA

SEQ ID NO: 542 - DNA, 32746 bp, Homo sapiens; identical to SEQ ID NO: 88
  source 1..32746: mol_type = other DNA

SEQ ID NO: 543 - DNA, 32744 bp, Homo sapiens; identical to SEQ ID NO: 148
  source 1..32744: mol_type = other DNA

SEQ ID NO: 544 - DNA, 32744 bp, Homo sapiens; identical to SEQ ID NO: 298
  source 1..32744: mol_type = other DNA

SEQ ID NO: 545 - DNA, 32744 bp, Homo sapiens; identical to SEQ ID NO: 341
  source 1..32744: mol_type = other DNA

SEQ ID NO: 546 - DNA, 32742 bp, Homo sapiens; identical to SEQ ID NO: 461
  source 1..32742: mol_type = other DNA

SEQ ID NO: 547 - DNA, 32744 bp, Homo sapiens; identical to SEQ ID NO: 308
  source 1..32744: mol_type = other DNA

SEQ ID NO: 548 - DNA, 1973 bp, Homo sapiens; identical to SEQ ID NO: 369
  source 1..1973: mol_type = other DNA

SEQ ID NO: 549 - DNA, 18980 bp, Homo sapiens; identical to SEQ ID NO: 220
  source 1..18980: mol_type = other DNA

SEQ ID NO: 550 - DNA, 1728 bp, Homo sapiens
  source 1..1728: mol_type = other DNA
gagtagactctgtcctgggacttggtggtgctacccttggcctcccacagtcctgccaccctgctgccgccaccatgctgccccctgggactgcgaccctcttgactctgctcctggcagctggctcgctgggccagaagcctcagaggccacgccggcccgcatcccccatcagcaccatccagcccaaggccaattttgatgctcagcaggtagaagttggggggggtagagggaggcaggtagaagttgtgggaggggtagagggagacaggtagaagttgttgcgggggagagggaagcaggtgaagttgtggggggtgtagagggaagcaggtgaggggccctcccacagtgccctcgagttctcccatggtctgcccccagtttgcagggacctggctccttgtggctgtgggctccgcttgccgtttcctgcaggagcagggccaccgggccgaggccaccacactgcatgtggctccccagggcacagccatggctgtcagtaccttccgaaagctgtgagtcccagagcagccctgcaccctaaccccaaccctcctctcagcccccggacttcagccctgctctggcccctgaccccaccccggctgtggcctggactaggattcctggttggggtctcccagcctgtggtgcctcctccccgcccccccagggatgggatctgctggcaggtgcgccagctctatggagacacaggggtcctcggccgcttcctgcttcaaggtgaggcaggggctgcagggcatgtgggtgggggatgacgcagccactgtggctctctgacatggctactgtggctctgccccagcccgagacgcccgaggggctgtgcacgtggttgtcgctgagaccgactaccagagtttcgctgtcctgtacctggagcgggcggggcagctgtcagtgaagctctacggtatgtgggggccagcctctgtgaccaggcaggcgctcaagctctgcacactcactgggccaccccgaggggctgggtgagcccatggggacacacttcctttctcccatcctgatcctcctgctaagcaggggcccagggagtagtgacagacaggcctggtgtgggagcagggagagggccccgagggggcaggggacacacagaccccgtttccagagccctccacgccgcctggtgccaggaccccaggaaccctgtctgccctgcagcccgctcgctccctgtgagcgactcggtcctgagtgggtttgagcagcgggtccaggaggcccacctgactgaggaccagatcttctacttccccaagtacggtgagtgtccccagcaggtccccagctcagccacccccactctctgggctgatgtccagcctgacccctgccttgggcccccaggcttctgcgaggctgcagaccagttccacgtcctggacggtgagtgcacagcggggcaagcatggcggcgtggtgaggggggccactgccaccggctgagtctcgtctctgctgcagaagtgaggaggtgaggccggcacacagctccagtgctgagaagtcagtgccccgagagacgaccccaccagtggggtgcccgctgcctgtcctccgtgaaaccagcctcagatcagggccctgccacccagggcaggggatcttctgccggctgccccagaggacagtgggtggagtggtacctacttattaaatgtctcagacccc

SEQ ID NO: 551 - DNA, 7489 bp, Homo sapiens; identical to SEQ ID NO: 347
  source 1..7489: mol_type = other DNA

SEQ ID NO: 552 - DNA, 32744 bp, Homo sapiens; identical to SEQ ID NO: 423
  source 1..32744: mol_type = other DNA

SEQ ID NO: 553 - DNA, 29724 bp, Homo sapiens; identical to SEQ ID NO: 396
  source 1..29724: mol_type = other DNA

SEQ ID NO: 554 - DNA, 32742 bp, Homo sapiens; identical to SEQ ID NO: 322
  source 1..32742: mol_type = other DNA

SEQ ID NO: 555 - DNA, 32744 bp, Homo sapiens; identical to SEQ ID NO: 399
  source 1..32744: mol_type = other DNA

SEQ ID NO: 556 - DNA, 32746 bp, Homo sapiens
  source 1..32746: mol_type = other DNA
acgggcgggcgcggcagggcagcgtgtggggctgcgatcggcatgggctctgcgcgcggggtgcccctgctcgggctggggctcaggggacgccgggggccagcacagggcccggtgtccctcgggccgtgccggtaactgggattggcacccgccggccatggaagagcctgggcccccaggtgggctcagccaagaccaaggtaagggggcaggtgggatcccagaagggggttgtgatggtccccgtagggagcccaggaccggacctgttcactggtgacccgcccaggaccggacctgttcactggtgacccactgaccccccgtgggcagtgcagagctcctcccagcagggtctccgggagcacggcccaatgaccccattacctgcacatccctcagactcggtcccagaggagggatgctgcccccaccccttggcgcccccaccctgcctcatctgcccctgtgctgacacgtgaaagcgagagggtctgctccctgcaaagggtccaacacagtccaggtgggcggtgggggaggcgccctcagccatgccagcacgggtcctgacctccagcttgatcccagcggatgcacactgctcgggtggggggcaggtctgggggtgccaggggctggtaggctctggcttttggctctgggggctctcctggcccaaccccaccccagcccctgatcgaggttggcaaaggtggccctgagctgcagtcagcaccatggacaggggcagctgctgctttctctggggggcctgcagttgctgtgcgtcctcagggttccctggagttacactctggtctggcccatcccgctccgctccgggttggagatttcttgctgtgatctgtcacgctttcctgacctgggagccggacattgccctgcgcagacagagcggagcagcaggggtggcggaagccccggggctgttcacagcaggagcttccgaggggcatcctgggcaggccccttcagcactggctggggcagggtctacagctccccaaacacagcgctagctctgggccagaggggcagggtctccagctccccaaacacagcgctagctctgggccaggggcggggagaggaaaacgtgaagggggacagtggccacggctgcagaagaagtggctcaggccagacaccaggaggaactcctgggtttccagggacagtaggagcttgcctcctggtggtttggaacctgcttgttctgccctgtgattggcatggacacgtggggtgggacatggcatcgctgctgggcagactggggacgggttgctggtttttgcctctgataaaccgtgtgacctcacacaagggactgagcctctctgagcctccatgggcaagagggatagcatggggcgctttcacagggtggctgtgggcattcagagcaagcctgtctgcagtggtcatgccgtgcctggcctgtgcagctgctccagggtgcctgtcccctcctctgtcccacccccagtggaggtgccctctctgaatggagaatagtgtggcagatgtaaccagggctgctgggcagacactgtttgtaggatgggctgtatattcaggtcactccaggtgcacccactcgctgaccgcagcccccatcccagggctctcctgggcacgttgtccctggttcctgcctgtctggcctgcagagagctccctggagtcactgccctgtgctggccactgggctcaggatgcctgcctgctgtggacaggggctggctgctgccgggtggccccaaagccccaggttccaggagacccagcacacttggggtctgcagctggccagggaagggcctagtcttaggagggggcagtggtgggagtggctctgagcccaccctccgtgcctgcgtcctctgggcagagggaggggagccagcagaacagtccttacagactccacgtgccgccgaggacggagcagatgggccagtgtcctgggtccagccctccatctgcacagctaatgagctgatgacgatggcgtcccagttcctggcaccttctcctggagaagccatgggctggccctgcccgggcagtgccctttgctggggcaggtgtgtgtggggtgcctggggccctctcagggacccaggcccagtggctccaccttcattgagggtgggcagggggaggggttggggaaggggatgagtaatccaacgtgcctgtttcttcccgggattttgctcccagcactgcatacgtgggctcccaccggctggacggacttcctgtgtgggaaaggcgagtgggcgcgggcctcccgtgtgggggcagggtggagttggtggacaccatccccaggacaggacgtttcctctggctcctgagaagtcactcaccgtggtggccgcaggcatggctccatgctagctgggtgaagaccccgagagggggccttgtggctgacggtcactggagacaacagtgagccactctggtgggactgtggaaccccctccagctctgccccagagagcagcacctgggtgagggctacaggaggctctttcagcaggcaggtcccaggcaccatgatgcagccctgacttggggacggtggccacactgtcctgggagtaggtcccttccaccgctcagacctggcgacccaggaacacacctctgagggacttgagtggtcttgatttcacattgatcaggcccctggctgctccgactttcaggtccctgttgtggaggtttcgggcggcccagttctcaggggcagccctgtgcccttcctgggtcagctggtgtgtgggtgggggccgacccagggagcacctcactggctcccaaaaggcaggagtgggagacagggcagccagcccagccccagggccagcttgagcagggaggtccagacagggacggaacgactatacaagatcccagaaacttcaggcagggaagctcagagggccagctccatctccaggacaccctctctgtctgagactctctggcagagcattcgtggggctgctccccggcctggcagtggcccggggtgctctggccgggaagagcagccccgtgccgggacggatgtggcgggctcagcctcctgtttcctcgcctcctccgtggctccatgcctgctctgcctggcagcggcccagctgccaccctccctcccgcgcctggctatgggctgggggcagggctggctctgaccacttggcccgaggaccctccccttggagctgcagccccctcccctcactcggcaggagctccctctctcccagctggcaggccaggctccatctggtgacttttcaggaaaggctcccccaccgtggctgccacgagcctggctccctctgcagctcctctggggtgtcctggacggtggctgggggcaaggccgtgcacctgccttcagagagccccaggccaggtgggtgcgatgcccctgctggccatgccctgctcagtgagggcagagaggcagccagggcctcagagaaaccagtgacttgtggcagggacaggagcctccagggacacacaatggggggggcactcgcggtggggggaggaagctgtgaaatgggctattaatagggtccccttcctgatggggctgtcaagtgcgattaataccgctgctgtgagctgggctgccaccagctggggatggctggggacggcgagggggcaggaaggggagcccactctgggagggacccttactgagatggggacctggccctggctgtcccgaagaggccagagaaaggccagatgttggggcccccttggccatagcgggccagctggagagtgtggaggcctgggctgggcaggcgcccacctgcacaagaagggctgcactgggggaaggtacgggtcacctggcctcagaggccatcctgtccacttgccactgccggctgcttggagggtccagtggcctcaagttcctgcacctttctgtgcaactgggactgctttggacacctgtgaccatcacaagtcctcctgtccatccctccacaccgggtggccggatgacagaagaaaggtgtctgctggccctccctctgggccctgtgggagctggatccttctagcagcagctgggccaccaggggagcatgagcctggctgctgtcctccccctgctctggggccggtggaaggtggagggcaggtcaggtggcgcggccgatggagtatggctggccatcgagaacctgtccccacgctctaggacactggccgttccagctcccccagggctctgtgcacacggaccaggagccacccaagggggcagaacaaagtcaggccccagggccccctccggcctgctcccctgccgagctgggtactgccatggggtcaggcccttccctccacaacgcccccacctcctgctgagagctggagtggctgccacacggagggcgctgccagaggagagggcagagcgtctgtccctgcggtgccctccaggtgtgcctagggtggccccagccccacaggccccgggcacttgcccttggttcccctgcccttgctgggacccctcaggcccagcctgactctgggatccctgggctcctagcacgaccactctggggtcctgcctgtggggagggctcgaggcaccgactcacactcctgataaaataaaaatagttggggaggaggctcccagacgtgcggggggacaagtggcttctctcagacgtttaaataatctccgccatatgtgtgtgggcccggccctccctcccgtgcggcgccagtccaggggcccggctgatctccagtgagcactgtggctggggcaaggtggccacttcctcctccctcccgtccacccaagcacagcctcagcccctcctgcatgctgggccggcccttgggggcagcacgggagggggatgctggggctgcgaggggcaggggggcgcggaagagccagggccaggaagggctgcaggagcatctggccctcatgcctcactgctgctgaggtcctttgctctcctagccctgggatgcggctgcctcagggactcttggtggccctggagggtgggtaggctggcctgggggccattgggacagcaggtgacggtcaggccaatgccagccgggcccaggcacagccctgtgggggcttcagagggagacacgggtgggcccagggaggtcctttgaaatgtcctgctgaaaggcagcaagcgtcgggagaggagggggcttagaggcagccagggccacctctggacaggcctggaagaggtggggcccctgcccgtcccgtacacgctcgtgaagggaagaggttggtggaggggcatgtgcagtccccatgcccctgtcgtgggaggggctgcggtacccaaagctgccccgggtgtgtgtgtacatgccgggaggcctgtgggtgtgatttgtgggttttgttggaagattcattattttccagccttccccaggggagaggcggagatgctgagccaccgctggccccttgttgatgacagccgcgaggcccatgctgcctgctgtgttaggacaagatcgatctccgccataaaaacaaaattaagccaacaccgccctggcttctgacagcgcgcgctcttcctctaatcagctgccacccgcccggttccagccttgggaagaaaggaaggggctgcaggagcaaacctctcacagtggggaaactgaggcactgagacagggaggacaacccaaggtcggggggcaggcccaggacccctgcttcccagcagccaccagggccaggcagtcagggtgggccggtgcagcccaggtgcgggggctgagcccaggggatcacgggcgcattcctctgcgtgtcaccgtggggcccgcagagccctcccatgcactctccccaactggggtgcagccccgtctgcccgtctgtccacccatccgcccatctgggtgcatctgtgtgggaggcttctccaggcccagggctgaagccggccagacccttgagagctggaccctggacaccagtgtggacactggctcccgtcacctcctcagagcaggcctggtggccttagctgcctctgtcctgcccgtccctccctgtccacctgtgtccagccagcgcctgctacgtgttggatcatggcctcacagggacagagcagggaggaggacttcgaggtccctgccccagggatgtcccggggtcaggcagtgctctgaggactggggagccccactgtgctgtgcagggacctgggggagcagcaggtgagccagggccctcctctccccgacggagcctatatctgcccgaccaggactgccggcccttcccagtctggcctctggtgtgggcccacagccaggtgcattgctacaatcccacctgagctcccacatcaggtgtcctggctcaggctcacgggaggggccgaggcggcctgggggtgggtgtggaccatggctgagggctgggcccctgtgtggaaccacagagcagagcgtggcttcttcggcctccctgtgggctttcaggatggccgggccctggctcagggcaggcagggtgagcatgagggcccgtcagtgcaggctgtggggctgggctcgcctgccggcatgggggtggggcagccccctccgtgaccttgtgtgggggctgggctgggccctgggccggctcacaggcagcacgtggggaggggttcttaagtctctgggcctgggcccctgccacgtctcttggcccggggcacccccggcttcacgctgcagctgcggttctgtgtctgcctgagttttggaggggagtgggcggtccctttggacctcagggcaggcagggcagcccccggcagaggcctgtgtcaggaagggattagccaggcctccacccgcctggacagttgaggattccagctctgctgctgaggaggtcagggggcctggggtgcaggagcctgggacccacgttgtggggctggggccaggcactctatgtgtggctcctctcagaacccctgcccaggcagatggcggcctccaagccctaaccccagctgatgggggatcagctagtggctgagagctcaagggagggagggagggagcagaggcccagccttggggagcttcaaggagggatgggtgagagacgggagcacccccagctggggccaggcccagggtgagggaacagcaggtgtgtcccaggccaggaggcctctgaggtgcaggaaggagaactggaccccctgggtcagagtggaagcccgcagcagcccagtatgaggtgggcaggggccctgggccagggctatggccgtctggtctgtctccaggccctcaggccacctcctggcccctgcgctgccccttacacggtggccttccccgaggccctgtcttcctgaggacgcccgggactccagcccctctcctctccctgcagctcatggctccctaatctaattccacggcagagcccagaaacgcctgctgacctgcttccgccgagagcagcagagcctgtgacggggcccctggtgggggcctgggttggctctgtgctgactgcatctgatctggctgggtgtggccctggttgtcagtggtcagctggagacgcatggccatctcctcagggactgccacctcccacgcctgaccttggccccggggctctgccaggatgcccagccctggcacctccctgtcctgggctctgcaggccaaactcctcccctggtatggggggaggcgagcagctgcccggaaccttccagtccttgttgctggagccagtagagcctgggcagtgggtgggaagaagggcggggttctccccagtgtggtcacgaagcatgggcatggccaggacacaggtggctggtgttcagccggggtctgcccacctcccattcccacagctgcccctggtgtcccggcctggacttggggatgggagagcctgtgctgtcctgtagtgcggggccagtacacagggtgggctgtgtggtcctggtggcagtgggacctggagtcctttcctcagtgggagctgagacggtggggtgggtcctccttgggcgaggcccctgtccaggtcagatggctgtcatccctgcagggcagaatgtggggacaaacgtgccctgggcatggggccacctcctccgccacagctcggtgaccgtggagaaaggtcaggctggggctgcagctgcatgagggagacatggagagcccaacccaggctcagggacccacatcctgggcctgggctgggagttgtcgctgtaagggatccggctcggctcccctctccagccacaggggctgggcgctgcggggatgaggtgagcttctgcccctgctctgggccacctgcctctggactttggggatccactcagaggtcctcataagtagggatgcggggtgagggcagggaccactccaggcccagcctcggcatctgtggtgggcgcacagcggggaggcccaccccacacagggtcctcggaggacagtaccctgcaggccttccggttgcgttctctgggtcccaggagggccctcccgttggtcctgctcttgtcccgcagccctgacctgggtctggtggcctggggccttgggaaactctgttgcctccccagtgccctcccatccccagctgggagttccctcggcctaaatcctccaccagctgggctggagctgggattagcacagggattgggcctggggctgggcggggctgaggtcctttgctcccccagccttgggaggcggctgcgtcagggattccttggtggccctggagggtggataggctggcctgggggccatcaggacagcaggtgacggtcaggccaatgccagccgggcctgggcacagccctgtgggggcttcggagggccctgaggaggaggaggaagaggcagaggagagaaggccccacggaggtcctgtcgccagcgctgccactgcctgacctccgctgcccgaaggccggtgggcctctgtggcctccgtgaagcaggcccggctgtcgtcaggccatgtctggtccatggccctcccccgacagccggaccaagggaacggtggcctggctggcggaggtactcctctgggttggagggagtgtggtgctgtcttcagagtggcagctcggccccctgggtaagaaggggcaggcgagtggcctgggctgagtgctggccctggccaggtgactggtgggtgggggctgttcctggaggtgggggaagcctgggcctccatcccatcctgcactcgcctcccctgtcccccgggtgctctagggatcatgtgggtccagcagcgtcggctggccctgcccctcagccgctcagaggcgtgctcagcacacctcggtctcccaggcacctgcagggcctgggggctgaacccaagggggcgaggggggatctcaggtggctccaatgctctcattgaaggggtgccttgtgctctgggggtcagtggtgcttgcagcccaggcggctgggctggcatcctggtgccggacatgagggcctttgccgttaggagactctgcagaggagactggctgggtatggctgggagggtggagtgtgtgtcttgtggtggcctgtggagggccccggtccgggctggcctgccagctctctgttccagcggcagacagggtcctgtccaggctgccctgttgcaggcctctgcccgccccctgcccctgtgtcctgcctcacccctctcctaaatccctgcagccatacctgcgtcttcacctcccatgtgccccggagagcccagccccccatgccatggcttccatcccttcaattcccctctgctcgtgatcacgtagtagcttccccaagaaggcccggccagtactgcccttggtcctctacaacgcccccgccagggtccctcagcgtgcagacctggggtggggattaacgtctctgtgctttagcagatggtacctctgggacccgggctttctgtgagcaggtgtgcaggaaccgagggggtgagaccagtctgttcctgggctgggacagctgactctggcctggactccctggaccctgcagccccctctcctgggacaagctacagcaggaggctgaatggagagaggaggggagagaaggagcgaggcaggcagcctgggggaggggaggggaggggttgtgaagctcggatccggcaccacagcctcccaagtccatactgcagtgcagggcgtgcgacgcagacattcatggcaccattcgtggcgcttgttgcacatgaggggtgggggctttcctggagatgccccaggcaggggcacaggcactcaggaattcgaccgctcccaggagccacctgtggccaggggcgggggcaggggcatggggttgctgcctgctaggcccaccccgcccctgacaaggggcctccactgcactatggccccagacagccagcccagccacctcatctgtcttgcctcgtgcccggccttcccattgttgagttctgtgctggctccgtctgagtggtagctctcggggccccaggcccagcgccggttaccagggctgctaggactggtccaggaggtggtgggagtggcaggtggccgagcagggtggggagcagggccctcagttcccaggaccatctggggaggagtggcagggcccagctgagctgtgtgacccaggcaagccggcacctggggtggaggtggccctgggctctggcctttgccctgtcactggcagggcggtgtgggcggggccgggcgaggtgaggagtggccgtgcctccgctgacggccgtgtttctcccgtgaggagtggccgtgcctccgctgacggccgtgtctctcctgcgaggagtggctgtgcctccgctgacagccgtgtctctcccgtgtccagtggagcggtgcatgggtgccatgcaagaggggatgcagatggtgaagctgcgtggcggctccaagggcctggtccgcttctactacctggacgagcaccgctcctgcatccgctggaggccctcacgcaagaacgagaaggccaagagtgagtgggagccctggggtggggacaaatcagagtccctggggggacacgacggtagggaccctcccagggcagccactgatggctgaggagcagcgagaccctaggcctggacacctctgggctcagtggccttggggatctgcagtgacctcgggctgtggggtaggagggatccaggccccctgcccgcctggcagagctccctgggactcagtgaggaccgagtagcactgtgcccagccctgtgctgagtgctgggctggaaggaggggcacagcatagtccatctagctggggaggtcacagctccccataaacagaaacgacccccacagaggtatgctgatggatgggtatgggtgcaaacagtggctcaggcagccactgggcatggctgctggagggagcaggggccacccgagatggaggctctgtgcagggggtgggtggggagagttgaggcacacagggaacgggtagggtcccacggtttggggagagacatggcagtcctcaagggctgggatcagggcgcagccagggtttctgatggctttgctgatggtcaggacccaggcatgccaggcaaggcctcagcccagcagttgccaagcgtgtagccactttgggcccgtggagagagtcgcgctgcggagcccccagggggacctgaggtcacaagagcctcgatgcacctgagcgcggagctgggggtccctggagccgctgtccccacctgcggcgctggagccctggaggtgtccaggggcttccttggaacgtggagacgtgctggttaaacgtggagccccgggccagccgggcactgggggctgcaggtggagggaggtggatgctctccctcgtgggggcgtgtcttttccacaggaaagggaaagggggagggacacgggtcagcagtggggggctgtgcagtctcgcagatcttcacccttggttcttgaactctggaccctgagccctgccgagggtcccgcaaaggtgggcaaggagctcccggctgcttggtctccgcagtgttggggctgccagcagggggacgctgggcccccggggacctgacccgtgctccctccccaccccgcagtctccatcgactccatccaggaggtgagtgaggggcggcagtcggaggtcttccagcgctaccctgacggcagcttcgaccccaactgctgcttcagcatctaccacggcagccaccgcgagtcgctggacctggtctccaccagcagcgaggtggcgcgcacctgggtcactggcctgcgctacctcatggccggcatcagcgacgaggacagcctggctcgccgccagcgcaccagggaccaatatccttgggcacctatcgggcaatgcagacccagggaccggccccttggctgctcaccctgggggggcctgtcctttgccgggtcacacactggggaagtggccggtaggctggggtcccctattccttcctccctaggccagagggtggaggtgtcagggctgggcccatggatcgctgttggcccctaactcggcaccaaagtggctgaagcagacgtttgacgaggccgacaagaacggggatggcagcctgagcattggcgaggtcctgcagctgctgcacaagctcaacgtgaacctgccccggcagagggtgaagcagatgttcagggtgagctggggggagccctacctgggctccagagccagggctgcacgggggctgtgcttgtgtggctgggagcctgccagccctgactgagctggaggggaccctggcagtgccctcaagctgcacagagtagctggctgctgaggatggggctgtctgaccagccaccccacagcctatggcaggcaggcaggtgggtgcccaggtgctgcctctttgcagctgggccgggggctgctctgccagctctggggaaagtggtcggggcacctggcacaggccctgccaggtgagtggactgggcattcagggcaggtgcccaaatgaagctgcacccccttcccaggccccagccccgcagcctcgaggggggtacaccagccctggcagggcccagtctgatgcgcagcagctcgttactttccccatgccgccctcgcccaaccaccctgatgttaggagttatgaaaatgcagccttcagctgagctgcggcctttattgtctgtaattggtttctgtttccggaaagcctgctgggccgggggagagaaactctgcccgtcagcaggtcctggttccgggtggtgctggctgagccagcaaaccaggccctggggccttgctgctttgctgcagcttggaaagcgggttctgtgggtgcaagtgccaggccctggggtctctgacacgcacatacacgcacacacacgcacacgcatgcacgtgcataaatacacgcacacacgtgcacatacacatatgcacacaggcacacacatgcacacacacacgcatacacatgctcacagcctgacagctccgccgtgtccagcccctgccagctcctgccagctcctgccagctgctgcctgttctcactgtaggtggctggtcatgcctggctggagcaagggaagctggcctgctcacaggacagggtgtgtgcgtgagttaggggctgggtgcttgcagacactctggggactgcccggggcttgtgaaggccccagtggggacacagtctgcctgggctgtgggggctggcaggtggctgagtctgcatgtctgcgccccttctccctgcctgcctggggccatccccagccacattttgggctcaggggcagctctggggccagcaggtccctccacagagttgaggctgtgccagggcccgggcagcagggtggcttagggtgcaggctccagagtggcctctgagtgggaggagacagatgcccctcactgaatccagcacgagtgtgcgtggtttctggggcctgaaggtccaaccagacctccctaagggaaccccaggcaggcggaagcagggacagtctgcagggctggctctggagaggaatggcgaggtagctgttgctgtcaggttaccggcctggcactccagccctatgtagtggaggcccagtggccctggtctttggtggtcaagacagctggagacggccccagtttcagagcgctgggcctccccgcccatctgtactgcatcctctctgggccctgcagagccgagagaaggagcctgcagccaggctggaggggctctgagaagtggcatcagcttcgctgtagagaaatctggagatggctcccattgcctggcacggcctaatcagagagaactgcatggtggataaacacttggcttgaggctaatttcatcaaacctaagataaggctggaagtgggctggacccagtggggcctaattgccagagtgcgctgggcgggcaccgaggcaggctcagccaaagtgcacgttcaacagcagtggcttccctttgtggaaagaaaagatgccacgtgactgtgtcaggggtgttctagggtggggctcaggccccgagggcctcactgtccgagcatttttgttcctgctcagtggtgagtggctcaccctggcacatagccactctgtggagggggccgcatctctgcccagctcagccacaggccctgggagggcctctggcctgggctttgtcccatggcccctgggagggccatcagcccaggctctgtcccatgggggccctttgagctgcagtgtgtcccctcatggctgtcctgggtgcagtgagtgggcacccccagacttggggctaccctcacacctcgcaccaggcaccccagggcttcatctggtgtgtgctgggcccagtgcatgtggctttagctgggcccttcatgccacgctggcctcatcccagccttggtgtgggcacacagcctgtccctggggtcctgacccaccttcatgccaagccgtgggtgtagggcgtgtggcagccagggctctgccctggggacagggacaaaggggctgatggggccacctgactggtgactcccctggctcagaggggatcccaggggagctggcaccaccacccctggccaccccagatcgtggccacgggaggaggcaaggctggtccccagtggcaggctggtggctgctgctgtccatggtgccgagccggccctggttcctgctcagctgaggcacatctgcaggccgaggcggggccctgggtactctcctgtggaccaggacattaagctgtcctgagaggcatggccagcgtgcaggtggccctttgtagcctgcttcctcgaccccactctgggctcctcgcaggcccccttggagcccctgggtgggctgctgagagcacgccgtcctcagcctgtgtgggctctgggaagaggacccagcggggcttgtctggaagcccaaatcacgaagcctctagactactgctgtggtggatgcagcacctcctcgacttttggaggtatttcctgcttctcagggcacccagtctggggcttccgtggaggcctgaggactcagccagtgtaggcggacacctgctggctgggtgtcggtgtggccaggcctggggtgagcaggcgcagggcggaaccctgccttcaaggcatatctgatcagcccgtcccatctctggccacatcctcagtggggggccagggccgaagtgacagcaggcggctcactgggagcgtaggacccctcaagatgctgagcagctgggcaggtgtgaaacgagctgtcagggctgcccctgcctgaaatgttgaactctggaactctttgaagagcagggctaggcactgcgtccctttgggcctggtgttcctcgtgagtaggggctgagctggggtgtcacactggggccatgtcacctccaagcaggtcatgctctcaccctgccctgcccagccctgggctcccatacccttgtgaggcaaagtcctcaatccttagggctcaaggatttcaagcatccccttccatggggactttattgctgccatgggattcccatggcccctgtagcaccttgggtttctgctgggatgcccagcctccagcccagagtgtgttgttgacccccgtttgggggggcgctgacccccgtttgggggggcgctgacccccgtgtgggggtggcgctgacccccgtgtgggggtggcgctgacccccgtgtggggtggcgctgacccccgtgtgggtggcgctgactcccgtgtgggggggcgctgactcccgtgtgggggggcgctgactcccgtgtgggtggcgctgactcccgtgtgggggggcgctgactcccgtgtgggggggcgctgactcccgtgtgggggggcgctgactcccgtgtgggtggcgctgactcccgtgtgggtggcgttggctcccgtgtggggggtgttgactgctgtgtgggggaggtgttgactcctgcgtgggtgttgttgactcccgtatgggtgatgttggcttccgtgtgggtagtgttaactgctgtgtggggtgagtatatggaggtggctgtgggttgaaggtgaaaagcatatggcttcaggcaggtgcgtcagttctgcattttcatggggctgtcctcctggtgggtgggcccgtgccctggggagtgattggaggccgtgacaagggcagtggagtagaggagggtgggcttgcatgttggtcttgactggggagtggggtggtcctgaaggacccctgtgcatgcaggccctggtcgaggtgccaatggggacccaaggccttgcattgcaggaagcggacacggatgaccaccaagggacgctgggttttgaagagttctgtgccttctacaagatgatgtccacccgccgggacctctacctgctcatgctgacctacagcaaccacaaggaccacctggatgccgccagcctgcagcgcttcctgcaggtggagcagaaggtgtgctgcccggggcaggtgttggggggccagccatcaggcctcgccttctgttctgagctttgagcttcagtcaggggacagtggtgatgggggagctgtctgaagctatcccaggccagggatgggctacctgggctcatgcccctgctctgagatggagagattagggtggggcaggtcacagcctggcatttgagagccccccaagttggctttagttttgatattacagggtgcgctctatggggcagccaagcaggtagggaaagtttgtggtttctcctccaggggcccctgaatggcttggtcctgactgtgaacaccctgcgcctcccacagcttgaccatgcctcctgccttggtgttgagcatcttgtggactagggttctgtggcccagcctttgagacctgcccctgtgttccagccacatgggtctggctgactcgctcccctagggtgccaggcccgccacaatatccactcacctgtttgtccagcagacactcagatgcctcctggaatccagaggggcatgctcagccctttatctagaccccaagaaatcctggccatccttagagaccaatgccaaggccaagtgctgccccactgaccaaggacctcatttccagaggttcagggctctggccatcttgtatcaggcctgggcagggactgggtaccgcatgccctggtggcaggagttgcaggtccagccaggcagcggaggggaaggccggagccccagtggggacagggatccatgggaggggctcagactgtgtgtggccaccctccagcctcgtaggagtgcaggtgaggaccctggaccctcctcagggaggagagcagggacagggcaagccttaggggaccaagatgcctcggcctgggggtgctgcttagggacctccactctacttgcctcagcctgggggtgctgcttagggacctccactctactggcctcagcctgggggtgctgcttagggacctccactctactggcctcagcctgggggtgctgcttagggacctccactctactggcctcggcctgggggtgctgcttagggacctccactctactggccacctgcgctgcgtcagcctctcggtgatggtctgagggcgaggatgggagtggcaggaggagccttgggaatcccaggtagggtctgggtgggttttacccaggatctcccagcagtaccccacccccaagcttaccacaaacccagagctggcctttggggctgtccctgggcctgagctcccgggatgcccccacctggccggggcagcttgccaggctccatcccgtggcagccgcttctccagtcctgcaggcatgacacccgggacgcatggcccaggcaggggaagctagcaccagttggctagaccccactgtctcggatgccctgtgccctggccaccaggggcggcaccagcatgtgtctgtgggtgacctggctgcagatagtaggtcctctgtcccagtaaaggcagaggtgggaatggggcctggataggggattggcaggcagaagtgacccttccctccctgacctttgccccaagccttgtggaaccctctgtgcactcaggagccagagtcctccagccggcaactggtgccctttgcctggcctcctggttgctgggcctccccaggggcccacaactggctctgggctcccccacctgttacctcaccatgttcccagggacctccaagaagccgtgtcagtgggctgggcagctcctggcccagctgcaccatagcgccctggaggtcccttggcctgtgatgcctggggtggcctgggctgggccggactgtggtgctcagatctcttgggagggttagtgtgtgacggcttgggcagacagtgggaggggctggatgagggggctgcctgtgcctgcctggctctgccaagggggcatgaagattcttgctctcctgtacccacccacacatggcctctgctccgtgccaggcccactctgggccacaggtctcgcactggtgtggggtggtccagctgatgaggtcagaggcccctcccgtgccgtcagagttcatagtcagagcaagccatccaaaagccacgtgatccacggtagtcccaagtcatgtgacactggagctggctggccatggtcatccctggtgtaatcagagacaggcaggggacagtggtgatgggggagctgcctgaggctatcccaggccagggatgggctgcctggactcatgcccctgctctggcctagatggcgggtgtgaccctcgagagctgccaggacatcatcgagcagtttgagccatgcccagaaaacaagagtaaggggctgctgggcattgatggtgagtggggcgctgccctcagcccagctgtcctgggatgctggaggggcaacgagggcccaacctgtgggccgggacaggtgttctgtgttctgtgtggcatgggggcaggtggtcatgagacgaggctggtggtgggctgacatggcccctatgccacgccgtcctgcaggcttcaccaactacaccaggagccctgctggtgacatcttcaaccctgagcaccaccatgtgcaccaggacatgacgcagccgctgagccactacttcatcacctcgtcccacaacacctacctcgtgggtgaccagctcatgtcccagtcacgggtggacatgtatgcttgggtcctgcaggctggctgccgctgcgtggagggtaagccctggaccttgggtgacggccgtgggctggcatctgctgtgggagatgggctgcacctgaggagcccccggggggatctctgggcaggggctgggaaggcctcttctgtgtccctcactgagcaatgggacaggccctcttttggtcgaagctcagcctgcctgggctcactgtggctaggcccctggggctgaccaaggcctgcccgcctgcagtggactgctgggatgggcccgacggggagcccattgtgcaccatggctacactctgacttccaagatcctcttcaaagacgtcattgaaaccatcaacaaatatgccttcatcaagaatgagtgagtggctgggcctagcggggctggccccagaggtgggcagggtagggtctccaggctctagctcttcctgccacacccacatgtcctttctttgggagcagtgactgtggtgaccagggggctggtttcattctggcatctctggttgaggagagaggggcagggagagagtatggccgcaggtctaggcaggggcttcacaggagcagctcgtccacacgcctggtggcacctcccggtgtcagtgcccacagcagctgtggctcccacactcatcacccctgagaagccactctgtgtccagactcaattggctgtcactcagctgtggctgtagacactattgaagaaaatacagaaattagtttctggaattagaagaccgcctccccgtgtggtttgaattaccttcaagtcttggctacatgaggctcgcaggtgggcaaggagctaattgcatgaaggaagagagaagaagcaagattgatttaggaaacagaagtagatgggcctctcctggaagagctggtccttgctgtcacagtctcgagctggccccatccctgggactgtaggtgggaagggcattgcaaggcacaggggcggggatggggggaggagagatgagctgggaggagccaggggcctgctgggatctcaggacagagttgcacctatgaccagtgtaatctgtgcaggcacaatgttctcctgcaggccctgggcttcaggcctcagtttcttgcctgagaagtgggggaatgagcccctgcgccctgcctgcccactccacatcacaggacttgctcatctcttgccctggttcatgccctcttgctctgggtcacttacattttctgaaagaatcatggctgccttttggtaaaaatccaagtaaaacatacacatggttaaaaatgaagctgaaaagcttataattaaaagtccctgctatactccccattctgcactgtgcaggtaataaccatgttccaccagatggtgtgtgccaggcttatgtctccttctttatgggaccaatgtcaggaccccagggccattcagaggacagggtccccagtatctaggtcaaaaggattctatttcccagcctatctatagctccacactgtaccttggttttgtccacatcattttaaaaccatgactttttcaaacgttccttttgttttcctggagtttctcattgcctttgttttttttcttattggggaaagcagctcatgctctctttaccagtccctaagattctcccagctcctttcccatccactctgttgcttttcaaagccattgacgggtgggccacctcccagagctgctggtaatcccagctatcctgggttcctggtgaagacccctcctcattcaatggtttagatgacctgggatcttgcagaggtggggcttacccatcctctgaggccctggcctcatcctgctctttctgccttggggccacaggtacccagtgatcctgtccatcgaaaaccactgcagtgtcatccagcagaagaaaatggcccagtatctgactgacatccttggggacaagctggacctgtcatcagtgagcagtgaagatgccaccacactcccctctccacagatgctcaagggcaagatcctcgtgaaggtgagtgagcccctgccctcctgggaccagctcacacagagtctcgggcctgcagcagtgccctgctccagacaggcaggggcatcatgccatccatgggcatatctagggggctgagggctggccacgctcctgacctggcctccatctccccatggtggtcactctggctcaggcccctcatgcacatccaggcctttcccttcacgctgctgcagccacagggagctggccagtctggcccctgccccatggctgagatgccaaaactgagcttgagaaaaggcccctctccttggccggcggctctttgtgggtgccaggtactggcttcccagcattttctccagggcccctcccatcatgcacctcctcccccaggggaagaagctcccagccaacatcagcgaggatgcggaggaaggcgaggtgtctgatgaggacagtgctgatgagattgacgatgactgcaagctcctcaatggggatgtgagtcgggctggaggtggaggggggcgcgtggagcctgcagttcccaagaacagctgtccgtccttgctgttggggcgagttagaaagggaggcatccgggagagagggacattggggcagattcgcacagcggcctggggcctggggggtcctccctgcccacccacccctctgcatgagagctgcaggcctgcctcttcccagtttcagctcccacatttgagctgactcttggggtaccatccactccccctgccctgtcctcttggcccctcagtaagtgggggcagcactgggggctgggtcccacgccagactccaccccattcccaccagcacctggcccacccaggccctggcacaggatttcccagcttcccgcccttttcctcaccaagtctggctggacgctgggtggctggtagtactgcccagccacccccgtggccagtgctggcctcatctccaagcagtgccatctctaaggtcaactctgatatgggggtcccaccagcagtcacctccacagagcgctgtcactgtgtccccgccagggccagggtggggggctgcagagatgggagggtcctgtgaggtgttgggctcgggggcgccgatctcctctcctctggacactgctctggggccgctgctgtgaggcagggaaggccgttgcttccagaggggccatgcatggggagataattgtgcagcgtgctcctggccacgcggccaaccattttagaaactcctgaggcagcagcactcttcctgcctgggatgtgcggcacacgcctctgtgtggcccacgtgatggcaaaggcagctccacggtgctcctggctttgtgcccactccaacctggcaccaggggcgtctgacacccaagtcccagaccctgtcctcaaggattccaagttcatcaggggcacccggggggctgcactggcagggaagggcgtccaacccagctcagaggctgccctgaagtctgcccctggccctgccatctcctgaggcacatggtggccagtggtgggactccagaccctgtgccgcctgctggcgcactgacctcccaggccacagggccagaagccgcacaggctctgctgggggccgctgggcagactcgtgctgctggaggagtcgggtgggcctgggttcccgtcctgcctgtggctgcctgcaggccctgaggtgaatcacacgccttccctgagcctggggtgggcagagtgctgtgaccctgggggttgtcattgccactactcgcagggctcgggacagatgccaacaggccggcctctggctcctgcaggcatccaccaatcgaaagcgtgtagaaaacactgctaagaggaaactggattccctcatcaaagagtcgaagattcgggactgtgaggaccccaacaacttctccgtctccacactgtccccatctggaaagctcggacgcaaggtagaggccaaaaaggtgacacccctgatgccgacaggcccccccgacagccagcctgtgggccagccagggcccccgaacgtatgctctgtgcgcactcacacctgtgcacacacaaatctgcacacaagcatacctctgtacacacctccgcacacacctgcatgatccatacccacctaccagcggggtctcaaagcccagccagtcgttgagagctgcccagctggggggacatgattgccttccctgcccagcgcccctgcctagagctgcctgtggccacgtggggaagtttccacatggagcgaatggccctcaggggctgtcatggcagacacaatggagtgtgtgtggggtgagaggtgacaggcagggtgggccgggtcctgcggtcacagagcctccttgtagaccttgaaggaaccaggagctgtggccggtggatcccgcagtcctgctgtgggtgggacagagtggggagcgtgggtgggccctacagaccctccacagggtgacagtgctggtgggcgcctgtgctggggacacggtctcctggtgcacagagcctccttgcagacctcgaaggagccaggagctgtggccggcagatcccgcagtcctgctgcgggtggggcagagtggggagcgtgggtgggccctacagaccctccacagggtgacagtgctggtgggcgcccatgctggggacacggtctcctggtgcctggagagccctaccgtgccctgtggcaccggctcgttctgcctgtccctgcagggaccttgctcttttcctaacccttggggagggtgggaaggtgacttctccctggccaagtgagggtgctgtgtccccttccaggaccagtatttttagactcaggtgtttgcgtttccgcccacgggcctcggagcactcggcacagctgacaccgcaggagagctcgaggaacatgccctgtgcaggtggctcttgcagggcccgagctgagaggcgttcctttatttttatcccaaggtgtctaggtgggggagagtggccatctgtggctctgctgggcagccagctgggcctgtgcaaaacctggagatgcatctgcgggtccaggagagtggtcccctgcagacctcaggtctgagcggctgctgggggttctgtgctcagggaaggcttcctgcaggaggaggaggggctcaggcacagccacgaaggttgggggaggagcgggaatcccccctgatgagatgcactccttgcctggtgtggacacacaccccagaagggtctcagagtctttggtacaggcgaggggcggagctgatcccaaggccaggccgggacgcgttcagccctggagctcacggagggcgtggcccaggtaaagggggtgtctgtgcactgggggtcgtggggatggcaaatcccactgagggacacttgtgcctctctgtccccctggggtagccggtgtcccctctgcccatgaaccttgaggacgtgagacctctactcacgagtccctgaggcccgggggcagcaggaatgggtatcttggggagagaagccggtgggtaaggaggggccccacccccagaaagctgagcacaacccggtgagtgcttgtgcagccaacagccttgccccgtgaggacccttccctgagcaccccctcggggcccagaacccagcctccctgacagaggcagggctggggggcctgctgctggctgagaccctccaccaccatccaggccccctcacctgggccttctgctgcctgcagccccttggagcatagttgggtcttgctgtctcctctgtttgggagtcccaggggtgacaacgggtctggccgtgcagtacgggctgtgtctggccgtccgtctcctgggtcagcgcgtgcctctcctcggtcatgcctggatttacagtcgctcgtggctctgggtcactgcagcattttggggatgtttaaggagctgtgaagtgtggtggccccgaccggctccaggcgcactgtcagtctggctcctagcgcctctcccggcagccgtggcaccaataaattcagaggaaaccggggctggcttttctggaggtggagagagacgagcatgtctgagagccatgtggacctggacaacctgggagcctcctgctgcagtgcacgtggggcctcgggctccagccagtgcagcctggtgacgggaaggccccttggccactctgggccgtggggagggccgtccaatcccatcctggctccctatgagggtgaaggaggggcagggcacacctctgggccgtggtacccagagcacagggaggctggcgggagctccccggccgcatcaacaggactgagaggcccgtctggcatggggcctgcggacgcgacgtgccctgatttccaacgcgtccagcgaggcagtgtccaggcaggcccaggtccaggctggggagagcgggcagcagtcggagctgtttgctgtggcgtggctgagcgccgagtgtctgtggtcatgagagctacagtggcctctttgcagcagtgtgggagcatccaggggtgtgggagggtgtgtgtgcaggggcgtgctgtgggtgttgcaggggtgtgtgcagaggggtgggcgtgtacaggggcatggccacgggtgggtgatgtgtccgcttctggcggaagccccctcctaacagggaccgctgctgcaggcccacggctttgctgtgtttcaaagaaagtagcccccacccttggtgggggacaggatgtggtatgggagcccctcctgagcacagctgggccatgttttggaggtgtctgtgggaggggctgcaggggtcaggtggtggcacaggctctgctggttccattgggaatgagctttggggtgaatgagcagctcgtgaggcagccctgggttcggcggggggcaggcagggtagccctggatgtgtctgctacttatacagcggtaggaaggctcacagtggtttcctggggttccccagctcagaacccgcctcagggagtgcccacctggagccgtgtgtctgattagggatacccgcgcactgcgggaacaggtcagggccgtggaatgctcgtaaaagggttgcgcaagcaggcctggccgagcagtattccaggcacacaaacgcagttattacgtagtcaccactggtgggaaaaaaggattcagaacttaacgagtttaaaacaacacatgagagacgctgaggcaggtgtgagcgaatgtttccaccggggcctgactttcaggccgcttctcctcggcagctgcctctgccccagggtggactgggaacggctgccacgggggctccccaacctgtccccgccctgccctcccctcccgtctgccttactccagacctggctcaagcccacctcttccaggaaggccttctgggaccaccaggggctgtcccggcctccctgcctggttcaaggctagactcaccttgtccctgtctctcccctggactcagagcaaggctgaagaggacgtggagtctggggaggatgccggggccagcagacgcaatggccgcctcgtcgtgggaagcttctccaggcgcaaggtccggcgcagctcccaggccagggtcccggtctgggcccagtgtcctccctgctcccagtgccccgtgtcctccctgctcccagtgccccgtgtcctccctgctcccagtgccccagtgggccctgccccagccagagcagatgggggtctcctccagtccccagggttcccagcctggctcacaggatcccctctgagtcaggccgagctatcggttgcaggtgccagggactgggccagaagcctgggctcggagctggtgggaacaggtgcctggctggctcacatcccttctctggcccacgctggccctcgccccaagctcaggtgccttgtggctgccctgagagtctgccagagcccagatcgagagggcaccgaggaggctttggcaggcccagccaggcgggatggacatgggaggctgcgtgggccgctggggaccccggaggataggccctccccaaccccccagccttcgccaaggcctggcctgggccagaggccctacagctcacacctctgccccccgcacagaagaagggcagcaagctgaagaaggcggccagcgtggaggagggagatgagggtcaggactccccgggaggccagagccgagggtaggtgccctgccccacggggaggccccgcacactcctgggagcctggcccaaccgggcccttctctgcggtgaccccaccaggaccatccctgagcagggcaggacctacccccttcttggcccctggaagcagtgaagtggtagggagtgtggtgtgcagggcaggctggtggctgtgggcagtgggggcaggggcggctgagcaggtggctggagggcccaggtccccacagccctggatgctgccgggctgtcggctctcggtcctcaccgcctcctcttatgaggcccccagcctcatgccctccccagggggcaacaaatgcctgccatgaagtggctccccctcttcccgtccagtcaggctgaattcaaggcccaggcccccgtgtcggaggccttcctcagcactgtctggggtctctttgaggtctcaaacctacaggcccagaaggaactcccacccctcccggaccctgggctccccccgtgccgcccactccctcctattgccgtctcccctcacttccatcccccaatggttcctccgtgcccctcgcctgggcacagccccctcctgtctcatcccgtcccacgtgccagccgggctctgcccttagcacacatctgatccacgtgtgccgctgccacccggccgacacggaggcccccttggaccctggcctcctctccacatagcgattctaggccagacccaggccccgagcccagctctcccctgctcagaaccttccagaagcccccacacctgccacgcttggcaggccacgtcatcctccactgcacacagtgcctagggactttgcacctgctggtagctcccagccagcccacatcctgcccagcactcaggtttccgcagcccgcggcccagtctggcgtccgtctctgatggttcggggcctgctgcgtgaattaatgaggctgcccgagccctggagcccgtctcacggagctgggtgccaggctggccctggacgggaggggttctgaccccctgcacctgccacagggcgacccggcagaagaagaccatgaagctgtcccgggccctctctgacctggtgaagtacaccaagtccgtggccacccacgacatagagatggagggtgagtggctcggggacctggggccacgggcggaggcctccctgtcccccatccctgctatgctgctgggcgccgggcgaggtcgaggactggcagtctgatgcccggtcaccggcgccacagcggcgtccagctggcaggtgtcgtccttcagcgagaccaaggcccaccagattctgcagcagaagccggcgcagtacctacgcttcaaccagcagcagctctcccgcatctacccctcctcctaccgtgtggactccagcaactacaacccgcagcccttctggaacgccggctgccaaatgggtgggtgcgggcatggtgcgctgggtgtggtggggagggctcggctcagacggtccctgaagcccaaggggcgagcaggggacccgctggggcctcggttctgtcctgggctctattgcccttggagcctccacacctctgtggcatgctgccgacaccaggctgccactgacaccaggctagcactggggcagggtccttcaggccttgtgggggatgtgggagcgatggtgcaggcctgtccacctactcccagggatacctgcctgcgaggctggctgcgccagctccggggatgtccctccaggatgtgctggcctcagtcctgcacaggtgtgaaccttggagtcccattcacattgggtgaacgaggggcagacggcagatacgcggcagctgtgcaggggaggctagcgtgtggtggtgggtgggcggggcacacacctggaaggtcaggtgctgaccagggcagccttgtgtcaccctcgcagttgccctgaactaccagtcagaggggcggatgctgcagctgaaccgagccaagttcagcgccaacggtggctgcggctacgtactcaagcctgggtgcatgtgccagggtgaggcactcggacactcagggctcggacgctcagggctcggatgggcctcctgggtgtccccagaacagagatcggagccccacaggctagcaagggggtgggggcggctttggcagagtcccctggagggtcaggttgggacgaagctcccaggatgctggggaggtgggtgggggaaccctccttgctagcgttgcaaagaagggcccagctccgtcaggaatccagggatggagaactggggagcctgggccccacatgagattcatggcaggacttgtctgaggggccccagtgccagcgacccagccccctgtgcctggcccctctgtgggtctcaggacctgggtctgggctgggtgtttggaggaacctcctcccggctctcagacacctctgttttgtctgctgtggatgacttccagcttggtccccctgtggccctggcaggagtatcaccatgggagagggcaggacaggggctgggcgagcaggcctcccactagaccaggctactcctgctgtggaccagctacttccacctctgcccttggcttgccctcctcagagttctcagcctgagtgggccctggggacactgtcaccagagaccccacccctcatacccccagggacccagacccacccccagaagccatgtgacctcctcggctcagctgtgggaggcatgggctctgtcccacatgctgcggtagccacaaaggtgatccatactgggccaggtgcaccccgaggtgcccccctggaccactgcctccctccctccccctggcaccggctccagtctcctatgtgggggctggggagggggctgttggcagccatgccccagcaagcagggggcttgctgagggctgggccactgaccacctccccggcatcccctcaggcgtgttcaaccccaactcggaggaccccctgcccgggcagctcaagaagcagctggtgctccggatcatcagtggccagcagcttcccaagccgcgcgactccatgctgggggaccgtggggaggtgggggccagccccacacaggcgggaggggtgggagttgggggcgggccgggcatcgcgatgggccctgatgccacccccactcctgtgtcccagatcatcgacccctttgtggaggtggagatcattgggctccctgtggactgcagcagggagcagacccgcgtggtggacgacaacggtgaggctgggccgtggctccgtcacacctgtgatggaagtctgaggggggagggttggggctacctggtgtgcccgggtgccctgcccaggcctccctcagtgacagtcctgggcgccctcccctctaggtgggcagtcccggaagcagcaccgggagtggcactgggagtggtgtgggccgggggctccaggctggagcggtgctgggccgggccctccccatgggacactcctcctggcgctgcttccccagggttcaaccccacctgggaggagaccctggttttcatggtgcacatgccggagatcgcgctggtccgcttcctcgtctgggaccacgatcccatcgggcgtgacttcattggccagaggacgctggccttcagcagcatgatgccaggtgggcaggagtggacacggtgccccccacactggccgagggccccagggcagggcaggtactctttcccctgtgagtcagtgcctgtgtaggtgggcctgcacctggcaccaaagagacaggagctgaggacgggaggagagccagcctggggatctgcgggtcaggcaggggcatggcctgtgggggaggggccacccccaggaagaggtccctgcaggctggtgcaatgccaatgggcttcctggaggaggtggggtagtgctgggcccacaggaggcagaggccccaggcctgggcttgttgggtgtatctggggtcttgggacctttaagtagaatggggggcagagcaggtgggggccctgggaggctgtgacctcatgaccctgctgacccacactgctccaggctacagacacgtgtacctagaagggatggaagaggcctccatcttcgtgcatgtggctgtcagtgacatcagcggtaaggtgagtgtcaccccctgccaccagccatcatggggaggggccacaccagccccttgtcccatgcccccccatgtgtccccagtgctgggtcctgaactcaggcagtgaggcctagggtcccctccccgggcctctgctcctctatctcaagaggggctgctgtgggggcctggctcctgagccaccagtgcccacctctgatctcagggctggctttgggcatctcgggcaggacaggtcctgagtgctccgggccttgccccgccctgtgtcacccatgcctgtctcagactcttgggggccttgcagcctccacccctacagtgctgccatctggcttctcagcagggaccgagtgatgcccctctcccctctactaccccccacccctctacttcctggtgtcacgtggaaggcagctgcccgggtttgcctgtgactccacacccagcatgtctgtcccctgccccaggtcagggtggggc

SEQ ID NO: 557 - DNA, 32744 bp, Homo sapiens; identical to SEQ ID NO: 177
  source 1..32744: mol_type = other DNA

SEQ ID NO: 558 - DNA, 19319 bp, Homo sapiens; identical to SEQ ID NO: 194
  source 1..19319: mol_type = other DNA

SEQ ID NO: 559 - DNA, 32744 bp, Homo sapiens; identical to SEQ ID NO: 379
  source 1..32744: mol_type = other DNA

SEQ ID NO: 560 - DNA, 3823 bp, Homo sapiens; identical to SEQ ID NO: 366
  source 1..3823: mol_type = other DNA

SEQ ID NO: 561 - DNA, 15536 bp, Homo sapiens; identical to SEQ ID NO: 117
  source 1..15536: mol_type = other DNA

SEQ ID NO: 562 - DNA, 2228 bp, Homo sapiens; identical to SEQ ID NO: 97
  source 1..2228: mol_type = other DNA

SEQ ID NO: 563 - DNA, 25067 bp, Homo sapiens; identical to SEQ ID NO: 100
  source 1..25067: mol_type = other DNA

SEQ ID NO: 564 - DNA, 10244 bp, Homo sapiens
  source 1..10244: mol_type = other DNA
ttcattgcccctgtaacctgtcaaagaagagctaagggagctttcggggttggcttcttggaggctgctttctcctttacttggaaggtaaaaatctcaagcccaagctgatcaggcagtggtgactgattgagctgttaatttttttctttttggtgtattgatttctttttccagctagggctgtaacatgcttatgggataaggttttacttttactaacaatgatatttacatggaacttctaacaagatggagtggttcttcctggtcctctgcagatgacaagaagcattaggtagattttcttggataggctcgcatggaaaggaaggagaacctatgctttgactgatgaacaattttcatcttattccttcttggtttcacatagagcatggttaagctttgacaggaattgcagatgcgtgtagcaaatcctacttaagtagaatgggttcttgctttattttccatctcagtaaaaactcttaaaactcccccattcatagtaaagctactttacaacagaaagtagaaaaaaaaataaagagagagtttggaaagacacttttagtgaagtcacccaatgtttaggtccaaatgtagctcctctgtcccccagcgctatgttatcaacatcacagggaacttctttcccctcgcaggcttcgctagtgatggacccatacatgattcagatgagcagcaaaggcaacctcccctcaattctggacgtgcatgtcaacgttggtgggagaagctctgtgccgggaaaaatgaaaggcagaaaggccaggtggtctgtgaggccctcagacatggccaagaaaactttcaaccccatccgagccattgtggacaacatgaaggtgaaaccaaatccaaacaaaaccatgatttccctgtccattggtgagttggggacactactgaggggctgtcattgtcctcctctactctcatgttcacaggctggttggagaagatggcagttgggggtgagtctgagtactgaacatgggagaataacctcttggctccttttgtgttttcctcccataaaaaggggaccctactgtgtttggaaacctgcctacagaccctgaagttacccaggcaatgaaagatgccctggactcgggcaaatataatggctatgccccatccatcggtaagctcctcctgagactccatacctggtgactgccaaatctttagtgctcttataacaggactaaatgtctagcaatcctcttcactttcctgatgcacaattcctaaggagaggctaagattacatggtcctttggatttgggaaccgggtctcgggatgcttaaatacaaggcatcaaggtccaacttctttcctggctttctttgacatatgggcacttcccctctaggctcccaaacatacttatttgtcaagtaaagctcctatcctatcattactaattctaatctgaaggccttgagtctggcaggagctttgtgtttgctgagcctctaggtcctaaatggatttacttattgctctgtgtatatagctcctttgcttcatttctgcttctctatgtattgaaggcctattttcattatggtcctgagcacattgaaatgcaattgttaccgtttatgactaacgggtttaaacaaacaaataaacaaacacccaagaacaacaaaaaatgggctgtcaaactgaaggatagaaggttgtttctgatagattgaaattactcctttttaggtttctctccatctattaaaaatttctaccctgaatattttggtaaagtacatgattccttgactttcagtattgaacattttttttccttatgtgtacatagaaacacattcttaatgcagaataaaaccccagtttcatgataaaatcaaattttaaaaacactttaaagagttatatcggggacttcgtggtttttcggttgattacttacattttataaagtttcatacaacaaaaataaaagcaaaatcaagaccaaaagttgttataaaaaaagtttctaatgactttaacatccaaatattaggaaactgatttaacctgaaaaaccaaaaccaagtctccatttgacaaatgttcaaaggttctgaacatttcatttcaaaggagatacaggtgttaatatatgtctaaaaaagtgttcttcctcattagtaattaaggaagtgctgatttgtataactttgagacacccatctatacctattaaattagtaaacattatgaaatagtgcctctagccttgctaagttgtctttttgaacataaattttgcaaaatattatgatgggcatgaaactgctgatacttcaagcttgtaagccaacatttggaaatattgtacaaaaataatttgaaataaaaatttgtacaaaaatactgataagaatattacataacataaaaaacttaaaatggaccacatgaattgaatgcactgattacaacttctttttttttttttttttttttttttgagacgaagttttcgctcttgttgcccaggcggagtgcagtggcatgatcttggctcaccgcaacctccgcctcccgggttcaagtgattctcctgtctcagcctcctgagtagctcggattacaggcacgcgccacaatgcccagctaatttttgtatttttagtagagatgagatttctccatgttggtcagactggtctcaatctcccgacctcaggtgatccacccaccttggcctcccaaagtgctgggattacaggcgtgagccaccgcgcctggcgattacaacttcttaaaaaatacagtccctaaaaaagatttgggaataatagaaatccttgtattacacagaataaaatataatcacagaaatcaagatggtgcagagtatttggggagctcttccttgttatcatttatacattcgtgcttatactaaaattgtaaaacataaaatgtgaagtgaatctcctttatccacaatggctgagagctgaactaaatagaatgccctctgagcaggggcagaggcagcctgaagcccatgctgggcctccagggcatagctgtcagttgagggatgaaaacttcatcttcttgccaggcacagtggctcacccctgtaatcccagcactttcaggaggctgaggtgggaggagcccctgagcccaggagtgtgaaatcagcctgggcaacagagggagattctgtctctacaaaaaaaacaaacaaaaacaaaacaaaacaaacaaacaaaaaacaaaacaaaaaaattcaaaaattagctgaatgtgggggagcacgactatagtcccagctactcaggaggctaaggtgggaggatcccttgagcccaggaatttgaggccgcagtgagctatggctgtgtcactgcactccaagtccgggtgacagagtgagacacagtctctaaaaaccaaaaaagctccactttccactcttttctttcaggcttcctatccagtcgggaggagattgcttcttattaccactgtcctgaggcacccctagaagctaaggtgagccttatacaagacaccagctctgaagcaatttagggcaaactatccctttttacttgtttctgttccacaagaagtacgggtgtcagagggggaaaagctgagaacaatttccctttagcaattagaagacttctcatatagttggggtcactaatcagtgattatagttaatgtcattacagtgtgataatgaccatcccatacaacttaatgtggtgtctgtctcaaggaggccgaaaggatccagagagcacctatatttgattgtctgtaaaagatcatttgagaacaactcataaacactaaaaaattattttaaaaaattttaccaataggatctttcttttttaaaaaaaattgtagcttttctcatttactgtaaggtcatttagagagaaagatagaagtaccaggacatactgaattgatggcagtgccaagtttaaatgatgtccttccctctatagtctactgtgtggggtcagcattttctaacataatgtgtgtctgtcacctgtatgtcagcgaagagccaggcttcaaatctctggccaaaagtaaataaataaccaagcgaaaaaggtccaaggccagcatgctctctcatggaagtctgctgagtcacagccaacctatcctttttaaagtgatttaagtggccaacatttcaacaatagttatcaacatatataaatttcttttggttttggcttagtacatttcctactacttacaacttgttaaaggaagttcacaattgctcccaactcacccacctgacaacttcttttctcctgttgctgttggaacccctaatgaaattaaccttttatttccttcacaggacgtcattctgacaagtggctgcagccaagctattgacctttgtttagctgtgttggccaacccagggcaaaacatcctggttccaagacctggtttctctctctacaagactctggctgagtctatgggaattgaggtcaaactctacaatttgttggtaaatgactttttaatcttagactcaaatgctcagttactaacctgtaaaaaatatatgaacattacttcagcagaggaaggtctcaaagtggtggttgaagccagagacagactttattgcttacattggacccttgagataagtgaggattccccctaaatgtttcagaatcatcttagtctcatcctttctttctctccagccagagaaatcttgggaaattgacctgaaacaactggaatatctaattgatgaaaagacagcttgtctcattgtcaataatccatcaaacccctgtgggtcagtgttcagcaaacgtcatcttcagaagattctggcaggtacgtccagcagacttcacagaggacgaggtggggacagaatccttcagctgttgtgtgaaatgacaaaaaccagtcattccctaagttccaagcctggggtggaggtggggagctccactgatgtctctcatcaatactgtgccataggagtggtaggcctggcctaaaagaagaaaaagaagaaatacttgtctcttcatcactcccaggagaaaaagaaatagtacttgcctcttcatcactcccatcacgttgaagatagggtctgaaatatctagttacttaaatggtgaattcaggctctgcactctggaagagtatgttaagaatttacagttcttaaataggaagacaaaacacacaaacatgaaatgcaaatcacactttgcttgtgctttttgtctttctctttaagaattgtaacttcttaatattacgggatagggaaattacatgatattatgtgactattacatgataaagcaattcacattaaaactgatttcagcatgttttattttcagtggctgcacggcagtgtgtccccatcttagctgatgagatctatggagacatggtgagtcttgatcaggatatatcactacagtaatctcaaattattttatgggaactttagaagtggaataatcagaaacaactcctaatcgtttcattacagcaaatcagcatccctgcactttttacaaatatatagacccacaactccttagccagttttctgaaacccaaagaactttggaaatccaaagattcctggaattcatttggttacaaaacctgatttgacctgatatttgtagatttttatttttcccacttgtggatctatatatttgttaagagtgtggggaaaatggcagaaatgttaatattcttgattaggggtactatcctagacagctctgggagtgttacataacgtatggtaagtgtgctacatggcctttctgaagcccaaaccattttgcattatgaaaatacctggccccaggaatttcagataagggattgtggacttatattttaaatctgtaactcctatagacagtaatttcatagagccagcttcatggagttgtaaatattactgggctagggtcagtttcctcattttaggcttcctttaatccagtccagacaccaaattaaatgtctttgtgtagtccccttcaaagcctcttgcaatcccagtcatgcttcagggtagggatgatcccattaatccaaggacctgtccctagtgatagaaggaaatgggtgggagccacgggatctgggattgcagtgagaagtagacaagaaaacaaccataacaagtgcctcttctcaggtgttttcggattgcaaatatgaaccactggccaccctcagcaccgatgtccccatcctgtcctgtggagggctggccaagcgctggctggttcctggctggaggttgggctggatcctcattcatgaccgaagagacatttttggcaatgaggtgataatatggtgaaagagtatgtgtaatttagggtatatatttatttcatgagcacagtggggacaagggaggcttttttcttttctttctccttgtcagtcaagcagcatgtgtgtggcagagctgggctacgaacccagagggtctgatctaagaatgccactagacaccatcactttccaagattaaaaacctgatagaaaggtcagaacaagaaactctaagacagagatgcttaagaaaagctaaacaacatgtttcttgtgggtgtcttttagatccgagatgggctggtgaagctgagtcagcgcattttgggaccctgtaccattgtccagggagctctgaaaagcatcctatgtcgcaccccgggagagttttaccacaacactctgagcttcctcaaggtaagggcagctcctgccctccactttgggagtttgggagtcagagaatgccgcccgtggaattaggaataattggttctcctttctggagccatgttccaatattaggagacggcatcggtgtaagcatccacacacacgtttctcacttccggccattctctctgcccctggtgaaaagcttcaagtaatagagctttttctttttcactccttatgccagaacatcacacctacgttcccactcttcaatgagggggctatttttaatgacttggcttttcttttacttaaattttgatccttgatttctccttgcctcttcttgtagtccaatgctgatctctgttatggggcgttggctgccatccctggactccggccagtccgcccttctggggctatgtacctcatggtgagtatgtgggtggcaggcactaggtcaatgcatgttgtaaggcaaagggcagtcattcagcagaattgccacaggcagtcacgcagggtacaaagacaaccagctggcctcctaagccaagcagtttaggagttgtcttattctgaattgtcccactgaggtaatttagcctctatcagttctcataaaactctttaaatgacttaattaggcagggcatggtggctcacgcctgcaatgccagcactttgggaggccaaggtggacggatcacttgagcgcaggagttagagaccagcctgggcaacatggtgaaactctattgtctctacaagaaataaaaaaaatgagctgggcgtggtggcacactcctgtagtcctagctccttgggaggctgagatggaagaatgacttgagccttggaggttgaggctgtagtgagccataatcgtgccactgtactcccgtctgggagacagagtgagaccccatccgaaaagaaaaaaaaaaaagatttaatttttcagtacagagaatcattttatatatgtagatacagggaagatttaaaacacaaataagaggcttttcataccattgtaattctcaactgggagtgatactggttccctaagggtatctgggaatgtatgggaattttgtttgttttcagaatgactaggggctgccattttgtgggtcagggatgttaaatatcctgcaaggggtgggctagtctcatgccataaagagttgcctggccctaatgccagtagtgtctcttttgagacatactagcattctatttccagcttttatttatcagcatcagggaaggaactctttaatatttattaataaaaatatatcctgtcttccctgagaaaaattccataaatattagccctcttatttatcagtgatcagtagcacagttccaagatatcttttaaagtagcccctaccttaatttctggcacaggaaattggcctgttctccctccttctgataagttggcctctccctcctgttggtataggttggaattgagatggaacatttcccagaatttgagaacgatgtggagttcacggagcggttagttgctgagcagtctgtccactgcctcccagcaacggtgggtgcctgtgtccctcaggacattctcaacagtttctagagccccagaagcaagttctgagctggtttttagcctgatcttttctcctccaacaaaatgtcttctcatttgataagattcaaactgatgtgtctcatggatcctatttaaaatttgcttctcccccccatcataatcccatccatactgggaagaaaagttgtaaacaaacgttctaggtgagaggaaattgatcctgtcccacaagtcattttaagatgaatgaactcagttgctgacttagcatcccagtcatgggagctgaatgaactgatggccctgatgaaatggtaccacttcttgtggatcagggtcctgaccattttagggtggtccagtaccagactcaattgctctgaaagtaacagactcttctttttgcagtgctttgagtacccgaatttcatccgagtggtcatcacagtccccgaggtgatgatgctggaggcgtgcagccggatccaggagttctgtgagcagcactaccattgtgctgaaggcagccaggaggagtgtgataaataggcctgcatccattctcctgaggatgtgtcccatctagggaaggctggactaggccttgcggctcctcagggactcaggtggccctactgggagaggggcctcaaatgcaccatgtcaagggttcaagattgttcctgcttttccccaagtacaaccacacccacactcagatcctcctcattcacatcgcagattctcccttgctctgcgctgctagagtgactcactaattcattaatctgcctccctctcgtaagatttccttctttttttcttgaaagtaccaggtgaacaaagtttaccagaaagcagttgagacaagaaaataagagctcaggatgagggaaaagaaaaagattgagagaatttgtgcccccaaccatttcctcagactctaagaaagaacacgctctctccaggcaggtctgaagctcaactctcttattgcctcacttcaggtatacctcactttacacaatagaattataactggaaagaagttggggacacatgtatttggtgattacattttaaacacattaggaaaagttgctatttgaactttttattgatttttggggggagtaaagaattattttgtgatgcaaataaatatcctttaattgatcgacttgccaaatttagatttgtgtgcatcaggctttcttttttttctttttttagagaagttcaatataagcttttcttttctttgtttctttctttctttattttgagatggagtcttgctctgtcgcccatgctggagtgcagtggcgcgatctcggctcactgcaacctccacctcctgggttcaagcgattctcttgcctcaacctcccaagcagttgggactacaggcgtgagccaccatgcccggctaatttttgtatttttagtagagacagggtttcaccatgttagccaggctggtctcaaactcctgacctcaggcaatctgcccgcctgggtctcctaaagtactgggattacaggcgtgagccacctcgcccagcggcatcaggctttcttaaagtgagagcacgcctgtactagagcaagcaggaatcagagaccttccagaaatactactgtgtaagggccagaaatatcttcacttgtcattgttatataatcattattacttttgctgtaatgttaatattgatttattaatatatattatcttttcatacattttctaagaaacatttatattgataagatcttttattttgccaagggcataaattattgtttttctttttttttttttaataaatttcaccaag

SEQ ID NO: 565 - DNA, 32744 bp, Homo sapiens; identical to SEQ ID NO: 26
  source 1..32744: mol_type = other DNA

SEQ ID NO: 566 - DNA, 10858 bp, Homo sapiens; identical to SEQ ID NO: 227
  source 1..10858: mol_type = other DNA

SEQ ID NO: 567 - DNA, 16149 bp, Homo sapiens; identical to SEQ ID NO: 106
  source 1..16149: mol_type = other DNA

SEQ ID NO: 568 - DNA, 17944 bp, Homo sapiens; identical to SEQ ID NO: 43
  source 1..17944: mol_type = other DNA

SEQ ID NO: 569 - DNA, 28613 bp, Homo sapiens; identical to SEQ ID NO: 180
  source 1..28613: mol_type = other DNA

SEQ ID NO: 570 - DNA, 32742 bp, Homo sapiens; identical to SEQ ID NO: 66
  source 1..32742: mol_type = other DNA

SEQ ID NO: 571 - DNA, 21283 bp, Homo sapiens; identical to SEQ ID NO: 218
  source 1..21283: mol_type = other DNA

SEQ ID NO: 572 - DNA, 32742 bp, Homo sapiens; identical to SEQ ID NO: 337
  source 1..32742: mol_type = other DNA

SEQ ID NO: 573 - DNA, 32746 bp, Homo sapiens; identical to SEQ ID NO: 67
  source 1..32746: mol_type = other DNA

SEQ ID NO: 574 - DNA, 32742 bp, Homo sapiens; identical to SEQ ID NO: 324
  source 1..32742: mol_type = other DNA

SEQ ID NO: 575 - DNA, 32742 bp, Homo sapiens; identical to SEQ ID NO: 327
  source 1..32742: mol_type = other DNA

SEQ ID NO: 576 - DNA, 5112 bp, Homo sapiens
  source 1..5112: mol_type = other DNA
ggaggactcaggccccgctggccgcgggctcggtacccggtgggtcggtggagcgtctgttgggtccgggccgccggcttcgccctcgccatggcgccctggctgcagctcctgtcgctgctggggctgctcccgggcgcagtggccgcccccgcccagccccgagccgccagctttcaggcctgggggccgccgtccccggagctgctggcgcccacccgcttcgcgctggagatgttcaaccgcggccgggctgcggggacgcgggccgtgctgggccttgtgcgcggccgcgtccgccgggtgaggacgcgccgggggcgggggcgccaggcccgggtccaagggataggagctttgacctaacattgggatggggcctgcccgctggacgaaccgatctctggtgatggggaatgggcagcgccgcacgggcggggccttgggcgccgtcaagggccgactgtgcccgcctcacctactcctctctccaggcgggtcaggggtcgctgtactccctggaggccaccctggaggagccaccctgcaacgaccccatggtgtgccggctccccgtgtccaagaaaaccctggtgagtgatgaggctcttggggttccccgccccgaggccgagtaaagcagcagttggatgatgacgggtcaggtcaagacgcagggatctgaggtagctgctgccccaccttgagccacttcccaggccccgagggctggaaaccaagatgctatgaaggggaggatgccccggtgcaggccgtgcctcactgtccactgtgatggggtgattgccttaggggtggctctcatctgaggagcctccagctccatcttggccagatcttgctccccagatccagatccaggcccccagagcagcttcttcctctccctccagctctgcagcttccaagtcctggatgagctcggaagacacgtgctgctgcggaaggactgtggcccagtggacaccaaggttccaggtgctggggagcccaagtcagccttcactcagggctcagccatgatttcttctctgtcccaaaaccatccagacaacagaaacgagactttcagctcagtcatttccctgttgaatgaggatcccctgtcccaggtgaggagccctcagcttgaggagccctcagcttgaggagccagccgctgcctcatcacccttctcccttccctctggagtgggtttctctggtcagcctaaagactggtctgcctatccaggacttgcctgtgaagatggcttcaatcttcaagaactttgtcattacctataaccggacatatgagtcaaaggaaggtgaggacccagccttggctgtacctgttcctatcagaacaggactttccccccaacttggcaccttggtgtgtgggaggagaaagacaagaggcagtgtacctgttcaaggaccccataattcctgagctctccctaagccttcccagcctggcagccaccctgagtacctggccccttctcctaccttatcttcccgctcagaagccatgggtcttggccgggcgtggtggctcacctctgtaatcgcagtactttgggaggccgaggtgggcagattacctgaggtcaggagttcaagaccagcctggccaacatggtgaaaccccatctctactaaaaaaaaagtacaaaaattagccaggtgtggtggcgcacacctgtataccagctactcgggaggctgaggcaggaaaatcacttgaacctgggaggcggaggttgcagtgagcaaagattgtgccactgcactccagcatgggtgacaagcgaaaactctgtctcaaaaaaaaaaaaaagaagctctgcatctccatcactctggcagggtgggatggggcagaggctggattttttgtgctggagagtccttgacaacatggcctttccccaccacctcttgtgggtggtgtcctttagaccccatttactgcttttgcacctgggaagtcatcacttcagtttggccctaaaagttgatcagacctcccactccatcacttgcatgtctggcccccacccctacctgctccccggggaaacccctgcctgctagccccaattgcccttccttttatctgcctggggtcgaacccctcctcttctgctccttggtcctcagaagcccggtggcgcctgtccgtctttgtcaataacatggtgcgagcacagaagatccaggccctggaccgtggcacagctcagtatggagtcaccaagttcagtgatctcacaggtagggatagtggccacagtcctcatggatccaggaagagacaggaccttgctcgcaaggcctctggtcaggtctggcttagaacactcttcctccccatgccctgcccacctttgcccgcagaggaggagttccgcactatctacctgaatactctcctgaggaaagagcctggcaacaagatgaagcaagccaagtctgtgggtgacctcgccccacctgaatgggactggaggagtaagggggctgtcacaaaagtcaaagaccaggttggacccctggaagtgagggtgggacatgggcactgcactggggctgacgaaggggcccggctctgactccaactccacccatctcttgtagggcatgtgtggctcctgctgggccttctcagtcacaggcaatgtggagggccagtggtttctcaaccaggggaccctgctctccctctctgaacagggtgagcatctcgctctactcctctgtccccagcctagcccctcaggagggcttcttgggaccagccttctgtctcctagagctcttggactgtgacaagatggacaaggcctgcatgggcggcttgccctccaatgcctactcggccataaagaatttgggtatgcattaatggggtcaggaggggcaaccggagccacttctccctgtacaagaagttacttcataatgggggggagacatgagcatgagagttacacagaactgggtccaggtcttaatgctgacccagccaggcgtggtggctcatgcctgtaattccaacactttgggaggccaacttgggaagatcacttaaggccagaagttcaggaccaggttgggcaacatagcaagaccccatctctacaaaaaattaaagacattagccaggcatggtggcttgcatctgtagtctcagctacttggggggctgaggcaggaggatcgcttgagcccaggaggttgaggctgtagtgaggcatgtttgtgccactgtactccagcctgggtgaaagactgctgggatgagctcttggtgaggagtcagaagttggagttgagttctgtctctgccacttttcttgctggctactggtccctcctccccatctctcccagcctcagatgtgtcatttctagaatgaagacattcttcagaggggatggcctgtggcctggggtggacgaggaatgtgaaacctcgcgtagagggcttagttcatttctggctgtgaatggcaaatgggagcctgcccttctctactcacccccaccgttccccaggagggctggagacagaggatgactacagctaccagggtcacatgcagtcctgcaacttctcagcagagaaggccaaggtctacatcaatgactccgtggagctgagccagaacgagcagagtgagtgaggggcagggtgaggtgaggtcaggtggggccggggcctgggtgcctactgatgccaccccttcccatctcagagctggcagcctggctggccaagagaggcccaatctccgtggccatcaatgcctttggcatgcaggtgaggccctagccccactgcccctgccccatctcttgttgacctccccgacctcttcttggagtcgatcccctactccttctccacctccagttttaccgccacgggatctcccgccctctccggcccctctgcagcccttggctcattgaccatgcggtgttgcttgtgggctacggcaaccgtgagttccgctgcctgtcctgcatccagccaggccacaggcaggggtgggatcacagcatctcaggtcctctagaggggaaatagggggaatgcctaggaaccctgtccttacccactgcctgggccatgaccagctgggcatcatctgtcctctctatggcagggaagctgagctgtgggagggtaaatattgatggcctaataacctgcaataggcgggtgggtgcgtgcttcctccctgccccagggcttctccctgaggctggtaggtgggcccctcgctttctgctcttttcctagtccctgtcacacagtaggcccagtgcaagtatttgaagggtgcaaagtgattaaggctctgcctggagaattaaggaccctgatccttgcgctctgcactgcaccccaggctctgacgttcccttttgggccatcaagaacagctggggcactgactggggtgagaaggtgagtcttgctggcttggcccctggccctccagccgccatcctaccctggtgccctcaccagctccccctctcccccagggttactactacttgcatcgtgggtccggggcctgtggcgtgaacaccatggccagctcggcggtggtggactgaagaggggcccccagctcgggacctggtgctgatcagagtggctgctgccccagcctgacatgtgtccaggcccctccccgggaggtacagctggcagagggaaaggcactgggtacctcagggtgagcagagggcactgggctggggcacagcccctgcttccctgcaccccattcccaccctgaagttctgcacctgcacctttgttgaattgtggtagcttaggaggatgtcggggtgaagggtggtatcttggcagttgaagctggggcaagaactctgggcttgggtaatgagcaggaagaaaattttctgatcttaagcccagctctgttctgcccccgctttcctctgtttgatactataaattttctggttcccttggatttagggatagtgtccctctccatgtccaggaaacttgtaaccacccttttctaacagcaataaagaggtgtccttgtcccg

SEQ ID NO: 577 - DNA, 20313 bp, Homo sapiens
  source 1..20313: mol_type = other DNA
tcaggacagacaattcctcagtgacccaggagctgacacactatggcgcacgtccgaggcttgcagctgcctggctgcctggccctggctgccctgtgtagccttgtgcacagccagcatggtaagggagtgcttgcaggctggaacaggctggaggactggggtgtgggcccatgggctggggtctcctggctggacagagcacacagagctggcccctaagtaggtctcagccccaggcggccagcttagggaagaagtcaggagctcagggctggaaagagaatggctgcttctctcttccaatatagggagcaggctgggggcaaggggcagtgtaggaggggcacagggggccacatttagcagccttccaggcacttccaccagcccagacagcctctctcagaagccagcaggggagggtgggcttgcttcatgcccccagaatggccaagactgcctgttcctgaggccgctgtcccatgacccccccaccgccttacagtgttcctggctcctcagcaagcacggtcgctgctccagcgggtccggcgagccaacaccttcttggaggaggtgcgcaagggcaacctggagcgagagtgcgtggaggagacgtgcagctacgaggaggccttcgaggctctggagtcctccacggctacggtgagcctgggctgctcggacggtgccggggcctcagaccgggcccaactctagacacttccacagagaagcaagcgaggaacgccacagccccttcgctgctcacagcctcatttcaactctgagcccctcctcacagggctggcaagaggagcggcctcagcctttcctgggggtctctgtgcctggactgtgtccctgtgcagctccatgacatggggaggcctccacagtcttcagacatccacctgccctggagctctgtgtccacatggcctcctcagcggcagactcccacaccacccttgaggggtgggactctggggaggccaccacaagcccccgggctcaagactcagtgttcctggagctctgtgtcgcctttcctgtctgtagggctctgccagggtcccactgccccctctcctcccatctcccccagcctctttcagtctcggtgtgtgtgttggaggaactcccctatcctcaaatattcttctccttttggaaacaaaagtaggaaactctgccacaaacctccccagagcctgccccctgcgtgaccagggtaaaggaaagtgtgaggaggagacataacatttactaaaacaacacaaaacaggagctgccgtagcctcactcccagcccttgtttttcaggatgtgttctgggccaagtacacaggtgagcaccgggaaggatttgccccaggaagggaggcctggggaccccagtgagagaattctacccagagaatcttctgctgcacctagccatccacccatccaccccttccccactccttccttggtccctcccatctgttcatccatctttctgtttctcaccaacatcccatccaccctgactccagctcatcctggccataccccaatcccaaaggtaaacacctgggtcttttccagcttgtgagacagcgaggacgcctcgagataagcttgctgcatgtctggaaggtgagcaactgacacgggtttggggagcaggacatggaggggagcctgggagaagagctcaggggtgggtttggagtgtggctggtggaggccgaggcagtccccagcatctgacattgctcccattcctggggtcaagatgtctctttgtacctggctctgtgtctggcatgcgaacgaatgaatgaatgaatggactaatgaattaatgtttttttttttgagacagagtctcgctctgttgcccaggctggagtgcagtggcacgatcttggctcactgtaaactccgcctcccgggttcaagcaattctctgcctcaacctcccaagtagctgggattacaggtgctcgccaccacgcctggctaatttttgtatttttagtagagacggggtttcaccatgttggccaggctggtcttgaactcctgacctcgtgatccacccacctcggcctcaaagtgctgggattatagaagtgagccaccgcgcctggccatgaattcatgtttaaggcttcattctcctttgcctgacccgagtctctgcccccacctagtcagagctttgatgatgtcacattccccttctagctttaggtgtcactgaaccaaacaggaacccaaacccccagctgctctgacaccaaggacttccctaagcatgccaaggtgtttctagcacctggccttgcatatgttgtcaatttcctctggagcgaccatcacatctactgaacactttcctatccttcaaggactgcttcaaatgtcaccacttttgctgagacttcagggagcaccctccctcctgcactgtgttctgaaggcacctttagcacgacaaaaatggaactctttgtttatttataagagacagggtctcccttttttgcccaggctgatcttgaactcctgggctcaggcaattctcccatctcagtctcccaaaggagtaggattataagtgtgagccaccatgcctggctgccatactttcatttttttttttttttttttgaggtggagtctcactctgtcgcctaggctggagtgcagcagcgcgatctcggctcgctgcaacctccgcctagcggattcaagtgattctcctgccttagcctcctgagtagctgggattacaggcacacactaccatgcccagctaattttttgtattttttagtagagacggggtttcaccatgttggccaggctggtcacaaactcctgacctcaggtgatccaccagcctcagcctcccagagtgctgggattacaggtgtaatccactgcgcccagcctcatttgttaaattacgtactcaacagacattttacaaagttcctgctacgtgccaggcactatatcaggtgctggggattttaagagaatcaaatacagtctctgccttcaaggaattcaaaatctcaaaagagaacaaaaatacaaaatattaaaatgattgcggccgggtgtggtggctcaagcctgtaatcctagcactttgggagctgaggtgggcgcccaggccaggggtttgagaccatcctggccaacatagtgaaacccccaacctctactaaaaatacaaaaattagctggggtgtggtggcacgcgcctgtaatcctagctactagggaggctgatgggggagaatttcttgaatctgggaggcagaggttgcagtgagctgagatcatgccactgcacttcagtctcggcaacagaacaagactcatctcaaaatacataaataaaaataaataattcaataaagtgattgcaagaaaagttctgttcaaggcaccaagagaccacaggaaaatgagtgtctggtttgccagaaaaatgagagatggcttcccaggagaggcagagttctgcctggcctggtgggatgcatggatgaacaaacaagtgggcattccagtcagaagaaacaatccgtggaaagacccagaggcatgagaagctgagctagcagggacaggtagaccagggccagttgaaaaggaccttcatcactttttcatcctgctggccaagagaagccacagaatggaagctccatgagggcagggctgtgactgtcctattggttgatgtgtactgagcacccgacagtgcctgtcatatggtaggcacttagcgaatatttggaggccactgttgagtgaatgggagaactgctggttgcagaggaagaggggctgggtgaatgcaggttcaggattgtggacctgcatgagctgggaggtgggggatagacaactttgcagggagagaggaaataagtccccaggctccaaggctgaccggggtggggtctccgcaggtaactgtgctgagggtctgggtacgaactaccgagggcatgtgaacatcacccggtcaggcattgagtgccagctatggaggagtcgctacccacataagcctgagtgagtgaggggccggccttcccaccatgggctgagaacagggagcaagcgtacctcaagcccaacagcctcctgttgggcaatttcctgttccagaatcaactccactacccatcctggggccgacctacaggagaatttctgccgcaaccccgacagcagcaccacgggaccctggtgctacactacagaccccaccgtgaggaggcaggaatgcagcatccctgtctgtggtaagctgggggcagtggggcggcccatggccaaggcccgggggcttcatggggcctggcagcctgggatgggaaccaagaatactggctacccaggcacagtggctcatgcccgtaatcccagcactttgggaggctgaggcaggcagatcacctgaggtcaggggtttgagaccagctgggccaacatggcaaaaccccgtctctactaaaaatacaaaaattgccaggcgtggtggtgggcgcctgtaatcccaactactctggaggctgaggcacgagaatcgcttgaacccgggaggcggagtttgcagtgagctgagatcctgccactgtacttcagcctgggcgacaagagcaaaactctgtctcaaagaaaaaaaaaagatgctggccaccttcagagctggcgtcagtcattcagatcatatctgtgcctattgctcagtaaagtcagggaatcaggggatctgagtggggggatctgccagcctcctcctccccctccccactcttgacttccttatggtccaggctgtggctcattccaaacatgcctcctttctgatcaaggcactcctccctccgggaagccctccctagccatttcagtccacacaccctgttctgagtatcacagagcaagccttgtgcagtttggccctgcgggattctgtcattattatttccttggtgtgttaagtagctatagccaccccttccctgaggcagaccacaataagcatttctttttcccatgagggttggcaggtgtggctgcactcgctaatgcgtctgtagggtcaactgacggaggttggccctggctgggtggctctgattcaaataatgggtccagctgagtctggctcctcgttgagggttgggcctagatctgctccacgtgcgttcatgctggggctgaggctgaaagaaggtacctgggaaaactcttcttatgctgatgacagacacagaaaacaatgaacagaaaagcgtcttctgtcctgaaggcctggctcagaacaggcacagtcagccctgcccacgttccattggccagagcaagtatatgttcaaggccagggtcaagaggtaaactacacctcagcctgtaaaatcacagagcaagggatgtggatgcaggcaggggtaaagaatttgtgccgattaccagtccacaaacatgggttagtgtttgttctctaggcatccctgtcgggcccattgctcattcctggggttggtcttttttttttttctttctaagatggagtctcactcccttgcccaggctgttggagtgcagtggccctatctcagctcactgcaacctccgcctcctgggttcaagcgattcccctgcttcagcctcctgagtagctaggattacaggcgtgtgccaccactcctggctaatttttttttatgttagtagagacggggtttcaccatgttggccaggctgatctcaaactcctgaccttgtgatcctcccgcctcggcctcccaaactgctgagattacaggggtgaggcactgcgcccggccttttttttttttttttttgagatggagtctcactctgtcacccaggctggagtgcagtggcataatcttggctcactgcaacctccacctcctgggttcaggcgattctctgcctcagcctctcatatagctgggattacaggcacacgccaccacgcctggctaatttttgtatttttagtagagacggggtttcttcatgttggcctggctgatcttgaactcctgacctccggtgatctgcccagctcggcctcccaaagttctgggattacaggtgtaagccactgcgcctggcccctggaattggtcttatagcaagtttatcccaacaaaaacagctactatttactccccaacccccatacacacgcacacacattgatgataaataagttgcaggcttgcagaaattgacccatccaggtgaacagcctagtgatcccagcaagcgtcctgctgtgcagctataaaaacatgactcctccagcagctccaggcagccactaccagttaattacagatggcctaggaggccaaacctggttactatctctggtttattatgtgccagacacttatgctgtatattttgtttaatcctctcaacaaacctgcaaaagtggcattagtaacccctttaaaggcaaacggtcagaagcccagagaggttaagtaacctgaggtcacacaggcagaaagcagcaagaccggggttcacacccctgtctgttccggtccatgtgtggtctcactcactctgctgcctccttgcccctcacccaccaggccaggatcaagtcactgtagcgatgactccacgctccgaaggctccagtgtgaatctgtcacctccattggagcagtgtgtccctgatcgggggcagcagtaccaggggcgcctggcggtgaccacacatgggctcccctgcctggcctgggccagcgcacaggccaaggccctgagcaagcaccaggacttcaactcagctgtgcagctggtggagaacttctgccgcaacccagacggggatgaggagggcgtgtggtgctatgtggccgggaagcctggcgactttgggtactgcgacctcaactattgtggtgagctgcctgggtagggggcctgagttgcagggacaaatcctggtgggaataacaacagccgcttctgcttatcgaacgcttacctcattgagtgcgctcattacagccttacagtaaccaggtggggggtaaggtcctgtgcccatttcacagataagtacactgaggccccaggaggttattgcctagtagcccaactgtgcatgcacgcttaacctctgcaccaaatggcctccaaggcccgtaggggaattggggggatctaggggatgggtgaggaatggcccagcccagtcccagccggtgcctgggtcccaacagaggaggccgtggaggaggagacaggagatgggctggatgaggactcagacagggccatcgaagggcgtaccgccaccagtgagtaccagactttcttcaatccgaggacctttggctcgggagaggcaggtgaggtagtgggcatccgaggggatgcggggctgcggggctggtggccaggacttgcccctcactgcttggcttgctctgcagactgtgggctgcgacctctgttcgagaagaagtcgctggaggacaaaaccgaaagagagctcctggaatcctacatcgacgggcgcattgtggagggctcggatgcagagatcggcatgtcaccttggtgtgtcctggagccctgcgctaccattcactcctgggggcaggtgtgctgctggacccccaccctcaggccctgcctgcaggcctgggctttacagatgacaacagctgagcatccaggatcccaccaactccacacagcagccacatgagatgggttgtttacttctttttttttgtttcttagatggagtcttgctctgtcacctaggctggagtgcagtgctgcaatctcggctcactacctcgatctcagctcactgcaacttctgccttccgggttcaaacgattctcttgcctcagcctcctgagtagctgaatttacagacatgcgccaccacacccggctaatttttgtattttaagtagagacagggtttcaccatgttggccaggctggtcttgaactcctgacctcaagtgatccacctgcctcagcctcccaaagtgccgggattacaggcatgagccaccacacccggcccatgggtcctttacttctaagcagatggtaaagctgagactgacggagctggtggctcacctccgcgcacagctaatgggtttgaatccagttcttctgattccagagctgtgctacgctatgtgaactctggactggaaggacctagttagggggtgcaaaaagcaggaggcaggtcaggtgcagtggctcacccctgtaatcccagcactttgggaggccaagacaggaagatcacttgagggcaggagttcgaggccagcctgggcaaaatggtaaaaccccgtctctactaaaaatgcaaaaattagccaggtgtagcagcatgtccctgtagtcccagctactaaggaggctgaggcgggaggatcgcctgagcccaggaggctgaggcttcagtaagctgtgactgtaccattgcactccagcctgggtgacaagagtgagaccctgtctcaaaaataaataaataaataaataaaaaagtgtgaggcagcccctcagcatcacacggaggctccaggccccaaaggcggccagcccaagcttggatctgggccccggaggcagctctgcccagctgggttcttagacctgggattgttacttctagggctggtgtagaggcagccccctcatcctcagctcctaatgcttcctgctgcccctcccaggcaggtgatgcttttccggaagagtccccaggagctgctgtgtggggccagcctcatcagtgaccgctgggtcctcaccgccgcccactgcctcctgtacccgccctgggacaagaacttcaccgagaatgaccttctggtgcgcattggcaagcactcccgcaccaggtacagaactggtggcccgtgggtgtctggcaggggtctgagtcctccaaagcgatcatgaggggccctggtggctccgggacacataggatgttctgtataccccccagaatataacatcccagcagtctctgctggaaagcccatttggtcacgtcctgactgaggcttggagctgcggggagaaatccgtctgtctcctggtccctccaacactaggatatagcccatgtgggagtctctgaaaatagagtctgtctggactagggcgtgcagcctgtgcccctgtccccgtcctccaggctgtctgactccaaagccctgcacggctttaggcccaggaagaaacacccagggggctgccatggcaggaaccagccctatcccctccctggtggcctgcaggacacactgtctcccagaccccaagggcaggcagtttcctgctccttgctgggtgaacctgcagcttctccatttctttcttggggtctctgcaggtacgagcgaaacattgaaaagatatccatgttggaaaagatctacatccaccccaggtacaactggcgggagaacctggaccgggacattgccctgatgaagctgaagaagcctgttgccttcagtgactacattcaccctgtgtgtctgcccgacagggagacggcagccaggtgggccaccagatgcttgttagctgaggggcagaagccaagttctgggcctggctctgataccaagtagccttgcaagagcccctttcccttttccaggcctcggtttcttggagtgaacccaaaagttcttttcagtactggcgttttattttttatttatatttatttatttactgacggagttccactcttgtctcccaggctggagtgtagttgtgcgatcttggctcactgcaaccccacctcctgggttcaagcgactctcctgcctcagtctcctgagtagctgggattacaggctaatttttgtatttttagtagagactggtgggtttcaccgtgtcggccaggttggtctcgaacccctgacctcaagtgattcacccgcctcggcctcccaaagtgccgagaccacaggcgtgaacgtctgtgcccagccagctctggcgttttagattctggtctctaagaaatggcgttggggccaggcggctcctgtgggggttggctctcactaggcccttcttccttccccaaagcttgctccaggctggatacaaggggcgggtgacaggctggggcaacctgaaggagacgtggacagccaacgttggtaaggggcagcccagtgtcctgcaggtggtgaacctgcccattgtggagcggccggtctgcaaggactccacccggatccgcatcactgacaacatgttctgtgctggcaagtctgtgcagggcgggctgagggaacagtggggcccaagctgggagaactgagttgtgcctgggttcaagccatgtgactttgagcaagttgcctaacctcttggtggctcagtttcttcctctgtaaaatggaggtaaaagtctctatcccataaggttatgggagggttaaatgaagtagtatatattaatgtacttggcatagtatcagtcaccagtgagctcagatagcagcaagaggctgcgggtagggaaatgccattcattcagtcactcagcaaatatttattgagcgcctatcacgttccaggcagcgttctagggtatacagcagggacccagacggacaatgtctgtgccctcagagagcttccttcctaggagggcacatccataaacagatctaaaacagcaatccctgaccagtgctgtgaagaaaaatgaagcacagggagagagaacggctgatgaagtgggcttctaaatagggtggccagacaaggtgggcagatcacttgaggtcaggagttcaagaccagcctggccaacatggtgaaaccccgtctctactaaaaatacaaaaattagctggtcatggtgacgcatgcctgtagtcgcagctactcaggaggctgaggcaggagaattgcttgagccagggaggcggaggttgcagtgagctgagatcgggcatcattgcactccagctgggcaacacagcaagactccattgatcgatcgatcaatcaatcaatcaggtggccagagaaggttggagaaggcctccctgagaaggtgatgtctgggcagggactggaagaggggaaggaaggagtgagcaggcatatctaggggaggagcaccgcaggctgggggcatggcaggcactaaggccctgaggtgggagcactcttggcttgtctggggagcagtagggaggcctggggggctgaggaggggcagcagtgggtgaggggagagaggggggcaggcagaggacagccacttcctttagggcctggaaggactttattgagtgagatgggaagttattgaggggcttgaggcaggttaagaaatgatgtgactgactttaaaagtaaaaaataaaaaaatttagtgtaatttcagactcacagaaaagttgtaaaaataatacaaagatttcctgtatactgtcatccagattgtcctccattctgtggatgtgtgggaatttttatatatatatatgcatagtttgagagcaaatcatgaatatggtttctttttacccataaatacttgagtatttccaaaaaaaaaaaaaatacccaaggatgttctcttatgcaaccacaatacaaatattaaaacccggaaatttttttttgacatagcttcgctgtcacccaggcttgagtgcagtggcacaatctcggctcactgcaacctcctgctcccaggttcaagtgattctcctgcctcagcctcctgagtagctggaatcacaggcatgtactaccatgcctagctaatttttgtatttgtagtagagacagggtttcaccatgttggccaggctggtcttgaactcctgacctcaggtgatccacctgcctcggcctcccaaagtgctgggattacaggcgtgaaccactgtactcggccaaaaccaggaaatttttttttttttttgagatggaatcttgctctgttgcccaggctagagtgcagtggcatggtctcggcttacttggaattacaggtgcctgccaccacgcccggctaactttttgtatttttagtatttttagtagtgatggggtttcaccatgttggccaggctggtcttgaactcctgacctcgggtaatccacccacctcggcttcccaaagtgctgggattacaggcgtgagccacagcacctggcccaaaaccaggaaattaatgatgatacaatattattgtctaatctatagaccttattcaaatttttgttagtcttgctaatgtcttttatagggaaaaaaaaaaaaaaaagcgtgtttctcacccaggattcaatgaaggatctttctttgtcttctatgaccttgacatgtctgatgagtgcagtctggttattttgtacactggccctgaatccgggtttgtctaaggtttcctcacggtcaggttcgggctcagtggtgccatgtccttcttggtgcatcctgttaactggcacatgagaacaatttgtctcatatgtggtgagtctaactctgacctcttgaggaaggcaatgtctgccaagtttcttgctgtaacttctgtttttccctttgtaattaataagaatctggtaaagagacactttgatgttttttttttttttttttttttgtgatggagtctccctctatcacccgggctggagtgtgtggtgcgatctcggctcactgcaacctccatcccccaggttcaagtgattctcctgcctcagcctcccaagtagcagggattacaggcatgtgccaccacacccagctaatttttgtatttttagtagagatggggtttcaccatgttggccaggatggtctcgaactcctgaccttgtgatccgtctgcctcagcctcccaaagtgctgggattacaggtgtgagccaatacgcctggcctactttgatattttgtattctgtttgcatcaaaaccttctcccaactagggtgactaccaaatggcacttatctaattctgtcattccttctacatttgttagttactttattgctttccttcctttcattctatcagtgtggacttaaggatccttactttattctaagggttcacctttttttttctttttttttgagatggagtttcgcccatgttgcccaggctggatggagtgcaatggcgtgatctcggctcactgcaacgtcctcctcccaggttcaagcaattctcctgcctcagcctcctgagtagctgggattacaggcatgtgccaccacgcctggctaattttttgtatttttagtagagacagggtttcaccatgttggccaggctggtctcgaactcctgacctcaggtgatccgcccgcctcagccttccaaggttctgggattataggcgtgagctctaccgtgccaggccatactttgttactactgttattttttctgatgctcagatgatcccaagtttggcctgtggaagtcccttcaagctggcttctgtgacttggggagatgttctgtcattctttgagtactttctttctttctggcacagcaaaatgattcaggttaatcctactttccttactgtagtgttggaaccagccatttctccagggaacccttgtagtcaagagtggaatttagaactgagatctgggtgctggcgtgtgcacattgctagtgggatgtcattacttctaggctctcttagtggacagaaccagaaaaaaattatatgatgcatataccaatatctctatcatctatataaaaaaccatgagttcctactgaaacctccaattccattctaacaccacaggattaattttagcttttccttttccatatttgtaactctctctgttgacagtgagaaacctgaccctcattatctgtaatgcatttgcctatttgaacaatactagaatatagtttcaaaatcctccatccataacactattaaaaccaatcctatggctgggctcagcccactgcaacctctgcctcctggactcaagccagcctcccactttagcctcccgagtagccagggctacaggcacacaccaccatgcccagctaatttttgtattttttgtagagactgggtctcactgtgttgcccagacaggtcttgaactctgagctcaagtgatccatccaactcagcctcccaaagtgctaggattacaggtgtgagccaccatgcctggcctctcctagtaaatttttagaagtggtgttgttaggtcaaaaggcaaacatgtatgtcattttttagagatttttaaatttctttccataagggttgtaccagtttgcatttccatcacagtgtatgagaatgcctgtttccccacaaccttgccaaaagaatgtcacagttttaaatttttaccaatctgagaggtgagaaatagtatcttgaaattgttttaacggacatctttcaaattgaaaatgaggttgaacatcgtatcatatgattaaggaccttttttttttttttttttttttttgagatggagtctccctctgtcacctaggctggagtgcaatggcacgattttggctcactgcaacttccgccttctgggttcaagcgattctcctgcttcagcctcccaagcagctgggactccaggcgcgagtcaccatgcccgctaatttttgtatttttagtagagacagggttttaccagattggccaggctggtctcgaactccttaccttgtgatcctcccgcctcggcctcccaaagtgctgagattacaggcatgagccaccacgcctggcctaaggaccatttttatataattttttttttgagacagagtcttgctttgtcacccaggctggagtgcaatggtgcaatcttggctcactgcagcctccacttccctggttcaagtgattctcctgcctcagcctcccgagtagctggttccacaggtgcgtgcctggctagtatttgtattatataatttttttgtgaattgtctcttcatggttttttgcccattttttggtccctttcttatcaatttttgtgagttcttcgtatttatattaggcctttatttgtgatatacattgcaaatgttttctcctagtttgtcagtttttttaacctcatgtataatttttctggccatgcagtttaaaaaattactaggtagtcaaatttatcaatcatttattttattaaatctggattttgaatcagagataaacttttcctggccaggtgtggtgtcttacacctgtaatcccagcactctgagaggctgaggtgggggatcacctgaggtcagaagttcaagaccagcctggccaacatggtgaaaccctgtctctactaaaaatacaaaaattagctgggcgtggtggctgatgcctgtagtcccagctactcaggagactgaggctggagaattgcttgaacctgggaggcggaggttgcagtgagcagagatcgtgccgctgcactccagcctgggtgacagagcaagactctgtctcaaaaacaaaacgacaaaaaacaacaacagaaaagcctttcctgatagctaggtcattgaggaattcactcatgttttcttctagtacctgatttcatttttctgcacttagattcctgactcatatggagtttatttttgtatctgatgtgaggcatagatctaatttattattttccaaatggctaactagctgtctctaaaccctttattaaaaattattggccaagtgcggtagctcacacctgtaatcccagcagtttggaaggctgaggcaggattgcttgaggccaggaattcaaaaccagcccagacaacatagcaagaccctgtctctacaagaaaatattggtcaggtgtggtggctcacgcctataatcccagcactttgggaggctgaggcaggtggatcatgaggtcaggagatagagaccatcctggccaacatggtgaaaccctcgtctctactaaaatacaaaaaattagctgggtgtggtggcgcatgcctgtagtaccagctactcaggaggctgaggcaggggaatcatttgaacccaggaggtggaggttgcagtgagctgagatcacgccattgaactccagcctggcgacagagcaagactccatctcaaaaaaaaaaggaaaaagaaaatattttaaaaattagctgggcatggtggcatgtgccttgtagtctcagctacttgagaggctgagttaggaggattgcttgagcctaggagttcaatactgcagtgagctatgaccgcaccattgcactccagcctgggcaacagagtgagaccctgtttctattaaaaaaaaaaaatcggctgggcgcggtggctcacgcctgtaatcctagcactttgggaggccgaggcgagcggatcacctgaggtcaggagttcaagaccagcctgaccaacatggaaaaaccctgtctctgctaaaaatacaaaattagccagacatggaggcacatgtctgtaatcccagctactcgggaggctgaggcaggagaatcgcttgaacctgggagacggaggttgcagtgagctgagatccctccattgcactccagcctgggcaacaagagtaaaaactccgtttcgccaggtgcggtggctcacacctgtaatcccagcactttgggaggccgaggtgggtggatcacaaggtcaggagtttgagacaagcctggccgacatggtgaaaccccatctctactaaaatacaaaaaattagcctggcatggtggtgtgcgcctgtaatcccagctacttgggaggctgaggcaggggaatcacttgaacctgggaggaggaggttgcagtgagccgagatggtgccactgcactccagcctggcaacagagcgagactctatctcaaaatcaatcaatcaatcaatcaatctttgaactagtgatttgagatttcacctttatcacattctagattgtatcttattttcatttatttatttgaaatatagacaagtctccctgtgctgcccaggctgatttcaaactcctggctgggctcgagcaagtctcccgccttggcctcccaaactgctgggattacagacgtgagccaccatacctgacctaggttttattttttagttttattttttcctgcatccagctaatttgatttgatttgtagagacggggtcttgctatgttacctaggctggtctcgaactcctgggctcaagtgatcctcctgccttggcctcccaaagtgttgggattaccagcatgagccacggtgcccagccccacgttctagatttctatggatagagtatgcttaaggatgagtatgtttctggatgttcgactcggctttcctggtctgttgtctgtctgtgtacagcgtcacattgttttaatgatagaggctttagcgtacatagctgggaaggctaatgttctcttttagtttttctttccagtggtttcctggcaattcttgcatgtttgtttttccatatgaactttagtgtcaacatgcctaggtctataaaaaagcttggtggtaattttattgggattatgacacttcaacaaattaactgggagaatggacatatttttgatgttgagtcattttatccaaggataagaaacgttttcctatttgctcaagtctattattgtatctttcttgactgctgcaatgtattctcttataattttttctattggtatcttattttatgtatttgtaatatcttatttttcttgagtaaattagttaatggcttgccggttttctcaaaacaaatatctagggatttgatttatgaaattattaggcctattatttttcttttttttgagatggagtctcactctgtcgcccaggctggagtgcagtggcgtgatctcagctcactgcaacctccacctcctgggttcaagtgattctcctgcctcagcctccccagtagctggggttacaggtgcacgccaccatgcccggctaatttttttatatttttagtagagacggggtttcaccatgttagccaggctggtctcgaactcctgacctcatgatccgactgcctcagcctcccaaagtgctgggattacaggtgtgagccaccgtgcctggcctttttttttttttttttgagacagagtcttgctctgtcacccaggctggagtgcagtggtgcgatctcggctcactgaaagctccacctcccgggttcacgccatcctcctgcctcagcctcccgagtagctgggactacaggtgtacactgccacgcccagctaattttttgtatttagtagagacagggtttcaccgcgttcgccaggatggtctcgatctcctgaccttgtgatccgcctgcctcagcctcccaaagtgctggtattacgggcgtgagccactgcgcccggccaggcctattatttttctattgtggttcattaatttctgcttttttctcttaaaaagtttgcttacgtttttgtctggtttactttgctgttctcttgctagcttttttttttttcagatagggtcttgctctgttgcccaggctggagtgcagtggcacagtcatagctcactgcagccttgaactcctgggctcaagcaatcctcttcttgcttcagcctcccacgtagctaggatcagaggtacatgccaccatgtccggctaatttttttttttcgagacagagtcttgttctgtcgctcaggcggtagtgcagtggtgcaatcccggctcactgcaacctccacctccacctcccaggttcaagcaattctacctcagtctcctgagtagctgggattataggcgcacaccaacatgtctggctaatttttgtatttttagtagagacagggtttcaccacgttggccaggctggtcttaaactcctgacttcatgatccgcccgccttggcctcccaaagtgctgagattacaggtgtgagccacagcacctagtgaaggtgtggtttttttgtgtaggttttactgttgttagtgttgttctgtattgtttgtagaggatacgtggggagatttggataaaagcaactatcattattatcctcatcagacttgtaggtctaactttttaattttttaatttttaatttaaatttttttcttggtcttttatcattaattaattttttcgagacagggtctcactctgttgcccaggctggagtgtggtgacatgatcacggctcactgcagccttaacctcccaggcgcaagtgatcctcctctcttagcctcccgagtagctgggactccaggcatgtgccaccatgcccagctaattttttgtagagagagggttttgccatattgcccaggctggtcttgaactgctgagctcaagtgatccacccggcttgggcatgagccacctcccctggtctggtccaactttttaaaagcattattctgcctgttgggtggagaatagactgtaggtgggcaaagaatgaaggaaactagtgggttcaggagctcgagctagaagtggtgagaagggtttggatttggggtctatgctgaaggtagagccgacaagatttgctaggattggatgggtagggtgaggaagtggggacagcaagaatgactggaggggtaagtggactctcaccagctgtgtctcgtgaaggggcgtggctgggctatgagctatgctcctgagcacagacggctgttctctttcaaggttacaagcctgatgaagggaaacgaggggatgcctgtgaaggtgacagtgggggaccctttgtcatgaaggtaagcttctctaaagcccagggcctggtgaacacatcttctgggggtggggagaaactctagtatctagaaacagttgcctggcaggggaatactgatgtgaccttgaacttgactctattggaaacctcatctttcttcttcagagcccctttaacaaccgctggtatcaaatgggcatcgtctcatggggtgaaggctgtgaccgggatgggaaatatggcttctacacacatgtgttccgcctgaagaagtggatacagaaggtcattgatcagtttggagagtagggggccactcatattctgggctcctggaaccaatcccgtgaaagaattatttttgtgtttctaaaactatggttcccaataaaagtgactctcagcga

SEQ ID NO: 578 - DNA, 17711 bp, Homo sapiens; identical to SEQ ID NO: 313
  source 1..17711: mol_type = other DNA

SEQ ID NO: 579 - DNA, 32744 bp, Homo sapiens; identical to SEQ ID NO: 409
  source 1..32744: mol_type = other DNA

SEQ ID NO: 580 - DNA, 32744 bp, Homo sapiens; identical to SEQ ID NO: 473
  source 1..32744: mol_type = other DNA

SEQ ID NO: 581 - DNA, 20782 bp, Homo sapiens; identical to SEQ ID NO: 99
  source 1..20782: mol_type = other DNA

SEQ ID NO: 582 - DNA, 17999 bp, Homo sapiens
  source 1..17999: mol_type = other DNA
ggctgctgcagcgcagtagctgctggaggctggcgaggcccggaggcggtgcaggaagcctccgaccacgcgggctcctgatcgcgggcgcccacagcgcggacatggcgggctggtggccggcgttgtcgcgcacggcccggcgccacccgtggcccaccaacgtgctgctctacgttgctcgagcaacgtagctctacgctctacgagcgtgccgtagctcgctcgtctccgccggggacgtgctgcagcaacggctgcagggccgctaggccgactggcgccagacgcggcgcgtggccacgttggtggtgaccttccacgccaacttcaactacgtgtggctgggcctgctggagcgcgcgctcccgggccgagcgccgcgcgccatgctggccaagttgctgtgcgaccaggtggtcggtgcgcccatcgcggtctcggccttctacgccggtgaggggccggggggggaacctggggggtgggaccagtattgggggactggaggcagggacttggggatcaagcggctggagggagggcgctgcaggagcctggggacccgggcaggagccggggctctgagaccggagctgcttcagaggcctgaagggccagggcaaaggctggaggctggggtgtttgattgcgagaagttgcaggaggcactggctggggagccgagaaattggggagccagaggtacagcaggtcaggaatttagaggactagggtcggggctcagactctggggttgggtgtaggccaaggctggaggtaggcagggctgcggaggtctttgccccctgaaaaaggcccacgggaaaataaaggagatcccagttcaaggccatagcagctgcaatgaccgtgaaccaatcgtgggacagggaaggaaccgacctgctgttcagaaaatccacgcctggggccccggggccaacacaggaacaaaatgcaaggggacccgtgaccctggggggcagagcaggtggaatctgaggttgggcctggatcttcagcaaattcatgcccaggggcctagtcctgctttggtaacaagattttcccctggggtctcacggaaaacatcaagggaccttggatccttgccatagaggactatatacctgtgagggttcagggaaccctctccttagaaaatccgacccgggcctggggtgtgggggacaggggcttgactgtggaaaccttctctactgcgtacaataagaacaatggaaatgttacctgaaaaataccggggttcattcccttaacgagtcacaaatgactccaccaagaggcgggttttgatcaatgggagttttacttggcacaagaaaggaagacactgggcatattctcccaagtagtgtgtcccccagagaaagagacaggagggttttatggggtgatggagaaaggagagggtgcatgattgcatgtagagtaggggtcccagtgagtcatgatgctagcgcataggttgcataggttatagtcatgaagctatagcttctcccggggtgaagactttagcatggtaatgaggagagttaacttgggttcatctgtaagtaacctggggtcatttaggagctgatttaaacaaacagggtgacctcattccacccagggctggggaagaacaggttgaggtcaggaggctgtaaaacaggctgatcactcaagttggttaaattcttgtaatctttggagatcctccatctgctcacaggagggtccctgtggcctctatcatcattgcaatttctatagccttgaaggggatggggtgggtaactggggagaaaatctctatgggtcttaagcctgacggggtcagtgggtcaggagaacagacagccggggagctagggcctcctgttttatcagaaggtctgtgcctggtcccggcgtgtgatttgcagactagatttgcaaacagcttcctagcaactgttaaagaagtcttgtacagcggtgaaggggtaggggaccagaatgctatttaatcctcaaaaaactagtgagattgttctctttttcttttcttcttcttcttcttcttcttttttttttttttttttttttttttgagacagagtcttgttttattgcccagcctggagtgtgcagtggcctgatctcagctcattgaaacctccatcttcaggttcaagcgatcctcctgcctcagcctaccaagtagctggcattacagatgcacaccaccatgcccggctaatttttgcatttttaatggagacaaagtttcaccatgtttgccagggtcgtctcgaactcctgaactcaagtaatctgcccatcatggcctcccaaagtgctgggatcacagacgtgagccctcgcacctgagattgttcttattactctcatgttacaaatgaggaaacaactagtgaaattagtgaaattgttctctttttcttttctttttttttttgggagacagagtctcgctttatcatcctggctggaatgtgcattggcccgatctcagctcactgcaacctccactttctgggttcaagtgatccttctgcctcagcttctcgagaagctgggattacaggcatgcgccaccacacccagctaattttgtatttttagtagagacggggtttctccgtgttggtcaggctggtctcgaactcctgacctcaggtgatccgctcgcctcaacttcccaaagtgctgggattacaggcatgagccaccgtgcccagcccactagctttttttaaaagatagaaattaaaatttcaaaatgtccaaatgttcaacttttcacaaaatgtttggaaggtagagaaaagtaaccaatagacccactattgtaactggattgtttttgtgaattgttatagtttttgaaaaaataattgttctgctataacttttatattctgctattctcacatcatatttatcattcctttaaaattttctagttttagagtggagactatgttcttttttttttttttttttttgagacagggtcttgctatgttgtccagactggagtgcagtggcatgatcacagctcactgtagcctccacctcccaggctcaagcaatcctcccacctcagcctcctgagtaactatgactacagacacaccaccacacctggctaatttttgtattttttatagagatgaggttttgccctgttgcccaggctggtctcttaactcctggactcaagcaatctgcctgcctcggcctcccaaagtgctgggattacaggcttgagccacggcacctgtctatgttctcttttcactgtaggatcagagggtcatattgatggatgatagtgatggttactttgcattttggaatggtaaacttaaacatgaactgttatacagtactctactgaatcttttaaaattcttttggtgtttttgcaaataggtatgagcattctccagggaaaggatgacatatttttggacctgaaacagaaattctggaacacctatatggtaagacaggcgtttgaaaatgttatcagtatctttttgtgtgtgtatatacacacacacacacacacaatatacaatacaatatatatacatatacaatcagtaactttttgtgtatatatgtgtatatgtatatatatgtacatagatccacaaaaatatatactttctgtgtacatatttataaagatttaaaatgttttaattgacacatatatgtatgtattttcagaatacatgtgatgatttgatacatttgtataatcatatcaggattctttgtgtgtgtgtgtgtgtctatatatatatatgtatatatatattttttaataaaattttttttgagacagggtctcattctgtcacccaggctggaatgcagtggcatggtcatggctcactgcagcctggacctcctgagctcaagcgatcctcccacctcatccttctgagtagctgagactacaggcatgtgccaccacacccagctaattatttttaaattttttgatagagacagagtctcactatgtagcacaggctggcctcaaactcctgtgctccagttattctcccacctcaacattaagtacatttttattaaactattcctaaattagagctccagtttggttggcagaagggtccaatattttgacagagaaatcttaaagttattttgatagatgtatgaggagaggctttaagagtgtctatacttctcatgaattggaaagaaatactttctctgggccgggcacggtggctcacgcctctaatcccaacacctgggaggctgaggcaggcagatcacttgatgtcaggagtttgaaaccagcctggccaatatggtgaaaccctgtctctactaaaaatacaaaaattagctgggcacggtggtgtatgtctgtaatcccagctactcagtaggctgaggcaggagaatcacttgaatctgaagacaggttgcagtgagccaagatctcaccactgcactccagcctgggcaacagagcaagactccatctcaaaaagaaaaaaagaaatgaaataatatctctgaattttagtccatgttctcaatgatttctgactttattatattaactcttattaatgatcagaatttattttgtaaattttgcagccaaagggacaatttattttgtaaatttgggattctatttgcaaaataaggatggtagactgtgagtggcttaatggaatcattcccacattcagagccaatgttttcaggtgagcattctgcggagtcctggtgaaaagaactttaacatcacaaaggtattgatagtgaaggagaaggtttccaagggttactccaaggttcaaaacaaatcagcggttttactgtttgctcggcacaaatatatatagtccagtccagtgcaaaatttaggccgggcacggtggctcacgcctgtaatcccaacactttgggaggtggaggcgggtggatcacaaggtcgggagatcgagaccatcctggctaacatggtgaaaccctgtctccactaaaaataaaaaaattagcagggcatggtggtacgagcctgtagttccagctacttgggaggctgaggcaggagaatcacttgaacccggaaggcggaggttgcactaagccgatatcacgccactgcactccagcctgggcgacagagcgagactctgtctcaaaaaaaaaaaaaaaaaaaaaaaagagcgggaagtagccggctcacacttgtaatcccagcattttgggaggctgaggcaagaggatcggtagagctcagcagtttcagaccagcctgcgcaacacagtgagaccccatctctacaaaaataaaataaattagctgggcatagtggcaagcgtctgttgtcccagctgctcaggaagctgagatgggaggattgcaagcctgggaggtcaaggctgcaataagctgtgattgcaccgctgcacaccagcctgagtgacagagtgaggccctggttcaaaaaaaaaaaaaaagagcaggaagtagaattgggaaagaaagaagcttcaggcagggatttgtaaatgaacaaaaccgcaggaatatttgcatactgttttaaaaaacagtggttacaatgagtgagtctcatctaccctcaggaaaagaaagagggtataccagcagtctaaagcccagcccatttggagattttttgggaagatttcttgtgataagaaattgtcggccgggcacgacaactcacacctgtaatcccagcactttggcaggcggatcactaggtcaagagattgagaccatcctggccaacttggtgaaaccccgtcactactaaaaatacaaaaattagccaggcatggtggcgggtgcctgtaatcccagctactcaggagactgaggcaggacaattgctggaacccgggaggcggaggttgcagtgagctgagatcgtgccactgcactccagcctggcaacagagggagactccgtcacaaaaagaaaaaaaaaaagaaaagaaaagaaactgtcttccaggtgctgtcctaggtgttagtggaagatacccaaaaaaccatataaaacagagattctgtcctaaagggacttagagtctagtgggatagatagataaatagacaagtcattaactagagttcgatgagaaatgctctcagagcccatgggtactcagcacagcgaggaggtgtgggagtggggatcaaggaagtcttgctggggccaggcaccagtggctcatgcctgtaatgctagcactttgggaggccaaggtgggtagattgcttgagctcaggaatttgagaccagcctgggcaatatgacgatgaaacctcatctccacaaatacaaaaatgagctggtcatggtggctcacacctgtagtcccagctactcaggaggctgaggtgggaggatctcctgagcccaggaggtcaagactgcagtaagctatgattgtaccactgcactccagcctgggtaacacagcgagaccctgtctcaaaataaaaaataaaaaataaaaaaaaagatctggagttaggcacatactgggggacaggtcattccaggggcagaagagctgagtagagttgacaatgtgtaaagcaccacggtatgcccagaggggagaaaccacaggcagtttggtgttcacagagtatttgttgagcaacttggaatgagtttggatcctggagactgttgaacacccggagctgaggatcttgcacttcacggttaggtaattgcagcagaggaaaccagagtggggggttattgtagccaagttcacataagaaataatgaagtacgtcgggtgtggtggctcatgcctgtaatcctaacactttgggagggtgaggcgagaggatcccttgaggttaggagttcgagaccagcttgggcaacatagcaagaccctgtctgtatttaaaaaaataaaactggcctggcatggtggctcacacctgtaatctcaccactttgagaggccgaggtgagcagatcacttgaggtcaggagttcgagaccagccagaccaaaatggtgaaacccagtctctactaaaaatacaaaaaattagccaggcatggtggcgcacgcctgtaatcccagctactcaagaggctgagtcaggagaattgtgggcggcaagccacccaggcaccgaggcaagagacagaggacacgatctgttccagtataataaaatataaaacaagaatagttataccagatatagatcttagatatgattatatatgaatatcattaatcattagtttgtagcaattactttttcttccaatattataataaccctcgctcaataatcatagcctaggaaaaaccaggccatacacagataggagctgaagggacatagtgaggtgtgaccggaagacaggagtgcgagccttctgttatgcctggacagggccaccagagggctccttggtctagcggtgacaccagcatctgggaagatgcccgttaccaggcggatcgtggtccagcgtctccctgtgatgctgtgcttcagtggtcacactcctagtccaccttcatgtttcatcctgtacacctgactctgccttctagatagcagtggtaaattagtgaaaatactaatagtccctgatatgcagaaataatggcataagctgtctttctctttgtctcctctccctctctgcctcggctgccaggcagggaagggccccctgtccagtggacacgtgacccacgtgaccttacctatcattggaggtgactcacattctttaccctgacccttcagccttgtatccaataaataacagcgcagcccgacgttcggggccactaccagtctctgcatattggtggtagtggtcacccgggcccaactgcctgtgttgcccaggcttcctgtgttggccgtgctgtcaccaaggtcacagcatcctgagaacatggttttctccttgactaacaaggcctcggggtctgtctcggggttggccttccaccgggtcagcgggatgatccggcgcaagctcacggtgtgtctcctggtggtagaggggcttgtgtcaacctgtggccgggtggggatgctccttcccagctggtaggctgcccccaggctccatgccctgccctggcctggacactcacgctttgccttcttcatcaatgtcatctacctcatacctgtggacaaaaggaggaaaatgcaggatgcagccaggggcacagtccctgtaggggagtgtggaggacaggggcagggcaaggacccggtgctccctgcacagccggccccgcccacagcacgctctgtggagtttttctcctgctgtgcagatgagaagcagagtggcagcccaggcaggtgcagtgaccagagagcagccctggggctgttggaggagcccctgggagcctccatctcccgagtgagcccagcaggactgtgacccgttcggccaggtgtcctacaggggctgctgggctcagctacagatgggcgagaccgcagcatagtgggcgcccagcgggaagaaccagggagggacaaagtgagtttgcaggtggtggagaggctctcttcttgatgtcggtgctgaaccagaagtgtgtttaaggagaatttcctaaaattcaaagagttccacgggagtcgcggctaggccggggcgcttcttcagcatctacctgctctacggcctgaacccccgtcatcagggccacgtttatatggggttcactgtcagccctgcttgtcaggtccagcagcacaatgggggccacacaaaaggcagggcccaggcctggcgcggtggctcaagcctgtaaacccaacacattgggaggccaaagcggttggatcacttgaggtcaggagttcgagaccagcctgaccaacatggtgaaaccccgtctgtaatagaaatacaaaaattagtcgggcatggtggcacgtgcctgtaattacagctactcaaaaggctgaggcgggagaattgcttgaaagatggggcagggggcagcggcagaggttgcagtgagccaaatcgggccattgcactcctggtgagaccggaagggtctctgtgccaggaggaaggcttcctggaggaggcggaccccgctgggcacaagcctgatgagagggaagggcatgcctgtgacatgggtggggagtccagggtggggacgggactgtcacagaggaggagcatgacggggagacagtgccctgggaatcttggcggtggaactccggggaggagctggctggggcggaggtgatgatccaggatgcgggccagcgtaggggtcttggtgggcatgctggggtcggatggagcgcaggagagagaagaggggggacaggtgggtacctgggctggaggcgcggcctgaggtgggcaggtgcagggggcgtgacttcatttaggggcagggcctggggctaggctgaagccggcagtgaggaccccgctctcgggtggaattggaggggacccgcggttgggcgcggcagggctcacagggacacccccgttctcctccccagggagaaagtgctcgtcgtgcacggcttcccgcccgccgtggcaacccttcgggtaaggaaggagaccaggcggcggcaggcgggcaagggcttggggtccgcccccctgcctggagccgccctaactcctccgtatcctgccgctgttggagtgggcctggaaccccctccataggcgcgcctcctactcccgctgcaccccgacctccgccgggacctctatgcgccgcgccgcacgggcgatggccttcgggcctccccggccccagggcaccgcgcaggtccctttgctggcaccaagcccgagcctgagccggacccggggcccaagaggcctgtgcgccctgcgagcccttgagctccaggggaggtccgccccaggcagggcggctcatcccccagaccacttcggatccagctgtttgttgaggagccaggaaacgccctgacacttttgcggccctgtccccgtctctaagatggggatgatagtatttctggccattcctgagcacagcaggacctgccttttccctttgactggaaggttcttctctacacctatcttgataacctgccacctccacagggaggtcttctctatctcccgatttaaaattgcagctctgagaagccgggcatggtggcatatgcctgtagtcccagctacggggggaggctgaggtgggaggatcgcttggtcccaggagttggaggctgcagtgagctctgatcgctccactgcactatagcctgggcaaaagagcaagaaactgtctctaaaaatataaaataaaattgcacctcttgtgtacttccccgtctgcttctttacctgaatacttactatctcaccggctaggtgctttatgactctcgttagtctctcccaccccaacctttgcactacattgcccgagggcagctcttgtcactgctgtagaacaaagtcctgcacagagacgatagccaagaaatagttaataaaataatggaaaacgggtgccttctactgagcacccgctaatagtgagtgagtagaggacttgccctggggacattcagtgacctgctgggtgttgctgagctgtgaggaagttcaggtctggctgcagtggtgaggctgtgactcaatcaatcactgctgatgctcccaggacctgcaccagcttagtcccaggggcaaggattttaaacccccacctccatttcctcatctgtaagatgcaaataacagtcacctctgcctcacgggatggagctgtgtaatgcccggaacagtgcctgctgcatagaggggttgctgccagctgcctctccctccttgtctcttacctgcctgctgcctgggacaggatgaagcggggcccttgtgttgccccaaccctggctgttggctaagagcccacgtgatctgcctgtgagaggagttccttccggaagaaccagggcagcttctgcccctagagggccaatgccctagctgagtgcagtcccccggccccagcctggtccagctttgggaagagggtgcccagttgtgcaatccaggccggggcagccgtgtcctgatcttggtattcagggctgagcctggagggggcttgtgatgcctgactctgtctctctctctggccccatgccttggtagctgtgaggcgtcactgctttgggtgacctgatctggctgtgatggatgagcacgggggaaatagtggaagactcggaattagaagacgtgagtgggctttggccccagcctccctaccccactccctgtcctgggctgcctgtgaccaaccttgtttctgcaggcacactggatagccctgctggagctcagtgtccctaatcccctccagatactggtggcctaggggaggtcatcaaagaccggtgggacatcgacctcagcccgtttccacgcttttttttgttttgttttgtttttttgagaccgagtttcactcttgttgcccaggctggagtgcaatggcgtgatcttggctcaccgcaacctccgcctcccgggttcaagcgattctcctgcctcagcctcccaagtagctgggattacaggcgtgtgccaccaggcttgactaattttctatttttagtagagacaaggtttctccatgttggtcaggctggtctcaaactcccgacttcaggtggtctgcctgcctcggcctcccaaagtgctgggattacaggagtgagccaccgtgccaggccttctccaggctcttggcaccttagccagaaacaatttaaggacaagtgcaaaagtcatgaatgtaggcagatttcctgcagagtaaagggactcactgaagaagaggaacgtgggggtcctcaagagagtgtctcatgccctacaaggtgtggggctgacctttatgggcttcttcaactaaagaggggtatattcatgaagagtccaggaaaaggtaaagatttctcaagaccgtggtgccacaatttacacccaaatacaggtgttcctggagccgtcttggcactggtgggtgtacggtttcatatgttactgatcatacaatgagatcctaggtgaaacctacatcaaatacagcgccatgttgtgtctggttggtcgtagccagcttggtcctcatcctatttttcagggacttattggcccttagcgcatgcagctatttcaagtttccttcttctcctcatgtgaaactgctgcctgggattttgtattcacttgctaccactctattaatctcacattctcgcctcttttctgtgtcaccccgtgtgggtccgacaggttgttactagagtgcaatacaaagtcttagtcaagggaacctcctgagggttgctgagggcaggggtggagctagtagcctgaggacctgccagtcacggggattcctcatgggcacagaggagggaggaggggtccatggccctagcatatgagaagcctctcctctgcctggaattcccatgcctcagcttcccccacactcccacctgtccgcttgcctctgaactcacgcatttcttggaagtcttgggagattcacctttactcagatggttgtttacctgtctcgtgcacagcttgaccttggactttaaagtgaggataaagaacgaggaggatggggggatgccccccttccacggggccctgtggcttccaaacctcggcctcctctggtctcttgtctgtggagcctccttcaaacccagggaaataaaaccacctgccacgggttgtggttcttctaggatcttctatcaatgttctctgaggtccccaggagccatgaagctggggctgactcccagggcaatgggactgcagtgtccttgttctttcttgttctatgcatccatgctctgctccacccctgccccttcactctgcccacacacatccctctagactggccttgtggtcagagcctggagtgcatgggctgctgggggcctgtgggctgcactgggccagaacccctggcaccttcaagactggcctggagccagcaggtaggtgacctttccagggcctgcctatcccagctttctcctccaatccctcccctctcttgcctgggtcaattagagagagcttgtctgttggctgcctggcagggtggagttcaggggcaggtcaggagcccagtgacagctcggaaaaaaaaaaaaaaaaaaaaaaaaaacagaaaaaaaaaacctacaaaaacaaacccaccattgggcctttcccctttcattcttctgttttctacacagcaaactcagtcgtggctttggagatcactttaagcttgtctccagctggcacactaaggagggtaatggagaagctcccccacccccaaccccaccccttccttccggaagcaaatctaagtccagccccggctccagatccctcccacagtggacctaggaaaccctcagctcagagaacaaccctgcattccccacacaacacccacaatcagccactgcgggcgaggagggcacgaggccaggttcccaagagctcaggtgagtgacacagtggaacggcccagggcgccctcaccctgctcagcttgtggctctaacattccagaagctgaggcctctggcatccctgccctttccccatggatatcccatttcagacaaccctggcctgcgtgaatccccctcccttcccttgtttgtttgtttttttccccggggaggccaggtcttgctgtcacccaggctggagtgctgtgggatcctggccactgcagccttgaattcctgggctcaagtgattctcttgcctcagcctctggagtagctaggactacaggccctcatcatcctgcctggttaatgtttaagaatttttttaaagatttttagagatggggtcttgcaatgctgcaccaggttggtctccaactcctggcctcagcctccctagggtctgggattataggtgggagccaccctgcctaggcctgtgcttttgctgagtcatcagagttttgttcattcccacagcagctctggcccctagtagcagctcagttcctcaatgggccgtgtttgtcctggagcccagatggactgtggccaggcaagtggatcacaggcctggctggcctgggcggtttccacatgtgaggggctgaggggctcaaggaggggagcatctccactgggtggaggctgggggtcccagcaggaagtggtgagacaaagggcgctggctggcagggagacagcacaggaaggtcctagagcttcctcagtgcagctggactctcctggagaccttcacacaccctgacatctgggccttgcccgacgagggtgctttcactggtctgcaccatggcccaggccctgggattttgaacagctccgcaggtgaatgaaaggtgaggccaggctggggaaccaccgcattagagcccgacctggttttcagccccagccccgccactgagtggctttgtgagtgcgggcaagtcactcagcctccctaggcctcagtgacttccctgaaagcaagaattccactttcttgctgttgtgatggtggtaagggaacgggcctggctctggcccctgacgcaggaacatggagctgatccaggacacctcccgcccgccactggagtacgtgaagggggtcccgctcatcaagtactttgcagaggcactggggcccctgcagagcttccaggcccggcctgatgacctgctcatcagcacctaccccaagtccggtaagtgaggagggccacccaccctctcccaggtggcagtccccaccttggccagcgaggtcgtgccctcagcctgctcacctcccatctccctccctctccaggcactacctgggtaagccagattctggacatgatctaccagggtggtgacctggagaagtgtcaccgagctcccatcttcatgcgggtgcccttccttgagttcaaagccccagggattccctcaggtgtgtgagtgtgtcctgggtgcaaggggagtggaggaagacagggctggggcttcagctcaccagaccttccctgacccactgctcagggatggagactctgaaagacacaccggccccacgactcctgaagacacacctgcccctggctctgctcccccagactctgttggatcagaaggtcaaggtgaggcagggcacagtgtttcacatccataatcccagcactttgggaggctgaggcaggcagatcacctgaggttgggagtttgagagcaccctgagcaacatagaagaaccttgtctctactaaaaatacaaaattagccgggtgtggtggcgggtgcctgtaatcccagctactccgaagcctgagacaggagaatcacttgaacccgggagaaggaggttgtggtgagccagagatcccaccattgcattccagcctgagcaacaagagcaaaactcacaaaaataaataaataaataaatatataaataaaaataaaactgtggcacctgtggtggctcactgctgtaatgccagcactttgggaggccaaattgggtggatcacttgagctcaggagttacagaccagcccgggaaacatggggagtctccatctctataaaaatgcaaaatatcagcagggcatggtggcatagcgctgtagttccagctactggaaagtctgaggttggaggattgcttgagcctggaaggtcaaggttgcagtgagttattatcactccagtgcactccaacttgggcgacagaaaaaaagaaagaccacggtccttttttttttttttttttttttgagactctctgtctcaaaaataaataaataaaataaaataaaataaaataaatcccacaataaaaagaaaaagcaaaggtccaggtgtggggcatgtgaatccagggaaggaggccctggctcagcccagctttggtcctgttcttctgggaaagtcgcctcacttcctccagccttgtctcatcttctgcggcggggactgtctgcctcttgctctgatgaccaagaacgtaagactcttcagtgtagacctaagaaagctagagggtgggtcctcacaggcccacaaaatttggtggcggtgggatcacggctggtggagcatgccttgctccagattggggtgtgacgcattgatgcagattatattactatagaatatgatggtctcagggaccaggcaggactttggcttctgagcagggttcagctcctgacttggccctaccggtgccgtgagatctcaaacaagtcagcctctaagcctcaggttcctcctttgccaatccaagagatgagctggcctgggacaggctgtgtggtgatggtgctggggttgagtcttctgcccctgcaggtggtctatgttgcccgcaacgcaaaggatgtggcagtttcctactaccacttctaccacatggccaaggtgcaccctgagcctgggacctgggacagcttcctggagaagttcatggtcggagaaggtgggtttgatgggaggaaggaaagtgtggagctaaggggtggtggctacaacgcacagcaaccctgtgttggcaccccttgcctgcttctccagtgtcctacggatcctggtaccagcacgtgcaggagtggtgggagctgagccgcacccaccctgttctctacctcttctatgaagacatgaaggaggtgagaccacgtgcgatgcttccctccatgtgactcctgggggcaggcacctcacagggacccgccaaggccacccagccccctccctgggcagcccccacagcaggaccagattccccatcctgccttcttggcccaggcctccccactaaggccccacctggcagcgggccccacacagctctcatctctcgcacctgagtcagctgcatggggggccacggatcagaaacttagtcctattgctactccctgccaaagggtgtgctacccagggccacagtcacagaagaagaccatcacggtcctcacccataggagccaagcccagctcatgatgggatcacagggcagacagcaattctttttacccccgggactggggccctgggggttgaggagttggctctgcagggtttctaggagaagtggccagatcgcctctgaggttagagaaggggaccccttttacttttcctgaatcagtaatccgagcctccactgaggggccctctgctgctcagaacccgaaaagggagattcaaaagatcctggagtttgtggggcgctccctgccagaggagaccgtggacttcgtggttcagcacacgtcgttcaaggagatgaagaagaaccctatgaccaactacaccaccgtcccccaggagttcatggaccacagcatctcccccttcatgaggaaaggtgggtgctggccagcacgggggtttggggcgggtgggagcagcagctgcagcctccccataggcacttggggcctcccctgggatgagactccagctttgctccctgccttcctcccccaggcatggctggggactggaagaccaccttcaccgtggcgcagaatgagcgcttcgatgcggactatgcggagaagatggcaggctgcagcctcagcttccgctctgagctgtgagaggggctcctggagtcactgcagagggagtgtgcgaatcaaacctgaccaagcggctcaagaataaaatatgaattgagggcccgggacggtaggtcatgtctgtaatcccagcaatttggaggctgaggtgggaggatcatttgagcccaggagttcgagaccaacctgggcaacatagtgagattctgttaaaaaaataaaataaaataaaaccaatttttaaaaagaga

SEQ ID NO: 583 - DNA, 3356 bp, Homo sapiens; identical to SEQ ID NO: 419
  source 1..3356: mol_type = other DNA

SEQ ID NO: 584 - DNA, 12276 bp, Homo sapiens
  source 1..12276: mol_type = other DNA
attgcgtgtgtttcagaaagtctgtataaaattctctgcagtggcagatcatagcaagggatggtttaacaaaatgaaggcactcattgcagcactgcttttgatcacattgcagtattcgtgtgccgtgagtcccactgactgcagtgctgttgagccggaggctgagaaagctctagacctgatcaataaaaggcgacgggatggctaccttttccaattgctgcggattgctgatgcccacttggacagagtggtgaggaattgccaatggcagagctgagttgggagattactcacgggggcaaatgtgactctaccccctaggcttactgctttgcacaatgaatggctttggtcagagttttttgtttggcttctgcggctgctctaaattgttcttttttccttcaaactaatatttgttattagtgtacccgcaactatgattcgatttgtgggtacatataagcatttatgctgagcccagttacatgctaaggactgccagagaaacattagaataagctatgggccttggcctccaggaaataataatacactggcacatacaggcaaacagtgtaagttactaggataaactagagagaaggaaaagttttctcaaccctcctaaggctcctaactgagcctgaaataaaactggtagacaaggccaggcgcggtggctcacgcctgtaatcccagcactttgggaggccaaggcggacggatcatgaggtcaggagttcaagaccagcctggccaacatggtgaaaccctgtctctactaaaaatacaaaaactagctgggcatggtggtgcacgcctgtaatcccagctactcagggggttgaggcagaagaatcgcttgaactcgggaggcagaggttgcagtgagtcgagatcatgccactgcactccagcctgggcaacaaagctagactccatctcaaaaaaaaaaaagaagaagaagaaaacatacaaatttatttaatccaaggtttacctgacactggagtcttcataaatgaagactcagatatccaaagaaactggccacttgcatacttagaattcacaaaggctgtgcagaatgcagaagtgtgatgggacaaaaggctgtaatctaagagtcatagactgaaagaaggacccagcaaggcctctctgtttgagttcttcatggcctctctgtgtggcatttcttgctcccaagtatgggacaggatccctttggaatgcggatctgaggacctactatcaaacagagtaggtcagagaatgtctttatggccagctcctacaaagaaagacacagggggaaggttagattcatattttaggatttatggatgctttcggggagagggattctaccatctgtgactgtcctggagaagagaaattttagtttctatggcttgccttgggggagaaagcagagtaggagaacaaagggcagaaggtcagacagatctggcttctgaggcccttcccattttcttcagttcaaaggactcagcacgccaaaagtaccatactttgagataccatgttctgagccccaacaatagccaagtgaccaaaggagtggtaaatgtactggagcaatttaatgaggggagatctagtaagactggatgggaggaggcttctgctgtgtaatgatgcatgggtaggatttgaacaggtctgggtaaatgtgttcctggtgaattcctggcaccaccacttctaggtgggtatggaatcaggaagaagggtgttagggagccattgaatataagcaggtgggttccagaagttccatgtgggctctggagcaggcatcaggtaggagccaagcctgtgggcttgtcttgaggtgaaacaagcttactgtcttcgcttagattacacgcctacctaaactggactagaggagccgatagacattatagagagacatgaagcctgcctctaagctccccaaataacctactctccctctgatggaaaaactgaaattagggaggccagacaaggagtactacagaggacaatttacccttctgaaagtatcacagagggaggcactgtgggttgcagagaacaggtgtgcaggagtttaggattcaaccagtaattcagtgaccattagtcccatgccaggctcatcaacacatgttagggcataggatgcatcagcacagagctgcctctgagagctagcatagagagcgggtggatggggaggggtcctgatgtgcctggggaaactgaggcaagagacagggacatgaagtagaaagctatttatgtattcaggaatgaaagaacaagggtcagacctgggttagtgggagtcagggcaatgagactgaggaatagacatgagagacgttgccaagaaagaccattcagggcctggtactggatagcaaaagcaaggacaaggaaaacatctcgtaggtttacatgttttaccccagagtctaaggcaatatgttgttagtggtgccactgacaaagacgagggaagtggagagggcagctagtttgtaagagaagagagaggatttagctttgggcaaagcaacatcaaagcagaaaatcccatgatcagtaatagagctgggcaagaggacacaactacaaggacagattggaggccctgatgaggtcgtcatgacttatacttccaggcatgcgtaggtgatgatgcctccgctaaaccaccactgccgtttagtgatagcttcttcaagtttatgggcagaagacaaatcaggaccacttaaaaagatttggaaataactcattgaagctatgtattggaatcaatagatcaaatgacgcaaaggtagagcatctgcaaagacagtgagaggaacaggaattctgtttaagtaataaatatatagctttaatacataaaaaaaaacccgctaggtttccatgtgctactcacatgttgcttttggcattcctcaggaaaatacaactgtatattacttagtcttagatgtgcaagaatcggactgttcggtcctatccaggaaatactggaatgactgtgagccacctgattccagacgtccatctgaaatagtaagtaaagagggcaccttcactctgctcttttcattcttattttccatctactctgttcactcagccaatgcctgggctaacacagtagaagagaaagggcagcttttgccttgagattcatgaagatgatgttaaccttgagcaatactcttgagagtctttcctgggaacccagttcaagacaactcagcagggtgtgtggtcccatcaaagagcataaccagctgtgggtccttgggtaaatcatctaataacatccctccactttggtgttttttgactgtaaaataagaagtgggtttaggaattcatggactctaagggccttccactcttgacagtctacaggtatcagaatctatgaacttgtaattgtgtcctatgaacaatggtcctattttcaggaatggccaaagtaattacttgcagtgaggaattgggtcttgctcagcacctaggatatacactgaggaataagatctggctttgcatgtgggaggtgggtattgacatgccaggctctctgacacaggtggagaacatgaagatgaataagcagagattcaagatttcatttccagaaaatgagaggttcacactcctggaactttcaccactttttcccttgaaaatgtttggggtatggccatgatgctttaaatagtttctcgctggttctcctgaggattttgagtgccaacaggatgcagcacacagaaactgactaagaaaatgcagggtttgagacaagctttgatgaaagaaatgcatttttaaatgaacagtaggaggatgttgcatcacctttttgctctttcatatctgacctgaggaaggcaggatgcaatgactcagcaagtcctcaagagcctctttcttacaggtgatcggacaatgtaaggtaatagctacaagacattcccatgaatctcaggacctcagagtgattgactttaactgcaccacaagttctggtatggtaatctgttaaattgctaattaattcttgattaatacaaattcaatcatacagtggtatttgtctcatctatgtacatatgtattcatatatattcagatgtattcatgtatatctatgatgtacatgaaagaaaagccttcatagactccattattattcattctccagagaatagaattgagacaaatttccctggtactggtacaccttcttttaaagaaattcaacacataaaaatagagatttaggagaggtaggttagcctcattatagatataggctttggagtcaggcttgctttagcttgagtcatcatctgccagttgtatagtcttgggaggaagtaaagtcttgggactatgaagtaaaggttatgacactttctatttaagacaaaataattgatgctcaaagaagttaaatgacttggcctcaagaacaaagccaagatattgtgaagatgtgacacaatcccaggagtattaactctaaattccacagcttttttatttatttatttttatttttgagacagagtgtcgctcttgctacccaggctggagtgcaatagtgtgatctcgggtcactgcaacctccacctcccgggttcaagcaattctcctgtctcagcctcccaagtagctaggattacaggcatatgccaccacatccaacaaattttgtatttttagtagagatggagtttctccatgttggtcaggctggcctcaaactcttgacctcaggtgatctgcccaccttgacctcccaaagtgctgggattacaggtgtgagccaccacgcccagcctccatacccttttaatttacattttcaaatagaattatcacaggattcctttttaaaatagcaaatccaaatatgatattatatacaaaaatgcaagatactgccacaggagtttgcattgaagaaaggatgatctgtatcttctcctctctctgggcaaaactctatgttaatgctctgtcttcccccttggcaacaacaggaagaacttattaaaatattagtggcctggtgcggtggctcacatctataatcccagcactttgggaggttgaggccagagggttgcttgagcccaggagtttgagactagcctgggcaatgtgactcaaccccatctctattatttaatatatatgttaatatatatatcatattaatacctaaatatatgattatataatataaaaacatatgatatattatataatatataaatatataatagatattatataatagataatatatatttatatattaacgaatgtcatagttgtcatatttatatatatatgttagcactttatcagtggtactggtgaaggcatcatgagtaggggtcacaacatagacatggggatcagaaagactcgaaggaagaatcagcagtttagttcggttgccaaatggctgattgatcttgaagcagttactcagctcttcccaccctcaatttgcccatccttaaaatgaaagttattgtcattcttgccaccaagccaccattaacatttccagccctttactgtgacactgctatcttctttctccagtctcttcagcactggccaataccaaagatagtccggtcctcatagatttctttgaggatactgagcgctacagaaaacaagccaacaaagcccttgagaagtacaaagaggagaatgatgactttgcctctttcagagtggaccgaatcgagagagttgcaagagtggtgagtctccactaaggttcggttggagtctgaaggcccaggctccaacctggcagcaggaactgaatggcataccctctccacctgcctcaattgactagctgccttttaatttgtcacttttgaggccataaaagacaggcagcaggtatttaaaaaatacaaaaaaattgctttcctcaaacacttttttttttttttgaaggatgggtaggggagtagacatctgacagagtagggagaaaatctaaagaggaaacagggaaagacaagaacatatgagggttgtgtcattgcaaatcatccaatactaacattcttgtactatgatggaaaactgaagttcagagaaattacctcaccacacccagtaatgtgcctatagttagatggttccctgctctctctacaaggacccaagtactttcacccagagctgtcttgtagagcaactggttgacatttgctatgcattcagaaaatgcagcgttaaatagattgtgttgcatacaagtaaggaaatgagtaccatgcagttgctcaaagaatgtttggacccatgcgcactggagtttgaaaacatattggtataggaaaatgcaggttatagaacagtacttagactatggacccatttatatgaaacacttagatctccctgtgtatgtgtaacacatctaggaaaacactcgaagaggaaacacatcaaataaatgagaatgaaaactctgggaagaagttggagtgcaggagaggtgatttttcacactctactttatcatatatttattatttgaaccttttcagtgaactggtattcaccttatcacttaggtgatacatttttaaaaggcagaaaccattttaaaaaatgacacatactggtgattttgaattctcatactgccttaaaaaatattgaatggtagttatctactgcttttttttcctttttctttgtctgttcttgaaactattttgatcccatctgttctagagaggaggggaaggaactggttacttcgtggacttctctgtgcggaactgccccagacaccatttccccagacaccccaatgtgagtataagaaatgtctgtgatcgttgactagagtcacagagaaaaaagaaagagaagaaggagaaggagaaggagaaggagaggaaggagaagaaggagaagaggaatgagaaggagaaaatgaggaggaggagaaggaggaagaaatgtctgtgaaatacaaagtatcatctgggaagcacttagtacctgccaggcactcttctaagtgatttacacatcagataacttattgttttgttttgtttttgagatggagtttcgctcttgttgcccaggttggagtgcaatggcacagtgtcggctcactgcaacctccgcctcccgggttcaggcgattctcctgcctcagcctccggagtaactgggattacaggcatgcaccaccacgcccagctaatttttgtatttttagtagagatggggtttcaccatgttgatcaggttggtctcaaactccttatctcaggtgtccacccacttcggctgggattacaaatcaaagtgctggggttacaggcgcaagccaccatgcccagcctatgataacttattaaccctcacactaccatatgagatagataccatttttaatcccaaattagcagataggggaactgaggcacagagaacataagcgaaccataagaacatgattttataatatacatgatatatacctaaacttaaaactaagtttctaactgattaggattaaaggcttagttagaactatagcagttcgtactaagaccctacgccaagtggttttattaattccacatcatcacactcacaggaatcccacttgacaaatgaggaggtaactgaaaatcagcaaaggaaaggtcttgccgatgttcacaaccaagctgagattaaaacttagttattctcatacaaagtccagtgggatttttcctctaatcatttacaaatagattcccatgtacctgccagaagacattattaataccacctggcatttgcatggtgacctacagttaaagaaacacctccacatctgttattgccaggagagcctcatgaaaatcctgctgacaaggaaaagcaagtatctgcctacatttcctgtgacaaggggacctgaaattaaaaccacttacctaaaggcacttagctagagagtgttaggaaatggaattttaattatgatgccaagtccaggatttttctgaggtttaacaacacattctccctggtcaaaagggagaaaccatccattagtacctttgttagctcttctaatgtccacactgaaccaggtctagaaaccttcttagcgcccaccagaaaagacacctccctcccctactcctatggccaacaaacccttcatgatcttggtgtggataatgtaaacccagagttgaagcaccagagctgaagaggaggctcaggggtaagtgttttacagcatcctcttgtttaattaatccctcccacaacctgtgagtacatagtattatccccattttacaatggctgactttcagaaatcttttgtaactttcccaaactcagacaactaggaaatggagaagccaggattaacataggtctctctgattcccaaactgtactcagaacctcaatgcttagcaatttcttctagcagacagccgtcctcttgtcctagtcgatctttcacaggtgggtttaggagcatctggagcacaggagtggcagccagttgtagccctggcacttgggtggagtcagcagacacttgccttgacaatgtccatgaaaacccatctttatgctatacagatgccctcctgtccaacactttcctccaagggaccagctgaagttgtaaaaatccctctttgacaccattcctcattgtcctaggcacaggcaactgaggtctccagtgcagaagggttggcctaaaggcaaggcagcaatgatgtggttttcctcatcatttccatcacccatggggaagcccagtgctggtgcctgctcatgaaaaaaaccacagcaactttagtgatacccttcaccacctgcactttccccaaagtgttaacaaggaaagattgctgaacgactggtgggaatatctgatcatattaccctgatttttctaaagcacttcttccttttctgaatgtctggaagctaactctggctggtcatcttcacaccacctggacacacacactaacagctcctcattcctttgtaggtctttggattctgcagagcagatttgttctatgatgtagaagccttggacttggaaagcccgaaaaaccttgtcataaactgtgaagtcttcgaccctcaggtgggttgtctaagcagactttgtcatggcagtgccagattaagtgacatacgtacacaaatagtgttgttgcttcctaaagctctatgagtgggtgtgtgtgtgtgtgtgtgtgtgtgagagagagagagagagagagagacagagacagagacagagagagggagacagggagagagagaaagagagagacagacagacatgcaagaaaaaagatacagagagtatcccacaactggggaaaggagtgcaattgccagattacacaaaaagtatgaaaacttttccaagaattgaagaggggtaacaattggcagaaaattaaaatcatgtccaattcaaccaaacttgaaggaatttgaaaatgctctttgtagtcgggactctagtgctgagacttagtcattcctaagcttatattattgggcatagaatctaagaggaatatatcagcctcaaatttattatgtaaatgtatataaaataagatgcaaaaccatattttgcatctgtctcagaaatctttggtctattttttacatgagtacaaagatttgcttcacgaaatttttcatatcagaaacaaaacttaaaataatccaaacatccaatcccaagttaaaaaaaagaaaaaggaacaaagggcaggattgtcaccatgaacatggctctgtctttttttttttttttttttttgagaaggagttttgctcttattgcccaggctggaatacaatggtgccatctcggctcaccacaacctctgcctcctgggttcaagcgattctcctgcctcagcctcctgagtagctaggattacaggcatgcgccaccatacctggctaattttgcatttttagtagagaaggggtttctccatgttggtcaggttggtctcaaactcctgaccttaggtgatccacctgcctcagcctcccaaagttctgggattacagacatgagccaccgtgcccggcctctgtagctattttttaaaaaattaaactctgaacaaggaagagagagaagaggtcaagtgttcagcctttaggagtaagggatgttgataccatcaagcctcagttaagaatatcagttataaggcactagttttccagtgttggtctacagatgggtgccaggtcataatattgtttcaccactctgtgtagtaaaaatgaaaaaaaaataaggataatgaagttttttatatctaacatttatccatctaaaggacaatcctttactctgatattgtgtttctggctctttcttttttttttaaatcaaaatttcattccaggctgggcatggtggctcatgcctgtaatcccagcactttgggaagctgagatgggtggattacttgaaacaaggagttcaacatggtgaaacctgtctctactaaaaatacaaaaattaggagtctgggcaacagagtaagactatgtctcaaaaaaagaaaaaaaaaaattaggtgggcatggtggcttgggcgtgtagtcccagctacttgggaggctgaggcaggagaattgcttgaacctgagaggtggatgttgcaatgagcagagatcgcaccactgcactccagactgggtgacagagcgagactcagtctcagaaaaaaaaaatagtttcttttgtgaaacaatgatggtggtaaatgatagttattgttaatattttaaatatcaactgggctagataacaatttgagaatcttttttcgtaatactttttaaattgatttgtggaatctatgatctgggagccattggtgtaaatcaagtcaagtatctaacatcttcttttatgttacatgatgataggcacttttctgtgaccttttccaggaacatgagaacatcaatggtgtaccgcctcatttgggacatcccttccactggggtgggcatgagcgttcttctaccaccaagcctccattcaagccccatggatctagagatcatcatcatccccacaagccacacgaacatggacccccacctcctccagatgaaagagatcactcacatggacccccacttccacaaggccctcctccactattgcccatgtcctgctcaagttgtcaacatgccacttttggcacaaatggggcccaaagacattctcataataataattccagtgacctccatccccataagcatcattcccatgaacagcatccccatggacaccatccccatgcacaccatcctcatgaacatgatacccatagacagcatccccatggacaccacccccatggacaccatcctcatggacaccacccccatggacaccatccccatggacaccatccccactgccatgatttccaagactatggaccttgtgacccaccaccccataaccaaggtcactgttgccatggccacggcccaccacctgggcacttaagaaggcgaggcccaggtaaaggaccccgtcccttccattgcagacaaattggatctgtgtaccgactccctcctctaagaaaaggtgaggtgctgccacttcctgaggccaattttcccagcttcccattgccgcaccacaaacatcctctaaagccagacaatcagccctttcctcaatcagtctctgaatcatgtccagggaagttcaagagtgggtttccacaagtttccatgttttttacacatacatttccaaaataaaatgtgattcctttgaagaggaaaatgaataatacattgaattagaaacataaataaaatgaccagtaattgtgaaaattacagttcttttcaacctactttcatactgaagatgcagcaaaatgtgaatgggaaaagagatggcctgagaagagagatcaaatggaaaggagaggaaagaactcagtgctgcctattagtagttaattctgtcactcaccactacatcacttgagacaaatctatgccactcagaatctccttctttcctggacttaactctaattctagagtctctgttactgcttgggctatacctgggcatactaataaagtatggtattgaaacta

SEQ ID NO: 585 - DNA, 32742 bp, Homo sapiens; identical to SEQ ID NO: 352
  source 1..32742: mol_type = other DNA

SEQ ID NO: 586 - DNA, 16703 bp, Homo sapiens; identical to SEQ ID NO: 82
  source 1..16703: mol_type = other DNA

SEQ ID NO: 587 - DNA, 16389 bp, Homo sapiens
  source 1..16389: mol_type = other DNA
cagatggtgctgtcgaccagtgtcaagaccaagtttcatgggttcctggacgctcagccaggggtagtctctgaagggccgcctggcaattgggagcagaagccagtttcccgccatctgctctccgtggaggcagtgctctcgcggctgctgcccgttggggtccagctgaggaaggagcgcggatcccaggctcgttctttgcctgggctgcccctgcggcccctggggcgggtgctgctgcggcgccagctccaagggcggatccaggcgggaggggcctcctcggagaagcggggcgcggtcccaactacgcagaggctggcacgccgaccctccacacctcaccacgcccccatctccgtccgtgtacacacactcacacaaggacgccaaccccacctagatgcaaagcaggattcaaaagaacatctttgcgttttctaccggctccccatcatcgtactagggaggaagaagcgggtgagaaacaaaacttctttccattgtcctgcccgtttctgcggacttgttctgaggccgaggtaggttcacactcctgctcctcctcctcctctctggtagcttcataaggggcgtttaggccggggagtcctttcctagtagaggcagcttgggactccttggggaggagtttgcgggacggggctggagagggaggaatggggagggacgtgaaagtcccgtatttgtatgagttaacgactttacattcccactcaggtttactttgcgcagctgggcacagatgccagcttctattgattagtaggcttggagggggaccacagaatcgccgaacctaagggaagccctaggaggcctgcacttgcccacaactaagaaagctttgctagttattcaggctaatcaccagctttttgaagcaggccttagttttttgcaagcgtaactaacatttggggatcggtgttttctgtttactctcctctgcctcctcacccttaacccaccctcagccagtgttgtgcaattcttagagacacttgccaacagcctcttctctaagccttcctactggaaggttgggatcctccgttttctcgctctgagacagcacgtcaaatgctaatagcagcacatgagtaaagcgcaacatctttattaaaacaatttcagcaccactcagggggctagggaaatctcagatgagccaagaccctccctcgtgacagtaaaaatcttataatcaagtcataatgtaatcagtagaaacccaagggacatcattatctgtggcacaggaccaccttcccagaagcagcctcaggtattcaagacttacttaaccacagagccactaacaagttttgcaagaggataggtttattacatacgcttcaattcaagcaattcttttactgatgacaagcagagtaaaataatttttgaatttatggtaatagtcaatgtaggtttccttcgaacagcaactttcagtggcccctttaaagttagctctgattgtctagaaagtactagtatggaatataaaagttgtgtgggcccggcacggtggctcatgcctgtaatcccagcactttgggaggccgaggtgggtgcatcacaagatcaggagttcgagaccagcctggccaagatggtgaaacctcgtctctactaaaaatacaaaaattagccgggcacggtggtgagcacctgtaaccccagctactcgggaggctgagacaggagactctcttgaacctgggaggcggaggttacagtgaacagagattgcgtcactgcactctagcctgggtgacagagcaagactccgtcttaaaaaaaaaaaaaaaaaaaattgtgtggtgcattggaaagcttccaggccggcgaatgcaatgagttccttgggcaatacatgtctctttctctgttcctcagttggctcttctttaatatgaggggtggacagagtctcagaggcccctcccactcttgttctatgactccatggagtggtacgatgttagtaacaggacatgaggcactctagtaatgtggagatgaactatcgtttggcagagaggatggaaaaaatcattccaggaaaagaggaatggctttagctattgttgaaaacagataatcaggttataagcaggcaagagtaagaggtttgtcaagttattgttggaagcattggtcactgtgactcaaattaaagtagctggataaaaaagtggaccaatgaaggtcagtgaaacctttctttaggagtttttattgaatctgtatttaagcagattctctgtaattctctgtaaacagttattcccggaagaatgccatgaaatacttgggaaagagggaatgggaacaaagagtgagtgggcacaaagcccagagttggttgaaaagcaaatgtttaatttttgtctttgtttggaaatacaggcatgtcagcaggactttgtccccactgtccttcaatcagtagtgttgcctcttcctggagacgtggttcttcttgccacgtgtgcttttccttctttacctgttacttccgttattgaataagttcatgcttatagacctaaagtgttagaataataaagaaatatagaaattatttagtccattcttcccatcatctaattttataattagtcctaagacagaatgatacatatatactctgtatgaaggaggaaagtgctctaacactagggtccttggaaacaggacccgtgcatcccgtgtctgtgtgcagggacattattggcttgagggagagagagaaaaaaatctccaggaaaggggaatgactttcaagttaaagctgtctgaacatttaaaaaatatatgaggttttttgcaattggcgattccttcatttgtattaaaattactgacaaagatgtgatgttccttaatcatagaatataattccttgttgtattttaaacacaaatgactaagtgcttagatgcattctaatgaaatagtaatttttcccccaaaccctacttttcatttcaacaaaacttccttgtgccaagtttaaaagaaaaacataaaactgtctttttgcattgtgggcagattgtgtatcctccaaaggttgtccagtgaaggcccagaggcagagaagggacctaactatattcagaggctgctggttgccccacctcagcactactgcagaactctaaaatcagaggctgctctgtttgtgtgagtcggtgcttgaattggtgcttcaggccatggggctgtgtgtgtgcaggcgcatatgggttgtatgctgtggcagggtaccgcttttcgggactcagaggtggtgttgcttgagctaagcctggaaagacaggtcagttttctccttgcttatgaagggttcaaagtctgactccaccattcatctgctgtttgttcttggagtttcctcatgagcagagcatatttacataatgcctacctcacacagtcctggtgttggttgaatgtagtcatgtatgtgagagcttcacaaaatgaaagattgcactgaatattataattattgtgatttcaagtgcatttgttttactagcaggcagcctgtcttttcttgacaccttctcaagtgcagccagactgaatacttggcagctaggtgggtgacaacagaggattgaggatttttaaaaagataacactgtcctagatccaacaccactgtgggcaaatgctgggggtctgtgaaacagttggtaccctgctgctgtctgatattggaaactatgagatctataaggtgatcctggtgacctttggcccactgtttttacgcaagcaatggatctacagccctgctttgatgatggagataagcaattttgcaactacattacaaggatcagaagattgaatgttcagggttagtctcttgtggacaggtaaagatggaagaaggagaaacccaggaaacatggcaagcctgcttctgggggttagaagctgagaagttgagtgtagggggaggggcagtgtactaatagctgtcacacaaccttctctggaagtgctttcctggctgtatgaaatcgatggaataacgtgcttagcatccgttcatgaaaccaaatgatgtgatacgataaataggatgtgatatgataaatgataaatagtacagtggaaaagcatcctactggaagaccatatcttactctgtgacatcttccaaggcagttcttggagttggcccagggagatcagagatgctatcttatggatccagactattatgtgtgaatagggaaacctcagtcctgccatgaacaagagtaagcaccacagacagcagaaaagggcaacttttggacagaaggccatgtttctcaaactttgtcttccagaacaaatctctaatccattcaggtgggttaatatctaacccaatcatgcccagcgaaaaggtgaatgaccctcctcgtttgttcaagagcagtgtccttggttttcatgtccctgccaggactgggacactatatattaggaacactatataatcagaacctggagaggcctccaggttcacacaactggaacccatctccaggaacaaacagctggaacccatctcccgttgaagggaaactgccagatttttgtaagattcttcctcctgggtaaactattgttcaatttgttttatatattatttctagccatccatccattttaatgaaaccattttcctccctttaaagcctccaggctcaagctcatgaattaaaaagaaaatggatcagattctaaagtttaaaatgaaaacaggtttcttttgggatggcctatgtgtggataaagagaaattagtgagactgggaggaagtggaagtttaggagggatttctaaattgtgataaaatccccaaaggcctgggggagccatttgctgaaggccatcgggagtcctcccccgtcgtccacccctgttacaggcattacacgtggcttaacaaggaaagaaacagtatgtttttagcattgtttccttctaaccttccctgctaatttctcttcttagaaaagttttggatgctctttcaaacaaagtggaacacatcccaagatcaaaagaaggctcactggcaggttgaagggaagaaggaaggaaaagcaataaagggatgaatatgccttgggtgttaggctcttactttgggggattttgccctaggatgtataaaagtgtgaagccacattgatgaaaatgataactatagttactcatcataaactgtcaagttaactccctggtgtgtaaaatttgatgaatcttttgaatactgaacattgcctgtggggagagggagagaataattcttgtgaatactaacagattcatttgatacagaagataaagttactctaaagaacagttggggccaggtgtggtggctcacacctgtaatccccgcactttgggaagccgaggtagccggatcaactgaggtcaggagttcgagaccagcctggccgacatggcgaaaccccgtctctaccaaatacacaaaattagccaagcgtggtggtggccgcctgtaatcccagctacttgggaggctgaggcaggagaattgcctgaacctgggaggtggaggttgcagtgagccaagatagcaccactgcgatctagcctgggcgatagaacaagactctgtctcaaaaaaaaaaaaaaaacaggccgggcgcggtggctcacgcctgtaatcccagcactttgggaggccgaggcgggtggatcatgaggtcaggagatcgagaccatcctggctaacaaggtgaaaccccgtctctactaaaaatacaaaaaattagccgggcgcggtggcgggcgcctgtagtcccagctactcgggaggctgaggcaggagaatggcgtgaacccgggaggcggagcttgcagtgagccgagattgcgccactgcagtccgcagtccggcctgggcgacagagcgagactccgtctcaaaaaaaaaaaaaaaaaaaaaaaaaaagaaaagaaaagaaaaaaaggacagagaacagctgggactaattccactgacaaaaagctgacagacagttacgtgtttgggtacagaaggatatatctataggacttttgccaccagatgtgaggctttgcacccttggcttaggcagattcacttttacaccacaaacgatctgtctcttactggttttctcccaattccattttaccttgctttttgaggaatttagagttgaatatattgagaaagttttgagtgagggagcagatgttagatattggtggttttggtgtacgcttgctgagatttggttcctggatgtcttagggaatcaagattacaggcccccaactaaacttatacaaaatttgtctctgtaactgagggtcactggacctttgctattgaaactagcaaagcctctattatgtttaatgagaaccatgaaacttcagatttttagagctagcaactcttttattttcttgatgaacaaacctaggcctggagagaaaaatgaagtcaattacttaaaaaatattaagggttataataaggcaagcatgttgattcaaggtgaataatatgagttctgtggaatatacaccagtaagaaacactaacaagtaaatacttcattgttcatccacgatcacgtgggtaatggcatgtttggaaatggcacccgtgaaacctgacaacaggtcggtctttattttgtgatatccttatgggtagattctgaactttgtggcttttactttggcacttatatctaatgaggtgtccttggtcttaatatctaatgcagagcgagtttggacagagattctaaacaggttcaccagctcatactcccttctgtgaacagcaatatccccacaagttatacagcattggcacctcctgcaagtacggtatttcctagagaagacattagtaacattcctatccaccactgccacctaacgactcttttaggtactagcagctctggttccgtttcctgatttctgatttctgggattctggcaccaggcagaagaatgttgactgtgtaaggcagacctttgacattagaagtcagtatttgttcattacagagcaagagacttaattgattacaaatcaataaaactttaataagatcttccaaaaaactagaaacaggaaacacacccaggagactgaaaagcatgatgtaaatgtgaagaacgtggcaagtgggtggcttggcagcccagcagctatactggagcagctgcatgagtgaatacttgttactcctttagggctggctctccattctacaatcatgtacctctttcttgataaactcccaagaacacactttcagcatggaatttcagacttttagagatagcaactctctcaagtatggacaaatgtcggtgcggacaaatttgatgcactgctgaagaataccaaataatatgctaaggaattttttcattccacaataatggagtaaatagcagctggaaatgtttgcattaagttcatagattataatttgtaatggaatcaacaccaaatgcaaattagaaagagagcccactttgctcacccagtcacgtcttcccatgtaaccatagaacattggggtcctgtgtctttctagatccacagtcttgctctcagaacaggctagccacaccacaggcctagtgccaggacccatggcctttttttaagctcagactcccttctgtgaacagcaatatccccacaacttgtacaacattggtgcttcctgcaagggctacagaactatttgatacgaaaatgttcattgacttacacacaagagaagcacaaaataaaaaattaataattaatttaatgtctttgaaaatgtaccatttatttttacatttggggtcataagaattgtattacacttaagaatgcaatacaatttgaagatcagatttttctccctttgtgagaatttctcagtatgtgtgatgactaccaagaaatcatagccagtcataaattcagtgagttactcataaacgaacaagaaccacctacttcttggggaggtaggtctgcttcccttcaactcaggatacaactgctttcaactgctttcttcacattagctgactaattagctagaagcctgtcgtaaacaattttatggttgactccttccctgggctcagggttccctagaacagaggtccccaaatcccggtctgtggcctgtccgcctaagctctgcctcctgccagatcagcaggcagcattagattctcataggagctggacgcctattgtgaactgcgcatgtgcgggatccagattgtgcactctttatgagaatctaactaatgcttgatgatctatctgaaccagaacaatttcatcctgaaaccatcccccaccaatccatagaaatactgtcttccacaaaaatgatccctggtgccaaaaatgttagagaccactcccctaaaactctcttcttagctctcacctcctgtattactatctcatctcagtacattgaagcccccatcttttccccatggatgcctcatttcctattagggaggcatttttttattttttgtttttatttttttccgagacggagtctcgctctgtcgccaaggctggagtgcagtggcgcgatctcggctcactgcaagctccgcctcccgggttcacgccattctcctgcctcagcctcccgagtagctgggactacaggcgcccgccactacgcccggctaattttttgtatttttagtagagacggggtttcaccgtggtagccaggatggtctcgatctcctgacctcgtgatccgcccgccttggcctcccaaagtgctgggattacaggcgtgagccaccgcgcccggccgtcatttggtatgtcttaatgtgcctcaggacctagcacagtccctggtacccagtagagacctatgtaatgttcattattcaattaataaatacatgaattaaagagtgagagtggattttgtaatgttacgactgatagagaaatactcagtgattctaagggatggggaagaacggttggagctagaggttgtgctcaggaaactattaaatagacgttccgcaggaagggattgacgaagtgtgaggttaatgaggaagggaaaatagaatataaaatttggtggtggaaaagatctgattcatgatgccgtgtcagagagcaaagctcctgtccttttggcctaatttggtgatgctgttcttgggtctaccacacctccttttgccctccgcaggagcctgtgttggaagagatggtgatgggcctgggcgttttgttgttggtcttcgtgctgggtctgggtctgaccccaccgaccctggctcaggataactccaggtacacacacttcctgacccagcactatgatgccaaaccacagggccgggatgacagatactgtgaaagcatcatgaggagacggggcctgacctcaccctgcaaagacatcaacacatttattcatggcaacaagcgcagcatcaaggccatctgtgaaaacaagaatggaaaccctcacagagaaaacctaagaataagcaagtcttctttccaggtcaccacttgcaagctacatggaggttccccctggcctccatgccagtaccgagccacagcggggttcagaaacgttgttgttgcttgtgaaaatggcttacctgtccacttggatcagtcaattttccgtcgtccgtaaccagcgggcccctggtcaagtgctggctctgctgtccttgccttccatttcccctctgcacccagaacagtggtggcaacattcattgccaagggcccaaagaaagagctacctggaccttttgttttctgtttgacaacatgtttaataaataaaaatgtcttgatatcagtaagaatcagagtcttctcactgattctgggcatattgatctttcccccattttctctacttggctgctccctgagaggactgcataggatagaaatgcctttttcttttcttttcgttttttttttttttttttttgagatggagtctcactctgtcgcccaggcttaagtgcaatggcacaatctcggctcactgcaacctctctctcctgggttcaagtgattctcctgcctcagcctcccaaatagctgagattacaggcatgcaccaccacacctggctaatttttgtgtttttagtagagacagggtttcaccgttttggccaggttggtcttgaactcctgacctcgggagatccgcccaccttggcctctcaaagtgctgggattacaggcatgagccactgagccgggccactttttccttatcagtcagtttttacaagtcattagggaggtagactttacctctctgtgaaggaaagtatggtatgttgatctacagagagagatggaaaaattccagggctcgtagctactaagcagaatttccaagataggcaaattgttttttctgtcaaataataagctaatattacttctacaaatatgagaccttggagagaagtttccaaggaccaagtaccaacataccaacagattattatagtttctctcactcttacacacacacacacacatatacacatatgtaatccagcatgaataccaaaattcattcagggtagccaccttttgtcttaagcgagagataattttgatgtttgaatggaatgctcccaggatattctcttgtcatggttattttatataaaattcaaaaaccaattacattatttcctctgtaatcttttactttatcaactaatgtctggcaagtgtgatgttttggggaagttatagaagattccggccaggcgctgtggctcacgcctgtaatccagcactttgggaagctgaggcggacagatcacgaggtcaagagatcaagaccatcctggacaacatggtgaaaccttgtctctactaaaaatgtgaaaattagctgggcgtggtggcacacacctatagtcccagctactcgggaggctgaggcaggagaatcgcttgaacctaggaggcggaggttgcactgagccgagatcacgccactgcactccagcctgggcgacagagcgagactccatctcaaaaaaaaaaaaaaaagaaagatcccagtttatcccagtttatcccttattcttcctcaattctcaagatttgtttttaagttaacataacttaggttaacacactctttgtaaaatacactgttcaatctacagactcagtggttagcttcctgttaactaatttctgttgacaggtacttggatattttatttagaaagtggttgccaataaattagttataagtcgccagtttcactgccttgtgaacacataattattgtggtctcagtattccctatggtggcttctcctgctcctggtattgccctgaaatgggccaaaagccgtggctccccaatactcaggttatagaacattgtccaggtaccacctaggagagcccagcctcactgaaagtattcaaatttaggaatgggtttgagaagtaggtagctggtatgtgcttagcacaagaatctctcttccttgggttagtctgtttcaaaactgaaaacactgtcattccttaagaaaataggaaaaagtattccaaacctctgtcactagaaaatttgccatattaccaaatctcaaaaacctctcaggaaatgagaaagtcccagtttctggtaaactatttgggcccttttctcaagttctccaaccagtgctatttccttgaggtgaggcaaagttactcaagatcatcgctgccactcaaggccttgatagggcaagtgaaaggcatggaccattattatattgatcacagcataagctgtgaaaacccacatcttctccaaacatctgcttggagcattatcatcgcatagtttgctctggtgttcagggaaatcgctgtttcataggaaatcacatggcagtgggatgggagtgtttcctgacctgccgatggtactggcacctgagcaagcattcctagtcctttttggtctgggcctcttgttctatcacaaccacaagctgtttaaaataaaacgtcaagtcacaggcaggtcattttatcctgcgtgaatcaattgaagaattgaagtcctggtcagctgtgattgttggctttgcaaggaaaaagaaggaacactccaaaatgctaaatgctttgaagaatagtgacatgcaaggaagaaaattccatgcaatttggagaagaaacatttttctaggaatctagtagctgagatattttatagtttaaaaacagacttccaatatcttgagaatacagttagctctacgaaataaagaggagtcaataatatatgcaactctgtagtcattcattattttatccagattgacagaagcagaggaaaccaagaaaaatggaagtggtaaaaaaaaaaaaatgcagtaattgccaatatttactgagcatttaccctgtgctaggccttgttataggcgcttagattgattttcttttcataacatccctaagaggtaggtattacatgctcattttgcttatgaggaaatctgctgagagagattaagtaattttctcatggtcacagcctcagtcttttagaccacggtgtcaaaagaagttcttactgtgagtcagggtggtgcagtggagaaagcgtttggggaaaatcctgacccaaaagtgtgcgttgggatgatgtggagatcattcaattttctcttgtagctacagctttgagatgcacccattggtatccacactggcctgctgtcctcaaatatttctctatgtcttgtttacttgagtagtgcagaaaagctgacgtcctgggtctgctctcgcatgcataggtgaggttttctctgtagctagtcatcttgctaaaccatatttttggtcacaaagaatcaggatgagagaaagtagataaaaccatggaaactcgaggtgccaccggaagagcaaaccaaagtatattgatctgctgaagctataatccaagtactaagtataccttcagaagttgtatgcattgttcttggggcaaaaaggaaatcaaacatctgcccttcctcccacaacctctttacttccctctcttcctaacactgtatctcacatctacagctgcaggcacacagatatgacatacagcttgatatctttatgtgcaaaggcaaaagatggctatggatataggaggtggcatttaaaagaacaatatccatgtttgatactgctttcattatcaataatgaaaaggtagcctttcagcagaacaaagtaaggtacaggtcgtttggaagccatttcagtcattcacacagtgtgatccaccattacgaagcagaatttgaaatcaaaagacaatagtacccatatacatcaaactaggagttcaactggggtcagtccttggactgcacatacagagttgggctgcctgactctcaaaacattgcccttgctaatttgcgttgctcacttcctattgaatcagggatgatttttctttgctgtagtgaatcagccctgctacactgcaagaatcaagccgattcacaattcacatcaattccaggagtgacggccagatggcagcatctggctagtcagttggtgagtgagtccacctccagtcttgattaaactctgctgctgggaagtagcaattctgagcataaatgtctttgatatcctgaatattttgggtgtgggatgagagaggcagtagatagtggaaagagcacagggtgtagactaagataggcctggattcctttctttaatctgtcaatgaaagcaatgaatgttctgaaactacatggcaatgctttttttgttgccactctggcttttttttttaatgctataaaatatatgcctatttttcactgccaagaggtgacaacacaatgatgctgcaaccagagaagacagacagctaccaacaactattgacaagacagaaggaacatcaagaatagatgcaagacaaagcaatgtatctccatggcctagattttttaggttatgcatagaaacagcaaggagaagaagacacaatccaagttttcttttgagaatattgtgctgtttaaatttattttttaaacatttcttagcttttcttattagtcaatttcataagcctgggaaacatctttactctatccatttaattgcatttgttcattagcttactcatttcacttattagttcattcaaacagtagctattatcaactgtcttctaagaactgtaactgggtattctggttttgcttttttttaaaaaatagaattaaaaggatttccaaaaggacctgattttacattagaattagaataatacattttaaattaatgtataacatatattattctagaattagaatagattttaaatcacattagaataatagccacatgacaaaaaagaaaagaaaaataataaaattaatgacaaagaaaaacaatagtcatgtgagaggaaaggcaaagcctaaatattcctctgtcctcttcctccacctagattcccagatgtaaggtattaaaagtagtttgtaaactttctgtgacgtatgctgagtctatccaaactgtcgggaattggagcctcccgggaaccaaacactccccaaagatcatacacctacggagttcccccaagagacacacaactgcagtttcatgtaggttcaccttttctctctttttatactctgtccacacaaacctggcagccacgcagtcagtccctgccctgtgtcattgtactggccacagcaacttctctctgtaaatgagaaaggtcttgctttcagaaaagatcatgtttgcaaactactcactcttgaggaagaagggtgggaaaagtagcagagatgagtggggagatggtgcatataagaaggaggaaagaggagactatggagtcaggatgccggcttgctattctcaacacctttttccagtgcccagttcttaccttatttctcctgccccttgctttcttttctaggcacctctaagatactgatggctctgcagaggacccattcattgcttctgcttttgctgctgaccctgctggggctggggctggtccagccctcctatggccaggatggcatgtaccagcgattcctgcggcaacacgtgcaccctgaggagacaggtggcagtgatcgctactgcaacttgatgatgcaaagacggaagatgactttgtatcactgcaagcgcttcaacaccttcatccatgaagatatctggaacattcgtagtatctgcagcaccaccaatatccaatgcaagaacggcaagatgaactgccatgagggtgtagtgaaggtcacagattgcagggacacaggaagttccagggcacccaactgcagatatcgggccatagcgagcactagacgtgttgtcattgcctgtgagggtaacccacaggtgcctgtgcactttgacggttagatgccaccatgtagggattatcgcgagtggttgaccttacacttactccttaaatagcagtgagtaatgcatttgagctgtcccaggctctgtctcctcagctcatttcctactctttttctctatataactcattctattaaatacattgcaccaaagagatatggagacataaacctgtaatgaatgaggctgggcttttctgtaataagcttccttttataatactggtcagcttagctctctcagatcctatcctgtggaatttagttattatgtgtatttatgtagtatttcaaacatttcaaaatgctttcatctatgtttatcacattttaataccacagcacttataatgatgtcactacatatagaagctcaaagttaagggatttgctgaagactgtaaagttaatggaagaattgagacaaaaatccagtgtagctggccacttatccagggctttttctacttcatcacaaggaatgttttgaaagtgtctgctttttttatccttaaaattcacctgtcagggaggcattaaaaatttggaaatgtatgccagcaaaatgtgagctctgtattttttggcattcttatgtttgggtttaataagattaagaaaatgatactgggaattttctttttcctgaaactttgaatcaccctagtaagtcaaagtactaaaaaatgtactagatcattaagacttatgtgctcttactgattgaaagattttttatgttttccttgtaataaaggacctaaaccgaaggtacctgagaa

SEQ ID NO: 588 - DNA, 32744 bp, Homo sapiens
  source 1..32744: mol_type = other DNA
ttgcggccgcactgcttgacggcagcggtgtccgccccacggccggcgttgccggggtaacggcgagcgcgtggggccaagaaaggtaagggccctgggcgaggaaagcgcggccctttccgagtttggtgttttgcagcgaaaggaaatctcgctcttccgaaagtcctccagggcgagagaggaaagggcctaggtactgtgctggggtcgcacagccggccgagacagtgccgggacggggagccaggcttccgagtgcgcccggtcactgactcctccgcgctttcctcgtgcgcctgcagcccttggttcttggaaacgccggcgccttgttcagggctggtggggctggggcgcaaggtgcagctgacaatgcccgagaggagccgcagcctctggtggagttcggtcgggtgtgggggtagtcaaggaaagaagcaaaggggtaagacagggagttaggaattggcggggcccctaacgctgttggggtgcgcagtttattttatttgcagctgtcgtctggtgagcgctttccacgtggtaggccccgaacgaaacgccttctgcaaaattatgcatttaatcctgacaacaactttcaaaggctggtcatctgtttatatggcttattctcaggttctaacttgaaagctccccagaggcaggattgtttaccttgtgcctttcatccttgcctccctaagcccaggaggtgcgcagatggagcttgaagcgtgttttggttgggagaaggtgagatttgctgggtaggaggttttttaaccaggtttgtttggcacctagtccaggaaggttggaaaattaaatggagccacctctcccttttttgtttttctaatagacatttaccatcacctaagaggtgttagcctgtgtgctcgagggaagaataagaaacagactctgcttttaatagaaagtaagaatatgcagctctggagtcaggttgcgcaggttggggaaataagaagtaaagatttctcaggggtgcgcccggcccctccgagtcactttccacatctgtacaatggaaataaaaatagtctttacctccgggggctactgggattaagtgaatttgaatagaccttgctgttaccagtggttagctatatgttaaaatcagctgggtccacccaggaaattctgatgtaattgattgcaggtgaggcctgggcatgaggagttaagggtaggtaagcttgagggccactgtgtgatgtaccactcccaggtttaattttcttaatctgcatttttcaatcatcattctaaataacctgcagtgactccaattccaaaccaacctttgcatcccaaacctcttgacaactgacccagtctttcctatatgtttttgtgcacctcaggcaccgctcttctttcatatctgtggaatgaggatagtacagtcagctctcgctatcaggttccgaatctgtggattcaaccaatgttgcatcaaaaatatttggaaaaagaaatttaaaaatatatatatataacaattatttagtatttacattgtattaggtattctaagtaatctagagaagacttaaagtagatgggaggatgggcataagttacatgcaaatactacattttatttaagggacttgagctgcggattttggtagggggtgagtcctggaaccagtccttctgtggataccaagggatgactatagtacccacatgtgcagcacatgcagtgagtgcctctggcatctggtacctacctatgacagtttcctcttcttattttactcacatcccacctcttacagcatgctgttctgccgcgacactaaagaaccttcttgaatatccattgcagatatggggaatggtaaatgcagtcttttctcctctgctttgcctttcgagttcagcacaggaggactcttccatgaaactagagatcatctgatttgtcctcttgaatttttccccctggggaagtgagctctaccttccctgagggtttctttctatcttttctagaagcttcacgctggtatctgtgaagtcattcttgcaggacatggcctggggaatgtctttacttctgaattttttaaaatagctttattgagataccatataattctgtaaaagtcacccttctgaaatgtacgagtcagtggtcttcgtattcgcggagttatgtaaccattaccatcactacaatctaattttaaaacattttcgtcaccctccaaaataaacctcctgtcttattagcagtcgcccccccatttcccacttttccctgtctctggcaactggtaatctgtctctatggatttgtctattccggaaactttatcttaattgtctcgtggtcttttgtgtctgacttcttttagcataatgctttcaggtgttgaagaatgtatccgaacttcattccttttctatggctaagtatttgattatatggatagaccacattttgttgatctggtcaactattgatggacatttggatggcttccactttgatgctattatgaataatactgttgtgaacattcacatacaaatttttccatgaacatatgttttcatttctcttaggtctatacctaggggtggagttgctggatcatgtcgtaactatgtgtttgacattttgaggaactgccagactcctccagtcctgttcgatttgaagatgaaactgggcttagagaaagtgggttgtgcaaggtcacacaataataatggcggctttgcatgtctggaaggcctactgcgagccaaattcctgaggggtgtgcagccacatgagcaagagtaacacaagaacttggattatgaggggtgttttgtcgcagggacccttccatcccacacacctgggttggagtacagagttctttcgatcaagtgtcacagctaaatcttgccttttttagatgtgacagcagtctgagagggaaaaacgctgaacaaatgaggcagactaaaatacaactcttatttgttgagagaatttattagaacttcttgaaggtggccattaaatcttttttcatttttttaaaattccgaatgtaatgtatataagtcagctgctgagcagaggttataaaagtgaaaaatcccataaaagtccaaaccattcctggaagtctttcaaaaagtgccttactagagaccaacatcctgcccccaaaaagcagtgtttattttcagttttagaataaattattgtctctccaattgagtactaaatgtgataatttagtacttgggctgagggataagtcagcaagcaaggtaaagcctagtctaaatatgctcttaagaaaatctcttaggtttcctgtgagcatgcagtagacgtggttttgttataaacactatacagcaagatgcatgcataaatataaaatgtacaaagtaatgctcagtatgtaattccttcaaggaaccttatttagaaattaatctagcatgttgctgcttagaacaatggcaattctaggaaggttccaacttcccgattcttctttttcatggttatctttgtaattgatgtatcatttcctctaactcctctttagtctgtgtttttctgtgtcctcatataattcctcagcttcttccttgagaagttggatactgatatcatcacacgttggataagccttttcttaatggtcatgacactcttaaagccactcaccttcccctccctcagttttggccaccttcttgactgtttcaggcttgatggcatcccttgccaatgggatgcaagtactgagtgcaggagccacctaagtaattagtcttattttttcccttgtgaggattcggagtcatgtaggttaaacgtgtgtatgatttggccgcactgtatcttcaagcaccaggtaagctctcagttgaaatcaagtctagacctagtactgggggagcagcagattcaagtttcccatctcattccaggacagctgctcctcgagtggaatgtcttgcaccatttacattgttttcccatgtatatggttacgttttcctaggttaagtgcatctactgtatctctgtgtctgcatcacacaatatgttcacatttacttccctcctttagacattagtggataacagccagttccgttagctccaacctgctttctgtgcttccagctatgttatatacttgttttgtctccttggatccaatgtatggccccagagggacacgtactggctttggctttctgttctccctcatggtgctgggtgcacagtgggtaattccgttactgctcaataacccttcaccgtctgattttgagaaagagtcatcagacaaaagtagatagaccctgcctgtgctttcagcagaatctagagagagggcatgggcttgggagttcaacagacctgggtcacccgatgccaccacactcggggtcgtctacaaatctctctaacctgaatctgtttcctatttgtaaaatggtgttgctactgctcaccctgtaatactaattatagctgatacatgaatggtacacgctatgtgccaggtactgttctaagcactttatggatcttaactgtaagatagagtcgttcttatcttgattttgcaggtgaggaaactaaatcacagagagagtcagtgacttttgcccaaaatcacactgctaggaagtggtaaagttgattctgatgctgatagtctggctttagagtccctgcttgaagccagtagcatttggtagtatataatcgacccttaaataactgctgctgtcattattatttattaatgtactttaaaaattgggagctgattgacccaatgtttagtgtgtattgtaagatcctcttggaaaatgaagtgcctgcaagatttaatttgttgaggacagggtctcagttttgtctttgtctccccagcacctatgattattaggaattcctggtagtaaatgtctgttgggtgagtgaaatggaagcactcctggtagacagaaatcctgttgtgcttgctctcaggagacctaacattgcagctttgggcatgtcactaggtctcagcgttgtcagctggagtagaaagattaccactcatttcctggggtttattgtggggattaattgcagtattctaggtcaatatgatttacattgctcacacaaactgttcttactgcttttagtttattgctttataaatactctatttcttcccacagaccactaagttttctgagcctaggtacagatgtactcacattttggatcaaggtagttattgattgtctgtttctttctgtttgttgtctactctttaaagaatacctcctctgaaaaatggcagaagcagttttccatgccccaaagaggaaaagaagagtgtatgagacttacgagtctccattgccaatcccttttggtcaggaccatggtcctctgaaagaattcaagatattccgtgctgaaatgattaacaacaatgtgattgtgaggaatgcggaggacattgagcagctctatgggaaagtaagtgcaggcagccttggtaagattactttcagacaaccctgagcaagcagtcctttccttctccccatcccagccatacccccacaccaaccatgaacaatgtgtattctttccttgcggtttggtccagttgtaggaaaagtacaatttgaattagtgcccaaaagccatatgttagggtaatagaatgacagatggagcacccctgcccacaaacctttatttcagtgatgaagtaggttcaatggattgactattttttttgtctttagttgtaaaagcaatgcatgtttgttaaaggaacaaaaaaagtaatttacagaaatgtaatgggtaaaaaagtgaaaattccccactcactcccatcccgttcccagaggtagccacagcgtggcatagtgtccctactcaggcacggatcagatggggctttggcatggagctccttatctgctgcctcctggttggggacctcttctcagatgaggacaagttctagtttttactgttttccagcattgatcaagttgaatgaagactggtagttctttaaaaaaaattttccataatctgttcattgctgtgggcatttttaaaaaacagctttattgagttataatttacaactataaagtcctcccattgtaagtatacaattcagtgattgtcataaatttatagagttgcacaactctcaccacagtccagttttagaacattcccatcaccacagagttcccttgtgcccatcacacttaatccctgctcccactcccggcccaaggcagccacggaatggcgtcttgtctccataaatgtgccttctctagacacttgatagaagagtgggtggcactggccatggtgaggcaggagtctcagtaggccaagggcagctcaccagggaggccttcatttacagtatataacattaagcaagaggctttataaagtgctgtatgcattatttattcttggtttttgttgttgctgggtgttttttttgtttgttttttgtgacagagtcttaccctgtcacccagactagggtgcagtggcatgatctcagctcactgcaacctctacctcccaggttcaagtgattctaccacctcagcctcccgagtagttgggactacaggcgcatgccaccatgcctggctaatttttgtattttttggtagagacagggtttcaccatgttggccaggctggtcttgaacccctgacctcaagtgatctgcccacctcggcctcccaaagtgccgggattacaggtgtgagccaccatacctggcctctttattctgattgttaatctaaatggagaaaggggtgtttgttttattctttcaattttctgtgtgtttaaatattttgtaatgaaaaggggaaaaatacatgttgtttttggaatcagcaggaatgagaggaatacttcaattctggagtacaaaagaatccaagaggtttttttggacctagtgggcagcatggctcctgccttcaggcacactgtgttcccgaaccatatgtagagaagaaactctgcctctgcctgccctcggcttatcagacctagactgaaagcattagttatgggataaatgaggtgtgctaaaaacttactagtactcttgaagcgattagaaaggtgttacgctaagaacatccttagtcatcattagataatcagagggaaaatgtaaagacatgaaaagtggggcgaacctcttgttaactcagatgggtacagtcggccctccatatcatgggttccacttccgtggattcacccaaccttggattgaagatattttgggagaaaaattgcatgtgtaccaaacggggactttattttcttatattaaacaatataacaactatttacatagcatttgcattgcattaggtattataagtagcctagagatgacttaaagtatatgggagggcctacgtagactatatataaatactgcaccattttatatcagggactcgaccatctgccgattttggtatccaccagaggtcctggaaccagccccctgtggatactgagggattactgtatattctacctcagctaaaaaactggtaactaagcatgaactaacttcattttctctcttcctggaagggttattttggaaaaggtattctttcaagaagccgtccaagcttcacaatttcagatcctaaactggttgctaaatggaaaggtaaagttgttgtatcattcagttcttttgacaaattaatcattttcctttgtttttgatcttatatctcaggctatatagtaaaattctagagaagtaacatgtacactggcagttttactgccaaagttagctagaataattctaatcaaagcaaaagggttatgattgggtgacagtgtgtttaatttctagaattatcaagtgttaattgggcttttctgttgttaagtgtttgcttagcagagtactatgcctatggcaggtactggtagttaagtacctgctcacctgtggcactatgcaaaatttttaaaattttgtttccagaattagaatttgtaatagccatgacatgtatgtgtgtggttctcccttgctgattctctttaatttataaatgttttagaatatttatctaaggaattctcatggtaattacttaagaaccaataccagcatgttaaaacataattagaaaggatcttttaaaggttttattgtaagaaaatatacagattaaaactgcactgagataacatgtcaacaatcaggcagaaatccaaaagtctgacaatatactgcattggtgaggacttcagaaacagaccttctcttgcattgctggtggggtgcttgtggtaccaccctcatggaggtgaatttggcaatgtctagcaaaattacctatgcatttactttgttttcttttcccccattcctctctttcctcagtccctggtaacctttatatgttttctgtctatgaatttacctattatagatatttcatatataaataacaatcatacaatatttgcccttttgtgtctgttgctttcacttagcatattttcgaggtttgtccctgccatagtgtctatcagaacttcattccgttttatagtggaataatattccattgtttggacatagtgcctttagctcatctgctgatggacacttagattgtttctgtattttggcttttctgaataatactgttgtgaatatttgcatacacgtatctgagtctatttttagttgttttggatatatacccaggagtagaattaatgggtcatatgataattgtctgtttaacattttaagaactagctaaactattttccacattgaccgcatcattgtacattcccaccagcaatgcaccaaaggttccaatttctctacatccttgccaacacttgtttaaaaaaataatagtcggccaggcgcggtagctcacgcctgtaatcccagcactttgggaggccgaggcgggcagatcatgaggtcaggagttcgagactagcctgaccaagatggtgaaaccccatctctactaaaaatacaaaaattagccgggcatggtgctgtgcacctgtaatcccagctactcaggaggctgaggcaggagaatcacttgaacccgagaggcagaggttgcagtgagccgagattgcaccactgcactccagcctgggcgacagagcaagactccgtttctaaataaataaataaataacagagcaagactccatttctaaataaataaataaaataaaatagtcatcctaatgagtattaaatggtaaaagtttttcattttaatgaagtccaatttatctattttttctactattgcctgtgcttttggtatctatttaagaaaccgttgccaagtccaaatcatgcagatttccctggtgttttcttttaagaggtttatagtttgaactcttaagtttaggtctttggtccattttgtgttaattttcgtatactgtgtaaagtaagggtccagcttcattgttttgcctgtggatatccagttgtcccagtatatgcgtttacttttgatccagcaatctcacttctaggaatttatcttaacaatacgctgacaaaaatatgaaaagaaatagcacagggctattcatgcaacactgtaatatccaaagactgggaacaacttacatgttcatcaggagaggacctgtggaataatccatatttatataattaatccatataatgaaggaccgtggagctgagacaggaatgggagatcgctaggatatgctggtaagcgaagacagcacagtataaaggaaagtacatgctgtgctgtggtttatctaaaaagatggaaatataaaatagatattttattatattttttgagacaagagtctcactcactctgtcatccaggctggagtacagttgtgcaatctccgatctcagctcactgcatcctccacttcctgggttcaagcgattctcctgcctcagcctcctgggtgagtagctgggattacaggtgtatcccaccatgcccggctaatttttgtatttttagtagagacagagtttcgccatgttgagcaggctggtctcaaactcctgacctcaagtgatctgcctgccttggcctcccaaagtgctgggattacaggcatgagccactacgcctgaccaattttttttaaatggaaggataaagcatagttttttaaaaattccagtaggaagggatgaaacaggatgcagagagaggtgagactttatagatttgactttgtaaccatataaatgtattacataattataaaaaaagtttggctgggcatggtggctcacacctgtaatcccagcactttgggaggctgaggcaggcagatcacctgaggtcaggagttcaagaccagcctggccaacatggcgaaatcctgtctctaccaaaaatacaaaaatgagctgggcatggtggcaggcacttgtaatcccagctacttgggaggctgaggcaggagaatcgcttgaaccctggaggcggaggttgcagtgagccaaaatcgcgccactgcatttcagcctgggtgacataatgcaactccgtctccaaaaaaaaaaaaaaaaaaaaaagttaaatttttacaagagatttttttaaacatagaaatgaagtaactgaagcttatatcaagttggttgtataaccacagagtgagaaattattttgagtaacttttggtttttttggagatagggcctggagtgcagtggtgcaatctcagctcactgcaacctccacctcctgggcttatgccgtcctcctacctcagcctcccgagtagctggaactacaggcacatgccatcgcagctagctaatttttgtgttttttgtagagacagggtttcaccatgttacccaggctggtcttgaactcctgagctcagacaatccacccgtctcagcttctgaaaagtgctgggattacaggaatgagccagtgagcctggccatttgagtaactttatagtgatttgattgttcaacctaatcggatagactttgcatcagttacttcttgtcacaataatgctgcttagtaaaccatcccgaaaggtattggttttaagcagcaaccatagtagtcactaggtgtgcaatcttggctgggtgtgctcactttcctgtggggttaaagctgaacatcatctcttccaagcatttaatgcatgcagacgaggctgagtttgggaaaagagaagtaattagcccaaaggcagagttaggaaaagaccaggacgaaaacccagaccactgggtgacctgataaacatttcggttggaaagactcctcccacctgatgccctgcttatgcctggggtacaggcaagttaactacaaccaaaacctagggattcagaaacagcaggagcccgcctgtcagaactgcgccctcatcaggctggtcttcaaaataacttgaggtcaagccagtttgagattctgcacagggagctagagctggatccctgaactcccaaatccacatccaaaaccaacactgcaatcaagttcacttttccagcacttttgatatacacatggaaggcgctttcagtgaagagggaagaatggagatgaagtgcatacctctagggcctcagcattctcatttggaagttggaatgagcattcagccatggcagagaggtttcctcctgtgctgttgctgcttagctggagccctgagttgagaagaattctgaggtcccctctaagcccagcaagaccgatgtgattgatgggcagcacctgccaagggtatgggttcagggaaggacggcatagaaagcatatttttgccattactgactggacagtaaactttctaggtgtgtgattttgtgaatcttaaaattctcagtctttcctagatttttagtgtttgttccccttatgggaaatttgcctgaaactaatagaacttctttgttccagatatgaagacaaacatgcctatcatcacatcaaagaggtaagtcataatgaactttggcttctgtcaaaatgatggtttaagtcagatgtttttaggtagtcttgtcccatgtagcagtccagtccacacctttttttctttctgtttttggtagtagatgtatccttgaaaattatgttggaatttaatgtggatcaaatcatttttgcaatgccttacgtgagtttatggtttgtttaaatactgttttgccagttgaattctttccaaattatgaataactatcctgtaatagctatgttattaagtcctcatattcttgggcctagattttgaaccagccttctgcccggtgggcacagatggtcctgtcccccttcctccagctacactgtagggtcagagaaagaggctttcacagaggcccttcctcatttaatcctagacattcccggaacgtttctccctgactccccaaacacacacatatggcctggctgattcctgcatgtgctcaatcctgctcatgcctgacctctcctgggtttctttccttaccaccgtcccctcctctgtcttggctgctgctcctctggcccccacagccctcttcggcgtgcagcactttcctcatgtgtcatacgtgggtttagactgtcggtgcttggagagcagagatcaggcccttctcctctctgcagtgccacactttgtggtcccttggtgagattgttgactgtctccatccatcccagacctccctgtccctgtgatacagtacagctcttccatgaaaccttataaaacttctcaggtccccagtgattttgttcatcttgcttctggcatatacgtgcaaaatctggcagctcctttttggttacatgcttggcaaccccatagccagcggggtggcaaggagtggtggcaccagggagatctcaatggctgttccagctgtaacctcaggttggggtcaggagtgggattctggtgtgtgggagggacctgctaagaacctgtcagagccctcagccttggaggagctatagtgcagacaggttgccacagcagaaacctagggatcagaaatagcagcagctcgcccatcagaactgcatcctggctaggctggccacaacatgacataaggtcaagccagcctgccagcgtagaggttctgcacagggagagggctacctccctgaagagcatctctttaggagcactacagtatcccaagaagtttcattgacccttgtattcatttcctagggctgccataacaaagtaccacagactcaatggcttaaaacaacagaaatttattgtcatggttttggacaccagaattccaaactcaaggtgtcagcagggccacagtccctcggaaggctctgggggagcatccttccttgcctgccttcactgctggctcctggcaccccttggcattccttggcttgcagatgcatcactctaatctctgcctctgtggtcatgtggcattctcccttgtgtgtttctgtgtgtctttgtccaaattttcctcttttttttttttgcattaaaaaaattgatacataatagatgtatgtattttcggggtatgggtacatgtgatattttgcctcttttaaggacaccagtcactatgtccttagatcaaattgattccatctgcaaagaccctgtttccagataaagtcatattcgcaggtactggggtgcgtaatctgggaggtgtatgttgtcctactattccttagtcaaggccccgcagttacagagttgcactgagaagtgaaagcgataaactattcactaataagcaggcctggcatgaactcaatctgcattcagatatatctctcttccttcctcagcgctcttgatatactttattgtgttatcaccttagttgattttttccttcaattctcctctagtctaactgccagattctcattttttaatccctttgccatactttgatcactttcatagacttcatgaatcctgcatcttttttgcaagatttaaatgttcaatttgccgtcaatttgcattgaatttacattaacataacaaaggacaaagtgacataaacgacacatagtgacagtgcaggaatgttgcttgaagggggtatgcttgtggggattaattttttataagaaattttcagattacagctcatttccccgtgtgaacctaaggatgtttaaagatgttaccagcacagttctatcagcaagctacatacgtcccccaaccaaaaccaatacttgatttattatttgttcacaacacttggaatcacaatctaaattttgctaaatataagaaaaattgatgcatgttcatatttttagattaatttttcaacttaaatacttgtcataatagttgttcgtattttttgtagagacagggtgtcgctcttgcccaggctggtcttgggctcctgggctcaagtgatcctcccacctcagcctcccaaagcaccaggattacaggtgtgagccactgcacctggccataattgtttcttttctgatgcctctgaaattctgatttttatttcaagtcgattcactcaaattggcctttttccaataatagtcgtccttggataaagttacgcaccttctgcgtaactctttctgaaggtaagtgtcaggacccttctgtgatgcctttggggaactgacacaagtaggggtatgtccctgaaggaccagccctgatggtcgtgctggttgcccaccccgttgtcctttattcagccagaattcactatgtgtcaggcattgggtaggtgctggggacccaagagcgaggaaaagacctagtccctgttcttgaaggatttacagtctagtgagagaggaagagaagtgaacagttgtgctgtcctgtagtagtcggtgttgtgatagagataccatcaccattatagccaacaggtgctgactgctctggcagtgccattcccagtctctgagcttgcctgcattacctcctttcatcttctcaagaaaccttcgagggtaggtactagagatgtttctgtttcgtagatggggactcaggggaggcttcagtagcttgcccaagattacgtgggctcagcgccagagcctgggagacattgatatgggtgtgcacaccagcactccctgagcaccttccagtgctaagtatcgtgccagtgatgggcctgtgtgtcatctcaggtcctcacatcactgccatgaggtgggtcctgttcttatccatcttccacaattggaagaactgaacacagggaagtgaagctccttgctcagggtcagtatgtggacttaggcactgtggccccagaacctatgtgcgctaaccactctaaaccactctgctgtgcacttccagtgataaaggggcattcatcagtacaacaatagggaacggtgccctgtgcaaatgggagaggtgtgtgttcaagggtgcagaaacatgagaagccttggcgtgttctgatgggcacgtcctgtgtccttgcggtcctggatggtgctgctttccccagtcctgtcactgcttccagtcgtggctgctgcctcatccttctgccacgctcccccttaacactttctgcattttacttctcatttctcttcctgcaactgctccagcatctgggattgatggcaacaggacttggctttttaaggtgttgccagccagctagaggacgccttcagctctgacccatgtgtcgttgtcttagtcatttgtttgtgtggctcttttcatcatatctgacttggaggctttcttctacatgctcttcgagcctcagtctcctttgacttttcatagcgatcctctgagaccctgaaaagggaacacaggtatggcctggttctggtatgtgacagaaggcacagaggtagaagtgctaagtggcttagctcagagccacacggaagagccaactccaggacctagacctccagaggctgcgttcatccctgcactgctgcctctgctctcaacagcaaattaagacatttccattcattaacatctttttcaagataccatatattgagtctgatttatttttcaagccactcctaaaaactccacaatgatatagtagtattgattgaacacttcttatgggctatgcactttacgtgtcttatttaattcttgctgcaaccccaggaggtaggtgcagttatccctggtttgtagatggtcactgagccttagagaggtggggtcatatagctggtatgagaacgtgatggagcaaggattggaacccacgtctgctttgactgctctgctgcaaagagcagagcagtgccctctgtgtgctcacttcactccagatcttctggtcaaaggaggaactattgaccctttaaatcagtggttctgtcacgtgttttgagtcacggaatttggcaaaagttttgggtcccttccccagaaaaatatattgtcacaaaaatttgtgttcaaataaaggaaatttatagaccctgtagagccaatgcttatgttgatatgaagagctaagattctttttagacccctcacatgaaagttcttttaaacgtatgcataggtggccatgttccaggtgagaagacaccctgcaggttgtggcacagctatgttctttttgctggttttaaaagtaatacataacaagatccctttgaggtggtagtactcatctccacattttataggtgggaaaattgaagcacggagaagttaagtaatttgcattgccacacagttataagtaacagggctggacacaaaatgtgccataccaaagtcacggtgccgtactgactctcaggtattagggtagccttaccaggtgttaatctttaggatacaattcccagtatatagggaggcatccctgatgttcatcctcatgtggggtgaacagggtatagacagctttgggattcttaggaatcagggttaagcaaccactagtctctttttaggtacagcagaagccaatgtccttgttgaactgtgtgagatatagcagtttgtaaactatgacatattcagtctttttttttttcttttggaacatttcacaaatttgcgtgtcatctttgcacaggggccattctaagtatatgtgctgccgcatcgagcactgttcagtcttcttaaccaggtaaaagaaggtgaaaagtaaagttacatctgccttctcacaagccacgtgttgtcttggatgcctttcagactaatcactgaaggtcgaggcaaaaagcacttgagtttcacaatgtctttgaccttctgatcagatttccaacatctggtagttctcacatcacatgaacacatcccaacagcctaggcatgaatgctttgccctattgttttgcctataattttttgtaacttgggaagtgttttgtaacttgggtgttagcttcaagttttagaaacttaacaagaattttatcaataaaatctactctgcaaagtattgtgaggaaaagggccatttctgttagaatatgtggatgaatctacataagccaaatcatttctctccttatcctgtgaaagggttagtaggcactgtgatgaatatttattgaaattctcattttgctttccaatgctaaacaagttatttgtattatgaatggcatatctatctgaaaacattatgagatccaaaattgaaaataatacaaaacaagctgagagcggtggcttacacctgtaatcccagcactttgggaggccaaggcggtcggatctcttgaggtcaggagttcaagaccagcctggccaaaaatttgtgttcaaaaatacaaaaaattagctgggggtggtgacgcaagcctgtcatcctagctactcgggaggctgaggcagaagaatcgcttgaacccgggaggcagaggttacagtgagccgaaatcgtgccactgcactccagcctgggtgacagagcaagactccatctcaaaaaataacaacaataatacaaaaaaaaaatcttgataaaggatggccattttcttgtttatttacctaaatcacttaatctatcagttttaaattagataaattttcatagtttgttaaactgggggttagttttttttgtttttttttttgttttttttttttcaaataaagcaaataaaatgaaactatattgtaaaagcaaagaaacaagaagtaacatatgcttgttgcagaacacttagaaaatgcagaggccacacgcggtggctcacacctgtaatcccagcactttgggaggccaaggcgggcggatcgtgaggtcaggagatcgagaccatcctggccaatatagtgaaaccccatctctactaaaaatacaaaaattagccaggtgtgttagcagatgcctatagtcccagctacttggaggctgaggcacaagaattgcttgaacccaggaggtggaggttgcagtgaaccaagatcacaccactgcactccagcctggcaacagagcaagactccatctcaaaaaaataaaaaaagaaagaaaagaaaatgcagaaaagtataaagaagaaaaatatttatctataatgcaccattcaataatactgctgtaaacattttggtgtgtcaccttccagtctgttttatgtgctttgttgttttttcaattttgaaattcgagtgctgtttctaacagtatttctgtcttgcaggtatcagcatagtgttgagtgggcagcagagctgatgcgtagacaggggcaggatgagagtacagtgcgcagaatcctcaaggattacacgaaaccgcttgagcatcctcctgtgaaaaggaatgaagaggctcaagtgcatgacaagcttaactctggaatggtttccaacatggaaggcacagcagggggagagagaccttctgtggtaaacggggactctggaaagtcaggtggtgtgggtgatccccgtgagccattaggctgcctgcaggagggctctggctgccacccaacaacagagagctttgagaaaagcgtgcgagaggatgcctcacctctgccccatgtctgttgctgcaaacaagatgctctcatcctccagcgtggccttcatcatgaagacggcagccagcacatcggcctcctgcatcctggggacagagggcctgaccatgagtacgtgctggtcgaggaagcggagtgtgccatgagcgagagggaggctgccccaaatgaggaagtaagtagaagaaaataaatcgcttcctccaaagccatccgttcctggagatgttggctaatagggatgtcttttgcctgcagctggtagctggcctgttgtagggtccaagggaagcagcaggctttgggccacagcagctgtgagggccatttcaactaaaaccccagagttggtgaataacttttaaaaaaatttataaaattaagacaaggccagtggtattctctcctttatttgggagaaaacaaaatgcggtgataattacacctgatcttgagtacagctgagcaagaagggctcacgtgtggaagtcagccatcttgagaaaagcctagggaggccaggtaagagctacgtcatgaagggacttgctgtcagagttaccctagagctgtctggaattgctaaaaattagaaacaatctaattgctaaatgggatatgagatacccattcaaagaaatatcatgtagacttagaatgaggtttatgaagtcatattaagaacataggagccaggtgcagtggctcacacctgtaatcccagcactttgggaggacgaggcaggaggatcacttgaggccaggagctcaagaccagccagggcaatatagcaagacctcatttctactaaaaacaaaaataaattgctgggtgtggtggtacatgccagtagtcccagctactcaagaggctaaggtgggaggatttcttgagcctgggagatcaaggctgggcaacagtgagacactgtctcaaaaaaacaaaaacataggcacatgcttattaggtacaattgggtgaaaaaagcaacacgtaaaataaaattcaccaacaaaatgattacaactgcaggaaaaattcacaggggaaaaaggaaataaatgagaatcttcatagtgaaaaagttaaaacttccttttccacacaagtaataaaaaagcacttcttggccaagcgtggtgcctcacacctgtaatcaacactttgggaggctgaagcgggagggttgcttgaggccaggagttcaagaccagcctgggcaactctgtctgtacaaaaaattagccaggcatggtggcacacgcctgtagtcccagctactgggaaggctgaggcagaagaattgcttgagtctaggaatttgaggcctcagtgagctatgatcacaccactgcactccagcctgggcaatagagcaagagtccgtctcaaaaaaattgtgttttaatcattctttataatattaacacaatagaatgtgaatcctgggaatttataagaaaaatgttcattttaaaatacattctctatgacatgtagtgcttccatttgttctgtatatattgtatttctttctctttagttggtgcaaagaaacaggttaatatgcagaagaaatccatataggatctttgagtatttgcaactcagcctagaagaggtatgttttcaacatattattatttcagccatcggtctctgggcctgaactacactatatgtgaacctacctcacagtgtagttctgtatgtaattcaattattgaatattgtaattcagtattgaaatcactatgggtagctcccaagtaggcctgcctttcactcctcagcctttatttcatcagttctaagatatgtgtttgcaatcattccacagaagattcgaggggtttttctgagtacttcttttctcattaagattttagattgttaggccgggtgcgggggctcacacctgtgatcccagcactttgggaggccaaggcaggaggatcacctgaggtcaggagttcgagaccagcctggccaacatggtaaaaccctgtctctaccaaaaatacaaaaattagagtgattgctcatgcctgtaatcccgactactcaggagactgaggcaggagaattgcttgaacccgggaggtggaggttgcagtaagccaagatcgtgccattgcactccagcctgggtgacagaatgaaactctgtctcaaaaaaaaaaaaaaaaaaaaaggctttatgttgatggctaggtgtgatggcttatgcctgtagtccagccacttgtgtggctgacgtgggaggattgcttgagcccaggaggtcacgtctgcagtgagccacgattgcactactgcgctccagcttgggcgaaagagtgagactctgtgtcaaacaaaaaaaagaataaaaagatttcagattgttaacagatgctgactggtgatgccgggggtaggggggtggaaagaagaaaaaagtggatttcggattggctgaatattttgttactaattttcactagctttttcaaaaatactataattcatataccatacaatttatccacttaaagagtacaagtcgctattgtttggtatattcatggagtctctacttttcatatactgtgctacatgattcagatcatgtagtgactgctagttaagtaaatggatttatttccttctgcaggatccctctacttaatgcagtagctacattcttgaaagttagcttgggcctggtgccatggctcacacctgtaatcccagcactctgggaggccaaggcaggcagatagcttgagcccaggagtttaaggtcagcctaagcaacatggcaaaaccccatctctacaaaaaatacaaaaattagccaggtgtggcggtgcatgcctgtagtctcaactacttgggtggctgaggtgggagggttgcttgagcctgggaggtcgaggctttaatgaaccgaggtcacgccactgcacaagcgagatcctgtttcaaaaaaaaaaaaaaaaagtggctaaaagtggccttccataaactgcatcatattgtcccagtgacctggagttcctctaacctgtggtcactttatgctcagaccctcttttcttgcttatgttgatagtgcacacagaaatgtcttttctgcctttgaagctaggaccgcttcttgggctcccctcttctccaggagctctgtgatggctttctttgatagttcctgcagtgtccagtgtggttcttggcatacaggtaggtcccaagaagtgctatggaacacatccatgttggtaattttatagctgagaccacaggaaagtaattgtgggggccgggcgccgtggctcacacctgtaatcccagcactttgggaggccgaggcgggtggatcacgaggtcaggagatcgagaccatcctggctaacatggtgaaaccccatctctactaaaaatacaaaaattagctgggtgtggtgtcacacacctgtaatcccagctactcgggaggctgaggcaggagaatcacttgaacccgggaggcggaggttgcagtaagctgagattgcaccactgcactccagcctaggtgaaagagtaagactccgtctctaaaataaaataaaatagaataaacaattcaaaattccttttctcggttgcaccagccacgtctcaaacactgaacagccacgtgtggccactggctactgtattgaacagcagatgcgtaggcattcccagcactgtggagcgctttatagcccacatgtacccgttcttagatgtttggcctgtcagaacctcagatttcttctctgtaaagtgggggctatgtaacatcttgttcataggatgttctggaaattaaataatacatgtaattgggtcaggacagtacctgataatatagtaaatgctcaataaatgttagtgcctgctatttttgtcattattaagttacttgtaaaagctaattagcagcttgttggaaccttcttttttacaatcacaaaaatgcccattgggtacctactatgtgccaggcattgggctaagtgctaccgatactgaaataagtagaatgtgactttggtcttaaagatagcccagaaatcattacagttcagtgtgataagcatagtgtggcatatggatcttgtcagtatcgctcttcctgtttccttgggcccaatgcctgacatctattaggtgcgtaatacttattaaatgaatgaatgtacaagatagggaatttgcatcgaagctggtggagaccatcttgcagggctgaggtggaaagcttttgcagtcatgatagctgaggatagtaaaggataaatggggcttgccacatggacacagggtagtaaaggctcttccagatagctctgccaaaacgaatgccagatgggggagggtgtgtccatgagtcagggtctggcctggtcctgggccagcagggcactgcaggggattccgtaggggagtggcagtgaccagagctagcatcagtatggagggtgggctggaggcctggcctgggaggtggcagctgtaggcgaagggtattccgtgtcagatgctgggagttcagctgcactgttccagttgaccagctgctgtcttttattgacaaattttttaaaggctgctgctgcctgctgcctcctcttgaacaccccctgatgaaaggcaagagtaataggagacaggagatgaggttactctgccttcttagaagctgcctggcacctgagaacatttcagagatgtgttccagaagttttcagggagcacaccgttaaacctagctctacttgtctttctgttttggcagatttcttttgaatgaatcacctatgtttggtgcactgcatgtacccgcggagtgtttctgtgaatgttagtcaggaacacaggcagaatggggtctcacccctgctgtggtgattcacaacagctctcttaagggactcagagtggtgatacacagctaacttagaagtctgctcagcgctgacatgggaagcttttagtctgcaaccttccacagatgtggacatgcggccttgtaggggtgttttcatgcctttgccttgactcattcagaacagagatttggaaattttcatagagtaattgaagagctataaactgtatttacctcagttatttctgagtagttatttctgaagagttctgtctccatccgtcttctgcatccttcagtggacacgcacacacgcaaacactcaaatgctttgctcttcaaattttttattcttatattttttagagacagggtttctctctgttgcccaggctggagtgcagtggcaccatcatagctcactgaagcctcatactcctgagctcaaggtatcccaccaccttagcctcctgagtacctagaattacaggtgcatgctacaccatgtctggctaattttttaatcaaatgctttttaattagcaagatccagtgagaaatagattgatttgggggagcaaatttttttttaaatgaaagttgatttcactgtaaagtaaaagcagttgcataatgctgtcatgaagttagggctgtcaactttgggggttttttttggttttttttgttgttgtttttttttttgagacagggtctcgctctgtcacctaggctgcagtgcagtggcgtgatctcagcacactgcaacgtctgcctcccgggttcaagtgatcctcccacctcagcctcctggtagctggaactacaggcatgcaccatcacacccagctaatttttgtatttttagtagagatggagtttcgccatgttggtcaggctactctctaactcctggcctcaagtgatctgcccgtcttggcctcccaaagtgctgagattatagtcatgagccaccacacgctgccaggcagtcaacttttgaaggttaaggagctttaacgtttatatttcccaagttcaaagtagatgtgtttaattttactgtgtgtgctgttgggaaactgatgggaggtgatttaataggggtggtgcagaccagctcactcattcccagcaagattcccaccatggcagcaccccagtaaggccctgcattccaggtctaatcctttgcttgagggactaagaagttcggatttgttagagcacagaaaatgacttgagctctaggagcagcattcatgctgagtgtgctcacaagagcctggggaataaactagaatgtgagtttattaacatcagcaaaggccccaccacctgcctttccatattggcatgttctcttcatgtagaaaattcagatgccgaagggtaatataattggaaggctgcttggtgagcacagagttagcctgtgaggagtgagctggataatacaagtgcttaaggatgtcaggctcatgtgtccttctccccaaggaggtataaactgttttttacttgatactgaagattctaagattgttgtatgactttcaattaattattttacttaatgtggtagcatgcattctttttcttgaaaagccaccattgaattgaggtatatcaaagagctgctaacatctagactggaggcagtgtggtgcatgcattggtctgccaccgaacccttgggtcggagtcccatcctgtgcgcagtgcgaagaccttgccaccgtcaccagactccccatttgctgagtttcctcactcactctgtgtcacattctttaactgtgttgatatcattcagctgtggctctgagtttgttgatacatgtcgatttcttagtctaactccagttttagaggctgccttactggtacttctgtgtattgttcgtatatacttataaagcttttaaagtgcgtgagaaaatttctcttatttagaaaataaagacaatagtccccacacaggaggaccaggtgggaatgcttggaaacaaagggacacaccagggtcgggcgacagctctcctcgtgcctgacagcagcagtctcagtcagatctcgtttacgcatcgtcttgtgcccggctcttccattttgtacctcacccgtttttcccacatttcttttcccgtgcttagtgtccataatatggattccaagtatcagaatctggtgattagaatgtctaagattcttccctagaattttgtggttatttttttactgctacgttgtttgactagtctccctcccctgcaataggtcagtgactttccttctatctaaacttctgaaaattttccagagacttcaactgtgagacagtttgggtccttttagcaagaatatatacttacagcagagccttttgattaaggtttgaaaaactactctaatttctctctataaatatatttatattctgcatatatacccagacacacaggaaacttcaggtgaactgctttgaggatcaggttttgttttaaaagcctttgtgtgctggtgggcaggagagaaaagaactgcagttttgccatttgtttcattgatccttgttttaagcctacagcatccagtattcccaggcagtctccactccaagtactaaccaggcccaacactgcttagcttctgagatcagacaagatcgggcacattgagagtagcatggctgtagggcgttattaatttttaaagttcacttgaaatcattagagtagctaagaaaaaaaaaagatcttactgcagctgttaataaaacataaagtaacaattaaaacaatatagtcttggtataggaaaggaaagattgggccacagtctacaaacagacccatttatagatgggatttcagggtacaataaaaatagcacttaatattagtgaagaaaagattcatggtgttgagacagctgattagccatttggaaaaagacaaagctaaaatcccatctcctaacataaaccaaaataaatttcaggtcaattaaagatataaagggaaatttgaaatagaaaacaaggataattatgctttttttttttttttgaggcagggtctctctctgtcacctaagctgcagtgcagtggtacaatattggctcactgcagcctcagtctcctgagcccaagcagtcctcccatctcagcctcctgagtagttggaaccacaggcacatgccaccacgcccagctaatttttgtatttttggtagagatggggtttctccatgttgtccaggctggtttcaaactcctaggctcaagtgaaccacctgccttggcctccgaaagtgctaggattacaggtgtgagccaccctgcctaggttttatatatttttgagatatggataagttcttctaagaggccataatatatagatttcattacctagaaatttaaaactctatgttaaagacaaaggcaaaattacaggcaaaagatgaaatgggaagaaaatatttgcagcatgcactataacacacaatagacagtgttcttggcattcctcagtttcctcagatgtaacgttctccttcagaggaagatagtgaagattgaatgtagtgtgatatgtgtgaggtctctgtcctggaagacacttagcaatgtatgttcctcattgtgtcgcatccctcttcaagctagccaacttccctgggtggagtgaagacatagctttagttcacaaaatggcagaatatttttaaatgaatatattttctgtaaatttaaaatggacttcaatgcaatgttttttatgggcagtttggagaaagacgtgtgtgctgagggagggctagcactcacatgaaaaaacacttcttggaaattgtgctttatttttgcttgaattgatataacagctaatgacattcagtgatgtatacacaacgaccagcacagttcctggcacatgtaataggtgctcgtttggttcctgcctttattctctgcctggtagcagatacatactctgtctctaaattgttgataatgatcacaaaatagatcttttacttaaatggtgaaagtattacacagtgactaggtctttcacacacacagtgactagatcacattagtagaatacacttttttcctggttaggcacctacaactgtattcccacatgccacatggcatattccacatgcaacatcttccttacctctgcttttagccagtgacattttaacccatactttttgtgaaccggtcatggtgatgatttaatgttcagtctgtgcgagtattcatttcagggataattagattgccatgccagttagctaatgtattccattgtttcatagggatctgttattgagatctatttttccattacaacacttgagggccctaactacatttagcagtatgatgttaaaaactatcattaaacttatccttccatcttattagtactgcgaaagtaaaacttactaatgagattgcaggggatgtgattgtcaacctctacagacctctccagtctactgataatttaattttaaataaaaccaactcagttgaattaagatcccctccatctgtagtaagtgcctagtcgcattttgcatagatgatcaaagccagtcaccattttaggccaataaaaatgagatattggtttcattcactcttggggaaatgtatgcttgctgataatgaaaacacatcagtttttgaagaacttacattttagcagatatcaagaaagaatctcttattaggcaaggatgggattgaacctttttttccaggctgtgctatccagttattagaaagggaagaaaactaaggccagccacggtgggtcatgcctgtaatctcagtactttgggaggccgaggcgggcagatcacctgaggtcaggagttccagaaaggaggaaaactaaaattaattgagcttttaggtgcttttcatagcttattaaatctttgtacgatttgatcttattaaatatttagctaagaaagcattattatccccattgtatagatgaggcatggagaatttaagtgatacttccaaggccctagctaacaatgacaatttgagctcaggtctgtcagatctcaaacttcagtctttgtgttacactgttctgaaccaagaagtgcaaattgtggtaaaatgcaagggactcagccatttaaggaaacaactttatcttttccattgtaccttttggctggtagtccatctgaaaaacagcagtattctgtattaataagtagtgagtgatggaaagagaaaaggtcaaaataagattgtgggccacttggcagggctgtcaacagctgtgaaagaaatggaacgcaatgttcacactgagaagagatgagctgagtgaggtgcagagacctgctgtagggtggctctggctgttggggcctaagccaagggcaggactggggacctgtcttttttgtctttcaacacaagcattgaacacccaacatgtgctagacccccttctaggccaagggaacagcaggcagtttctgttctgccagagtttacattctagtcggaggaacacatgtaagaggaagattttcagacaaaagtaagtgctctggagatgatcaggatgggggttacttagacttggtggccagggaagacctctccaagaagtgacctttgagtctggagcagaacatgccagatagtaggagtagtgattacagaggcaaaggcctgaatgagcttagtgtcttcaggggacagaagtgcagccaggacagctggaaagagcagtggtaagatcatgcagggacctggagctggtggcaagcagtttggactttattctaagggcagtgaaatctctttggaaagttttaattaggggaacgacgtgattttcgtgtgccaagaagatgaatctggatgctatggagagtggactgtagagggctcagaacagggagggtgtcacagaaggcaggaaggagccacccacagacttgggaccaagaaggcaataggaaaaagtggaatagaaggtgaccaccttcatctccagaaatgctctagattaggatttgggtaaaactaaagtagtggtccctcgtatctgtcagtgtttatcaaattataaattaaaacaaaaatgttgagtatcagtttaacacatttaaaaataataatagtgatgtcttcaacagcacatatactaaaattggaacaatgcagagattagtatgacccctgcccacggatgacacaagtttgtgaagccttccatattaaaaacaacaacaacaacaacccataccttgacataaatactttaatgtaagttttttatgaaaaataactaattttccaaaacaaaaaatttggaagaggcttcgtttttcatttttgcaagtcgctttaaggtctaatttcctgaaagtcagctagattcttgcatctgcttcttgattcagtcttgggccatcacacgtcttatagtcactggagagagcacaaatgaggcagataacaccacgttattattatgaagtggttttgaccttgagacctcctgcaagggtcttggggatcccaggatccccagaccaccctttgagaactgctgctatgaagacagatgtcatcagatagccaggcagagaatgacagggtattcactgcttggaagtccttccacctatattacttgtgctgtcttttgttctgtgtatgccgggttagtggtggggtggaaggacagtgaggaaagaagctgagtgagcagtttgtcagtgcgttgttgctgcacacaagcctcaaagcttatgacagggaggggattatgtttctgctcccacactgcacaagaggggccctcctcgtctgtgtctgctggaagcagcagtgagagccgaagcagaatatttgatgtttggttatcaatctaatttttcaccttcatatttaaaaagaaatgtgaccccattttaccactggctaccatttggtcactacctgctctgcaccaatctcatgggaatcccttcagtggtatctgtagaccctaagcgccctggacaggcaaagccaacaacacatggctctttgggtggtgtcagtgtttggcagtgtattactttaacagaaagccattttcatttccatttaagtgtgactatattcaactggagccaattttctttgccattcctacagcctccccccacacagtaaaatatatcattatgtgaggtcagtgcaaacatagggttctagaaaatcacttcaccaaagatgactgggaaactagtattttgtcaggtaagcaaaatcagcactgccccacacttttcacaccttttttttttgttgatatatttttctcaatttaaatatggttatttaattttacagggagaaactccaatgagcaacagtttctattgctatagctgttaacatcattcttcagttatataggttttttagggaataaatatggaaacattcataaaaatcttttatttttattgatttaagccagtttgtaacatttgtattttcttagatttttaaaaaaatctaagacatttgaatgaaccatttatattaaaaatatgtgacttttggccaggtgtggtggctcacacctgtaatcccagcactttgggaggccgaggcaggtggatcatgaggtcaggagatcgagaccatcctggctaacactgtgaaacccgtctctactgaaaaaaatacaaaaaattagccgggcgtggcggcgggcgcctgtagtcccagctactcgggaggctgaggcaggagaatggtgtgaacccaggaggcggagcttgcagtgagcggagatgtgccaccgcactccagcctggacgacagagtgagactccgtttcaaaaacaaacaaacaaaatatatgtgtgtgtgtgtgtgtgtgtgtgtgtgtgtgtgtgtgtgtgacctttttgatgatgacttaagagcatttgtatttgaggtgaaaagagatcagtctgtaaaatggtttcacaagaatgtgaaactatttgtaatgagcattttctgcttgctgtattttcaggcctttttcttggtctatgctctgggatgtttaagtatttactatgagaaggtaagatgctttgtttacatacaacccacttaaaatttccctgttgttaaaagcaggttgtactaatttctatattgcattaatacaaatgtttctactcttactgaataaaataggaattgaatttttctctaaagttttggatttgggtcctgaggtgggactgttcgagcaaaaggcatctttgacccttttagattgcatttcattcctcaaaactaggagaagtacagtatcttgtactggataatgattaggaaatctgtgtcagaacagtattaaaaattaacaaaaataaaagttacccgtatttggcacctactatggtaaaagctatattttaggtactttacacgcaatatttccagtccttatctccacctggttagaatttgcagataaggggccgggcccggtggctcacgcctgtaatcccagcacactggggggccgaggcgggcagatcacaaggtcaggagatcgagaccatcctggctatcctggctaacatggtg

SEQ ID NO: 589 - DNA, 16476 bp, Homo sapiens
  source 1..16476: mol_type = other DNA
tggggaaagtgtcctgctgtggcatgaaataaatgaaacagaaaatgatggcaagactgctaagaacatcctttgctttgctcttccttggcctctttggggtgctgggggcagcaacaatttcatgcagaaatgaagaagggaaagctgtggactggtaggtaaatgaaatggaaggactgctgcatgcaaacagcctcggtacagagttggcctggctcactgcgaagttcctaaggggaatgtccattctctttcctccctttacaaataaaggaagttaaagtgtgcaaatcggccaaactcccaggcaggggtaggcttctgagtgacggagtttccccctgaaaaagagctgagcagcccctcttgggcctgattcactgttctcagcggggcaaggctggtagccacagaagtgggattgagctgacagcttctgtgagctggcaatttcttttaattacatcatggcttttcctaacagaacacttccaacatcctttgaaagactgacagagtaaagaaggcagattatttttttctgaaaatggagcatgtgctgctccttatgagaaagagaagggggacctggtcacacacagcactgtttgcctaacatcggtttgtttggaagcagaggcagctgttgccatgattggtacgtaggccactggcctgttgtacagtgtcaaagacattaaatgctgtgttgcattatagtcatgggttctcctaaagctttaactactttttcaccctttaattgggatatttaggtttgccataatggttggtgtcaagctttttgtgtaaacttcaggctacagaacacagatatactcaaggcagtagtcagtctttcctcagttactgagctcaacagaggtctgtgtggagttttgaaaatataaatatgaacgaaacatggttcctaccctcaaggacctcacagttatgtggtaagggcataggtggaacactggggaacagagagcccagaaaacttctctaaggatgtaatttttgagctaagttttaagaacaattaagaagtagctggaaaaagaagggatgtgcaagagcatctcaggccaatgaaggagcaatgaggaggtagagaggcaagaagcaacatggaaatttgggagttgcaaagtagtttggtattgctggaacttcaggagaatacaggaagatgaccggaggtgaggttagagaggtggggacagccaaggggtctgtgtgctgagctacaaggtttgaacttgacattgaaagggagctattggaggacttcacgcaggggtgtgaatggtcagatttgcactttaggaaacccattggcagtactatgagggctggatggatggggagcagcctagaatcactgagaccaggagcacttttgcagcattacaggtgagaagaggtgtagacctgagttaaagaagcggtcatggaaatagaaagaaggacatgctgagaagacttggtgatggatgggctgcagccagtaggagaaagggagatgttaagaaataattttaggttggccaggcgtggtggctcacgcctgtaagcccagcactttaggaggcctaggcagacagatcacctgaggtcaggagttcaagaccagcctgaccaacatggagaaaccccatctttactaaaaatacaaaattagccaggcatggtgacgcatgcctgtaatcccagctacatgggaggctgaggcaggagaattgcttgaacccaggaggcggaggttgtggtgaaccaagatcgtgccattgcactccagcctgaataacaagaatgagactccgtctcaaaaaaaaacaaaaaacaaaacaagaaagaaaaagaaagaaataattttaggcttctgcttctgagactgcatgaatatgttccctaatagtgtgggatgagcagatttggagcaaaatattataaatttggtttcaaaaatacggagttgggggttaatgggacatctttgagtttaggtttctctggacctcagcagaaaggtctgggctagaaacagactgaggactcttgagtacataattagagacagtcacccaggaaaaatgtttaaaagtactagctctcaactggtgtgccacggcacactgatagttcacaaacccttcactggtgggccaccaaattgtgattgatatggaaaatcatttttgccacaagtgaatggacatattacttagcaatgtctgttagagagaatataagcaacttgttgccaagctgctaacatttattgagaaaggtaaggaaagagaccatcaagtcagcaccaaagaataatttcatgtttcctgccacatgtgaggacctgaccctgtaagaaagcataagcagggcaggaaagagttcacttaaattaagtataagaccgaaggggaccaagtgaagagtgtgcagcttttacgggtttgtgacactgttgtatggtaatagtgtatatattataatgtttggtgcactgtgagtgtttaggggttaatggtggggttcatgctattagaaagtatttggctagatcagtggttctcaaccgagggtaattttgccctcagaggatttttgataatgtctggagataattttgattgtcacaacttggcagtgctactggcatctaataggtagagggcagggatcttacaatgcacaggacagctcccacaacaaagaatgatcggctgaaaatgtgaatagagcacactgagaaacgctgagctaggtaatccaataatgccttaatgctgtcttggctgagctacctctcctccctgtgagatatccaagggagatatacaaatggaaaacaacagtaaaggaaggaaagggcctacttaattacttggttttagccctgaatcttcaaggcagagtattcggataaactgagctgaggaatgcagcttatgacaggggctcaaagtaccttccacctctcctgaagcccaaacccaaatctcatatccagtcagccaactgcatggtctgggccttggccttctctccactgtagccacatggatcatggaagcaacagaaagagccactctcaatgtatatggacttccacttcagggactccacccaccagtataaccaaggtcttagaacatatccaatcagatttttattttcttctctggggaggagcaaagataagagtgaagaaagaggcaaagagcttgagcaaatccctttccttagaggccttccatgaaacagaaatgagagatatattaaagtgtgtaatacagttactgccacaggaaaacagtcaataaatgttagtaattcataatcattttgtctgttaggtttactttttataagttacctaaaagacaaaacaaggaaagtggagagactgggttagagtacctgtacctagactctacaactagaagctggaggaagagtgagcaactaatgaatgacaccaagagtgttttgggaaggacattacaacagctatatgaagcatatgcctctaaggtatgttatatagttaattgttcacttgaataatataaaatgcataaaactgaatccaaagccttcaccagagttttctgttcacccacccaacccccaatcctagcaccttgaagtgagctagctcaggaccagctcaagacaactatctgagtcaatctgactaagacctgaggaaacatgtcatcatactctacagcaatgccaaatttacttggcaccatgtccagtggtgtcactaggcaaggtgtgaattaattgtatattgaagtcttctggctgccaaaatgtctgtcagtttgcttattcatctaatagaaatagggagaggagcctctgctgttacagggcaatacagaactgtgattaacatgctatgagttatggattgtttatatcatggtgttgatcagtggtggtgagctcagtaaagggttctacttgatcttccttttcattaattgttttcaaaatgatatgttgaaaactaggactctagttcaaggccctagaactaacttgtctggatggagattatccctgctatatctggactttatcaggcaatgagctaatcagccaaagagacacaggtaagtaggcctgctggcttattatgggcatgctcccaatattctaggcatcatctgttgcttagtttcaagatactgctttccaaccaggagtggcaagtaaaatcaagccatgattaacatccaattatactcatgtatgcatttcctaacaataacttatagacaagtaaatatataacatgactctgctcctataatatgctggactgtatgctgggcctttacatatgtcaagtaatttaatgcccacaacaatcctgttttagcctctggcactgcacatgtgtatctgagtatttactcaaaatacacacggaactgtcatggtgtgtggtaatattcatgttatttacctgccattaagactagccttcagagccaagctacaaagttaaagcttatctgtaggctatttgagaacatgtgatgtgccaagcacttttctagatgcttttcaaaattatttgtctcaacaaacctgctttgaataaacagacgacagctgacccttgaaccatgctggggtaggggtgccggccctcatgccgtcaaaaatttatgtacaacttttgacttcctaaaaatttatctactaacagcctattggatgccttactgataacatcagtttgactggatgccttactgataacatcaatagtcgaataacatgtaatttttatgttatatatcttatatactatattcttacaataaagtaagctagagaaaggaaaatgttattaagagaatcattaaggaagagagaatatattcactcttcattaagtggaaatggatcatcataagtgtcttcatccttgtcatcttcctgttgagtcagctgagcagaaggaagaaggggaagggctggtcttgctatctcgggggtggcagagatgggagaggtggggaaggtggaaggggaagcaagagaggcaggcatactcagtgtaactttcacatgaaaatacataatgaattctatctatttgctttttcatttctccaaaaatgtttctatacagtagtaatcattttttcaccatttgctttagtttcagtgcccgtatcacagaagggttcatgttgtaaaagaagttaaaagcaatctttatatttttttcttttgagacaggatctcattcgacacccaggctgcagtgcagtggcaccataagagctatctgttgcctcgacctcccaggcccaggtgaccctcccacctcagcctctggagtagctgggactacaggcatgcaccaccatgcctggctaattttttttttttttttttttggcggagggggtgggtaaagatagggtttcatgatgttacccaggctagtctcaaactcctggactcaagcaatccacccatattggcctctgaagtgctgggattatacacatgagacactgcacccagcctaaaagcagccttgaatgatcagactgcgtctaatattgatctgtgttcttgcaccacctcttctatgtcttcttgctcatcatctggctctggttccattgagttatgttctgttaatttctctagtgtggtgtctattagcttttgaatttctccaggaatcatatcttgaaatccatcacccccaacctttcttgccatatccacaatctctttcatgactttcttgattgactctgtcataaatcctgtgaagtcatgctcaacatctgaacacagatttttccagcaggaatgtattgttttgggcttgatggctttcatggcttttcctataacagaaatggcatcttcaacgctgtaatcctttcatgtgttctatcatgtgttccatagcactgacaatcctttccagagagcatcatatgtaatgagtcttaaaggttcttatgaacctgatttagaggctgaatcagagacattatgtttgggggcaggtggacaactttgacacctttggtgttgaactcatgggacttttagtgcccggtggcactatccaataccaaaagaactttaaaaggcagttccttactggcaaggtaccttctaactttagagacaaagcatcactggaaccaatttagaaaaagggttttgttgcccaggccttcttattgtacaactggcagctggtatgtatcttttcccttcaaggctcaagagttagcagctttatagataggtgtagtcctgattatcaacccaactgcatttgcacaaaacagtacagttagtctgtcccttcctgccttaaatcctgatgcttgcttctctttcttaccaataagtgtcctttgtggcacttttttccagaataaggaattttcatctgcattaaaaacctgctcaggaagaaattatttcccctcaatgattttcttgatggcatctgggaattcatctgctgcctcttggtcagcaaaagctgcttctcctgttatcttaatttttttttttttaggccaaacctctttctaaaattgtcaaaccatcctttgctggtattaaattctccagctttagatgatctaccttccttctgctttgtcatatagtgacttcactttttctccaatcatattagagtctatagtattcctttcttatagcaatcttgcacccatataaaagctgcattttaattttaagtatgagctataaaagtattttgtaaaaagtgcaaggttttcatgcctactggcatagctgcagtgagggcttcacaaatttccttttcttttttcacaatggctcttatgctggattcacttaacttgaaatggcaggcaactgaagctgcagacctcaatccgcagtacatatcaagcaattcaacatcttcttataatgtcatgacttgtctttgcttgttagaagcatttccagcatcagcagtggcactcagtataggtcctacggttttattcaaggtttctgatattgccccaaacatgatgaaaaatatgcaagagctgtgagagatcacttttgactacagtatgcaatttactggagagaactgctcacgtggaggttgttagtgtcatgtggcattttcagcagatattcacaagacttgagctcacctcaatggtgacaaaaggtggctataaaattattacagtagtacagtattactacagttaatttaatgcagttatgacttagtactgcatatttatgtttgtttatatttcttgactgtgaatggcaccatgtttggtctatgtttgtatatgtaaattttgatgaattttaactttttataatagatttgtgcatagtttagggcagcaaatgaaaaaatagactagtatctacatatattgtatgcattcataatgtatctaactttttcttaatttttaaaaatatttctaggctatgtggttcatctgtgagttttttttttcaaattgtcaaaaatctccccctaaattttccaacatatgtttttaaaggcctgcatacatatagacccatgcagttcaaacccaagggccaaccgtattatataaaatgaaaacgcctgcagctgcttctgctttccaggttggggatggggaccagaagcatatctattagtgggaaaataatgcctacattgttcctttccacatcaacgagactgctaggggaggaagaaggaaagagcaacattgtaaagcctctatcatttgccttagttggagtagataggccttcacttgccggaatacaataatgatctttgaaggtgcaaaggtagccccacaccctagcagggagacacagttaaactgctctgctaaacaaaaaagggacagaaagaagccagggattaaaaagcataagaaacatggagaaagactggggtaaggccttatggtgatgtaaaaccattcaatatttcttacctttagtaaaacctgccacatgcaatgtcttgagtgattggttctggggggaaaatgacaggaaagggactgatttccatgcctgattggcatagagccaaaagaagagagcaacagcagttggtgatatccaggtatgactcagtgttctttggaagctggaattatgtgccagaagtgactgtgagaatattactcctccaccccctgacctggaattgaacctctgacagagagtgaaatgcaagattagaccaactggtttaaatctcaaatgtgaaggtgaccaaggccaatagctgggttacatttggaattgtttcccttctcttgcctttacaaataagaatcttccgtgtaccttcataaacatttatcaaactatattgcctgcacttgtgtgactatattttctgctagacagggggcagagactgtacccctcttgttcaacactcaatagtcaaaacaatactgaacatatgtgttaaaggaataaagctattcaaaggcacatgcctacatctacctactcttaagtccatgatcttttccctttatcaatagcctctcttccaactaaggctacaatccacttaacctcagctggcagttacactcagttagaacaataaacttcatttatcataaaaaataaattcctcactggatcatcccagaattcctccatgttgtaccccaaaggcacacaaatggcctccttaccacattcaatgcaggttcacagagtaactaactcttcagagttctccaaatgatgatatgaatgccattcagtagctatgatcaattatggaaaatgaaggtaagaaaacagcttacttttcggggcattcctaagcacagtagacaagaatgctccaacagactatgttgtgcattgaaaaaaaaattttatcacatcatataattaagcaactgtgagaggcttcttcattgaatttgttttctaagaaaaaagcaagggccttttttaaggacataggttatcctttcctgcttttaattatgtcactcagatttttttaatattgacattattggcttcaattaaagttgtatcatcacacaaattaaatggaaccacctagaacaaatattagcaagtttctaaaacatgaaaaatagatactatcgaaataatagctttattttggctctaagatttggctgtttgaaaattgactcatatttggccttaccagaggaaatccaatatcacacagtaaatttcaccactttttttaagcaggaaaatatcaagttggaaaggtgaagtgacactgaaaaatggattgcagaaaaatcctctcataatgggaggaagggagagcagataatgagggatcctgattaaacacaacgctactacccagcagtgaagtgaagcacaaagtgtgcagagaaaatcagatcctgacagccagttctgcactgtgcctataatatcaatggaaaaaacctcagatgtaatccttggttggttgttcctacttcatttcctgaacaaataattcagtactcctttattatacactggttgcttaatcagaaacttggttccaaaacaaccaagagaaataggaacattgccctcacacacagatcacaatgcacagggctcctgtcacatgagtaaaaatcatgcacagttaaaaatggactttctttcccctgtctttcatgtcacaggcttcatattgatggggaagctgcctattaggggaatagatgacttctcatgtgtattaatgaaagcaatgtattgcaggctgggtagctggtagaaatgttgtgggcgtttgtaagtggaagatttacgccattataaccctaatatattcctgcagagtaacaacacagcctatctaatatacaatgatggagtccctaaacctgtgaattacagcagaaagtatggacacaccaaaggtatgacaaagattcttggtttctctttcctactggaaatcaacaatttcttaaatatttcatcttgagtatccttatattccatactaaatagatagcctttcttcttaatagtttatttgagttattgaaatgtatgacttctatatcactggttataatataattatatgatttgacttggcaatctcatttttagaaatcccattttatttcttaacatattttaaaatatttgctttgcagcagcaggaatccaggtactgatactgaggacacacacacacaccagcaattttatatatatatatatatatatgcacatgaatatgtatatatgtatatgtgcatgtagtatatatgtacaaacacattttagtcagatttattgaagtatgatttatagagagtaaaacgagctcttcttaacatacagttcccttggaaatatacatttttgaaaaagtattttaaatagctttttatattaatttttatcatgttatttacattatcacatataatttttattatcctttcacaatttttttatttctaaactttgcatatgtgtttgtgaactacagaaaaattcaaaatacaggtaaacaaaaaaatctataatcctaatgcccattagataaaccatatttaatcctttctactttttctaaaatacatattttaaaacatttttacaaaactactgtaatgactatttttcaaccttttttcaatttcatatatcataaataactttccatggcaacaagtattcagaagattccaaattcaaatgccttcaagggagcaggcaaatgatgtcagcaagtgaaaggaggcagttactattcaacttgcctgatacggacacaattttccaggagatgttgaaaattaatatttgtggaaaaactccccagtttttaaatgttggcactaaattcaaagtttaaaaaatactctgcaagcgcaataaaatgtatccacaggctggatttggctcagaggatgtcagtttgcagcctctgatttagaatatagtttgtaatggctgacaaaggtcatgaactttgaaagctttttatttagcaaagttgctctcctgaataccctatttactgggaacccaacaattttcataacatgctacattcttcaacctctcctccaacaatctcccacactattcctgctctaccctgctaactgccacaaggctttggggaaatggctctaaagaagtagggcacaatatcaagtggaggggttctcttggccaacagatgccctaatatcctatggcatttgtaccaggaggataggattccagcaaattggcacactcatctgcacagaggataactcttgaaggttatccagttctgttacacacagaactttcaatattttccaccttgacacaggtattgattctatttccacccaaagaacaacagtatgctttcttaaaataggcactttgaaaaaaaaataactagaaggcatttggtttttaatctaacacttaggcaaacacgagtgaatcttatgtttgcatagtcatatgcaaactggaaagtctagctatcataccaaacctaccatgataaatttctaaacacaaaaatagtcagatgtctgttttacaaagttctttttggtatgtcacaaaatgataaaaatctttctattttcttccttattggctttcaagttgtttattttgctctagagatttttacaaacgtaattaactaggatgctttagcacagcttcctttttgtctctttgcttcttttattgggcttgtagaaatagtgactcttctgccaataaatgggcagcagttttttataacaaattattgtgagtacatttcttcatttgatattttctctttcaactctgttttttagtcagcttttgaaaagagcctagctgcttagcagtgaagacactatctaaatcttgctaggtgactgtatagtttaacaaggtccaattccaatttagcaaatttgcattctgccaaaacaaattttccttgtgatttcaaaatgaaattcctcttaactcttcacaggatggctaccttggttcccttttcgtggtggctttttatcagtaatcaggcaatgtgatatgtgccagaattgtatttgaaatctttgaaaaataagcatgatccttgtgattattagcctaataaaacactagtctgaagcataaatgggcttaaatgttgccactgtgaaccctattataaaagaagctttgtttttctgatttatctttgttaaatgtgtctttggtaggtttactgctgtggaacagagttcaagggttctggctgattcattccatccctcagtttcctccaattccggaagaaggctatgattatccacccacagggagacgaaatggacaaagtggcatctgcataactttcaagtacaaccagtatgaggcaataggtaaaactaaagtatgtgagaaaaaaaacgataactatgttgaagaaatgatttggaaatatattcataaatgtgtcacttcatttgttaatctattcatagaccctctgatacctagattctaatactggctttgccatggtgaggtcttgggcaggctcgcttactgggctttggctcttaatctaccagtgcagttgttgaacttgatcagggcagtagtttcaaatgtattcaggggcctggtagataacatatatgagtgaaacagacatgttacatgggaagtgaggatagtgatgaactggggtgttgactcacctagcttcccttaaagcctcagttccatcatactgtggctctacaggaatacaagcctaatgattacagatctccttatttctcatgaagtaccagaaacctagggtgtgtgtgtgtgtgtgtgtgtgtgtgtgtgtgtgtgtgtgtgtgtgtgtgtgtgtgtcagagagagagagagagagagagaaactgatttccaaatatgagttcaatcttaattttgtttttgaagttttccaggccacatgttccttgtaggccacaaacatgacacctctgagccagataatctccttttaagatttcaagctcagcgaaaaattcttagatttggcaaactgtggtgggaaaggagaagtagggacaggttggtagctaaatagtagtgaaaagcaacttgcctatagaaacaggagatttagaaaatgtttctcatcaaatttccatcttatggcaaggatcactgagctcctcacccaagtcaagctctagtctcactagttgaaatcatgtaatgatgccgaatatcacagagattaggcatgcacactgaggagatgatgattcttaaagctttttggtacatggagttctcaacttttgtatatgtatatgtacatttagaagaaaaaatatatggtctccaaggccaaattacctgggttcgaatatcaatttcatcaattacaaacttcataatcttgggtgtgtgatgtaaattctcagttaattcatctataaagtaaagataatgataacaacagaatttgcctgataacatgtttgctgtgaggattaaatgaataaacccatgtaaaacttgtaggaccatgtctggaaactaggaagtgcttaacaggtgttagttatttaaacaaaaagttatttgaaggctattggtttaaagaaagaaatgcctttgtttttgtgttgttttgtttttaaatccacaaaaagatctataataacagcaggtatttccatttgtgtcttaattctcaacttttctttactgtttcttgattcagattctcagctcttggtctgcaaccccaacgtctatagctgctccatcccagccacctttcaccaggagctcattcacatgccccagctgtgcaccagggccagctcatcagagattcctggcaggctcctcaccacacttcagtcggcccagggacaaaaattcctccattttgcaaagtcggattcttttcttgacggtatgaaagaccatcatcaaacaacatgctgtataattctgctgttgaactgactagggatagcttagagaaatattttgagtattcagagaaagagagatgaaaaaagggagcaaaagaaaaggaaaaaggaaagtcacggatcagttcaaacatcagccggctatatgagtcaaccacaaaagtatctcacaaccatccagccacgggccagtgaaaactcagtctccatcctctgcttggcaaggggccatagccatctccatttcttccattccctgagtggttattttaagccttctttactctcaagccctttacactactctgcaccctcactcatggcttccttttttccttcataaatagaacaatgttcactagggagaaaccacttctatatgctaccccccccccacccctccaacaatcttatctgttctccttcctttttgcagggtttctcccacccccaaagaagtgatgcaccccctatgctctgaaacctatctcagcctcagcataccttgatttgtccacctgatctgttctctgtgttccatttcagttctcccactccccaggctactttctcataacatacaaacatgcctaaaaaccctccctcaactctaaagcatctatagctctatttttccttttctttcagatttatttttttaaaactcatcagggccttcacttgctcaatgttccttcactgcagtcttgcttctgtctgtagacacttgaatctctccccagtcaccaatggctgtcttagatgacctcactgtcttccttgcttatttgcttccttcctttatacgttgaataaaatttactgaatgcctactactagccaagccctgtgttaggcactagagatcttaaacttgacaggacagagacagtctctgcagaatgtggcactgttgaaattctttcctttttgaaactctcaccttcactgattttggggaacacgcagtcccctggtctttctcccacttctaagtttcttctgccaggtccttttcctctgactactctttaggtgactgggttgccatgtggcccctacccttccttatctcattctacatacccatgctgggcaattccagcaagccctccaatgattctcaagtcttgatctctaccccagacctctatactgactgatgtatttaacagcaagtgagacatttctacttgaaggtggtacagccacatcaagttcaacatgccaaactcactgcgtcatcatcccctacaaatctactttttcttgtattctgcatagttacccagtcactccccatctcttctttttctgacccttctatcaaaccatcaaattcagtcagttccagatccttaataacactcacatgtattgtatcttctccaaactctttgccactgccatgggtcacacctgtgtttattgacacagttattatgacagccttatgtttttcctttcttctttctaacctgtccttcccaattcatcctgcccattgcctctcaactgatatttatgatcataaaccagtttctattaattctttactaacattcctttaaaaactctccactgatttcaggaaaatccaaacactttggcatgatttacaaagttccctagaaactggccctaattccttctctagactaattttttccaaaggtctttccaggacaaagacatatattgcttcattcgttttatagaacagaagatgtttgcaaacaccaacatcatcatagtaatgatgataataacttacatttgcacatcactttagcatttacaaaatgttttctcatccactatctcaattatgttgttattattgtgctcgtgacatccacatatcaggggtgaaagatgatttccattccagagtatattttcagggactaatctaagtgtaaataccaacctcactatctttctcctcctaaaccctagacatctttgcagcctggatggctcaacggctgaagacacacttgttaacagaaacctggcagcgaaaaagacaagagcttccttcaaactgctcccttccttaccatgtctacaatataaaagcaattaaattatcacgacactcttatttcagttcttatcaagatcatgccaagtggtgtatttcccaaaagggcaccaaaaatcgctggacatgtattggagacctaaatcggagtccacaccaagccttcagaagtggaggattcatttgtacccagaattggcaaatttaccaagcatttcaaggattagtattatactatgaaagctgtaagtaaacttggtgaaaggacacaggtactatcattgaaaaccttgacaatgggtcttcttccattacaccttctttatattttaaaggcctgtgaatatacttataacctgcatatcacaaaataaaacatttttctctcatgtt

SEQ ID NO: 590 - DNA, 32744 bp, Homo sapiens
  source 1..32744: mol_type = other DNA
ctgaatggtacgcgctcgccgactggacagcagtctggcttccgcggtcggacttctacacccgcctccagacaggagaggggcacgtaccggcgctacggcttcctgcaggctgcctccggatagtccccgagagcttgttccgaagcaagcaccctgcagccctagcgatccagccctcccctggaccctaggtcacggcaatcaaccccctgctgtggttcccgaaccccaaggcccgatgggtcccgcgggggtcgcggcgaggccagggcgctttttcggcgtctacctgctctactgcctgaacccccggtaccggggccgcgtctacgtggggttcactgtcaacactgctcgtcgggtccagcagcacaatgggggccgcaaaaaaggcggggcctggcggaccagcgggcgagggccctggtgagagggggaggccttctgtgccgggaggaaggcgtcccagaggaggcggaccccgcggggcacaggcctgttgagaaggaccggccaggactgtgacagaggcggggcgtctgtggtggggacggggcctgtcgcaggggaggagcgtgacggggaggcggtgcccggggcatctccgcggcggaactcagggaaggagctagctggggcgggggtgatgatccaggctgggttccagcatagggctcttggtgggcacgctggggtcgggtggaatgcaggagagagaggaggtgggacaggtgggtacctgggctggaggcagggcctgaggtgggcaggtgcagagggctgcacttctcggctgaagccgggaatgaggaccccgctctcgggtgggattggaggggacccgcggctgaggcgctgggctgcgacagggacatcacggttctcctcctcagggagatggtgctcgtcgtgcacggcttcccgtcctccgtggccgcccttcgggtaaggaaggagaccgggcagcggcggccgggtgagggcttgggttccgcccctcgctccgagccgccctgatgcccctgtacgccgcccgcagtttgagtgggcttggcagcacccgcacgcctcgcgccgcctggcgcacgtggggcctcgcctgcgaggagagacagccttcgctttccacctgcgcgtgctggcgcacatgctgcgcgcaccgccctgggctcgcctcccgctcacgctgcgctgggtgcgcccagacctccgccaggacctctgcctcccgccgccgccgcacgtgcctctggccttcgggcctccaccgccccaggccccggccccaaggcgccgcgcaggtccctttgatgacgcggagcctgagccagaccagggggatccaggggcctgctgctccctgtgcgcccagaccatccaggtgaggtccccccgaggaatggatggctctagagtccagacgacttcggatccagctctttcttgagggaaacccactgacacgctttggccaccctatccccatctctaagatgctgatgctataggacttacggccattcctgagcaaagcaggccctgctcagggccttcaccatttccccttcaaagaaaaggttcttccctaggccatcagtactccgctgcactccagtgtggtcgacagagcatgaccctcttttttttttttttttttttgagatggagtctagctctgtcgcccaggctagagtgcagtggcgcgatctctgctcactgcaagctccgcctcctgggttcacgccattctcctgcctcagcctcccgagtagctgggactacaggcgcccgccaccacgcctggttaattttttgtatttttagtagagacggggtttcaccgtgttagccaggatggtctcgatgtcctagcctcgtgatccgcccgcctcagcctcccaaagtgctgggattacaggcatgagccaccgcgcccggccctttttttttttttagacagagtcttgctctgttgcggaggctggagtgcagtgatctcagctcactggaagctccgcctcctgggttcaagcgattctcctatctcaacctcccaagtgtgccaccacacctgccgaatgtttgtgtttttagtagggatggggttcgccatgttgggcaggctggtctcaaactcctgacctcaagtgatctgcccgcctcggcctcccagagtgctgggattataggcgtgagccaccatgcctggacatgaccctgtctctaaaacaatgtaatgaactgcagctcattcttgtgtgcacttttctgcaccccctttcccttaacacttactattgtctggcatgctacgtgttttcttgatctcattagcctctcccaccccaactgccacactgcactatcagagggcagcacttatcactgctgtagaacaaagtcctgcactgagccgatggcccagaaattttctttttatttatttatttattttttttttgagacagagtcttactctgtcgctcaggctggagtgtagtggcgcgatctcagctcactgcaacctctgcctcctggtttcaagcaattctccttcctcagcctccagagtagctgggattacacgcgcctgccaccgcgcctggctaatttttgtatttttagtagagatggggtttcaaccatgttggccaggctggtctcaaactcctgacctcaggtgatcctgcccacctaagcctcccaaaatgctggtattacaggcatgagccaccgtgcccggcctaaatatttaataaaataatggacgatgggtgccttctactgagctcccggtaattgtgagtgagtagaggacttgccctggggacattcagtgacctgctgggtgttgctgagctgtgaggaagttcaggtctggctgcagtggtgaggctgtgactcaatcaatcactgctgatgctcccaggacctgcaccagcttagtcctaggggcaaggattttaactgtccacctcagtttcttcatttgtaagatgcaaataacagtcacccctgcctcatgggatggagctgtgtaatgcccgcaacagtgcctgctgcatagaggggttgctgccagctgcctctccctccttgtctcttacctgcctgctgcctgggtcaggatgaagaggggcccttgtgttgcccccaccctggctgcctgctaagggcccatgtgatctgcctggcagaggagtttcttcaggaagaaccagggcagcttctgcccctagagggccaatgcccttggtgagtgcagtcccctggccccagcctggtccacctctgggaagagggtgcccagttgtgcaatccaggcccaggcagctgagccctcatctcagcatccagggcggatactggagggggcttgtggcatctgactctgtatctcctacctgcccctctccttggtagctgtgagaagtcactgctttggggagacctgatctggctgtgccagatggacactgagaaagaagtagaagactcagaattagaagaggtgagtgggctttggtggcgggctccctaccccactccctgccctgggctgcctgtgaccacactgcttgcctctgcaggcacactggacagacctgctggagacctgatcctcagtgtccttaccccctcctacctcttttctgtgccacctgctgtgggtccagcaggtttttacttgagtacaataaaaagtctgagtcaagggtgccttatggtggatgctgaggggaggggcggagctagtagcccaaggtcctgccagtcacggggcttcctcaggggcacagaggaggcaggaggggcccctggccctagcacgtgaacagcttctactctgcctggaaaccccatgcctcagctttcccctacttgcctctgagctcatgcaattcttggaagcctgggagacttaccttgaaattgaatgcaaataggacaaagaccaaggaggatggggggatgccctccttccacggggccctgtggcttccaagtcttaatctcctctagtctcttgtctacggagcctccttcaaacccagggaaagaaaagcacctgccagggttgtttttcttctaggatcttctattgatgctctgtgaggtcccccaggagccatgaagctagggctggctcctagggcaatgggactacagtgtccttgtcctttcttattctttctgttctttctttctttctttttttttttttttttttttttttgagacagagtctcactctgttgcccaggctggagtgcagtggtgtgatcttggctcactgaaacctccgcctcctgggttcaagtgattctcttgcctcagcctcctgagtagctaggattacaggtgcccgccatcatgcccagctaatttttgtatttttagtagagacagggtttcaccatgttggccagcttggtctcgaactcctgacctcaggtgatcctgctgcatcgacctcccaaagtactgggattacaggcgtgagccaccacgctcagcctctttcttgttctatatgtccatgctctgctccacttctgccccttcactctgcccccacacatcactccagactggccttgtggtcagagcctggaatgcctgggctgctgggggcctgtggactgcactgggccagaacccctgccgccttcaagactggcctgtagccagcaggtaggtgacttttcccaggccggcctatcccacctttcccctccactcactcacctcccttgcctgggtcaattagagaaagcttgtcggccaggcatggtggctcatgcctgtaatctcagcactttgggaggccgaggcgggcggatcatctgagctcaggagtttgagaccagcctggccaacatggcaaaaccccgtctctactaaaaatacaaaaattaaccggatgtggtggtgtgcacctgtaatcccagctactcgggaggctgaggcagaagaatcgcttgaacccaggagggggaggttacagtgagcggagatcgtgctactgcattgcagcctgggcgagagagcgagtctccatctcatataaaaaaaagaaaaagaaagaaagaaagcttgtctgttggcctgccctgcagggtggagttcagagggaaggtcaggagcctagtgacagctcaaaaaaaaaaaaacccaaataccaatgttggccccttttgcctttcattcatgtgttttctatacactaaactcacatattgggtttgcagatcactccaagcttggctggagctgtggtggtaaggagggtaatagagaagcttccccaccctcaaccccaccccttccttcctggagttcccagccctgactttagatccctcccacactggaccttcaaaaccctcagggcagagagcagccctacactccctacaccacacccatactcagcccctgcaggcaaggagagaacaggtcaggttcccgagagctcaggtgagtgacacgttggaatggcccagggcaccttcaccctgctcagcttgtggctccaacattctagaagccgaggcctctgccatccctgccctttcccatggatattccatttcaattagacaacccagcctggccggaatccccctgcgttccttcttttcctttgtgtatttttgagacagggtgttgctccgtcacccaggctggagtgtagtgggatcctggcccactgcagcctcaaattcctaggctgaggcaatcctgccgcctcagcctcctgagtagctggggttacaagagcaagccaccacacccagctaattttgaaaaatattttttgtagaggagaggtcttgctttgttgtccaggttggtctcaaactccagggctcaagggatcctttcccgttggcctcccaaggctctgggattacaggcgggagtcaccctgcctgggcccctccttttgatgagtcatcagttttcattcccgcacgaggctctagcccctggtaccagcttagttgctcaatgggctgtgtttgttctggagcccagatggactgtggccaggcaagtggatcacagacctggccggcctgggaggtttccacatgtgaggggcatgaggggggctcaaggaggggagcatcggggagaggagcgcactgggtggaggctgggggtcccagcaggaaatggtgagacaaagggcgctggctggcagggagacagcacaggcaggccctagagcttcctcagcacagctggactctcctggagaccttcacacaccctgatatctgggccccgcgctacgagggtgctttcactggtctgcactatgccccaggccctgggattttgaacagctctgcaggtgactgaaaggtgcggccaggctggggaacgacctggtttcagccccagccccgccactgactgactttgtgagtgcgggcaagtcactcagcctccctaggcctcagtgacttccctgaaagcaaaaactctgcaaaggggcagctgggtgctggctcacacctgtaatcccagcactttgggaggctgaggtagacaaatcacttgaggccaggagttctagaccagcctggccaacatggtgaaaccccatctctactaaagaaaaaaaaaaattagctgagcatggttgtacatgcttgtaatcccagctacttgggatgccgaggcgggaggattgcttgaacccaagaggtggagtttgcagtgagctgagattgtgccacactgcactccagcttgggtgagagtgagactccatctcaaaaaaaaaaaaaaaaagagagaatcccactttcttgctgttgtgatggtggtaagggaacgggcctggctctggcccctgatgcaggaacatggagctgatccaggacacctcccgcccgccactggagtacgtgaagggggtcccgctcatcaagtactttgcagaggcactggggcccctgcagagcttccaagcccgacctgatgacctgctcatcaacacctaccccaagtctggtaagtgaggagggccacccaccctctcccaggcggcagtccccaccttggtcagcaaggtcgtgccctcagcctgctcacctcctatctccctccctctccaggcaccacctgggtgagccagatactggacatgatctaccagggcggcgacctagagaagtgtaaccgggctcccatctacgtacgggtgcccttccttgaggtcaatgatccaggggaaccctcaggtgcatggctgggtcctgggggtaagggaagtggaggaagacagggctggggcttcagctcaccagaccttccctgacccactactcagggctggagactctgaaagacacaccgcccccacggctcatcaagtcacacctgcccctggctctgctccctcagactctgttggatcagaaggtcaaggtgaggccgggctcaatggttcacacctgtcatcccagtttgagactgaggagggaggatcccttgaaggcgagagatggagaccagcctgggcaacattgctgtagagatgacatcccatctctacaaaaataaaattaacaacctggtatggtggcatagactgttcccagttacttaggaggctcagcggggaggactgtttatgcaaataggaagctgcaatgagccctgatgatcctgctgctgcactccagcctgggcaacacagcaaaaccatctctacgaaaaaaaagttcccactgactggcaaggaaagccaggaaggggggctcaggtgccctctcagccatgtacctgttcttctggaagggcctcctcgcttctgccaggctcatcacatcttttttttttttgagacagagtcttgctctgtcaccctggctggagtgcagtggcatgatctcagctcactgcaacctccgcctccccagttcaagtgattctcctgcctcagcctcctgagtagctgggattacaggcgtgtgctaccacacccggctaatttttgtattctttttagtagagacggggtttcaccatgttggtcaagtggatctcaaactcttgaccttgtgatcctcctgcctcgacctcacaaagtgctggaattacaggcgtgagccaccgcgcctggccctttttttttttgagacagtttcactcttgttgccgaggctagagcgcaatcgtgtgatctcggttcactgcaaccaccgcctcctgggttcaagcaattctcctgcttcagcctcccaaggagctgggattacaggtacctgccaccacgcccggctaattttgtatttttagtagagatggggtttcaccatgttggtcaggctggtcttgaactcctgacctcaggtgatctggccaccttggcctcccaaagtgccgggattagaggcatgagccaccacgcccagccttcatcacatcttgagagaggacactgtctgcctcttgctctgatgagggtctgatgcaaggatagtgagtctctacagtgcacacttaagaaaggcagcatgtgggtgctcacaggtcagcggaggagggggagctggtggggaccaggcatgccttgctccagatcaggatatgatggcattggtgcagattatattagtatagaatatggtctcaggaaccaggcaggactttggcttccgagcagggttcagatcccagcttggccctacctgtgcagtgagatctcaagcaagtcagcctctaagcctcaggttcctcctttgccagttcaacagatgagctggcctggggtgggctgtgtggtgatggtgctggggctgggtcctctgcccctgcaggtggtctatgttgcccgaaacccaaaggacgtggcggtctcctactaccatttccaccgtatggaaaaggcgcaccctgagcctgggacctgggacagcttcctggaaaagttcatggctggagaaggtgggcttgactggaggaaggagggtgtgaagccgaggggtggtggctataacgtacagcaaccctgtgtcggtgccccctgcccgcttctctagtgtcctacgggtcctggtaccagcacgtgcaggagtggtgggagctgagccgcacccaccctgttctctacctcttctatgaagacatgaaggaggtgagaccgactgtgatgcttccccccatgtgacacctgggggcaggcacctcacagggacccaccaaggccacccagccccgtccctgggcggctcccacagcaagcccggattccccatcctacctccctggcccaggcccccccactgcagccccacctggcagcaggctcggcacagctttcatcttctgcacctgagtcagctgcatgggtggccacggatcagatacttagtcctattgcttatcctcaccaaagggtgtgccacccagggccacagtcatggaagaagaccatcccggtcctcacccataggcgccaagccctgttcatgatgggatcacagggcagagatcaattcattttactccagagactagggccccaggggttgaggctctttggggtttctaggggaagtggccagatcccctctgaggttagagagggggacccgttttgttttgctccactgaggagccctctgctgctcagaaccccaaaagggagattcaaaagatcctggagtttgtggggcgctccctgccagaggagaccatggacttcatggttcagcacacgtcgttcaaggagatgaagaagaaccctatgaccaactacaccaccgtcccccaggagctcatggaccacagcatctcccccttcatgaggaaaggtgggtgctggccagcacgggggtttggggcgggtgggagcagcagctgcagcctccccataggcacttggggcctcccctgggatgagactccagctttgctccctgccttcctcccccaggcatggctggggactggaagaccaccttcaccgtggcgcagaatgagcgcttcgatgcggactatgcggagaagatggcaggctgcagcctcagcttccgctctgagctgtgagaggggctcctggagtcactgcagagggagtgtgcgaatctaccctgaccaatgggctcaagaataaagtatgatttttgagtcaggcacagtggctcatgtctgcaatcccagcgatttgggaggttgagctggtaggatcacaataggccacgaatttgagaccagcctggtaaaatagtgagacctcatctctacaaagatgtaaaaaaattagccacatgtgctggcacttacctgtagtcccagctacttgggaagcagaggctggaggatcatttcagcccaggaggttgtggatacagtgagttatgacatgcccattcactacagcctggatgacaagcaagaccctccctccaaagaaaataaagctcaaaataaaatatgatttgtgttcatgtagagcctgtattggaaaggaagagaaactctgagctgaaagagtgaatgcccggtggggccacatatggtcacctctcccccagccttcagctccccaggtcaccatatctggggaggggagaagggtttggagaagtaaaacccaggagatgtgtggaggggggatgtctgtttaatcccagcacatcctctgctgtcctgccccaagatggtggaggacgtcgagtccgccgggcagcgtcactttttcttgggctccttagaagctaccaggtacctctgggccacactgagatgaggggagtagccgtctgcataggaggtgtcttcaaacaggatagaatagtcctcctggggctgtggggcaggtggacaggaagggcagagagcagccccggggctggtgtcactcacttgttggtggcatggctgtaactgaccacctcggccaggatccactgctcatccccatccacggccttcacccgggcagccaccttgtctccaggtctggccacgtagtctcctgaggcagggatggccccacagaggggtgggggcctgtgagtggaacaaaggatcagtcccagcccctgggcaccagccccttcctcgcagctgctgccctcacttgtcaccaggcttcccaatccacaggggcagggtcatggccgactgctgcagcagggtcatcagcacccctctgcgcatggtcttccggggtggctccaagtcattgtagagacccgcgatcttggccactgtgggaagaaagggaggcctgaggccccagggacaggggctggccctgaccccccagcatgctgaactgagctgctggaggagcacctgggagcccccagctcccgagtgagcccgagggcacagcaggactgtgacctgatctgccaggtgtcctacaggggctgctgcgctcaactacatatgggtgagacggcagcacaccaggcacccaggggaaggaaccagggagggacaaagcgggttctgaggtgctggtgaggttctcttcttgatgtcggtgctgacacagaagtgtgtttcgttagtgaaaagttcctaaaattcgaagggtcccgcgggaatcggggcgaggccgggtgcctcttcagcgtccagctgctctactgcctgaatccctggtacccgggccctgtctacgtggggctcactgtcaaccctgttcgtccagcagcacaatggtggccgcaaaaaaggcggggcttggcggaccattggccgaggtccctgttaagagggggagggtctctgtgcccggaggaaggctccctggaggaggcggaaccggggggcacaagcctgctgagagggacccactaggtctgtgacgtgcgcgggacgtcccgggcgaggcctgttggtggggggaggctgtcgcaggggaggagcctaacggggaggcggtgccctgggaatctcggcgttagaactccggagagcagctggctgaggcgagggtgatgatccaggctggggtccagcgcaggggtcttggggggcacgctggggtcgggtggagcgcaggagggagaggaatgagaacaggtgggtacctgggctggaggcgggacctgaggtgggcaggtgcagggggcgtgccttcaggcagttgcggggccagggctcggctgaagctgggagtgaggaccccgttctccggtgggataggaggggacccgcgatgctgggctgcgctggcggtagggcgcggcggggctcacaggaacattcctgttgtcctccccatggagattgtgctcgtcgtgcacggcttcccatccgccgcggccgcccttcgggtaaagaagaagaccgggcggcggcctgtggcctggatttggggtccgacccccgcccggagccgccttgactccaaccccgccgcggttggagggggcctggcacccccgccctgggcgctcctcccggtcccgttgcgccccgacctccgtcagccgcacggcactggccactgaccgtcgggcctcctccgccccagggcgccgcgcaggtccctttgctgacgccgagcctgagcctgagccggtcccggggtccaagagggctgtgtgcaccctgcgcgtccgcgcgctccaggggaggtgcgctccaggggaggtccgccccaagcagagcggcacatcctccagacgacttcggatcctgctgttgaggagccaggaaacgccctgacactgttgcggccctgtccacatctctaagatggggatggatgatagtacttctggccattcctgagcacagcaggacctgccttttccctttgactggaaggttcttctctacatcttcagtcttgataacctgccacctccacagggaggtcttccctggctcccaatttaaaattgcagctctgagaagccgggcatggtggcatatgcctgtagtcccagctacgggggaggctgaggtgggaggatcgcttgagcccaggagttggaggctgaagtgagctatgatcactccattgcactccagcctgggggaaacagcaagaccctgtctctaaaaaaataaaatacaataaaattgcggctctttcttgtgcacttccctgcccgcccccctttcctgaacccttattattttctgccatactacaaattttatgcatctcattaaaccccttccgaacctgtgtactaaactgcctgggggcagctctcatcactgctgtagaacaaagtcccacatagagccaatggccaagaaacagttaataaaataacagacgatggtcctggcctctactgtgagtgagtaaagggcttgccctgcagagattcagtgatctggcgggggttgctgagctatgaggaagttcagatctggctgcaggggtgaggctgtgactcagtcaatcactgcccatgctcacaggacactggccagcttagtccctgggggcaaggattttacccccccccccccacctccatttcctcatctctaagatgtgaataatcgtcgcccctgcctcacaggattgagctgtgtaacccccctcccaccttttttctatgccatccactgcgggtctggggctttttactggaatgcaatacaaagtctgagtcaagggtgccttctgttggttgctgagggcggaggcagagctagttgcctgtggtcctgccagtcaaggggcttccagaggagggaggaggggcctgtggccctagcatgtgagcagcttctcctctgcctggaagccggacgcctcagcttctcccacactcccacctgcccgcttgcctctgaattcacacaattcttggaaggcttgggagactcacctttactcaaatggttacctgtctcgtgtctcgtgcccagcttgaccttttttttttttttttttttttttttgagttggagtcttgctgcgtcacccaggctagagtgcagtggcgtgatctcagctcactgcaatctccgcctcccgggttcaagcaattctcctgcctcagcctccccagtagctgggattacaggtgcccaccaccgtgcctggctaattttcgtatttttagtagagacagggtttcaccatgttggccaagctggtcttgaactcctgacctcgtgatctgcccaccttggcctcccaaagtgctgggattacaggcgtgagccaccatgcctggccccagcttgaccttgaactttaaatagtgaagacaaagaatgaggagggtggggggatgccctccttccacagggccctgtggcttccaagcctcaacctcctctggtctcttgtctgtggagcctccttcaaacccagggaaacaaaagcacctgccacgggctgctgtttttctaggatcttctagcgaagctctgtaacttcccctgagagccatgaaactgggctggctcccagggtgatgggactccagcgtctttgttctttcttgttctatgcatccatgctctgctccaccgctgccccttcaactctgcccacacatattactccagactggccctgtggtcagagcctggaatgcctgggctgctgggggcttgcatgcaggctgcactggactagaagcattggcgccttcaagactgccctgggaaacatgacctgccctgtttctgtctagtgagtacccatttttccccactcaccggctcacttcccttggctgggtcaattagaaaaagctcttctgttggcctgccctgcagggtggagttcagagggcagctcaagagcccggtgacagctcaaaaaataaaaaaagccgccaggagcagtggctaatgcctgtaatcccagcactttgggaggccgaggcaggcggatcacctgaggtcaggtgttcaagaccagcctgaccaacatggtgaaaccccgcctctactaaaaatacaaaaattagccgggtgtggtggcggatgcctgtaatcccagctactcaagaggctgaggcaggagaattgcttgaacccaggaggtggaggttacagtgagccgagatcctgccactgtactccagcctgggcgacagatcacgactccatctcaaaataaataaataaataaattatacattgggctcttttgccttttattcttgtgctttctaatcacaactaaacactaaactcacatcttggctttgcagatcactctaagcttggctgcagctgtggtgctgaggaggctaatagagaagctccctcgctctcaaccccaccccttccttccgggagcaaacccaagtctggtcccgactccggatccctcccacattagacctaccacaccctcagggcagacaacagctccacacaccccacactcagccaccagggcaagggagcaaaattccagaaagctcaggtgagtaccagagtggaatggcccagggcgccctcaccctgctcagcttttggagccaacattccagcagccaaggcctctgccatactggctgtttccccacggatatccagtttcactaggggaactccagcctggcttcccttctttcttttttatttttgtttttttgagacaaggcttggctctgacacccaggctggagtgcagtggccaaattgtagctcactgcagcctcaaaatcatgggctcacatgataatcacgcctcagcttccctggtagctgggtgtacaggagagagccaccatgcccagctaattttttaaacttatttttaatttattttttatttttttgagacggagttttgctcgtgttgcccaggctggagtgcaatggcatgatacagctcactgcaacctccgcctcctgggttcaagcgactctcctgccttagtctcccaaggagctgggattagaggcatgcgctatcacaccctgctaattttgtatttttcatagagaaggggtttctccatgttggtcaggctggtcttgaactcccgacctcaggtgatccgccccaccttggcctcccaaaatgctgcgattacaggtgtgagccaccacacctggctgcccagctcagttttaaatattttttttctagagatggggtcttgctgtattgcccaggttggtctcaaagtccaaggctcaagtgattcttccccactgggcctccaaagctctgggattacaggcatgagccatggtgtcccctcctcattctgcggaatcatcagagttttgttcattcccacaccaggctctggcccccagtaccagctcagttgctcaatggaccatgcttgtcctggagcccagatggactgtggctgggcaggtggatcacaggcctggccggcctgggaggtttccacatgtgaggggcctgaggggctcaaggaggggagcatcggggagaggagcccactgggtggaggctgggggtcacagcagaaaatggtgagacaaagggtgctggctggcagggagacagcacaggcaggccctagagcttcctctgtgggcggcaagccacccaggcaccgaggcaagagacagaggacacgatctgttccagtataataaaatataaaacaagaatagttataccagatatagatcttagatatgattatatatgaatatcattaatcattagtttgtagcaattactttttcttccaatattataataatccttgctctataatcatagcctaggaaaaaccaggccatacagagacaggagctgaagggacatagtgaggtgtgactgcaagacaggagtgcgagccttctgttatgcccggacagggccaccagagggctccttggtctagcggtgacgccagcgtctgggaagacgcccgttaccaggcggatcgtggtccagcggtagcaaaaggtgtcaagaaacaacacccgctactcagcagaccaggaaaggggggtctccctttccctgggggagtttagagaagactctgctcctccacctcttgtggagggcctgacattagtcaggctcgcccgcagttatccggaggcctaaccgtctccctgtgatgctgtgcttcagtggtcacactcctagtccaccttcatgttccatcctgtacacctggctctgccttctagatagcagtggtaaattagtgaaaatactaatagtccctgatatgcagaaataatggcataagctgtctttctctttgtctcctctccctctctgcctcggctgccaggcagggaagggccccctgtccggtggacacatgacccacgtgaccttacctatcattggaggtgactcacattctttaccctgccccttctgccttgtatccaataaataacagcgcagcccgacattcggggccactaccagtctctgcacattggtggtagtggtcccccgggcccagttgccttttctcttgtctctttgtcttgtgtctttatttctacactctctcattgccgcacttagggagagacccaccgaccctgtggggctggtccctacagagaatgacttgaacctgggaggcagagattgtagtgaggtgagattgcaccactgcactccagcttgggtgacagagcaagactctgtctcaaaaaaaagatgaggtgagttcagtttgggaaatgttgaatgccagatgcctttggcctattcagagggagattgccgaagcacagaggagagttcatgacagggtttaattatttttagtgctctcatgtcccagattcggccaattggagtccctccacgctggttcctgtgtcctgtgacatcacccatcttctttctccttttcttctttcataagccacttccttcctggcatgacagtgtgttccaggaccatcttgtaccttgcacctgccctgccctggccctagaatcagccaattctctgaggcatcctgattcctttttgtgggggaacggtttgagaacaaaatatactactacatgatactatattctgacaggaaaaaacacagccataagaaataaagccatggccgggcacagtggctcctgtaatcctaacactttgggaggctgaggcaggaggattgcttggggccaggagttcaagaccaacctggcccacatagtgagccctcatctctattaagaaaaaaaaaaaagaaagaaggaaagccatatttggatgagtttagtcttctgattatttttgctgaagttttaaattattattattattattttttgagacagagtctcgttctgttgcccgggttggggtgcaatggtgcagtctcagctcactgcaacctctgcctcccaggttcaagcaattctcctgcctcagcctcttgagtagctgggattacagattcctgccatcacgccctgctaatttttgtatttttgttagagatggggtttctcaatgttggtcaggctggtctcaaactcccgacttcaggtgatccggctgccttggcctcccaaagtgctgggattacaggggtatattttatatttaaagtatatttaaaaattaagggccaggctcagtgtctcacgcctgtaatcccagcactttgggaggccgaggtggctggatcccatgaactcgggaatttgaaaggcacaagagcgaaactccgtctcaaaaatatatgtaaaatatattttatggccaggcatggtggctcacaaccgtaatcccagcaccttgggaggccgaggtgggcagatcacctgaggtcaggagttcaagaccagcctggccaatatcgtgaaacgctgtctctactaaaaatacaaaaaattaactgggcgtggtcgtgtgcacctgtaatcccagctgctcagaggctgaggcaggacaatcccttgaacccgggaagtggaggttgcagtgagccgagatcgcaccattgcactccagcctgggcaacaagagcgaaactccacctcaaaaacaaaacaaaataaaacaaaacaaaacaaaacaaaatatatgtatatacacacacacattatatgtaatatctacttttaaatataaacataaatattataaagcttttattgcaattgttcattttagaaacttcagaaaatacaaattagtaaaaagaagaaaataagtctgtaataccacttttaagaactattttaaaaacctctagcttttttttgagatataatttacataccaagacttttttaaaaaaaaaaattcataatggtgacttttttatcggactgtatagaataaagcttgttaaaatgtctaagatattttgtaatatatgaaaatttcagctaaacttgtgctatagcatcccatggtttgaatatattattgaaaatcattccataaacaatggtttggtatatagttttaacaattcaaggctgggcacaatggctcacgcctgtaatcccaccactttgggaggaggaggcaggcaaatcacctgaggtcaggacttcaagaccagcctggccaacatggtgaaaccctgtctctaataaaaatacaaaaattagccgagcatggtggcaggtgcctgtgatcccagctactgaggaggctgaggcaggagaatcacttgaacctaggaggcagaggttgcagtgagccgagatcttgccactgcactccagcttaggcgacagaatgagactccatctcaaacaaaataaataaataaaataattcagcaggatgaggtggctcatgcctataaccccagcactttgggaggctgcggtgggactattgcttttgcctgggagttcaagaccagcctgggcaacatagagataccatgtctcagaaaatatatatataattaattttaaaaaagagaattcattgatgattctgtatttacaaatatattcctgcatcatttgttcatggtaaccaggaaattgcaatgcataaatacatgctgtcatttccaaagcggctctcttccagaattggtactgattctagtagacttttcattctgatgttaaaaatataattaatagaaatgtcttgtacctaatagcttttttccccacaactccccaaccccctcactctagaggccttagtagtctaatttaatcagcttagtctgaaatataatactaccttggcatcttgttggcctagtatttcttactcttttatggaatgaactgtgcaattgttttgtgtggctaaaaggtattctaggtcgagtatagtggctcacacctgtaatcccagcgctttgggatgccgaggtgggcggatcacctgaggtcgggagttcgagaccagcctggccaacatgttgaaaacccgtctctactaaaaatacaaaatttagccaggtgaggtggtgtgcatctgtcatcgcagatactcaggaggcagaggcacgacaattgcttgaacccaggaggcagaggttacggtgagctaagattgcatcactgcactccagtctgggcaacagagtgagaccctgtctcaaaaaataaaaaacaaaataaataaataaaaaataaaaggcattctaattaagttgttgcttttttttttttttttaattccagagcggactgatgtactggcccttagtacaggtgagttccgcctgctcagtaatatgaactcagggctttggtttccatgtggccctaatggactcactctccctgttccagctaaccaacttcagccttgttcctgttcaatggagaacagcttacgctggagtctgtggttttctctgggccaccttcatctgtttttcccagcagagcggtgacggcacattcaagtcagctttcaccattttatatacaaaggggaccagtgccacagaagggtccccggagaaatgagaagtcaaggactctcttaaagggaccacattttgacctaaaatgcacagaattgcctgcagacaaaatatttgatgtgccaattatgcacttcattttgaggaattactactatttatagacccacttttaaaaaaattatcaatgattattttttaattgtattcagacattttttcctgatctagtctgaaatattacttctctaatattttggttaatatgaataacagtggcaaaatggcattttagaattattaatatttctaatattttaatgcaagtttcaggaaacttggtttcttggttttgattgtttacatttctattctaaaatctcaggttatctcctgaacacttttggacagatgaagttttacaccaaaaaatagttcttagagtgaattttaatttacatagaactcaatcgaaatgaagatttaataaccagatttctttccccaaaacatacataatttgttattttgatactaaaatttagtaaatacctttttttttttttttttgagatggagtctggctctgtcacccaggctggagtgcagtggtgccatcttggctctctgcaacctctgcctcctgggttcaagcgattctcctgcctcagcctcccaagtagctaggactacagtcgcccagcaccacgcccagctaactggtggtggtagagacagggttttaccatgttggccaggctggtctccagctcctgacctcgtgatccgccctcctcagcctccgaaagtgctgggattacagcagtcagccactgcgtcctgcccccaaatttgctttgcatggagaaaactctaacaagtcctcttgaacacagttttctgataacccagatcaatgaactacccaggcttcaccactatgcgatataggcatgtgagaaactcgtacttataccccctcaatacattaaaactaaatatatatatatatatatttttaaatcaatgggccaggtgcagtggctcacgcctgtaatctcagcactttgggaggccaaggcgggtggatcacttgcggtcaggagttccagatcagcctggccagcccgcctctactaaaaatacaaaaattagccaggcgtggtggtgcatgtctcccaccacggctgggaggtgtgcccaacagctcattgagaacgggccatgatgacagtggcggttttgtggaatagaaaggggggaaaggtggggaaaagattgagaaatcggatggttgccgtgtctgtgtagaaggaagtagacatgggagacttttcattttgttctgtagtaagaaaaattcttctgccttgggatcctgttgatctgtgaccttaccctccctccactattgtcctatgaccctgccaaatccacctctgcgagaaacacccaagaatgatcaataaaaaaaaaaaagagttctggagatcagtaaaaaaaaaaaagaaacagggtttctccatgttggtcaggctggtctggaactcctgacttcaggtgatctgcccactttggcctcccaaagtgctgggattacaggcatgagccactgtgcctggccccaaatgtgttttacattttcttcctatttgattcatctttgtcctgcaacataaatatgctacttttctaccgataaaaagacaaaatggaatttaaatctggcctggacttctcaaaaaagtcagtgtgatgaaaacatgttctagataaaacagaaatgagactgggcatggtggctcatgcctggaatcccagcgccttcggaggccaaggcaggagaatcacttgaggccaggagtttgtgaacagcctgggcaacatagtgagaccccagatctactaaaaatttaaaaattagctgggcatggtggtgcatgcccatatgtctggaggctgaggcaggaggatcgcttgagcccaggatttggaggctgcagtgagctatgattgtgccactgcactccagtgtgggtgacagagtgagaccctgtctctaaaaaaaaaaaagagagacaagatgatcaggatgagcgcagtggctcacgcctataatcccagcactttgggaggccaaaccaggtggatcatatgaggtcaggagttcgagaccagcctggcctagatggtgaaaccccgtttctactaaaaatacaaaaatcagctgggtgtggtggcgcacacctgtgatcccagctactcgggaggctgaggcgggacaattgcttgaacctgggaggcagaagttgctgtgagcaagattacaccactgtgctccagcctgggcaacaggaatgagactctgtctcaaaaaaaaaaaaaggggggatgatcaaacacaatgcatcaacctcccggagccatataaaccctaaccctaacccaggaagcaggcaagcctgtgtgtgagtttccactctattgctggtaccactcggctctggcaacccggaaggccaccttcccctgttgttactgtgtaaggaggaaggagcactggtttgcaagtcagaagcctgggttgaagcctctgctcgggttcctgctggctgtgggaatgtggggttacctttcctggctggcctcgtttccttcatgtccaatgcaggggttccagtcacatgcattgggcaccattacatgtccaagctgtgccaggatctagaaaaatggctggactcaggccaaggggccttcctgtctggcagtgaaaataagaggagataccaagggccctgagtctggaggggaagtcatgagcacagggcagtgccagggcccgggagctgccacagaggagcccaccttggtgacagacacctgtaggcacatccgtgatgcccagtgcccaacacagggaactggacaaacgtttcatgcacgactcttttttcccttcttggctaccttgaggaccttgattataatagttatcctttttttctttttctttttttgagactcttgctctgtcgtccaggttggaatgcagtggcaaaatcttggctcactgcaatcttcacctctcaggttcaagtgactctccttcctcagcctccctagtagctgggattaccggtgtgcaccactaggctcagctaatttttgtatttttactacagatggggtttcaccatgttggccaggctgatcttgaactgctgacctcaggtgatctgcccacctgggcctcccaaagtcttgggattacaggtgtgagccactgagcccagccggattataatagccttttcatgcaccaggggctttatactcattatctcatttcattcatatgagttgaagtcagcttaccccccatttcacagatgaggaaaccaaggcccagagaggttaggaattcgtccaaggtcacacagctaggaagtaggattcaaacccagacagccaggctgtaacacctaggctcttctcaggctcatgcccttcccaggggtctgggaagccctgacctgcagcctgtcaccttcgtttaccccccagcctccaggatattatgtgtgcaccggcgtgggatcctggaactggcaggaattgtgggttgtgttagtccctagactcccatcgcctatatgaaatatggttccttttgtggcttgggaggccatggccagccctgcgatgccattgactggtgagtgcatgcctgggaccaggctacaaaatccctcacactctggggtagtcaaggcttatgaggaagtacccaaaactgaagctggggtttggtccagggagatcccagtgtgcagtactactttgcaggcaggcagaggcctcttggataacatggccagtgaagccagatcttggtaccagctgccccttaccctggccatgggctgaaaacgttgccttaaaaaattggccaggagcggtggctaactcctgtaatcccagcactttgggaggccgaggtgggcagatcacttgaggtcaggagttcaagaccagcctggccaatatggtgaaaccccatctctactaaaaatgcaaaaattagctgtgtgtggtggcaggcgtctgtaatctcagctactggggagactgaggcaggagaattgcttgaacccgggaggtggagtttgcagtgagttgagattgcaccgctgtattccaacctggacaacagtgccaaaccctgtctcaaaagaaaaaaataataataatataaagtggccaggtgtgttgactcatgcctgtaatcccaccactttgggtcgaggcaggaggatcactggagcccaggagtttgaaacgagcctaggcaacagagtgagaccctgtctctatattaaacacacacacacacacacacacacacacacacacacacacacacacacacacacacacacacacaaaggcagccagactatgcactaggaactgccctgggaatctctttgtgttctcacaacaatcccatttcacagatgaagaaacctaggcacagaaatattcagtaacgtgtccaggtgcggtggctcacgcctgtaatcccagtactttgggaggctgaggcaggcagatcatgaggtcaggagttcgagaccatcctggccaacatggtgaaaccccgtctctactaaaaatacaaaaattagctgtgtgtggtggcaggtgcctgtaattccagctactcaggaagctgaggcaggagaattgcttgaacccgggaggcagaggttgcaatgaaccgagatcacaccactgcactccagcctgggtgacagagcaaaactccgtctgaaaaaaaaaaaaaaaaaaaaagaaatattaagtaacttgtctgaggccacttagttaccaagacgtgggagctgggacttgaacccaggcagtctggctggattcatgcctgcagcctctgcactcctgctacttactgtgtgagaagcgcctgttctgtggaaggttgtgggctgagatctttccatgagttccactcatttacccccaaggctgttcttaaagacgggcatgacagttatgcccattttacagatggggccctgaggctcacaggggcatgccactcacccatttccacaaagctatagttagttagcagagggcagaattcggccgcctctcccctagcttgaaggctgtgattgacacagaggtttttttgttgttgctgttgtttgttcctttttcttttttttgagacagggtcttgctctgtcatcccagctggagtgcagtggtgcgatgtcagctcactgcaaactctgcctccaagatgcaaatgattctcgtgcctcagcctcccaagtagctggaattacaggtgtgcactaccacgcccagctgttttttgtagagatggggttagtagagatttgttttatagagacggggtttcaccatggtctctactaaaccctgtctctactaaaaatacaaaaattacccaggcgtggtggcacatgcctgtagtcccagctactcaagaggctgaggcaggagaatcacttgaacctgggaggtggaggttgcagtgacccaaaatcatgcactctagcctggggtctcgcttttgcccaggttagagtgcagtggcacaatcatagtggctcactgcagcctcaaactcctgggctgaagggaatcctcccacgtcagcctcccaagtagctaggactataggcatgtgccatcatggcgagttaattttttgtgtgtttttattgtcttgagacagagtcttgctctgttgctcaggctggactgcagtggcatgatcttggctcaccgcaacctccacctcctgggttcaagcaattctcctacctcagcctcccgagtagctgggattacatgtgtgtgccaccatgcctggctaattttgtatttttagtagagacagggtttcgccatgttggtcaggctgctctcgaactcctgacctcgtgatccacctgcctcggcctctcaaagtgttgggattacaggcatgagccactgagcctggcctggtgagctaatttttaaatttgttatagagacaagagtctctcttatgttgcccaggctggtctcgaccccctggcctcaagtgatcctcccacctcagcctcccaaagtgctgggattacagatgggtgtcaccgcacctggcctccgaggaggatttcattataaacctgccctgaagggagggaatccaattttacgagagggtgtagcctggtgaggcctggatgacctccggaggcaggggcttgtgcctgggctgaggcctaagggacaatgggcagacatgaagttgccccaggcagagggtacagtgtgggcaaagtcaggaagtggcagggcttggatcactccaggaagagagaggagtcatgtgtcacaggagctcgagacccagagagtgaggcaggcaggcagggaccaagcttgggcacagccaggaaggcaggacagggcatggtggggccaatggaatcattacccaagacgggcattttcagggaaacagcttagataaggccaggcgtacagtagctcccacctgtaatcccagcatttggggaggctgaggtaggaggactgcttgagcctgggagttcaagaccagcctaggcaacatagaccccatatccacaaaaaatttaaaaaaggagtttgtgttcctgtagtagcatacttgggaagttgaggtggcagtatcacttgagcccgggagttcaaggctaaagtgagctgattgagccattgcaccccagcctgagcgacagagagatatgctgtctcaaaggaaatacaaattaaaaaaccagccgggcatgctggcgtgtgcctgtagtctcagctacttgggacactgaagtgggaggatcgcttgagcccaggagttcaaggctgccgtgagctatgattgtgcctctgcagtccagcctgggcgactgcagactgcaggacttttttaaagaccctgtctcttaaaaaaaaaaaaatcttagataagaggatgctgtgcctccctgggggtcttcagtcacccatggtcctggcaagagaggagggccaggagagagcttcacccacctgctgtcctgcccgtgtgacatccgcaggtgctgccatggccacgactgttgttacactcgagctgaggaggccggctgcagccccaagacagagcgctactcctggcagtgcgtcaatcagagcgtcctgtgcgatgagtccccagcagcaccatgccacccaccccgagtatcccctgggcaccctggcatagccagatgacttccgtgcccctgttgcaataaccactgcttccaagtctctgtagaccaccccttgggtatatctaatgtaagtgatatttattttatttatattttttgagtcagagtctcactctgtcacccaggctagagtgtgctgacgtgatcttggctcactacaacctctgcctcctgggttcaagcgattctcatgcctcagcctcccaagtggctaggactacagacatgcaccatcacgcccagctaatttttgtatttttttcagtagaggtggggtttcaccaagttggccgggctggtctcaaactccccacctcaagtgctctgcccgcctcggcctcccaaagtgctgggattacaggcatgagccatggtgtctggccctaatgtgagtgatctttaacactgagcacttgaaaaagaaaaccctgaagaaacctaattattcgatgtctggacgacaaggaagaagatagaaatggcatcagataataaacagtgtaaatgtttgtttatcagaaaggggctggtggtcgggacaagtaggaggatcgcttgagtccaggagtgcatctctacaaaaaagttaaaggattttttaacattggccaggcgtggtggcacacatctgtgatcccagctacttgggaggctgaggcaggaggattgcttgaagcccaggaggttgaggctgcagtgagctgtgatcgagccactgcactccagcctgggtgacacagcaaaatccagtctcaaaaaaaataataataatattttacataaccaaccacttctaaagattaaaaaaaaacccctatgattaaaaacctcaggtccctcaggcaatcataccagatatcgaaacaaagcaataacataaggactgcagtatttattttatttttatattatttatttattctttgttagtttttggagtgtgggttttgttttgttttttgaattttttattttgttctactcggttttattcttattgctcaggcttgagtgcactggcctcttctcagctcaacctccgcctcttgggttcgggtaatgatggttccacgtcagcggccctccgcctcttgggtttgcgtgacggttccacgtcaccgaccctccgcctcttgggttcgggtgatgatggttccacgtcagcggccctccgcctcttgggtttgcgtgacggttccacatcaccgaccctccgcctcttgggttcgggtgatgatggttccacgtcagcggccctccgcctcttgggtttgcgtgacggttccacgtcaccgaccctccgcctcttgggttcgggaggtggttccatctcagccgccctctgcctcttgggtttgcgtggtttttctgcctcagcctcctgagtagctaagggaggtgtcttgagattatcatcggctgagggtggaagcggcccccgcagacgctcggcaggtgtcttgatattatcatctgctgagggtggagctgagggtggaaggggagtgagctgacgctcagaaggtgtcttgagattatcatccgctgagggtggaagcggcccccgcagacgctcggcaggtgtcttgatattatcatctgctgagggtggagctgagggtggaaggggagtgagctgacgctcggaaggtgtcttgagattatcatccgctgagggtggaagcggcccccgcagacgctcggcaggtgtcttgatattatcatctgctgagggtggagctgagggtggaaggggagtgagctgacgctcggaaggtgtcttgagattatcatccgctgagggtggaagcggcccccgcagacgctccccgcagacgctcggcaggtgtcttgatattatcatctgctgagggtggagctgagggtggaaggggagtgagctgacgctcggaaggtgtcttgagattatcatccgctgagggtggaagcggcccccgcagacgctcggcaggtgtcttgatattatcatctgctgagggtggagctgagggtggaaggggagtgagctgacgctcggaaggtgtcttgagattatcatccgctgagggtggaagcggcccccgcagacgctcggcaggtgtcttgatattatcatctgctgagggtggagctgagggtggaaggggagtgagctgacgctcggaaggtgtcttgagattatcatccgctgagggtggaagcggcccccgcagacgctcggcaggtgtcttgatattatcatctgctgagggtggagctgagggtggaaggggagtgagctgacgctcggaaggtgtcttgagattatcatcggctgatggtggaagcggaatccgcagacgctcagcaggtatcttgatattatcatctgctgagagtggagctgagggtggaaggggagtgagctgacgctcggaaggtgtcttgagattatcatccgctgagggtggaaggcaggtgtcttgatattatcatctgctgagggtggagctgagggtggaaggggagtgagctgacgctcggaaggtgtcttgagattatcatccgctgagggtggaagcggcccccgcagacgctcggcaggtgtcttgatattatcatctgctgagggtggagctgagggtggaaggggagtgagctgacgctcggaaggtgtcttgagattatcatccgctgagggtggaaggggatggagcagacactcggcacgtgtcttgagattatcatccgctgagggtggagctgagggtggagctgagggtggaaggggagtgagcagacactcgggaggtgtcttgagattatcatccgctgagggtggaaggggagtgagcagacactcgggaggtgtcttgagattatcatccgctgagggtggaaggggagtgagcagacactcaggaggtgtcttgagattatcatccgctgagggtggaaggggagtgagcacacactcgggaggtgtcttgagattatcatccgctgagggtggaaggggagtgagcacacactcgggaggtgtcttgaggctcagggagttatcagttatagaatgttgttgagttggaggaggtggctggtggcccatcctgttttttaaagtttcagctgtgaggtagggccagtagggcaatcctgaagaatgacgatgctccgctgccgccattctgacctgtagggccaaaggagggaatgttttcacacatattcatttgatggacaaaattaccgccaccaacacagtctgcaccttctgttgctggtgatagatttttgcacctttccatcctccaggtttcaaaatagcagtatcagtgtcataatatcacccttccactgagtactgccgacagctggagggtaaaggaaagtcattgggacacactgttgtctccacatgccactgtgtctgtctgcaaatgtaggcaggctggggtcctgccccagggaagacagagtcataacagagtaataaagaagcatgtttgagacacaggagtgtctatgtctatcctcattcctccctcacagccatcaccagagcatgtttcttgcaccaggtcaacagacagtaagagacagtaagagaggcatgaaaagcccactgtccacacatgttgcagcttctttttggagaatgttttccaggccttttatgttctgtctctgactctcagaactctgcaaggtcagtgtgaccaccctgctccaaatctaagaaaacagaggtttccagaggaaggagaaattgtgcccagggtcacacagcttgcaagaggcagagtggaagttgattccagctctgcctgcaggaccctctcatttcccctctgtttcccttcttgacaaaggatcttcttcactctggaggtgccacccatgagaacaaagagctctggagagatgtggattcctgaagagctgcaggggaactgggagagggttttctgacagaacaatctcacctcaagaagtcacttaggcatggctgtaatatttcttttcactcccaggtaataccaaattgtaagtgcactaggacataaagaatacttttgtccatggaaaaatgaggtgggaattctaaacaaagcaagttttaaaactgtgtttcacttcaagtgtacaagtcccatcacgtgtaatcataggactcggcagcttttgaaggtacagaggccacacaagaaccagcttagctgagcatcatttaaggccttcatttggaattgtccctgtgggtaataagttacattcactcttcactagtttacagtcagggcccatctgctattacaaatacggaacctctgacacttagaatattagatcaggggccccactgggtggggatgaaggtgtttttgcacaacacggttaccaacagggatgggactgtgatgcttgtaggcagcctttctctctgccatctccctctgcagggcttgagcacagagctgtagggagaaaaatgtatccatgtcctgacctggcagactatgtccaaaagcaaggaaaacaagcaaacttacccagttgcaaagagcctttcttgcagaaggggggatctgaaaaagccaacac

SEQ ID NO: 591 - DNA, 27073 bp, Homo sapiens
  source 1..27073: mol_type = other DNA
ctctgctccggtgcaggcccgcagggcgccctgggctgggagcaacgcgactgaccgtggtcgtgggcggacggcggctgcagcgtggaggagctggggtcgctgtgggtcgcgaagcagagcccgggacgtgcgcgcttggtgcacgatcctgaaggggagctccgaggggcccgggtcgccagggctgctgcggccattcccggagcccggcgcggggcccgcgagatactggtttaggccgtcccagggctccgggcgcacccggtggccgctgctgcagcggagggagcgcggcggcgcgggggctcggagacagcgtttctcccggaagtcttcctcgggcagcaggtgggaagtgggagccggagcggcagctggcagcgttctctccgcaggtcggcaccatgcgccctgcagccctgcgcggggccctgctgggctgcctctgcctggcgttgctttgcctgggcggtgcggacaagcgcctgcggtgagttaccttgcgaggtaaagtggggagcgtgggagccgggccctagagctttccactgggtgaaggctgcagctctcggggtcggcggtcgctgagccccgggcagcgactggggagggcggggggagccgagcacgctccggggtgacccctgggaagaagttgggaagttgagcacgcctcggggtgacccctggagggagtgggttggggggagcccttagcacactcagaagtgacctctgggaaggagtgcgatgaggggagtcctgagcacgccccggggtgacctctgggaaggagtgggttggggggagccctgggcacgctctggggtgactcctgggaagaagtgggttggggagccctgaacactccccggggtgacccctgggaaggagtagggggtagggtgaggtcctgggtacactccagcctggagctggactggaaactcatcccacagactgctcccagcctaggacgcgacaaagcaggtggcaggcttggtggagcactgttcctgcactcgaagttctctcagaggtcgaagaagtcgtggaggggacacttaatttcagctttcactgcggcgggtggtgaaacgacggttcttcctctttttgagtatcctgttctgaatcccttcccttggctcgccctccgcgtgtgtgtgtgtgtgcgcgtgtgtgtgtgcgcgtgtgtgtgtgtgcgtgtgcgtttgtgtgtgcgtgtgtgtgtgcgtgcgtgtgcgtgtgcgtgcgtgcgtgtgtgtgcgtgtgtgtcgtgtgtgcgcgtctgtgcgtgtgtgtcgtgtgtgcgcgtgtgtgtgtgtgcgtgtgtgcgtgtgtgtgcgtgcgtgcgtgtgtgcgcgtgtgtgcgtgcgtgtgtgcgtgcgtgtgtgcgtgtgtgtgtgtggcagccgcccaaattaattaggggtaaacaggcggtgctgcaaagaactccaactttaattctgtggaagataccaatatttgaataccatattatttctttctatttgggtaatgatcgggttaataggatttcttacttacatagtaggtgtggaaaaggtgggttttacttatttatttttttttagacagtcttactctgtcactcaggctggagtacagtggcgtgacctcagctcactgcaacctccacctcccgggttcaagcgattctcctgcctcagcctctgagtaggtgggattacagatgcacaccaccacgcctggctaatttttgtatttttaatagccaggctggtctcgaacttctgacctcaggtgatccgcccgcctcggcctcccaaagtgctgggattacaggcgtgagccactgcacccggccagggttttactttttaaacaccttaggtatatatttttaatcatgtacattaaaatgtagcattatatttcagtgttccggaaagtgtattttctgaaaaagagctacatttatgtccttatttattggccatgaggttcagagcctctcactggggaagtctgtggcatgctggcccttgctggctgagtggaaactgctagttcacacccaggtgtgggacctttgagctctctatgccccagtttcctcatctgtaaagtagaaatagtaacagtcagcctcacagagttggcttcaggagaaatcagttaaggtacagaatgtaacttggaatgatgtctggctggaagtaaacattagcataaaacaggctgtcatatgtggatcccccaccccagcccataattcatgcaactgatatgatcggacaaacttgagcaggcaagatttgcgagaacatggttgattcagaccacgagggcttcataggtcagcgggcattttcccaagttctaactggttttgagaccttggtgatttttctttcttctttgactttctttagcttctccattactttctccgtgaataggggaggggggcatctgtgtgggagggggtctcctgcagtcacatcactctgcctggttttagatggagagtttgttacaaacgtctgagtcttggtagttttgttgtaagcatattgatagtctcatcttcctgggtgttgctaagctttccagcctcaggttccgactatgtaaaataaggtttttcacccaagggtaaaaaatgctttaccagctccaattctcaccctgcagctcatcctttttttttttttttgagacagggtctggctgtgtagcccaggttggagtgcagtgatgtgatctgggctcactgcatcttccacctcctgggcttaagctatcctcttgcctcagcgccttccaagtagctgggactacaggttcatgccaccacacctggctaatttttgtagagacagggtttcaccatgttgcccaggctggtcttgaactcctgagctcaagcaatcctcctgcctctgcctcccaaagtgctgggattataggtgtgagccaccacgcttgaacccttttttccttttatactgagagcttgcataattagttccaatgtacaactaagttttcataccatcttaactgtaaattctatacaaattcaacaggactcaattatttacaaaagctaatgtgtgacaacttgatcttcttacttggaatcttcccttctaaaatttgatttatcctgaagtgtctgcttgacttatatcctgtgttgctgctggctttttccatgtgcattttttgcaagctgctctttttacttcagtctcgttaagtcttgcagttctggctagaggcctactgccatgaataagctgccgctccacagtggcttctttgaagtcttagagtcagatgagtttcacggtgttcaggtttgtgatccagtgtggccccaggttctgggtaacacgtgtgatgcagtgctgtgtgcataccatgtcgtgaataacattcatgatgcagtgcacataccgtgttcaagttaacagtcctggtggcatctgaagtagcaccctaaaatcaaatgacacaaattctgcagagaagcaagtgaagtctaaaaactgagttggggtagtaacgataaatagcgttatgctagttcaggttatgttttgttgccaaatgaattacaaaaaactaccaggtttcaggcttttatgggtttcacgaatgcaggggagggatcgtgggtctgcatttctcttgagcatccttaggagaaaggtgcttcgtggctcagtggcttcccttcagtgaggccctccctggctgcactcctagcttgccctgcctccgcttcccctcctctcccctcctccccttatcctattcatgttctccgccactcagcactggacgccaccacacgtgccttcttagtgtaggggtgtaccgccttcctcacgggagtgtgtgcagcagcagggcaggcagtgttcctcctcccacagcactcagtgctgaatgaatgattgaagggatggatgggtggatgaattttttctgtaactttaaaaaaagttcttgaaaaataagtttcttatgttttaacagtgacaaccatgagtggaaaaaactaattatggttcagcactggcctgagacagtatgcgaggtgagtgtttctgccttgacgggccctggggcctggggagccctgtgaagaggggtttgtgtgcacgtgcccgtccagggcacccacgctgctggtgcgggaggtaggcatcgctctggcgggtgggcggtgtctcctgcagagactgcctccaggagggctgtgtgtgagcttcccagggctgctgtaacaaaagtgccacaagctgggtggctgagagcctcaggaatttattctcacggtcctggaaggggaagtttcaacctaggggtcagaagggttggttcctcctggaaggctctgagagagtttgttctgtttctctgctagcttctagtaaggacccgtggtcctctgcgttcctgggctgacccatcaccccaatctctgccttctccttcacggtgtgttctccactttgtgtctctctgtctcttctgatgaggacaccagtaattggatttagggcccaccctaatctggtatcaccttttcttgatgacatctgcaaagaccctgtgtccatgtagggtcatgttcacagatgggaggaggggttaggacagggatatatcttctgggaggacacggttcaacccacagcaagcctcagtttgtctcctccctctgtgggcggcaagccacccaggtgccaaggcaagagaccgagggcataagctgttccagtataataaagaaaatatataaaatgagaacagttatactagaaatagattatagatatgatgatatatgaatattattaatcatcagtttgtagcattgctctttattccaatattataataatccttgctctacaattacagcctaggaaaaaccaggccatacagagataggagctgaaggggcacggtgagaagtgaccagaagacaagtgtgagcctctgtcacgcccggacagggccactagagggctctttggtctagtggtaacaccagtgcctgggaaggcaaccattacttagctgacctcggtctagtggtagcgtcagtgcctagggaaggcacccgttactcagcagactgggaaagggagttagagcagactctgcttcaccatacctcttgtggataggcctcatatcagtcaggcctgcccacagccatctggaggcctaaccatctccccgtgatgctgtgcttcagcagtcacactgctgtttcactttcatgttccacccagtacacctggctctgccttctagatagcagtagcagaattagtgaaagtactaaaagtctttgaaatgcatagaagaaataatggcgtaagctggcctctctctctctccgcctccgctgccatacagggaagggccctctgtccagtggacacgtgactcacgtgaccttatcagtcattggagatgactcacactccttaccctgccccttttgccttgtatccaataaacaacagtgcagccaggcattcggggccactactggtctccgcgtcttggtggtagtggtcccctgggcccagctgtcttttcttctgtctctttgtcttgtgtctttatttctacaatctctcgtctccacacgaggagaaaaacccacagtccctgtagggctggtccctacatccctccatgtattggacattttattaacatgtcctgtgagtgaagaggacccaagagcttccctgcctcctttgctgtgcttggcacccatggcactcacggccctccgggctggcccctcatcatctggctgcgttttgctccatgcccacatcccttcagtgcgtcagtgtccaggcccttctcattggagcacccagagccaggacactgcctggatctgcacctcagggcgtaccctgctcggtgtgtcaagctgaccctggtgtgcattgcacacttctcaagtgtttgaccgtgttgctgagctagcaccacattctgtcaggagcacgcaggctttatgttttgcctctagcactgagtggtagtgactttcgcttctacttcctcactgatttttctgatgacaaacgaaaatgaaattttgcttatctggctcaaattatgctcttgctcacttctgtacacgagattgccccgttttcagttttgcagacttaatgttgcgctcctgctgctgtttccttgccttgggttggggcagtggacagaaggagccggaagctgcctggcatcaactttcaattgttgggagtgtagctggcattctgagatagggagggattgctggagtccttggttcctacggaagaaggaccgtggaggaggagctggaacttaagcactgtctttgacccacactgaaggatctgcctccagggcctgagaccaggctgctctgcattcagggaggcatttacatgacaaaacgtgggtgtgtccctgcacactgaatgtaaatatgggtggaggcacatctttgccttgaggctttagaaacaagatttaaaaaaaaatctgtagcaaaatgtccttgttaaggagtgtatttcctactgggcagccatggtgaagggttctgtttgagcccaggtgtcctcctaggcagtgagggctgtccctggtgccccctctgatgagatgcttgtgtcaaagatgctcagtctgcctgtcgggttctcagtgttctgggctctcccacagctccatgcaggcaggcctgggaactgagtgctgtgcagagccctcagagccccgtgtggtgcaggctttgctctctgcattgcctccaggaaaggagcccagcttctggctttgaactgggttccctgagggatagagttgagtggcagaggtgaagttacaggttttggcctctgaccctctttctccagcactgagcagtaaggactttctgttctacttcctcaactgatttttctgttgacaaatgaaaatgcagtttcacttatctggctcagattatgcccttgatcatttctttctttttttttttttttttttttttttgagatggagtcttgctctatcacccaggctggagtgcagtggcgcgatctcggctcactgcaagctctgcctcccgggttcaagctattctcctgcctcagcctcctgaggagctggaactgtaggagcccaccaccacacctggctaatttttgtatttttagtagagacagggtttcacaggttggccaggatggtctcgatctcctgacctcatgatctgcccacctccgcctcccaaagtgctgagattacaggcgtgagccactgtgcccagccttttttttttttttttttttttggagacacggtttttttcttgtcacctaggctggagtgcaatggcatgatctcggctcactgagttcaagcaattctcctgcctcagcctcctgagtagtagtgactattagcgcctgccaccacgcccagctaattttgtatttttagtagagatggggtttcaccaggttggccaggctggtctggaactcctgacctcaggtgatctacccgccttggcctcccaaagtgctgggattacaggcattagtcactgcgcctggcccataaaaacacctgtttctgttaagtcaaatatttgaggaatggcttaacaaaaatggctgtttctgttaagtcagttgtttgacgtttggcttagaacatccagccctagtgtagcttcctcatggatgtgttgttgtaagcaatgtattgtgaagtagccctggctttagcttgtgttattagtgcagtacctgtatctcgttggcatatgttgcaactagctgctaaatgtattttaatagggttcctaagtgtatttgaataaacaaagagccaatcattttcttgttatattttctccctagaaaattcaaaacgactgtagagaccctccggattactggacaatacatggactatggcaagtgtctcacacaattaaatcttaggcagaagaggcttgctgactgggaaccctagcttgaatgtggtcttaatatttattcttgttttttatttttaggagtttatccaatagactagattcttatttaaaaatatctttagtctttctagcagaaccctgattctcttgttctttaattctgtcttcatagaacaataacactttttttttttttttctgagacagagtcttactctgttgcctaggctgaagtgcagtggcacgatcttggctcactgcaacctccacctcccaggttcaagtgattctcctgctccagcctcccaagtagctggaattgcaggcacgccccaccacacccggctattttttgtatttttagtagagacaggatttcaccatgtttgtcaggctggtctcgacctcctgacctcaggtgatccatccaccttggcctcccaaagtgctgggattacaggtgtgagccactgtgcccagccaataacactttttaaaatagtgtttacagattctcggtacatgtcagggtcactacattttaattttctcattttgttcttctcttggggtttattataaataactacatgaaaatacataaatgcacgtctcgtacacatttcagagacactcaaatttattattctggttttgtctgcgttttgttcagttaattcttttctatgtaacatggacatacttgtgacgctgaactgtgcacattaatcgccccatctgaaggacccgttttgtcccactgcctcgatgccgggattgaaaagggcccttttagcttaattggtgcctcctggctccttaggaagagggattggtggaaaacaagttaaactgggatgtaggtacttggcttcgggtttcactttcttctctgtctggtcagataaccttgacctcctgtctctggggctcctggctttgctagactttgcgtggtgtcctctcccctgctgtgaccaagtgctctgaatgtacctctgcccatcatggccgtttcatttctgaggctggaatgaagctttgcaatgctgtccagtccagcggatagaatcaggcaggtttcacatgctggtccagctgttgaccctgaagacactctcctccctggcctctttggggctctgaggggtcggggtcttaggaagttagtgaccttgtggagtaagcagcactcaagagtcagagttgataagtccagaattagatgtgtgaggatggagttaaagttctagacagtgtaagtgcgtttgctactgaaaatgaaatgaaaatcctactagctgatcttctgccatacgccaggcactttctgacatgttttatctgtcatctcctggagtcctcctcaccattgaaaggaacagactctcgctgttctcatgctggatctgtggtgcggagattggccgggggtcagcttacttaggtctcggtgctagggagcagcagaggttgccgtcaacccagccggggctgaccccagagtccccgctcctcggtgctactaggctatccattgcacttcctttactaagcagtggcctgtctgcattactcctggacggtttaacacaatttcttttcccttctaaagaaatttgaactctgactcctcttacctgcatcttctttcttaagcatcctgcctgggataaggaattcccaattagaatttctctttttattctttgcagacttcaatgaaagtgttttctaaggtcatgtagaagccaccccaaccaagcctaatatttcttattttctcttttaaatttgaatttccaggcccgataaaagtgaaggatgtaatagatcgtggcccttcaatttagaagagattaaggtattgacttttaattatatttctactgcagagtgttgacctagattaactcttttcttcacaagcgtaccttcaaagtcatctttaaaattaaggggtcatgaatgtattcaccaggattgagcccttgctgctgttttagtaagtattgttatctcgaccccacaaattacaccaattgaccttttccctctcctcccctcccctgccctgtgcccaagccactgcatgaggggcctgagcgaggggctccgaccggagcaagccctgacactcccccatgccagacctgtgcagatcctgacgctcgcccgccagccccgcctcgtcccaggccccaggacttctgggtcagatgaccgacgtgggaatctggtcggtgtgccatatcgccaggcatctccagacagctgaggctcagagagcacaggcctggggccgtcctatctggtggatgggtttctgagcaggtggacatgctgggcctttccagtacaagagcttgattaaagaaaactcacagggcgggaatttattagagatactagcagaggcgttcctttgagatacccgtaccttatatgtcatacggagtcttcactcacacacacgccctcatctttccttaggggtgccaacagttcctgtgtgtaaccagtatataccagggtaactggacctggaccccagggagggggtggtaactgaggccttctttaaaacgtgtggtagcattgaaggcttgcgggagttgtgggtctttcctaggaatggtacattccccaaggtcattagttgcaaatccatcacaagttctttttttcttttcttttctttttttttttttttttgagacagagttttgctcttgttgcccaggctggagtgcagtggcgcaatcttggctcactgcaacctccacctcccgggttcaagcaattctcctgcctcagcctcctgagtagctgggattacaggcatgcgccaccatgcccggcttattttgtatttttagtagacatggggtttccccatgttggtcagactggtctcgaactcctgacctcaggtgatccacctgcctcggcctcccaaagtgctgggattacaggtgggagccaccgcgcccagcccacaagttctaatccatatggaattgttttctttttcctccccgtgaagaccttcagtgggatgagccaagaggctggggactgccgtgagacttagaagggacaccccagagcctggtgctgtctctagctcctcacacagactctcctcctctcctccgggactcactgcagggaatggtttctggggaggcgtgatgaagaggccacttcaggatacattgagtttgaagtgcccttgagacctccagggggtgacatagaggatcttcagggtcagaggaaaggtggctttaggcatagttagcatgaggatggtgaatcaaaatgacaggtgtggggatggacatgggtctgtggacatggatgggtgaggagtcagggccgacaggtgtggacgtgggtggatgagggggcagggctgacaggtgtggacgtggatgggtgagggcagggctgacaggtgtggacgtgggtgggtgagggcagggctgacagatgtggacgtgggtgggtgagggcagggctgacaggtgtggacgtgggtgggtgagggcagggctgacaggtgtggacgtgggtgggtgagggcagggctgacaggtgtggacgtgggtgggtgagggggcagggctgacggatgtgggtgggctaaggggacagcgctgacaggtgtgggcctggtgggcagaggggacagtgctggtggagccccgtgttaacagccaggtggaaaggggcatgtgtgcctgcagctgggaaaggcggaaacccaggagtggagagatttgagaagaggcaccgtaggactgcatatccccggggggtccaggacaggaaagctgaaatgctttttgagtgggggcgtgggtgggtcgtgggtctgtggtggtgtgagccgctgctcctcagagtagtcctggcttccttgttgtgtagcagtaggaacacctttgcattgtcccaaacggaagtagcccaatttgcacactcaatcatatcgtgccctaggacatctcggagagctgatggggctgaagccagcatggtggggcaggagaggtggggtggggggctggaggggaagaggagggggacagagctgcgcccacacaggcaggggctgtggggtaggggctgagttacaaatgggctgagaaaaggaccctcatatagggtgctggaaaacaggagaaagggaaggaaagtgaagttatccgaagtttgttaagcacctttttactgacctttttggggtttttttggtgtagagggtgtgtagaaatagaaaagtaaactccagttctgttggatttagcgcgactggtgcccaggctgcccagctcacacaagctcttctctgggaaaaggagagcttgtcctttgtttgtttgtttgttttaactgatggtttcgttttgtttttttttaagatggagtctcactctgtcgccaggctggagtgcagtggcgcaatctcggctcactgcaacctccgactccctggttcaagcgattctcctgcctcagcctcctgagtagctgggattacaggcatgtggcaccgtgcccagctaatttttgtatttttagtagagacagggtttcaccaggttggccaggatggtctcgatctcctgacctcgtgatccgcccgcatcggcctccgaaagtgctgggattacaggcgtgagccaccgtgcccggccaatgtttttagaacagttataggtttacagaaaaattggatggagattacagacagttcactcccttccccctcaactctcccaatcattaacatcttctatagtgtgttacatttgttacaattaatgaactgatactgatactttattattaaataaagtttagcattaacattagggtttactcctgtgttgtgcggctttggacaaatgcaggagagcaagtcccacccagtgtgctctggagcagccgctggccctaaaccccctgagccatacctccccttcttcctccccttgaacccccaagcaaccgcgaatctcattcctgtctcttaagactaccttttccaaattgtcacgtcgttggaatcatacagtatgtagcctctgcagactggcttcttgcacttagcaatgtatgtttgcagttcctccagtgtcttttcatgactcgacggctcattggtttttgttgctgaaaatattccattgtttggatgtacactttatcccttcacctataacagcttgtattttcgtgtgcagttttatgattactcaaattgcacttgtagatatatcttaacaaacacttcatacaaaataagcataggattattttattcaccaaagtattgttaattagcagagctcaattctttggtgtcagtttatcaaatttaccttctaggttttgagtttattattaagaacctgcgtagacttattttattttttaatgcataggatcttttgccagaaatgagggcatactggcctgacgtaattcactcgtttcccaatcgcagccgcttctggtaagtcccagcctctgattgctgtcttgattactgtctgagcgggtgtggggagcgtgatgaatcgctagaagtggaaactgtgtgggaagcaagataacagaatctgtcttctggggctgagcagtttgaacaaccttttatgagatatgattctgttacggcatttttggtgcctttctccaatgtataaaaaattgaaagcaagtggaatttaccatataagcctgttttctaacctgtatggtatttattactttgctttaaaacttttctcggccagtcacaatggctcgtgcctgtaatcctagcactttgggaggctgaggcgggtggattgcttgagctgaggagtttgagaccagcctggtaacatgacaaaatgccacctctaccaaaaatttaaaaggtcagctagatgtggtattgtgcggctgtggtcccgggagatcaaggttgcaatgagctgtgatcagctggggtgataactagcctaggtgacagggtgagaccctgtctcaaaaacaaaataaagatacaaattttctcttctgaggcttaacaaagtccaatgcttgcatatctaagaattagtccatatcagacaggagagaatatttcttaaggaaattgtgctcctgtcttcaaatacattaagaaaaaagagaccaggcacagtggttcacacctgtaatcccagcactttggaaggccaaggcaggtggatcacttgaggtcaggagttcgagaccagcctggccaacatggcaaaaccccatctctactaaaaatacaaaaattagctgggcatgatggcgtacgcttgtaatcccagctacttgggaggctgaggcaggagaatcaattgaattcaggggatggaggttgcagtgagccgagattgcaccactgtactccagcccgggcaacagggcaagattccatctcaaaaaaaaaaaagaagatgtcttctaaaatgatgatctcatgcctatgacttagggaggagagaaagtgagacttagcatgtgaggctgagacctcagtcatagtgaagcacctttaagttcagcagaagctaagcctagggcataaacgccatgttgaattcaagatagcttttaaaatcctggcttttttaagaacataaagttaaattccttgtattaacattatattaactgaaggtaattattttctctatcccacttcaatattgcaatttataattcagattacaacccatcaaattttaggtgggaagattaacctagaaatatttttgtgtataattttcaggaaaattaaaagttaagtttagaagaaagcttttgaaaacaaaatgaaatggaagtgatgtccccctttctggttcatcggtgtggcagtgaagtggccttaggattcatggaccctcagtctgtgcgttgaatcacccttgaaaattcgggtggtgaatggttcaggtctcagtcacctgttctgcacagcctgtgttctagaaaattatttcaaaataatggccatgataagttggaatggaagaagataggaaaaaaaattatatgtcacttcacagtgtacttcagatgatgagtttatggtaactgagttatgtgaaagagaatttttccagttgttacaatgttccatgatagagtctgtcagattttagctaaatggcttaaaataaatcagcaaacatgcaaaggccttcagtgagctgggtcttgagcatttaatcaaaacagtgtgggcacagtatgcatttatttttgggctctgataaaggcaagatgacttactttaaattttcaggttgatagttgaattacacacttaaaaaactggttctaaatgaaaaagataaatctcacacacaaattaatatttatatttttgagtgctcctaaatacaaaatatcagctagggaggagctcctgtctgggctgtgtcacccagtcctgtgcctatcactcaagtcacctgactaactccatgggggttggcctctggcttctccacctctgctccttgggcaggggaaggtgtcacagcactgctgtggaatgtgtctttgggcataaccagccccgaggactggctgcctgttgtggccgagcgggctgggtgacagtgggtgggtgagcctgggacatccgctcctggctgcatctgctcttggtgggtgagtcagggtgtctctcagcacagagggcaacacgctgagtcacttcgcattggtgactgaccgttctgatgcttaaaaaaaaaaggtccagtccaaatgaagtgtgagtgaatgctgtgagctccatgaatatcaatctatttccaacatctgttgagttaagcttgctccaggaataatgatggctgacatttactgtttattgtgagccaggaactgttttcattcatgtggaagggctcagcacacctcatctcacctgcagaattacccctgttttatagaaactaagtcacctggaattcaggttacatttcaattagtttaaaataatctcctttttctaccttataggatataggaagttatcaggtaatttgctctggaaaggcttctagatgaagacagttactcatccactttcatcgttcctgttttcaacttttcatcattttctgagagttaaatcaataggaattatttaaaactagtattttggatgaattttgccagtgaattaatgcacatttagattgtgtttttaagactgcatataagtgctttataagtggttgcatgaatgttatttattaaaacttcatgaattcatcaccaataaagctgaggaaatctgattcccattttgtcttttcatgctaaagatgataaacatctgatgacacgccagtcattctgaaggtggctgtcaatctcgtcagcagttgattggatgacagcccagtgcagtgggaagggcgctgaccttggacttgagcgtggccttcaagggcaggctctgagtgaccttcagcaagtcccctggcccttctgggcttccattccctgtctgtaaactagcagtgatatttccgccttgcagagttttgagaaccaaacgaagaacgtgaaagatttttgtaaacctttaatctgcagtaaaatatcaggaatcattctcagtgaccacatttttctggaatacaaattgctgttcacgtgcagccctttagttataggctattcagttgttcttattgtcctctatgtagaatggatgcttaaactataatttgtagaagctgaaatggaaaatgggcctgaggtgtttcctggtaattagctgtcctgcctttccatggctggttgcttagaaatgacagtttgtgccactctgcgaaattccctgactgcaaagcacccactcactgcaggagaccacacgttgctttgtgaatcagtgggggttggggcagcagcatgttcttttttctcagctttgatttgttgttaattgagcaagctgtaattgtagacgtgaactgaaactgattatttaatcgtgggggattgaaataattgcctatgttgcaaataaggaattttatccttcctactttgtaaaagaaatgacatgcctaccacatgggaatagtctgtgctgagagaaaacatgcttgagcattttaattgggaatcagtttcattactttttttttgagatggagtttgtctcttgcccaggctatagtgcaatggcatgatcttggctcactgcaacctctgcctcccgggttcaagcgattctcctcctcagcctcctgagtagctgggatctcaggcacctgccaccacactcggctaatttttttgtatttttagtagagacagtttcaccatgttggtcaggctggtctcaaactcctgatctcaggtgatccacccccttcagcctcccaaagtgttgggattacaggcatgagccactgcacgcagcctgtttcactacttttaagtggagatttttcctaatcctcacaggaagcatgagtgggaaaagcatgggacctgcgccgcccaggtggatgcgctcaactcccagaagaagtactttggcagaagcctggaactctacagggagctggacctcaacaggtgggtgcgcccttcccccggctgcacttcccagtggggatctctgctgtcgcccaagcctgacagctggatccaggggagtgggtgtagacctcactgccctccagcagcttctgcatgtgcactattcggctactgggatcattcctgaggaatgttctgagcctaccaagcctttccagatcattctacatcacgatcacacagagtgggtgcagagtattgggatgcccatctgggcaccatctcatcatcagagtcggccatagggaaaacgaggactccaaccagcatgtgccgttctcagccatgattcctgataaaggatagtgcattaataagtcgtttccttagaaagacggaaactctggaagtctgtaggtctttgccgcagaactcctggaacaagcaggcaggaaagagatgtgggccagggttctttaagccccagaaatgaccccaacctgcctaaatcgtccctgcctgccctcacctctattcttgagaagtggaatacgttgtcccacttgagccagttgacttgtaaagcaaagtgccttctgagcgccacaccgagcccactcactgtccgaatctggttgctagagagccagggtgtgcccttacctctccgtcgggacgtttcagggtgtcagcgtcttagctgctctcactgaccttcatcataagaggtcataataaaccagtgaagtcgtgaaaaacatgacaggcaattgcacagcctctgtgttgctgcttttggaattcacgcagcttgttttagagcaattctccttcaaatcagaataataccaggagccttagctaatcagctgtatttaaggtttctgaatcaaaactgcttaaaagatgaataaacctccattgcttatctagacatgtgctttgcctcctcaacgtacaaaatcgtctcacacagatggtctcctgtgtcatctgatgaaacgcagtctaacagctgcaacttgggtgggatagagctcaggcactgatagaagaggggcttggcacggttagcggggatcaagattacatcaaagaatgccctgtgaataaacttctttaaaaatcacctcccagagcgcgtggcattaggtgtgccttttcatcctggttctgacactaactagttgtacaatttgtgtatctaacctctagctcttttttccatgctgtgaaataaatggataggttgccctcaaccctgaagtctcttccagctcttaaaatctgcactaccaggtatatacactaagaaacgtacacagacctatacactttgatttgtatatagtttgtgtatataatttgatctatgtaatttaatcttaggtttttaataaaggaagcattgctttcttgcagtaagagcaatattttaggaaacattttctcacctaacaaatgtagctaattagctgttcagaaatcattatgggccatgtgtggtggctcatgcatgtaatcccagcactttgggaggctgaggtgggtgcatcaccagaggtcaggagttcaagaccagcttggccaacatggtgaaatcccatctctactaaaaatacaaaaattagccaggtgtggtggtgcatgcctgtaattccagctactcgggaggctgaagcaggagaatggcttgaacccaggaggtggaggttgcagtgagctgagatcgtgccattgcactccagcctgtgcgaaaagagcaaaactgtctcaaaaaaaaaagtcattatgaggattaaccaagagagtgtcttaggtagctcctggagcacaggagacttgcagttaaaaagaaagtctgacattgctgaaagactggcagggtaggacccactttggagatgacaagaaagatgccctctgtttcaaaacaggggtctcacagtcctgaccctgctgcagagtgctggtgttttccaggctgactccataaaccagttcatttaatcaaacagagaaaggataaatggatactactgaaaattttaaaatcaatcatctaaataattcatctctgtatccaacaaatagtttattaagtggctcctacttacactcgttgaaactcagtagctttcctgctatggtttggatgtggttggtttatccccaccaaatctcatgttgaaatttgatcaccagtgtggaggtgggaggtgtttgagctgcggggaaggatccctcatgagtaggttaatgcccccttgcaggggtgagcgagttcccactcagttccccagagagctggttgttaacaggagcctggcaccgcccccaacccctggcttcctctctggccatgtgatctctgtacacaccagctcccctttgccttctgccatgagcggaagtttcctgaggcccttgccagaagcagaatctggttccatgcttctcggacagcctgcagacccctgagccaaaaaaacctctttttttaaataaattacccagcctcaggtattcctgtatagcgacactagacagactgagacacacacacacacacacacacacgacacatgcaaaactctaagtcctggagttcctgtggggattcagcagagcccagtgctgccctgccattgctgtagatgggaatggtgcgtcctccattcattcattcattcattcattcagtaaatgttcactgagggcctgccagggcaaagcactactgagagtatgtttgctaaaacctataaagaacaattataggaaaattatattcttagtttctccaagggaaatctataattcttagtgccttcattttaatctaaaaattaaattaagaagtcaaaatttaagacccctcatttttccttgtaaactggtatcacaaattatctttttctcataggttggcttttcaaattatcataaactggaacaggctgggcacagtggttcacgcctgtaatcccaacactttgggaggccaaggcgggtggatcatgaggtcaggagttcatgaacagcctggccaacatggtgaaacccccgtctctactaaaaatacaaaaattagctgggcatggtggtgcacgtaatcctagctactcaggaggctgaggcaggagaatctcttgaaaccaggaggcggaggttgcagtgagtcgagatcgcaccactgcagtccagcctgggccacagagcaagactctgtgtcaaaaaaataaaatagaataaaaaattgtagcttgtttttcttcacttcataatatgaaggcagcaaacctgaaaaaccacaaatcatcttgaagcaaagttgtcagggttcccatagacacagatgagctgatggcacgtgctagagtacccacagataaagacctgggatgcgtgccaagctcatctcaactcagcagaaagcatgatgctgggttaggtgctgcatttccccacatctttctctctttgccgtattcccttgatcacccaagtcaggagcatgctacccaatagacgtgtaacacgagccacagatgtcattttaaattttctagtagcatcattaaaaggagcaaaaagaaacaggttaaattaatttcaaaaatattttattaaactcaatatatcaaaaataggatcatcgaaacttaggataaatattaaaaaattaataagctagtttacattttttttttttaactgcaaagtctgaaacctgttattcatacaacaccaacagctagggtaggcgaggtcctgtgggttcgggccatgatggggctgaaaggaccctggtccggcatctcggtccttgttccaggaactctgtggccaagacagtctgacaataagttattgcccacagaggatgtctaagtctttgtgtccactctgtgatcgtgatctagaattttctaccaaggcttgatggggaactaggatattcttctgcaatgattcagaattttacagtgtacctttatactttaataagtgaattctatatatggtagtttggtaggattctgtgtagaagtgctttaggaggtgattgaaagctgtagggacttaccatacggttatgtattgcttggtgatggggtataaaattgtcatgtgaacatcttggagtgcacttacttagctgatacagcccacgacacacatatgctttgtggtatagcctgttgcttcgaggctacaaacctgtacagtgtgtgactctactgagtactgtaggcacctgtatgtaacacaatggtaaggatttgtgtatctaaacatatctcaacatagaaaaggcacagtagaaatgtggtcatatgggaccgccctcgtacatgcaggccttcactgactgaatgtcgtaatgtggcgcatgactgtgtttaaagatttgtccaaatgcagtttaccaggataagcctggaatccgatttcaattgctgtcttttaaagcaggtgtggcaaacgggtggtgatgtgtgtgccagctccactcggtggtggccccagcgctcccatgctccgaaggagtcaggaactggaaagggtacctgcctggagcagtttgtgtgtgtgctaaggggtggggaaggcggggactgggaaccatgtatttgcagtccatgttgacacatttgttgcataaagtcatagaaaacactttcctttaagagtgtcttaatttttaccatgaaatatgatacctgaaaagaacaagaaagcaaagtggaccttcattatacagctaacttttttaaatttaaattttagtgtgcttctaaaattggggataaaaccatccatcaattactaccaagtaagtcttgcttttgcttcttttctcgtgtgtctctcccggggacctccagtagggccgtttcagcctctgagtcaatgggctgtaaattgccccagtgcaaacccccttcctacttaaatgttatcatgtgaacagattttatttgcattttattttcctgcgcatgttgagtaggagctgaaggctgcttagaccagtgatttggaagcacagatttcatggctccctttgtgagaagtgtgtgctccagggtccggcagagcaggtggaatctgcagtttcaagagtcacattcacttttataacgtagtcttatatttgtttgtggtttgttttcatgataaaattgtgatttgttttatgataaaagaaactatagatatttaagcatgacaagatgttattagctggtaagcatatacaaaaagttgctttttgccaggtgtggtgactcacgcctataaatcccaggaccttgggaggctcaggctggaggattgcttgtggctagaatttcgagaccagcctgggcagcagagtgagacctctagaaagaagtaaaagtagctgagcatgatagtatgtgtctgtggtctcagctattcaggaagctaaggtcagaggattgcctgcgcccaggaatttgaggctgcagtgagccatggtcgccccactgcactccagtctgggcgacagccagatcacgtctctttaaaaaaaaaagaaaaagtagttgttttcaactcttggttgcctgtttttgtaaacaaaattgtactcctttgttacctggggatgcttgtgctcccatggtgtagctgcagtagggaccgatgtgtcatccacaaatcccgggatatttacgacgtggacctttacggaaaatgtttgcagactcttgccttagagaaaggtatcagattctttgagatagttttcgtatttatcacaggttgtggatttagaaaaaggttgaaagtcactgatcttagtagttctggggcgatggctggatgttgaacaattattttggtatcttgactgtttgtgaaataaattggcaacagtgtctttgctctcatggtgtctgcttacctgtgcagccatttttccagagtgtggggagcagtggacttgaggaaggagtctaccagccctttccagactccccctcaaccccaaccccaggaagccgtaagatgatcgcttgcagggccctcaccgtcctcacctggactcatgtgcgaatagatgagggacatgtgcctgccatgtttgcccagagctcggtgttcagggaactgattacaggggtggcaaaagccacaggggccacacatttgctgagctgcttccaggtgcgaacggcgcttgtttgggcatcagaaacagcacggtggatactcggagtcctgtcctttgaaaggagtttgatttatcatcaggagaaatttgttgcttttgcatccagcatccagccacgtatccactcatctgttttatggggaaatcagggctgcgggagcacccaggagagctgccgacccagacatttcctgggaaatgcgttgctgagatggaggcctgcagcctgcccaggccctgaggggagtggttcagtggagcagagctgggggctgggggctgggagatatgggaccagttgcttcttgagggggctcaggggcagagcaggagggttgggaaggggccgggtgggagccatagacatgaggacctcatcctccagcagcgctgagctctgagtaggccggggtgtttgcttgttgctgtccccgtggtactggggagaggctaggcacagagaccctccgagtaggtcacatgctgggggaatctgggcctatggctatgcagctggagaggaagggatagtgtggggagcttggacttggccgtttgggacagggggatgggagaggcagaggtcctgcctcaggcctccataggagtgacatttgctggtgtcagaagcttggcaagaggggaggatgatcagaccctgcatggacagttcgaattggagctctctgcagagtccaggaagagaggtctggatgggagggaagccatggggtggaaaagatagcttccaatggaaggcagtgaaaactcgccataagtgaaggagaagaaggaggccaaggagatggggcaggaatggcagccggcagccaggcggtcagtggagcaggtgctcaggaggcccacaggagagcttcgtggaaggagtggacagtgtctgaggcaaggggcaaaaggcatctgctggagctggtgaccccagcttggtgccccccaaagccagagtacgaggctgagaggatgcaggtgtcctcctaggaggtttgagtcagaaggcacgaggcagaagcagtgggggaggactccctcagtagagcgaggaggaggcccctcatccaagaggaggttggagcacaggggggtctaggtttgcagtttcgggaccggtagctgaggggtcccagggcctttcttctgtgaaggagaatgtgtccaccgtggggagggggtcgggagagagagatacttcagagtggacagggctgagaaagctttatgggccgcgaaaggcagagtagttgttggtggatgagggtggctgtggcaggtggcgtttcaggtgagacagctcggggcccagaaagacactgggaggaggagagctctgctctccagagaaacaggagcagagaggaaaacagagccgcagcgagcggcttgtggtctggggatgaagcccaggttgacagcatcctctgcttcgctggtggaggtgggggcatcattctcacacctgtgctgggtcctgtccctgccagccaagggagaccaggaccctgccactgttgcgctcaggatagtccagaactgtcagatcttttctgttgaagtttaatttctaatacacttgtatttaaaatcaggttgcagattttaaagatgcccttgccagagtatatggagtgatacccaaaatccagtgccttccaccaagccaggttagacagttatgttttgtcttcctttttttctcaagaagacaggttctacttttctgatggccttgtcttcaccatgcagttccctggggcagacttgtatttgtgcatttgtgtctgtatatgtgggcatgtggtgtgtgtgtgcatgtgtgtgtgtacatgcatgtgtgcatgtgctgtgtgtgcatgtgtgtgtacatgcatgtgggcatgtgctatgtgtgcatgtgtgtgtacatgcatgtgggcatgtgctatgtgtgcatgtgtgtgcatgtcctgtgtgtgcatgtgtgtacattatgtgggcatgtgctgtgtgtgcatgtacatgcatgtgtgcatgtgctgtatgcgcatgagtatacatgtgcgcatgtgctgtgtgtgcaagtgtgtacattatgtgggcatgtgctgtgtgtgcatgtacatgcatgtgtgcatgtgctgtgtgtgtgcatgtgtgtgcatgttctctgtgtgaacatgcatgtgggcatgtgtgtgcatgtgtgaatgtgtgcatgcatgtgaacgtgctgtgtgggcatgtgcgtgtgtgtgtgtgtgtacatgcatgtgggtatgtgctgtgtgtgtgcatgggcctgtgcctctgtgtgaatgtgcatatgaacatgttcatgtactgtgtgtatgtgtgcacatatgggcatgttctgcatgtgtgcacaggcctgcacatctgtgtatgtgagcatgcatgtgtgtctgtgtgagcatgtgctgtgtgtgagcaagcatggtttcttgacagcatgctaggacagggtttgtcttcttgcttatctttaacaagaatatacctgttcttttagcaatagggtactgttgcccttttggcctacaaaagccatttcttctcctaatatcttgatagatatgttgagtgctgttgtatctgtgtgtaactttgttaattttctctaacataaaagcagaggcttttcaccagggcaccaggctggcctctggtggtgaccaggggatccaacccccaagcccagctccactgcccacaggcgagtcacctggggccactccttccaatttagtgcacagcagccttctgctcaatgaaggggtccgttcttggaacctagaacctgtggtgtggagcctctgcttttgttatcttctaaaagttctaaaagttcatgatcttaagaccttgatgataatccaagatctgaattctaaagcgtctttcattgtttacttttaggatgaggaagtacagacaattggtcagatagaactgtgcctcactaagcaagaccagcagctgcaaaactgcaccgagccgggggagcagccgtcccccaagcaggaagtctggctggcaaatggggccgccgagagccggggtctgagagtctgtgaagatggcccagtcttctatcccccacctaaaaagaccaagcattgatgcccaagttttggaaatattctgttttaaaaagcaagagaaattcacaaactgcagctttctaaaaaaca

SEQ ID NO: 592 - DNA, 22559 bp, Homo sapiens
  source 1..22559: mol_type = other DNA
ctgcagctgcgagcctcggggaagcggaacccacaggcgcgcgcgccgctgcttctggccgggcgcgggtcgtggtgcaccacgggagcgccgcaccggccggcatggaggagcgcggcgattccgagccgacccccggctgcagcggcctgggtccgggcggtgttcgcggctttggcgacggcggtggagctccttcgtgggcccctgaggacgcctggatgggcactcaccctaaggtcaggaggcgcgagaggagcagggcgccgtccaggcccctaacccaggcagaacactcccaggcagctctctttctttcttcctcagtgggagactgaggacgcgcgccaccctcaccgagggggaccggtgtgcacaactgccagcctcaggcagcatcggttttgtttgtttaaacaagttgcactatctcaatcccccagccaaagccattttggaactgagagccagacagtaactccgcccctctcaagccggagatccctaataagcgctccactagttttgctgtctaggtaaatcccctttgggggataaatttatttaatcctcacggtaaccatgcaagacaatttgtgggcgatggataagatctaggggtccatagtgataaagatttaagcacagtcacgtttacacttagccttgggcccagaatgcatctttattttgaaaaggtgcagattcctaatatttcagatttcttcgaaagtttgaataggttcttgctcaaagcagagctactcacattttgcgtgtatttttctagattagcagcaggcgagatcaagatagtcctctgcttacttctgcttgagacattactgccttgtacaagtacggttccaagcagtgaatagacagtgaatggagatgtgggttttgtaagaatctcaaaaactagtctctacggtactttaacagaattgcactcttctgctagagagcaataattcataatcatctaaaaacagccaagaaaaaatttgaaggtataagtttgaagagttaacctttttcagcttctcttgcttaattttatcttcctactctgtccccttcatcctcccaaaaggtgagaaaaagaaacaatagcatggaaatattatttagtgcccttttagggaaacaatagcatggagaggcagcatattggttaggcgcatgaactcaaaatcagactcagtttaaatcctgattctgtcacttatcaaccttgtgatttgggacaagttgcttgatcttattatgccttagtttcctcacctgaaaaatggggatattaatagtccatacttacttatacggttgttacaggattaaattaatgaatatttgtaagccattcaacatacagaaagcactatataagtacttaataagcgaaacaccagtaacaactttttaagactttatctagatttggtggtgttattcagtttatatacttgtagattgttttctttttcaagttaatggctgtatacaccttgaccatcaaatctccccttttgatttctcttcttgaaggatcaaattaatttttaaaagaaaaagaacaagtaataaaataatagggggtatttgtttttccaatttcacctttctgttaatttaaaaattatgtagtttcatccagtaaaatggtaccagatttattatccccaaacacacttttattttattattctcctgcttagaaatcctcagtgtttccatactgataaaatcacatgtttagcttgaccaccaaagccttgtaacctggctcaaaattatgttttgggtgttattttcaaaacatgtttgaagtcgacaactaattaacccctgtcctcctgaacctgtacagttacagtgaagctgatgggagaatgtgactttagacctgtccccatgcaggtctgctaataattcaactcagcattagccctgcatatccacctagtcgctggcatagctgggcagcctcagaattctcctgcaggtgtaggcccctgaaaagtattccccttatgctgaccagtagtctgaaagaagcagctttctctagttccttgtcaattccttttaaaaaatctactcttaaagtgagaaagagtgggtagagaggctaggactgatactctagcagattctctccatatacaaataagaggctagggaaatacacagtacccactaacatgtcccatcacaagttttattaaaaaggtttctctattgctggcagataggtttctttacaggcccttgaatgtatgtggcttaatcccacctttgtgtaattacctgcagtattactctacttctccacttacttaaatcataatgttcttcagtgctcaacttgtatcccatcccacctctgctataaatctttcaccagtccctctgagtagagctcttctgacctgctgtgtcatgttttttattccatttacatggtttttaatcacttacagtcatatattgttatttgcctaacaattttaagtgtgcatgtatttaacaattgcaagttctttagagacagagataagatcttatattgccttttaacttccactatacctagaagaattttatagattatatatgcttgatgaccacttgatgattggaagaaaatattaaataattttttcttctcaatttgacaattatattttaattttcagtatctagaaatgatggaattagatataggagatgccacccaagtttatgtagcgttcttggtttacctggacctcatggaaagtaagttgtttgtttatattgttttgttattgggactgtggtagagatttggggggttggattgggatatagcattcttaacataataagcaatcttttatgcatttgctgttaattttgcaatttatttatttacattgggaattactgagtaacagaagctactagaaaagcaaagacaggaggtagtgttacgagtgatatttgctcagctgagtattaggtagaagtttggagtttttattttttgtatttaataaacattattgtccattcaatgatgctctttcaggcaaaagctggcatgaagtaaactgtgtaggattaccagaactccagctcatctgccttgttggtactgagatagaaggggaggggttacagactgtggtgcctacccccatcactgcttccctcagccataacaggtgagcaggtgattttggtctaagttcctttcccgagtaaagcagtaggaaacattaaacatagtgatgtaatacttttaatgaaatttgggatacagggttcatagctttactcttggctatttgaggaataagttaaatatgagtgttgtattcggccattcttgcattgctataaagaaatacctgagactgagtaatttcttaaaaaaaaaagaagaggtttaagtggctcatagttctgaaggctttacagtaagcatggtgctggcatctactcggcttctagggaggcctcaggaagcttataatcatggaggaagttcgtgaagcaagagcaggcacatcatatggcaaaagcaggagtgagagagagtgttgagggggaggttccacacacttttaaatgaccagatctcacgagaactcattgtcctgaagacagcactcagccatgaaggatttacccctataacccaaacatctcccaccaggccccacctccaacattggggattacagttcaacatgggatttgggcaggaacaaatatacaaagtatatcaagcattcaacaagtatttatttagcacttactctatggtcagtactttttcagagacagtatgtatggtagaaatatttatattcttggtaaggaagcaagaccattacatatgaaataacagctgttataagatgtaccatgtaatacaaattatactttatatagcagttggtgaaaagcatgattaacatgcaagctgaaatcaaattttcatgtagctttttttaaaagctttaaaaaagagactttttttaggacctttttttaaaaagcttaggtacacagcattggattaaacatgtctttgtttcatgacatactctcattattagttcatgcttggtttttatttatttacttagttatttttaataatgtaataagtatctctgtacccatcacccaaagcaaaactagattcttgataataactaacatctaatcttataagtcccttccttaacgtgctttcactgacctgaggtaactcattctgaattccatgtacattgggaatttttaaattttagatgtttttaactttaattaaaaaatcttatcttttaaggctgaccttatacacttaatattatattactaaaattcatccattcttgtgcattttttgagctgccacataacattccattgtgtgattataccaccatttttacatccactccctcgatgatggagtgttgctaatgtttaactttaggagataatttcaaactattttcaaagtggttgcctcaatttacttttcacctgcagtgtaaataagatcctttggagctgtattgtctctcacatttagtattgtcagacttttaaatttttgccaatggaatggattattcttattttggtcttaatttacatttcccttattactcataatactgaatatttctttatatatgtattatttataagaaatatctgttcatatcttttgcctgttgggttgtttttagttttctcattgacttgtatgaattctttatatattcttgacctaatagtttttttattgtgttttccagtttttaagtctgtctttcactgtcttaagatgtctttcaatgagtaacagttcttaatttgaatataatcatatttatccatcttttataatcaacgtctttgtgtctagtttaagaaatattttctatctaacggtctaaaaaatacttatattttcactaagagttctattgttcttgtttttaatggtgtgagaggcggttagggataccattgtcatgtggataaccactttttctacctccatttactgaatagtccctcctttcctcactatctgacatatcacttctgctactttccaaagttccaaacatgcattaatttgtttctgggttctctattatattccattagccagtttatctgtccttttgccaataccatatctcttaatcgcttgcttggtaagaagtcttggtatctggttagcaagcctcccttatgcatttcttctttagaagctgtagcaggcagcttctaagatggcttctcctaattctggtattcactcccttatgtaactctcttcccttgagtgtgacctggactcagtgacttctttctaatgaataaaatttggcaaaaatgataggaatgtaacttctaagattaggttacaaaagactgtggcttctatcttgggcactctctcttgcttactataaaggaagccagctgccacgtgagctgtcctacagaaagtctgaaaatagaaaagagatgacaattattgatggagcaagattcttgagagatgaggaaggatggattcaagaggatagtggaggagagtaatattgagcatgtaaaggggtgctgtaaacctctgagagtggggtatgggaagaatgaacaaatgaaaacacagctctatttgggtggcatataagtagggaaaagagcagagcctcttaaattccagcatgaataccgttgatgaatacttaacattttttctagctgactatgactgaatacatagcagtctagtagaaagagccccagactataaagtcttaagacctgggttctagtcttgggactgacacttaacattttgtttgatgtttagcaacacacctaatttctctgggtttcagtttcctcgtcttattttgttgttgagggatttagattaccagtacatgcaagatcccttctaaattaaagctgctgtaactggttattttcattgtgcatatttcataaagccatattaaactaaatttgcagatttctatgaagtattttttgtatttattattcataatgagaattgttttttaatatgtcagtctattcatatgcttctttgagaagctccttactgttttctctgtgtttgagaattacaaatagttgttagcattgacatcagatttaatcgctagtactttccggtttttactagcatgatttccaagccatcctatatccaagagtcttaattcattcctcagaactcattacttctgtcttttaattactgtaacaaatattgtcctagctagtattaatgttatattatttgtttggacaaggagctactatttgaaattaacctgcatttattcctaaaaaataaaattaatgaaagcaatagcctattttaatcaaaatcatttcataagtctagaagtacaaatttgtttccattgttaatttctagtattttccaggtggtaattaatgcttttctagcttgaatggctaaagcttgttttcttcttcaagtagaattagttggaatgataacttggtaagccattttgatgctgttgcatttaataactgagagagcttaaatctttatgtcttgtttttatataaatattcttaactatattatacagtagaatactaatatagaatgtagcacaaatgaggcctgatacatactagatttatatgccttttagtgcataacattttctcaactcaaactatgcaaataactttttaacaaatggaaatgtgtgggtgtatatgtgtgtatgtgtgatttcattattcagtctttaacagggcagtcttttaggtagtaggcatacttttatctatttttacttttagtgtattttataatataaaatgttatatatctaacagtaatgctgcaattccagcctttcatagttaatgtgggaatttttctgtgttagtaacacagagaagaaaatgattgatgttgagtctctgataaccttgtatagcaaagaaattcattgggacatgtcctaaaagtatttggtgggaagatgtgagggcaactcaccatgaaagaaaaaatactttttatttaagagggaaaacagcttttacttattcagtgataaaacatctacataaattaacgattctgttttcacttttaaatattattatttgtcagataatattgcttgggctttttggtcttaacaattatttattgagtgactcttatgtgtcaggcaatgatctaggtgctggggataccatgataacaaatactttcatgacatcctcatgaaagtagtattctagcactgaatattcgcttagaaaatacttttttttttttttttggtaattgttggatggaattttaaaaaacagaattgccctttgttcagatatttaattgaatgtgtgatttgggactgccttcacttattttgtagctagataattgaataacaagtattatggagtactgataagtagtttaacagggatatgtacaaaattatgtcaaaacccagaggaaggacaggaaaagtctctttagccagtaagagaccatggtttagtagggtaactgcaagtaattaagcatgattgcctacctagcatggtgtctagtcagagtaggtgtctagtaatattccttaaggcagcaaatgaatgaatgaatgaatgaataaaatttcagagaaaagagggaaaggatggaaaattagatgggaaagtttatttagattatgaaggccatcattgtttttacttttttgctattactaatggtattctaatgaatagccttgtgagtacctccttgtactcatgtatgagagttttcctaagaatagctgggacatgtatacctttataccttctttttttttgagatggattctggctctgtcactcaggctggagtgcagtggcacaatctcggcacactgcagtctccgcctcccgggttcaagtgattctcctgcttcagcgttctaagtagctgggattacaggcatgcactaccatgcccaactaattttttgtgttttagtagagacaggtttttgccttattggctaggctggtctcgaactcctgacctcaagttatctgcccgccttggcctcccaaaattctggcattacaggtgtgagccactaggcctggcctatcccttcatctctactggttattgctaaattgttttcaaaaggattattaccagtttacacttgcacttgcaatgtgtaagttttcacagactgggagaagatttataacatgtgcataactgacaggttaatttagaattagcttctgtgatttcagaaaaaaaatcccaatgggaaacatgggcaaagaatatgaacaggcaactcacagaagaggaactcaaatgctcaaatatgtttgtaaatgaaggaattacaaatataaaatgtgtttgtgttgtcttaactttgaagaagacttgcagacagtttgtttttattttttgacagaaataaggtactgtttaatggggaacttttgaacagaactacagctagcacttagagagtctctgaacagtttaggaaaaggagctccctctcgacatgcaaaggaaaatgtctcttcactaaggttcaaggcttggcgaacaatgaaggccagattttagatccacttgtgccaggcaccgttgtgcaaagcacaatctgcatatctgtacatgatgccctgcccctgaagcatgtctgtggagtcttaggtttccacaaagaacactatgaaaattactgctaaatgggtggtgtcattgaagggctttaagcaaggaagtgagactattgtttattctatgtggttttaagaatactttgcatttgcagagaatgttacagaatttcaaagtatttcaaaatatttttacaagtagactttcattaaatcagcaccaaaatccctagtggtatacggggtgtttgttttatcctaactttacatacaaaaagctgaggttaaaagtatattttcatttgtacccccactttttccaaaagataataaaagattaagtgagctgtaccacggtctcagttagcctcacagctattagagtttctcttgctttattggtttttaaaaagattttattgtaaatgaaactagatacggaaaaccacacaataccaatgtataaattaatgagttataaggcaaacgtctagaactcttgtaattataactaagtcaagaaatagaacttttctaggcaccccacaaacttttcaatgtgccccatcccaatcataatctttcttcccccccaaaatagccattattctttcttttatagtaataatgggctttggcccatatattgttcccaggacctcttagtgctaatttgtcttttgactctcactcaagaaagaatgttggaatatcactggtgagactgataatattatcaggaatattagttttatatttaaaaataccctgccaactttactactctattgttagaaacaaattacttgccacatactatacaaccaacctcagcataccagttgtaaatcaccattttagactgtgcgtcttagctgcttgaatatagtgctttaaaaaatgctttgtagtcctcaaaaaaccttaaataacatttttattagtaggagagttgggtagcatacacagctgtagagccagaggagttggcagtttgctggagctacaatttcttattatttacaaagagcatatagcacataaggcctgataactgtctcttttattgaaggagacaaattttataatctgttgtttgtaaaactgaaccaaactctgtcatttacatagttaactacaacttagttataaagtatttccctagtgatgacaaatagtcccactgtttcagtcaccacttgactgttatgtggcagagtggcatgtatatttatatggtttattatttattttatggtgtatatgtattttctgcctccttaaaaagtaattgttctaaggagtgtttaatgttatatctgtgtgctattctaagaatgcctgaacagtttttagtgtctgcttcccacttactttcccaggctttagacctggtggttttgtttacatactttctggcaagagtgtcgacagattccattacagggtgaatgtgtatttgaatgactgtgagtgaatgcattactttgagcacaagtacgttttgtgtttagcattttctgtaaagcagttatatatgatatgtgatcacagttaaaacactttgtcatatttttcaagtttcagaaggtcttgtgtgtaatagtccttatgaaaatattgatttaatgttatttcctgatctgtaatgggggaataaaattgataaagtgcccatttctgattatctagtgggaaaattttgctgatggagtatgaagtaattaattgctagtgtttcttgtttctctcatctaaaaatacttcctaaagctaatgtaaaataatttttagtttgcattataatgccatattaagttgtatatttgcatggtatccatatggacagtactctagattgtttctttgctaaattgaatctaaggaatacatgaagcaactttggtaaatgactgtagaggtacagtttgctcagacaaagcaatggtataaaatcatattcatagatacacagagatgaaagagatctgatggatttaaagatgagacaacaagaggaatactaactaaaactagtgacctatctttttcagtgctaagattgcaaatgaagtcaaatttatgttcagatagcctgattagcttcactttggaccaccttgggtccattggtatttattgagtaccctaaatggtaaaagtatactatactgaaattaggataatagtattacaattttctgtaatagtagtagtactacaggtagttgcaaatgggaaaatatcttaagtgacttatacagggactcaaattataagggaacaaaatggttttctagtctttaactactggtagggttttttttgtttgtttttttttccccctcatagacccaatgtcacctcccaattctaatgtaaattttgtttcttcagtaagatacaagaggtgggaaaaccttagttgacatattttaaactcatctgtggttatatgtaaattaaaaaaaagctgagcgaagtgaaatgtcttatacaattataaaatccaggcacagttaagatacagctttctgaaactattaatctccttttctttccccaaaggattgtagttccttccttagtaatacgtgaatcattcatcctttcaaacctgactaaattgtaaatggttctttcttctcagtgtcagagaagaatagtggatgggagaatggagcctctcccatcaccattttgttcccctaggacctcaaatagtggcatttcttttgttgttattgtttcgtggcagttggtaacctttctaaattgaatacactcagccatcttatctgagacaaaaatatttcaaaagttcttcttggcatctgcatattacttgggaagtttagaaaaaagatgtaaacattccatataccaaattgctcctttgcaagcttagctaccatgaagctaaaagtctaagagcttttaaaagttggtttgaataaaattattttggcaagagtattgtacaattaaaggaatttatgccttaagagaagtgaaaataattctgtgcacattagaaatgaatgtcagagccaaagttaggattcctagcctgtggtgatttgcttaatctgatgcttagcttattaatgcatatcatatcctatttccctcaatgttgttttcaaaagaatgtactctcttttcctcatacattgaatccgatgaattttagttattttttctttgtcagaattaatttttcccaatatagcttttaaagactgccaatagtaatttttcttttttaaaggacatgattaaagaacattttattagctgtttgtattatcacagcagtaacccagataatataaatggacgaattatttatttttaaatccattgcctttgtgttttcatggggagaagaaaaaacctaatattttaaaaccccgagatgtgtagggaaaattaaaaatttatttattgttcttacccatcactaaaaatgttataaatgtatttgattttactttttatttaaatataattaatacaaacataattatatactacctagaggcaaaatttggttttaggatagaataaaaaggtaaattacaaattattccagtattttctaagttgcttatttatttattggctgcctgggctcatcgggtgcaaaatattatggactttgcctacaagatgctaacagtctggagctgagatggacagtcatttacatctagtgtgataaacgtaatgacagatatgtacagggtactgaggaagaccacagagggaggagacctaactttgactggtgggataaagagacaagagagtctgggaaaacttactggaggacaagatgtttgaaatatgcaagaacaaggaacaaggatgggaatggatgccctggttaaagtaataacatgagcaaggtattgagggctgagagggcctgaaatttgccaatagttcattatgactgggtatgtagtaatggcagagagagtacctgcctgcagttggtgagaaagccctagattggtgtggcatgggtggagaaggagtgagtatgtgtgatacaagagatatgggaatgatgggaaaaggaggggaggaaaggagagacagacatagaaaaaatatgaaaaaacaaacaaacaaacaaacagctctcctcctgggaagtaacagttcaggagaagcaacctcttaaggattaaggaagtcaaaggtaagagaaagttaaatcaagagttttgccactacaaaatctgtaggaaatcctgaaacaaaggtgggaaaattatttgagtcagaatattaggaattgtaatgcttgtttctgttttctgtaatggataccaattacaatgtgcaaatctgtaaggatatagatgtttagctattaatgcaagaacctaatttggggatttgaggaggttaagtaactagggtttagtcatctgagcttttctcttcattatactcactccctaagcggccttatctggttctaaggttttaaatatcatcgatatactgatgactcccaaatttttatctccatcccaacctcttccatgaacctcagactcatatatgtaagtgcctacttgacatctccgctgtgatctaaaaaaggcatctcaaattagcatgtccaaaaagaaatcttgatttgctcctatactttctccttctgtcgttttctttttgtcaataaatggcaactctattcattctgaagctcagaccaaaaaccttagagtcattttaaaatgtatacacacacacacacacacacactttattttttagaccaattttagatttacagaaaaaattgagcagatagtacagagatttcccatctaagtcccagtccagcatagtgtttcccctattattaacatctttgtgttagtatggtacatttgttacaattaaccaatattcatacattattagtattattaactgaaatttgtcatttacactagggtttattctttttgcacaattctgtggattttgacaaatgcataatgtcatgtattcatcatcacatacagaatagtttcagtgccataaacataccctatgcttcatttattcatccctttcttcacccccaaacacatccctggctgctactgaactttttactttctgtgttgttttgccttttccagaatggcatatagctggaattatacagtatgtagcctttcagattggctttcactcagcaatatgtatccctgctagcatggcattttgggttttagctaccctagtgggcacacaatggcatctcattgttcttttaacttcttgcaatttcctgatgacatatgatgttgagcatcttttcatatgcttatttgccacctgtatatctcctttggtgaggtgtctgttcagattttttgcccatttttaaattgggttttctttttgataagtttcaagacttctgtgtatattttgaatgcaagtcctttatcagatatgtgttttacaaatattttctcccagtccatggcttatattttcattatcttaacattgtattttgcagaacagaagttttaaattttaatagaatctgatataatttttttcctggatcatgcttttggtattttatctaaaaactcatcaccaaatccaaggcatcctattttgtcttctagaagttttatagttttgcattttacattaaggtctgtgatccatttttagttaatttttatgaaggatataaggtcagtgtttagattgattttttccaggtgaatatccagttactctaacaccatttgttgaaaagatgtttatttcttcatcaaattgcctttttttttttggtcaaagatcaattgactatttatgtgagtcaattctgagctctctattctattccattgacctattcatctattccttaaccaataccacatgatcttgattactatagctttacaataggtcttttttttttctttatgtgatttttttgagacagggtctcactctgttgcccaagttggagtggagtggcacgatctcggctcactgcaacccggtccgcctcctgggttcaagcaattctcatgcctcagcctcttgagtagctgggactacaggcgcataccaccacacctggctaatttttgcatttttaatagagacagggtttcaccatgttggctaggctggtctcaaactcctaacctcaagtgatccgcctgccttagcctcttaaagtgctggggttacaggtgtgagccactgtgcccggcttgtaataggccttaaagtcagataaaatcagtcctctcactttgttctttaacactttgttggatattctgactcttttgcctttccatatcaattttacaatcagcttgtcaatatctacaaaacaacgtgctgggattttgaatgggattgcacttgtagatcacattgagaagaattggtatccaggaacatggactatctctccatttgtttagatctcctatgatttctttcatcagagttttacagttttcctcacatagatcctataaatattttgttagatttatacctaaatatttatcttttatgatgctgatgtaaatggtgttttgtttttaatttcaaattccaattgtttattgctgatatataggaatacagtggacttttgtatattatccttgtatcctgtaaccttgctataatctcttagtttttattcttccattttctcatacccccaaattaatttatcagtaaaccctgtcaattccttaaaattacatccagaatctgtccatttcttaccacttacactacaactgttaccactctggcttaagctgctattatctcacctcctggacctactaagtggtcctcctttaaaacacttgatatattaatgctactcaacatatttcatatttggttttctttgattatctactgtctgttttcctccactagaaagtaagttccctgaaagtgagaacttggttttgtttattggtatatccctggggtctaacctggtacctggtacatggtgctaagtaagtatttgttgaaagattgggtaagctatcttaggctactgtgttcctgcagcagagacttcctaattaataccttaaagaacataagaatatactataagcaaccttttaagaatttccaaaaaattagaatgtctgcaaaatctgccaggcacagtggctcacgcctgtaatcccagcactttgggaggctgaggtgggcggatcacctgaggtcaggagtttgataccagcctggccaacatggcaaaaccccgtctctactaaaaatacaaaaaattagctggatgtggtggtgtgtgcctgtagtcccagctacttgggaggcctagtgaggcaagagaattgcttgaacccaggaggtggaggttgcagtgagccaaggtcacaccactgtgctccagtctgggtgacagagcgagactctctctctcaaaaaaaaaaaaaaaaaatatatatatatatatatatatatatatatgtacatatgtatgtatctgcaaaatccatccacttgcaggatttatcaccattttccacgctttgcattgtaacctgccaatgttatgaatagcctctttactttttagttgaattttttttcatttatattctctctgccctttcacccctctttttccctagtgccttgggaaaaggacttatattaattctggagtagagggttactagaactagttctttctttggaacatctctgaagatattcttagttatgagatttgatcctcaaatgctacatactttcttgaaggaccgtccattattatttccctgtaattgaaaaatatttccactttctgaaagcataatccttattacaaattcatttaatgaccactattttatttgagtcctaaagtctcataattgcaaaatgacttctgtcatttggcttctctgcatattaggatgtgtgtcctcaccttccctctgctagaaatctgctgctggtgaaacccccaattctggcagcttcttttaactgatacagcatttttttttctcttacccttaaacaaaagcttgcagttcattacagaatgacttcccactggggtggatagcttcattgttcagtaaacccccttggaattttagctgccttgattttttactaggaaggcattggcatgaatttcaaggaggtggtctgttatccctgaaacttttctttgggactgagcctgtggatgaataaggcttctttggtgcctctgacaccaacttaattttgcattatgtttcagagttgcattatggcatgtcattccattatatcataatgaggcaaatcaaggaattattcccttttactaataaggctatagcatatattatttggccacattgaagaggataggagatactttctatgggttgaaattaatactacttttaacccatgatacattctatttcaatagcatttgaagttaaaagtaatgcggtcttcaacttcttgtcctctgtgtaaatctccagagattacttagtatctgtttcagaatcattacagaaaaatcaatgctaagatttatggaaagcatttaaatagcttggactaaaggtattagccaaatagtgttaactgtgtatttgcttcaggcttgttttcaagttagctatatgaagctctggaatcactttttttcagtacacagagctcctctatgaacagttatgagaaataaaaacctgttgtgagcatcaaattttgttgctgttattaaatagctattattattgatacatatttttctttaggtgggatttttccctttagatataactgagtttaaaacttgaaactgttagtattaatacataggttatatttttcataggttgatttctatccaatatgaactataaagaattttatcgtttattgttgtagatttgtgtgatgaaacatacaatatttccagtatcttcacaatatttttccaaagaactgagctattaaaatttatacatataaggaaacattctgtcatttctaaagtgagatttcaaaccataagcttgttagaaattaagtgagattatagtattctggtgatacttaaatgttcttgggatctttacaatcatatgtggttttttaagaacttaagaatcttttgttactgctattattaatagattgggaaaatataatctgttgactaaaaggcaaaataaacatttttaagattttatgcagtatcctataatggaaacaaacaagaaaggtcttgttcttgtttgttgaggaaaagatgatggctttgctttaaacatacttgaaaaatcgactagaagagatcctgaacaagaaactgtaagacttctggaatgtaccttgagtaacagaggcagataaactattttattctgttactagtgagaagattcactggtaattcacaatcaccgccccctccaaccaaataccataaacaaggcctcagaaatgggaacttccatttcatttttgacagtgatttctctcaactctgaaaacaaaaccccttttacaactctgagttagttttcaaatgttagggtttcctgcatgggtatttggggtaagtatgaaaatgttttgctgcttaaatcaaagaactctggaaacagatataaattgagaatggaaaaagagtagtgaataagatggaaatttctattctaaatttcactatatgggctacaattcccatatagttttccttagtgaacaccaccccccaacacacacatacaaacacaccttctgatttaaataacattatatcttcagaaatggaaaatgtgttaaagttgtgttaacaggcttccttcttgtctgtgtcccattctcatcacagtctaccagttagggatgtttagagaaatttatcttgtggcattgaagtggctttatgtgcattatatattgggttttatgtatattgcatactgtgaagtaatcatgatacatgctgacaacaaaagatgtagataagttaaaattttagttgatccattgtctgtttcttctttgccatctttgtagaaaaaaattaattcaagatggacagcctataaaaatgtatctttttctattattattaatttagatattggcgtgccacttttgaagaaggaaaatacttagctacattaaaagatttgcattgaagaagcaattgtgatatgctgccttttatcacagtgtgacttcccatcagtgctgagtaatgaagtttctgattaatatctatcgttgctttatcagaatatctttctctaaagtaaatcattcttgtgaataagaatctagctagttgtaatgcagttcagcataggtggaaataattttttaaggactaagtcaatttctgggattcagactgtttcagaaaagaaacattttctgtatttccactaatggcacagtgtaccttagtatgtttgggttagtattcagttttagcaataatcatggaggcaggggtatctataaatattatatcccaatttgcaaggtagcaaagttgtatatatactacataatatgaccacttgacagtttatgaagtcttttcatatatgccatttaattgattcatataataatcttatgtgtaaacataaaggtgtactactatcttcatttcaagtatccttgaaaagactttctccattgaattgcctttgtacctttgtcaaaaatcaactgaccagccttatagcacgttaagaagtaacttatatgatgttattaacacaaaggatgggggaaggaatgaagctatattggagtaaacaatgacaccagacagttatgtgaagaaatgaagaataccaggaatattaaatatgtgaatgtaaaagaccctaatatattttcctttctcctcttaactttataaaaagaaaattatttaaagtaataattacaacactatattactgggtttaaatatataaacatatatgacaataatagcataaaggtggaggaaaggaataaagctctattggagcaatttctatattttttagaatcaagttagtattaagctgagagaaattgtgataaactaagacgcaatagtaatctctagagtcatcactacgaaactcaagaaactatagtaaaaaaaaatacattaattaaaatggtgtactagaaaatacctatttaatagaaaagaaggtgataaaggagggtgagaggaagtaaaaagacatgtgatatatagaaaacaaatagctaaatggcaggcatgaatccaaccataccaatgttaattttaaatttgaataaacactcaaaagggcagagattgtcagattggatataaaaacaagatccaactatatgctatctacaaaagatacacttcagattcagagacaacaattttggaaaactgtcaactatttctataccattctctttcctttccttctgtgattccaattatgtgtaatgttgaacttatttgatactataccagaagactctgatgttattttttaaaattattttttctctttttacttcagtttggtttcttgtgacctgttttcaagttttctagtgctttcttctgtcacatctcatctaattgagtgaccgcaactcctaagtatattgtgactttattttcaggataagggagatcttgaaggcatctcgaaagttgcaaggtgatccagatttgccgatgtcttttactttggccatagtggagtctgattctacaatagtctattataaacttactgatggatttatgctgccagaccctcaggtcagttttgaggtaactgacagcaagaagtacaaaaagaggaaaattatgacgtgattttaagtgtgactcaagtcagtcacagaactgccacttcctttgccatagggaaaattcaagaaaaaaagtcttgattttcagacgtcagaaaattggttatattttgttcaaagtagcatgttcctagttatttttgcaaaaaaaaaattgatttccttactctttggagaatttcatggttttccaaagtattttatgaagtcatcatgcatttaattatttagtgagtagctgaggtggaatgtaaaggctaataatagttgtaagtaaaaaaacgcttatttaagaaatgttaaattggttgacattttgacaggaacattttaataagataaatgtgctatatgtgatttctttacatactttgttggtataatttggataattacattaaatatctttctaattttgcttttggattacattgtttatcggagaaaagtccatcctgatcttttttttttccagaatatttctcttagaagatgacatccatgtttcctgatgcttgttttattcatacaagattggatttgagacccatcagactgcttcatcttttatctcagaaatagggttgacgtacatagtgagggttgacttccccattccataaggttttcattctgaagagtaaaacttccccaggtagaagactttctccttcttaaaaaatatagggtgatttctttaaaactttgttatctagagacagtttaattacagttatatacaggtttatgcctaggatgtattcagatgggtgggacctgtgtgctgcttttgtcatcccacactcaaagttgtctctttgtttcttgctgccactgccagctcattgttgagactgccatttctttctcttactcagctctccccagtgccttttggccactgcagctaccgtagaatggcattttatatgtaccttgtcacccacttctgtttactttttcctctccagtaaaaagtaaaagatttctttcaattggtcttcccattgcagttactgttatttctcttttttggttaactttaaatcaaaactcaaaatatgttcatccagagtgtgtcttaagtaacttacgtgtcttaagtaacagggaccagagacatgttacctacaagagttctgggctatccttttcattcttatcacatatcatagcttgaatattacaacagtgtgggagagaatcaaccgtaaaaatgtcttcattaattagacccagttattccacttttgttaatgtctctcaaattgtacaaagtataaaaaattatatgcacaaagatgttccaagtgacattacttttagtagcccaaattataaaccactttaaagtttggggtaaagattggcaaactttttctataaagggccagaaagtaactattttaggtttttaaacctactgtctctgtcataacttgtcaacactgctgtatgaagcacaaaagcagccatagacaatacataaacaatacgggcgtggctttgttccagtaaaactttgtttacaaatgtggtgccatagtttgtcatccctgggtctaggaaatagtcaataaacagatatatacaaatgatacataatgtacttattaaaaattagtaatgaatattattaaaaacatgaaaatattaccttaagtaaaaattgcaagacggaaaagtgtataagtgggtgtaatcatggctgaaataacagaccaagcatatgataaaaagataacaaagtaaatcaaattactaactggttatagtgggataggaggcagaaaatggatgactttgtcttttctcaatgtttttatttgtattttataataaaaatgttttaaaattaa

SEQ ID NO: 593 - DNA, 17869 bp, Homo sapiens
  source 1..17869: mol_type = other DNA
ctattggaggagaaggccgagaggagcaggacggcgggaagaggagtgcggaacccgcgggaggtgaggcccgccgagccgggctgcgagccgggctgcgagccgggcggcagcggggtcggaggtcgtgggcggcagcgggcgtgaggggtgaggcagggtcaaggggcgggggcggccgcgggtctccattgcccgagcctgtgggagcaggcgggcctggggctgcagcactcaccccgggagccccgccgcagctcgggtagcgttcaggcacctcgccggggccgggccgcgtgcgttcggagcggggaaggcggtctccggggcccccggtgcgcgcggggaggcgtccgctcaggggaggccgaggtgggcccgcggctgcgcccccggccttcgatgccttcgctcgtccgcctgggaccgcgctggcttcgcatcgaagtgggagaggtctgaacagttattttaatactttgatttggaaagaaaatcctttaggccgggcgcggtggctcacgcctgtaatccgagcactttgggaggccgaggcgggcggatcacgaggtcaggagttcaagaccagcctggccaacatggtgaaaccccgtctctactaaaaatacaaaaattagctgggtgtggtggcacgtgcctgtaatcccagctgcttgggaggctgaggcaggagaattgtttgaaccaggacccgggaggcggaggttgcagtgagccgagatcacattactgcactccagcctgggctacagaaaaagactccatctcagaaagcacacaaaaaaaagaagaaaatgtttgttcatcctgcctttaattccttattacaaggcgtgaatttttattgttttttttgagacagtctggctctgtcatccggggtggagtgcagtggcgtcttcacagctaggcacaacctcgacctcccaggctctcaagtagctgggaccgcaagcgccactacactggccagctatttttctttttttttttttttttcggtagagagtaggtcttgctgtgttgcccaggctggtcttgaactcctgggctcaggcgaccttggccgccttggcctcccacggtgctgggatgacaggcatcagcagtgttgaagcctgtgaggtggggtccctgtggctgactctgccctctcctggggccattggcagtgcaggggtccttgtgtgtggaggaaataaggagatgatcaaagtatgattccacgaatcacacggtttattgtcaaagaagatttgttctcgggttcacagtgctcagaggggaggagaggggaggaggtgaagacacctggcagggaagcagggcctccatggatggggtgcattcacggcagggaggtgagtggcagaacggccagggtccggttgctctgctgggatggagcgggcccctggagagtgagatctggtgagagttcgaggtttgccttggtagcagtggagagcgtgagagcgggagctctctgagaagctgggaccgaggtccagctcccaggccagcagcgtatagcttgcctcaaagcatctgcacaaccttcaagctgatgtctgtttttgcagtccagcagtcagggtcagtaactcacataagggagtgtctgacaaggtttaagtggcattcccaaggttgcggagttcactcaagtcctcacatatgtggtctgataagacatcacactcttgcaggggggtcaggtcaccccaaaacatcagactatgtaagtgctgtgaatcacttcaaagctacacagcaggtcccagggcccaaggcagaggagtgagtccacctcggaaggctcagagcagctccaggcagtaaccacggcatttccagagtctggtgtgtgagcctaacagctctggtgtgaccgtccgtactcacctagcagcacgtgacatcagctctccccctgaagtcattgctcagctcgggtgctgcaggaagacatacaggtctgtcttgggccagccccttgcctgctgtgggctgctccctgtgtgtggccttcaccccggtgtagagagatgggctggtcacacccctgcccctcacagcggcgagaggacagaggcatgtgccgggctgtctgtggagctcccaggccagtgtctgggatgcggcaggtgcttggtgttaaagggaaaatattccaggatatctgtgaaagcacgttaggcagagaccaggctttcattcagaacctttgagagatgtgggaaccaccacactgcggtcttgcagtgggagagaggctgggctcagctctgaacaggccatgggctggtggcggcttacagctccagagctgggcaggggcagaggatggaaggttgctaagaggaacccccaggggcgaaggggatgcaggttcaactgacctgccagatcaggccgcccgggggacagtggaagatgaggcgcctaatcagctgtcaagggtgatgggacacgggaggaggtcgtcactaaacagactttgagccaggcctgttaaaccaagttctcagcaggatgtgcacagagggcccaggaggagcctcaggagccggactgccgttggccaaccggtgagtctgttatccgtcagtggacactctgcttccaggtgccttggcctcggcccgcgtcctgaaggcgggagacgttgcagccacgtgctggccttcccggtgctcctgccagcgtcccgctgcttgacacagtccaagttttgtatccagacccagcctgggacagcagcctcccgacagcccccaggcccagcctgtctgtgacagtcacgcctgctcagggaaccatccctccgtgcagatctgggctgtgttttgggtggtacctcgggtgtggggtcccctaccaggtgcgaggttcatactccccaggctgcctcctgtcctcagggcttggagagtcccatgttctgaaaatgacctcttttcgagccgggcaaggccgcatctcctttggcagtgtagtgtcttccctggaggtggcattcctttttgatttgccttctgtgcttgggaacctcacttcctcactctggccagctctgccagcagtttggagctggttcagcgccccaccgccctgccttggcctgcgcccggccctccagggtggcttctcgccagttcctgtcaggcctgcctgggcaaccaggcctgggcacctccctgtcccttgctcagaaaacccacaggctgtgggggcccgggagccaagcctggtgcgcgggcaggaaacgcatcctggagcaccagcttccctgccctgcccgcctcacggggtgcctgggggcgtgcctcagcctgctgctcctgtagtctgttcctgtctccctgagcaggctgaacatgggcatacgagtgaccagcgtgatcgtgtccaggccagtgccgcattctgtgtggtccaagggaaaaccttctccaagtccacggcccgccctttcctctgctgggttacggccaagggcgccaggcctcactggaggacatggatcctggacccggccctcgaggctgctgccttccagtttccccatgtcctggacactcttggtctcaccatttgggaggccgacaggggatgcagagtggcctgttggaaaggccttatgtgaccccaggctgagtccctgagcagcctgctgaggccggaggggagaagagctgagcttctcccttgctgggccaggctcgggctgtggaatggctgccagctcccttcctgggagaggctgggtggggtccacagcaccttcctcccgtcccacaggaagctgtcttctgctgttggctgctgggggcgactgatgtttggatccctgagcaccctgccaatcccagactcaccttcccactctttccagagtccccagggagacacttaagggaaattaaactgcagagtgcaagagatgcctcagtcaagtcagccaaaaacacgcgggtcatccccaagccccagagaggtgagtcgggcagggcactcaactgctgcaggaggatggtcttatttctagcactttccacaggaggtaaatgtggtgggtttggggggtttttcaaatgcatcagtgtctggaatgggttctaagctgctaaataattcttagaggtaaatgacagacatgttgccctagatgtagctagacagccttccctctacagtgaagtctcctccaccctcagtgacagagccccgatgacacggacacctcggctgctgtcacttccctggttcgggcctcccacaggctttgaattgaaggcgagtgcctcagaatttgcatccattgttctgtctttcctgggaagttattcatcctggtggccagcccaccgacaaaatggatttggatctactggacctgaatcccagaattattgctgcaattaagaaaggtacatttatttctatttacataaagggtgtgggtgggtgtgtgcagtttatataaggcaggttaacaaaacgctggctggctaagccttccttcctttgcctaccctgattattaaaccgagggcgggatgtactatgggattttcaggtgtgtgtgtgtgtgtgtgtgtgtgtgtgttcttaactacatggatttctttcagttacttttatttttatcaaagtaatacatgcatattgtctaaaaggtaaaatggagccacataaagtcttttagttttttttttttggagacggggtctcgctctgtcacccaggcttgagtgcagtggtgcgatctcagctcagtgcaagctccgcctcccggggttcacaccattctcctgcctcagcctcccgagtagctgggactacaggcgccagtcaccacgcccggctaatttttttgtaaatttagtagagacagggtttcactgttttagccaggatggtcttgatctcctgacctcgtgatccgcccgcctcagcctcccaaagtgctgggattacaggcatgagccaccgcacccggccgtcttttagttatttttttaaaaaatatttacatctgggctcctaaacgtgtttatgttgtaatgtttgatttgtcagtgttactgattatccatggacttctcttgggggctgtgaggactgagcgtgcctacacctgtgtaccccaacttcctctccccccagctccctgcccatacttagaacctagtttgggtgacatcagctgtcagggttgtgactgggtgcatactggccattgttgaacctggtgtggtggtgcaggggatggttttctttcttacagcatcttttttcgcccgagttagtaaatgctcaaaactcaggccccacgtgcagcccctgccccctgctccccatgccagccgcctggctgtcatccggggaccctcctgccagcttccatcctcccccgtctccccgggcctcagctacgtgaacctcagcacgctgtctgtggcgagaagccggagtgctcatggagctgccgcagcagcctggtgacagggcagggcctcgctgtcctgaccctccatccttggctgttggtttttatcctcctgttggtggccttgtgatcacagctgctgccacagctgcagacacgacgcttgcagaccagggacagagaagggctcagccagggagttcctttctcacctgtgtctcttatccaaaaaccaatgtttccagaagtccctgcagacttcacggctgtgaagggggctggggctgtgaggcttaccagggggagcgccctgccacagccccgatcccggtgagtcctcagggcccacagagccttctggagcagcctgtctgcgggaagccccctccgctggatctggtgaaacccaggggcgctttcttcattcccacccttccatctccttgtgttttctgtgtggcttttctgaagatcacaccagtgcttactgttttccagccgcacaatggttgtcttttcactgcagcgttcagcgcacccgtgttgagggggtttctgatgtggtgggtgtaagtccccgtggccgggtggggcgcttcgtccaccactgctccctctcgtgtgcgcttcctcgcacttccctgatcggctgatcagtctgcagcatttgtcgtctttctacaagtttgaaattagaaagtgatgcacttatctgagtccaaaattaacttccttgccctcctccccagatggcaggtcctggggatctgcacccctgtaactgctgccaccgccgttctgattcgcacatgctctgccccctgccctgactgccctgcgcagctggcgtttggacctgggctctgctaccctcccagcgctcccctccccagggcacatgtcctctcccgcggctcagcccagatccatgcctggtgggcgggtggtggaaagctcggtgctggttttttcctgcccccttctggagcactgtctccagctggcatggaactgggtgcctgtcgtttcttctcagtaccggaacctgctctcagcaccgggacctgcccagccctgtcttctggcttctgccccagctcacgaggctggtatctgtccgagtgccaggactcagggcgcagtgtccagcagccctttcctcgtgcctgtgcatcggccacactgtgtccagggtttccagggagcaggggatccggtccctacccaccttgtccccagaatcggaagcacggtgctctcacagtgctcttaacaaagcaccttttgtcactgtgttgccctgcgttgtgacagtctgacattttcctgtaatttatctgtgttatttcagccaaactgaaatcggtaaaggaggttttacacttttctggaccagacttgaagagactgaccaacctctccagccccgaggtctggcacttgctgagaacggcctccttacacttgcggggaagcagcatccttacaggtaggtgggccctggcatctctgccaggggtgacatgtggctccagcatcatggtcccagtggtgcagggcaggggctgtgcagacttcacccagggaccagcctcagggcgtgtggcagctgctccagccccagagttcccatcttgcttgtcctacacccatggggctgtggtcacagcatcgggtcagaagatgcgtgaggtggacacgggctgtgggacctcctggggaccttgctccatggaccagaggagggggtgcaggaagcaggggtggatttggcagtcagcacccagagcccttcaggctctggcagggtgggaacggtgtgagatggggccctggccacggtcccaccaccacgtgtgggaaaccaggtctcagcaggggaaggaggtacccagggaaccccatgcgcctggacggacaaggtttccatccctgcatctcagcaggccctagtaggcagcggggtcctggcatgagcagggccctctctcccctgcaggtggctcagtggcccaggccccgaggaacgtgctgaacttggggctgccgtggtgggcaggtgccacggccacacacacggtgctgtgggcagggctctgggcaggcctcacagtcagggtggcctgctccacctggacggggtgcccaaggcagtgtgcagactccaagggaggggctgctcctcccggcccaggccccaggccaagagcgcagcctgcaccgcatgtcccaccttgagccttgccctgaggggcttcggtgtcgtggaggaggctgtgtcaaatggctcatccaaggccctttagccaagaggctgagaccagcattgctccagaatggtatctgtcacagagaactgacggcatgtggtgtgcatgtgtgcgcgcctgcgggagcccattaaagccgcttgagaactgttcagcaccccagggcatcccagctggacagagctgtgcctttttcttcacatggaggctgttagggagcgcctcggggctctctggaagctttggctgaaggcgtctggtgctgcaattgccccatagggggatccctgcgggcatgtgatggtggccctggggctccccctgactctgcatctcaggtgcacccgcccttcccggctgggcccccctccctgccctcagcaccttgctcacccccatgaccgcaggcacctgtgctccagccacactgcacctggcacaggcaggctgaccatgcctcccgcagtccccagccctgcccgcaggcccaggagagtcaggcctgacactatccctgccctttagcactgcagctgcaccagcagaaggagcggttccccacgcagcaccagcgcctgagcctgggctgcccggtgctggacgcgctgctccgcggtggcctgcccctggacggcatcactgagctggccggacgcagctcggcagggaagacccagctggcgctgcagctctgcctggctgtgcagttcccgcggcagcacggaggcctggaggctggtgagtggccaccccttccgtggggtctgggcaggtgggcggcccctgctttgtgtgggacagctttccgttgaggtggggcagtggccgcctcttgcgctgttcctaccattgcgtctccctccttctcaccctgattgccctcgctccttccagaacagggagggggaagtgaggctgggctcagctgacagcaggaggggtgggagggtacgaaccccaccaccaggcagccggccctcagcagagctaggcccccaggggtcgctggctgagcacagcgatgccggcccacgttccgcacagctgccaagcccagagtccacagagccagcaacgcagggagggcagcacagcctttccccgggtgccccgccgccaggccaggtatgctcctggcgcggccccgtgagcctgtacgctctgtctgtgaaacgagggttccctgcattggactaaagcgttcagagcatgcctgcctgggtctctcaggtgttaaaagttcacgtagttttaaactgtgagctgtgaggaggagagatgtttctcagtagctccttaacttttaaactaattccctggtgtcaacatgcgattcccacgttgtcttaaactccacgtgaacagagtggcagtattttttcatcggtggcacctccgagcacatctgctaggctcacttcccacacagggccggaccccaggccctggacccacaggcccagccagccacctcctcacgggcctgacctgccagcagcggtgtggctgggaacctcacctctgccaccctcaggtcagcgtcatccccaggacccagggtgtgctgtgcctgcctgagcttcagtgctgggtggagggtgaggggtctcctgagcctccgtgtcgggtggagggtgaggggtctcctgagagcccagctggggtctgctcacgccacaggcatttttgtccctgcagcccaggggagggcaccctcttgtcaggtgcctgagtccctgcggctggtcttggggatgagcctggagacagccagaagccgggaggacaggagttggccttgaaaatgggagtctcccgcttaccgcacggaagagctgctgtgaggtggaggcgggactcgagcgtgctcaggaacgggacgggagccgccctcattctccagcgtcctccgtgccaggcttcgtgcaaatctgatttgtgcaatgactccccctcagcttccaccccgttggccttttcagtgaagcccacactccccgatacccagggacacagaagccttaggacaccctccctgaatcccccagctgtgcccagcccagtgactgctgcgggatgacagcacagtccagccttgcgggccaggggaagggagggggccccacggccaccgtgaccacatgcaaggttaggggtcagatgtgctttcctggggaaatgacttcctttcctggatccaatctaaaggcccgaattttgaaaagaaagcggcaggcgggctctgaagtgattccgactcccgtgcttaagccgcgtgaggctctcccaggcctgctggggccccgcccaccgctgggctgtccacagccaccctcctgccagcttcacgatgtccccatgactgtgcagcccctacataacgtcaccccaacaaaaacacgctgcttgaccggttccacctgcttccgagccttccagcccagcctctctccagccaacaggacggaggaagcccagggccccgaccttcctgtggctcctgactaggggcacagtcactgctggggacactggtggggaagggaaccagccacaaaagggatgtggcctcccaaggcagtatttatacgttcctggcctcaagcgggccagatgcttctcagaagcttagttctgacacagaatggggcggggggttcctgacccatttttgcaactcttctttacgtttgaaattctgtcaaagcaaaatcagctcagaattaaaggttacgcggacactcacaaacaggctgcatgacacggcgtgggggcactggctctcccacaactgcatgtgccactgcaggaacaggacgacgccccgtgggccacggggtcctggctgggcagccttcctggcatagtcagtgcttagagagctcgccggccttgtctttttgtttttgttttgcaggaaactggagttttattattactcaaatcagtccccctaagccttcctgttttttaaattgagatgtaatttacatgccataaaattccctctaaaagtgtacagttcggcctgataggcgcagtacctcatgcctgtaatcccagcactttgggaggccgaggctgaggcaggcggatcatgaagtcaggagttcgagagcagcctgaccaacatggtgaaacccagtctctactaaaaatacaaaaattagctgggcgtggtagcgcacgccttgtaatcccagctactcagaaggctgaggcaggagaatcacttgaacccgggaggcagaggttgcagtgagccgagatcgcaccactgcactccagcctgggcgacagagtgagtctcttgtctctcaaaaattaaaataaaataaataaattcagtggcttttaatagaagcacaaagttctgtgcccgtcaccactatccaattccagaacagttccctcaccccaaaaggaaaccctacccatgagcagtcagcccccacccccagcagcctgcctcccctttccctacctgtgactcttcctgtcctgggagctccatgcaagtgcagccggacagcacgtggtctcgtgacaggcttcctgcattggcattgtgttttcgaggttcatccgtgctggagcaggtgtcagaactgccttcccttttaagattcgatcatcccactgtaaggatgggccgcacttcattcgtccactcctcagttgatggcctttgggccgtctccccccgggctgtcatgaaacgtgctacggtggacgttctttctcttgggtatctacctaggagtggggctgctgagtcatgtgatttgtttaactttttaaggaagtaccgattgttttccgagctgcaccattttacattcctagcggcagtgcacaggggtcaggggtctgcctcctacacatcctcaccaacacgtgtcttttcaagctggctttttgaatttcaccatggagcccagattgcaggagctttgaagagaggaaacgcttgctcagtgggggccttgagggtggccatgtgtcggggctcaggggccatttccagaaggcgttgccctgatgctgccacttgctccctgccctgcagtggggaacggaggttcacagggggaaggaggggcagggtggagcaggagaggcctcccatctgtggccattccagcccagggcccaggacaggggaagtccttgcctgggtgtcagaagtggagacccagcccatattcctcctgaggggtcacctggccccggaggtggctgccagtgggagggtgagaaaaagcaccagcctcctccctccccaggcgaggggcaaagaacctgtgaggggcagagagttagaaatggcgggagacatctgcacttgatttgtgtggcagtcacaggcccgtctggagtcccctgggcacatcaggcactcttgcttcccaggagccgtctacatctgcacggaagacgccttcccgcacaagcgcctgcagcagctcatggcccagcagccgcggctgcgcactgacgttccaggagagctgcttcagaagctccgatttggcagccagatcttcatcgagcacgtggccgatgtggtgagtgtgggagaagccccatgacacccccaaggcaagctattcaggaccattggggcaggtgtagccaccacggcaatggggtctcacagcagggcagggagagttggggctcagctctgaacacagcatgggtcatgggggtttacgcccgaggagcaggtggggtcagaggatggagagtgactgagaggaactggcaggggagggaattctggctaaagcatcctgccaggacccttgctgaaggtgtgccttggggatcagacggcctctggggactgtggaggatggaccagtcagctactgagggcgactggatacggagagcaggggtcctgctacaatctcagcagggattgccaaaactggatttcatgaggacgtgcacagatgggcctaggaggaggctcaggagcctgacggcagtttggccaaacagaatcctggccaggagtggctgtgggccaggcaggcagggcggcaggctgcgacacccagttacatctgaatctcaggcagctttgaagcgtgttctagaatgaggatgcccatattcagatcaactttcttcatgatctgaaactcagatgtaactgggcgcctgtacaccatctgtcaaccttgcccatgaagacggagtggggaagagaagccccaggcgggtggcaaggacctcctctgggctgtgggcccctgaccagctgccccaggagaccaccgccctgagaaggatgcgacctgctctccaggctgctgccctggtgagatagctgtgttggtttccccttgcccctgaggggaagacggccctcactaggggcacaggggctccacctggccaaggcctgctgggcacccagctcagacaggtgacctcagatccttgaccactgcctggctgctggcttccctgcagacactggctgggcttggaggagggacctatggcagggccttgcagagagcaggggccactcaccgggggccagtggagtccgtcctgtagccaagaagcaggcaagagaggctgggacccatccctgcagctggggcagcagtgctgtgagctgtcagtgcttagtttatagacatcatcctgggagggagaagtgatgaagtagaaaagacgcagaagaaaagatgggacgtttgggagtaaacccctgaccaaaggcaagtaaggaaattccaccctgtgcagggggagcggctgccatgtccagcccaccctagacatggctgtggcctggcagagcagctcctgggtgggccttcccccacttctcttttttttttttaagacagtctcgctctgtcgcccaggctggagtacagtggtgcaatctcagctcactgcaagctccacctcccgggttcacgccattctcttgccttagcctccagagtaggtgggactacaggcgcccaccaacacgcccagctaattctttgtatctttaatagagacggggtttcaccatgttagccaggatggtctcgatctcctgacctggtgatccgcccacctcggcctcccaaagtgctgggattacaggcgtgagccaccgcgcccgccagccttcccccacttctaagaggtcttataaaaactttcaagtaaagcataaggcatataaacttttaatttaaaaaaatgtacaataaaatacgttatcgcacacaacgtgaggaagttacacatgggaagggagccgtgggcccagctcatgccccaggtctcctgggagagaccacgccgcaccagggcaccagcttaggcccagccccagccccaaggtcacgccagccgtgtggttattagtatcatgtcctatgcacacagacgcaggagaaatgagtgagcgctgcggctcccggccaggggccctccctgccgccctggctgtcccgggccagctccgggccacactcggcagtcccatcctggagcggggccaggtcggggtcactgcaagagaagatagaaggtcagggctgggccgccaaaacctgacagtgttactaagttctgttctggaaacagctctctggggaacccccaccccaagtctgcctagagaagagggtgttgctggttgtgagcctccctggggccgaggggtcatgggggactggtgcgtctttggtctctgctccctggagcaccaaaggcctgcgtctggcacgggggaagccaggggtgtggacacagagccttctcttgcataagcagagcctggtgccattcccacccccccactctgtggcccttgggcttgcatgaggatggggaccctgagccaagcccctcttggaggcccagcctggcagctagcagcagtcaccacttgcccatccccagctccccccagtccctgcatgtgcaaagtccctccctggcccagctgcctgcttcctggggctgcaggccgtgggactcacgttagcggtggcgtcttccaggccactgctgctgctgtcgttttccacaaaaagaggctcggccagagacgccctggagatgaagcacagacgagtttcactcagggcgtgcaggcggccctcaggcgtcttcagagctccgggcgtgacaccagcgtgtggctgcagaccttggacttgagggacagcctaggggccccttagcagcctccatctggccagagctgctggcaaggcccgtggggcctgaactacactgcttggtgccaggagcagctgtgtcaccctcccccatcaccatggctcaccaagctgtgcggtcagaggccaggccagccatgccaatggctctggcacccacaggccacggcagcacccagagggaggccgaggacacctgccttcactgggggggtcctcccctggaagctctcctgggagctggtgggcacagggctgtttccaccccttggccaggccaggccagctcagagcacagggctaaggcctggatgcacgggaggcactggccttgagggtgtctcaacctacagccccatcctgacccccaggtggtctcccagagtgccccacgccttggcagaggcaggccaggcctgactcgcctgagtaacgcctgaagggcatcaggcccctgccttgctgagcgtctgaagaggtcatggccaccacgggctggctttggtggcactgtggccaggtttgggtggtctgagtacctggtgcggggccactgaaggagggggctggttgctgctgacctgtgagggggagagggtgaaaccatggcagaaggagagcagacccccgcaaggactcaggagcctgcgcaaaggacacctctacagaggacggtgttggcacagccaaggggtgactgcctgggggggccagaggaaggacatggggccaagggaaccagttgtgtgagcctgaagcttctatagttggggcctctttgagaaaaatacagaattgggctcagagtatggggactacagagtatgggcactgtgagccccaggtgggtaggaaggttttcagacggtcgagtgacagtccaaacggggtctggtcacctggggcggggacttgctgaccagcatagacaatgacagctgtccccacaggacaccttgttggagtgtgtgaataagaaggtccccgtactgctgtctcggggcatggctcgcctggtggtcatcgactcggtggcagccccattccgctgtgaatttgacagccaggcctccgcccccagggccaggcatctgcagtccctgggggccacgctgcgtgagctgagcagtgccttccagagccctgtgctgtgcatcaaccaggtgagcaccaaggcagggttgcacccctgagctcgtatttttagccaggatgcggaagcagagccggtctggaggtggggcgggtggcagtgaggtggcctccggctcctgcgggtagcagcctgtgcctaaccatcgagaagaccctcagccgttgcagctgacctggactgtgctcttccaggtgacagaggccatggaggagcagggcgcagcacacgggccgctggggtgagtgcagccatgtggtgtgtgcacctctgtgcaggtgccaggggcacagctgggccgaagtgggcggggccaccaagcctgagcgccagcttgcctgcttcctgtttctcaggttctgggacgaacgtgtttccccagcccttggcataacctgggctaaccagctcctggtgagactgctggctgaccggctccgcgaggaagaggctgccctcggctgcccagcccggaccctgcgggtgctctctgccccccacctgcccccctcctcctgttcctacacgatcagtgccgaaggggtgcgagggacacctgggacccagtcccactgacacggtggcggctgcacaacagccctgcctgagaagccccgacacacggggctcgggcctttaaaacgcgtctgcctgggccgtggcacagctgggagcctggttcagacacagctcttccagggcagcggctccactttctcatccgaagatggtggccacagactgacccccatctgagctggggggatgttctgcctctccctgggtctggggacaggcccgcttgctgggtacctggtccccactgctgagctggcccttggggagaggtgattctcagggctggagcctggggtgtcctacagtgactccctgggagccgcctgcttcttctctccacatggaagcccaactggggttgcgtctgaggcctgccccctgggctggggcctcagaccccctcagccttgggaccgtgcccacgagggtctcccctcctgcacacagggcagtccttactcccccaccactcaggccacagtggggctgcaggcaggcggctcctcctcacccacctctgggtccttggctcccgggggccccacctcggcacacactgtgccccacaaaacttcagtgtggtacaaggtggagaaagcatatcccaccaacctccagtgtcagggtccaggagagcctgggggtggggggactgccttgtctctagtagtgtggcctgtgccagcaccacagccggtcagaggagcgcaggcagcgcagggctggcacgtgacaggctcgtcagccacctgggaacacagttctgggcaaagaggatccgaggttgagaggaaggagggtcccggtgtatcctggccctgggggtctgggcgtccagctcagccctggcctggctgggtggtattctggtagggatatggcaggactcctggcagggccacctgcaggaccctgtcctgcagtcccacactgtgcagacccagtcccacactgtggccaggccttacatctggctggaaagcagagcctcctgggaacacatctggctgcacaggctgaaatatccacccagcaggcagagtggcgtggcctccccatgggcacagtggtgacccccttgattcccaccgtacaaccccctccaccccccactcagtgcctccacatgctgcctggcacagaccaggcctttgacaaataaatgttcaatggatgc

SEQ ID NO: 594 - DNA, 1521 bp, Homo sapiens
  source 1..1521: mol_type = other DNA
gtataaggtccacaccccgggagctgagtgattgcagaaactggccttccatctctctcagacaccaagctgcagatccaggtaagcagcccaagaggtgttctcaggtgccgcttctgcttcagggttgcagaagagggagctagggccagtccacagcactgagaaagattgggtgatgctagcgctgaaaaaatgtggcccaggcaaacatcagctgggggcagaggggtcagggtggaacgtgcaggctgcagagcatccatgggactggagaagaaggagcctccaaattgggggaggccagcgtttctctctggaatacaatggaatcttttatgatgccagtgtcaggcactggcctgagttcccttatgctccaagacaacaaggctctgtcacccatggccctggatgtcggggatacaatttggttcatgatttattcaaactgatgtttcgatgagccatttgagcactgggtacaaatgtattttggatcaaagaaactccagtattcaaagataggaactgacaggattttaggtcactttgtaggtcaccacctagaggggaggaagacctcgctttggagagtgggaataaaacgctcgtggaaaagggtacacgtgagtgtctcattacacgaaaaacctcaggaagtaggatggacgtctttctggctgacctgaaacagaaagtgtaaaccaggcaagccataggtgggagctggagttctttttctaagagggctcttttccttctctctccttttctcaattaggcttttctgggaaagtgaggccaccatggctctggagaagtctcttgtccggctccttctgcttgtcctgatactgctggtgctgggctgggtccagccttccctgggcaaggaatcccgggccaagaaattccagcggcagcatatggactcagacagttcccccagcagcagctccacctactgtaaccaaatgatgaggcgccggaatatgacacaggggcggtgcaaaccagtgaacacctttgtgcacgagcccctggtagatgtccagaatgtctgtttccaggaaaaggtcacctgcaagaacgggcagggcaactgctacaagagcaactccagcatgcacatcacagactgccgcctgacaaacggctccaggtaccccaactgtgcataccggaccagcccgaaggagagacacatcattgtggcctgtgaagggagcccatatgtgccagtccactttgatgcttctgtggaggactctacctaaggtcagagcagcgagataccccacctccctcaacctcatcctctccacagctgcctcttccctcttccttccctgctgtgaaagaagtaactacagttagggctcctattcaacacacacatgcttccctttcctgagtcccatccctgcgtgattttgggggtgaagagtgggttgtgaggtgggccccatgttaacccctccactctttctttcaataaaacgcagttgcaaacacctg

SEQ ID NO: 595 - DNA, 30401 bp, Homo sapiens
  source 1..30401: mol_type = other DNA
agaaggtgccgcggcggcgccggaggtaggaggagccgggctgtggggctgggagtcggcacccgggaggcggaggtcctgtcatttcgggccgttctctctttcctaagggagaagagcctttctcgcccgtctccctcgctggctccgtggcctcggcaggcccgcagccccgacggagaggcaggagccgcactcgggtggagaggggccggggcccgcctggagggaggagggtggcggatccggatccccacggtggtctccgtccgggccagtccggggatcggggttctccgtctgactttagagccgttagagtctttggcagcccttttcccagacggggaacccctcagcccctttccgtaggtcgccgggttgggggaagcgggagggtccgccccttaccgatccattcattcatccctcgcctgctgtgagccgtgggctgcggtaggtacgaagcaaggaggcacaagtccccttccctctggaaacctgcaggcttgcaggatccgttatgtcattcagtaaatcttgactgggcacctataggaggagatagactgttgtgaggttcatatcaacagagatgcggagatcaacacagttgtggaggtggaatttgttccagccgctccccgcatccaacaggataaaattcactttgcctagcctgaccttccaggcccttgtgagccaatcctttcctctccccgcagcgttttctcctacacctttctctctactcccattataccgaactctttgcaattcatgaattcaacaagtagttgtggagcacttatttcaagtcaggcaccagatcagccaaagaggttgcaaagtaatagatggatctctaccctcctgaagtgttgagcttaatgggggacagataataagccgatgaataaaaacacaagagcggatagtttcgaaccacacttcctgggtttgatcccagccctgccactgtgaaagctgttcctgaactggctttaggccagttcctcattctgcttgcgcgtgtttccttgccgtaaagacaggatgacaagagattccaccatataggcttcttgtaaggattaaacgagtttgacttggaaagcaattggaacagtgcttggcacacagtaagcattcgatagatattacctgtttcatatgatgataacctatgacagatgccattgtgaaaacagtgggcgatgatagggattaacggggatggagacggtccataaaggattagaggacacttctctaaggggaagacacagaagagaatgcgccagccatacaaagtagattctaggtaggagtattttcagctctggaaaacaaaatgattaattagattccttggacagtggagattgcattattgtatttgaaaggaataactttctgccattgggtcattcagttttgatttttgaaccccacttagctgtgtgccaaagtaaacaaccatgctcacgaggcccagcctttgcacacaggcgacattccagtcatccaggtttggagagccttgctgggttgagaagataagtaaaagtgaccttttctctcctgagtgttcatgagaatataatgtctctttctgtctcttatgttgcagtatttacagaaagagcctctttaacagccaggggtcttagatcagtgtaggagatagttttcctagatttggggatcatcctgtttctgtggtgactgccttttatggggtttgctccctaaatttcagttaagaaaacactctcccaagatgcacatattttaatacctgtggaagaacaacatgctttgacaggtttctaggtccttttgttgtgatgtctgataggacggttagaccatgttaaccaggctggactgagtatttgacagtattgttactccgaagacttttccctcaccccacatgcccttgtccctccctggaagaactggcataaaatgacaatgtctgattacacttacatgcttttggttttccacagatgtgtaattaagtgaaccatatatgtttcatcatcatggagatcttggagaattatctgagcaccaggttcatatgtattcgatctcagaggcatctattggacaacaaaacactctttcagttgtgaactttatttatttattattattattttttgagacagagttttgctcttgttgcccaggttagagtgcagtggcacgatctcggctcactgcaatctccgcctcccaggttcaagcgattctcttgcctctgcctcccgagtagctgggattacaggcatctgctaccacgcctggccaattttttgtattttcagttgaaacgaggtttcaccatattggccaggctggtctcgaacttctgacctcaggtgatccaccccccgcctcgtcctccaaaagagctgggattacaagtgtgagccaccgcgcccggcccagttgtggactttaacagagggaagctttaaacatgtttaaccacaggcccaatttgaacaaagatacttcaatcattatagagaggaaaacagtactttttgttcaattgtgcaaactctccaagtatctaatggagaagtagagaagaaccctaatgaaactgagtgtgaatgaggctcagctaggcttctacttgggttcactttctcatctgtctgcctgtcctgggattgaccctcgctcctctgaagaccagcctgaaagccttaaaactggtcagatgatggatgagtctgatgaggactttaaagaactctgcgctagctttttccaaagggtgaaaaaacatggaatcaaggaagtgtcaggagaaaggaagacacaaaaggctgcctcaaacggcactcagataagaagcaaattgaaaaggaccaaacaaactgctaccaagaccaaaacccttcaaggccctgcagagaagaaacctccgtctggcagccaggcccctaggactaaaaagcaaagggtaaccaaatggcaagcaagtgaaccggcccactctgtgaatggggaggggggtgtgcttgcctctgctccagatccacctgtgctccgggaaacagcacaaaacacccagacgggtaaccagcaagaaccatcgccaaacctttccagagagaaaaccagaggtaatttgtactcttttaaaccaggggctggaaaacttcctggaaagggccagatcgtaaatattttggctttgtaggccacacagactctgtcacaactactcaactctgctgtcatagtgagaaagcaggcgtggacaatatgtaaatgaacaggcatggccatatgccagtaaaactttatttacaaaaacaggcagccagccacatgaccgtagtttgctaacttttggtttgtttttattttttaatttttaagcttaaaaaaaaatttagagctggaggtctcactatgttgcccaggctggtcttgaactcctggactcaagcaatcctcgtgcctcagcctctcagagtgctgggattacaggcgtaagccactgcgcccggctgactcctggtttaaacaacagtcaagaaaaacataacccgtgtgaatttttcacatgattgtgtttggagtcctctgctctttcagaatttcctatgaaattctgttatatgattgacatgagttacacaaacaacacaataatgctgcttctcttgttttcttgaatttattccaaagtgggtaagttggactgggccagccaatttggataggctgctgagagggccgcatgaggactctgtgtgggctcaagtcccaggagaatcttcaggttctttctttctctctctgaagaccttttaatcttttcctttgttattgttattgatttatttacttacttagtttttagagacaggatcttggtctctcacccaggctggagtgcagtggtgctatcatagcttactgcagccttgacctcccaggttcaagcagtcctccctgcctcagcctcccgagtagctgggaccacaggcacccaccaccgtgcctggataattttttaactgtttaaagcagttttcttgccctgctgcccttggtatactgagctatatgcttactacacattcttcatgcaaaactgaaaactacccttgcatatataatacaccatgggctctctgagctcctgagttctgtttctaaatttcctttgccctcacttcctgatcttaataacctctcagtagagtggtggtagagtctcaggtcgcatagactactggaaggcatcagcagtgttgcctcaccaactttactggtctctcgtgctctttgccagtcggatgaaatctatgcatggttcccccaaaacacgtatccatgcgcgtatctgcaaaactggcacacaacttcatggggttcatggatccccactgaagatcatccgtggatcccaagttaaagaagaactgatctaggacataaacctttgtcattaatatttctttaataatagctttattggggtataattgatattccataaaattcaccatttaaaagggtatggttcagtggtttttagtatattcacagacttgtccaaccaccaccactacctaacgttagaacagttttatcatcctaaaaataaaccccatgctcattagcagtcacatcccattcccctcctgttattgatatttatgtctatattgccataaacaaagaggttaccaacaagcaaccagtcctcttcacatttgtgagtcaaacctaaactagttgataaaggactcttgaaacttgcgtctaacctgtatctggtagaaaagtcttttatttctccagctacaacagatggttgtgaatattttcctccttgccagagaatgtgcccaacagcgactcccagcctcctccttcctgtttgacaacagcagtgccaagtccctccaaaccccgcacagcacaattggtcctacagcgaatgcagcagttcaagagagcagaccccgagcgtttgagacacgcttcagaagagtgctccctcgaggctgcgcgggaagaaaatgtcccaaaggatcctcaagaggagatgatggcggggaatggtatgatgagtgtgtttctgtcttccacacagagataagttaatacaactctgaggaagggaggcgggaaggaatcagcatttgttgagtttcttctgtggataggctctctgcttgatgttttacctttgccacttcactggatccagccagagaatgaagagtctctgggatcatttcccacctagcttccttgataaggtaccgttttgtttttttttctgagacagagccttgctctgtcacccaggctggagtgcagtgacatgatctcagctcactgcaacctccgcctcccaggttcaagcaattatcttgccccagccagtgggattacagacgtgtgccaccacacctggccaatttttgtatttttagtagagacagggtttcgccaagttggccaggctggtctcgaactcctgacctcaagtgatctgcctacctcagctccccaaagtgctgggattacaggcgtgaaccattgcacctggccctcttccttttttttttttttttttttttttgagatggagtctcgctccgtcacccaggctggagtgcagtggcacgatattagctcactgcaagctccacctcccaggttcacgccattctcctgcctcagcctcccgagtagctgggactacaggctcccaccaccacgcctggctaattttttgtatttttagtagagacaaggtttcaccttgttagccaggatggtctcgatctcctgacctcgtgatccacccgccttggcctcccaaagtgctgggattacaggcgtgagccactgtgcctggcctcctttttttaaaaattatgactttttattatgaaagctttccctttcagttttttccttttaaaaagataaccctcagtattcacaaagaactcttcctttcagaaaaggtttttttgttgttgttgttttaattacaatgaagccaggcatgatggctcatgcctataatcccaaaactttgggaggccaaggcaggaggactacttgaggtcacaagttcgagaccagcctggacaacatagtgagacccccatctctacaaaaaaattttaggggccaggcgtggtggctcacgcctgtaatgccagcactttgggaggccgaggtgcgcagatcacaaggtcaggagattgagaccatcctggctaacacagtgaaaccccatctctatgaaaaatacaaaaaattagcaaggtatggtggtgggtgcctgtagtcccagctactcgggaggctgaggcaggagaatggcgtgaacctgggagacagagcttgcagtgagccgagattgcaccactgcactccagcctgggcaacagagcaagactctgactcaaaaaaaaatttttttttaattagctgggcatgatggtgcacaactgtagtcccagctactcgggaggctgaggtgggaggattgcttgagcccaggacgttgagctgcagtgagctgtgattgcatcattgcactccagggcaacagagtgagaccctgtctcaaaaaaaaaaaaaaaaaaattacaatgaatcccctaatcccctatacctcaatctagatttaacaaatgttaacatttggccatttgtttatgtctttataaatatacatttttttttttttttgagatggagtcttggtctgtctcccaggttggggtgcagtggcgcaatctcggctcactgcaaactccacctcctgggttcaagccattctcctgcctcagcttccaggaagctgggactacaggcatgcaccaccacgtccagctaatttttgtatttttagtagagttggggtttcaccatgccggccaggctgttctggaactcctgaccttgtgatctgtccacctcagtctcccaaagtgctgggattacagacgtgagccaccgtgcctagccaagcgtacatatttttcttccatattatctgaaggtaaattatagacattaggatcctttacccctagattctgctgcataaccacaataccattagcacgcttaattccataatagtgcctggcgtccagttcaaactcaaatttccctggttgtctcaaggttattttttgtagctggtttcttttttttctgaacaaggattcagtaagttcacacactgcatattgctgtagctcagcagtatcctaaggtctagattctagaatagtcccccatttccttttgttttccatgacactgactttttttttttttttttttgacagaggcttggctagagtgcagtggcacaatctcggttcactgcaacctctgcctcccaggttcaagctattctcgtgcctcggcctcctgagtagctgggattacaagcacccaccaccacacccggctaatttttttgtatttttactagaaatggggtttcaccatgttgcccaggctggtcttgaactcctgagctcaggggatctgccctcctcagcctcccaaagtgctaggattacaggtgtgaaccaccacacccagccctatgacactgagtttttgaagaggctaggctaattgtattataagatttcccactttctggatttatttctttatgggatcgttaactccttcctctaaccattgggttgccccactctgagtagattagaggctcattggctgcaggtgagacagggtggcgacagtgccccatagctgctgtgtacttggtgtggcaccggcccaataagcgtaataatgccaggtgctcctgttctccatccccaaaacaatatggattctcatctctgatgaaaatatacaaaaggaaaagaaataggaagaaaccattatcggcagacctacagctaataagtatgcaggatcttggcattgcattgcagatttcactgcagtagcacggaggagtctcaggccaccccagggtccacagcaggcagtgatttgatgtcctgccgaggcatcagtcctggacgcacatgtgagttgcagaggaggcacccagctggtgtgagctccgcccctgcccagcatttgactcagttctctctgtatcttcacatcacacccagcaagtgctcagaaagagataaaccatttgtttgttaagaaaccaaaccaggctggacgcggtggctcacgcctgtaatcccagcactttggggaggccaaggcgggcagatcacctgaggtcaggaattcaggaccaccctggccaacatggtgaagccctgtctctactaaaaattagccaggtgtggtgggcacctgtaatcccagctactcaggaggctgaggcaggagaatcgcttggacccgggaggcagaggttgcagtgagctgagatcgcgtcgttgcactccagcctggcgacagagtgtgagactccatctcaaaaacaaacaaacaaacaaaacagggcaccaaaatgaaggtgtgctgttttgctggcctcagtggcaggcactggtaggccacagccatgaagaacttggggatttatgaggcgttcagggcatatcccttgtgagtgacaggggtctgctccagcaatatcagatgggccaccctgggagccatctcaagaccagaatcagtccattcttgagtctgatgctaagtaagagatgctgccttttaaacgccaaaggcatttcactctgccctggttttatcatgggcagtaaaaggtcagcaggaaagggtgagttttgaagagaacatctagctttgttggaatatgagccttgtgaacttgcaatgcccgaggtagccaacttcagcagaagtgggaaagtttaggtccttgctactcagagtggtcctgtgctgccagcatcgccaagcctggaggctgctagaaatgcggagagtctcaggctgcacctggaccccttgaatttgaatctgagtgtcgacaagcttcccaggtaatgcatatccatgttaaagttggagacggctgttcccggagtgctgattagtgcccagtctcactggacagtgtccaagtcaccagcctgcagagtggagctgggttctggtttctttgcgttccacctgctccccatggtctgcaggagctgacagagcagaggtctgagggtgagcttgtctttggagtttattctcacggatctttggtgcttctccacagtgtatgggcttgggccccctgccccagagagcgacgctgcggtggccttgaccctgcagcaggagtttgcacgggtaggagcatcggcacatgatgatagcctggaggaaaagggtttgttcttctgccagatttgtcaaaagaacctctcagccatgaacgtgacccgaagggaacagcatgtgaacaggtgggggcagcttgggccgtcgcctctcccgtgtatgtgaccagaatccccaagcaccccagggctggagtgcggatctccacaccttaccatgacaacagcacctcagctttgttgtcaacctacccctttttaaaaataacttcgttgagatacaattcacagaacatatagttcacccatttaaactgaacaaatcactacttttgggatattcacacagttgggcaactgtcaccacaatcacttctggattattttcatcacccccaaaagaatccccacacccattggcagccactccctattgcccctctctcccctgacaaccactaatcaacattctgtctggatggatttgccgattctgaaattgcacagttgtccttttgtgtctgccttctttgacttaatatgttgtttttgaggttcatccatgttgtagcatggagcaggcttcattcctttttatggctgagcagtatctcattgtatggctagactgtgtttttcccattcttagatgaggaatatgaccatggtttatcctttcgtccattggcggacatttggagcatttctaccctttgggattgtggatagagctgccgtgaacatgggtttcatgtatttgtttgggtacctgctttcagttctttggggtctctacttaggagtggaatttctaagtcatcatgtaactgcatttaatctttccttgctttctttagccaactttgctgacagatacctaagtgtagtgtctaggggctgactgccgggagacggagccaggctgtgtagaggggattggctttggggaacttgctttgaccacagcacgtctgtgttgacctggacccacatttgctccaatccacattcctggggagggtggttctcctgtattgactgttttccttcaggtgcttggatgaagctgaaaagacactaagaccttctgtgcctcagatccctgagtgcccgatttgtgggaaaccgtttcttaccttaaagagcagaaccagtcacttgaagcagtgtgctgtgaagatggaggttggcccccagctcctgcttcaggctgtgcggctgcagacagcacagcctgagggtagcagcagcccacccatgttcaggtaagtcgacgaaaaggaagaaaaccaagccaaataatgctgtgtgcactcagggctttttctatttaaaaaagctttttatgggctggacgcagtagttcacacctgtaatcgcagcactttgggaggccaaggtgggcagatcaccttagatcaggagttcgataccagcctggccgacatggtacaatctcgtctctactaaaaatacaaaaattagcatggtggcacatgcctgtagtcccagctacttgggaggctgaggcaggagaatcacttgaacccagaaggtagaggttgcagtgagccaagatcgtaccactgcactccagcctggacagagtgagatcctgtctccaaaaaaaaaaaaaaaaaaaaaaaaaaaaagctttttatagtgttggagggaaaaagagccctctttgattctggaaatgaaacacttagggcggaaatcgggcacagtctagaagggagtgaggaggggacagaatctgcattctggaaggctctggacctgcccctttaggggggtgcagaaatgatcttcgcactgttttcctcaaggtccttcctgagtttccaatcccatgatcccacagtcggtaccctctagtgcaggggtccccaaccccccagcctcggaccagtaccggtctgtggcctgttaggaacctggccacacagcaggaggtgagcagcgggcaggcaagctttactgcctgagctccgcctcctgtcagatcagtggtggcattagactcacaggaacacaaaccctgttgtgagccgcacatgcatggaatctaggttgagctctccttatgaaaatctaaagcctgatgatctgaggtggaatgctttgatgctgaaaccattcccctactcctgtcccatggaaaaattgtcttccatgaaaccagttcctggtaccaaaaaggttggggactactgctttaccacatctaagaatttggtagtcactttactccatccatttcgttgttggacagcatggtttccacctcagcacagtccagttttcacactgttaacataagattactcagcacagttcacagatttggtgattggccaggcacggtagcttacacctgtaatctcaatactttgggaggccagggcggaaggatcacttgagcccaggagttcaaggccagcctggactacatagcaagacccatcactacaaaaaattaaaaaattagctggctgtggtgctgcacacctgtagtcccagctacgtgggaggctgaggcggaaggatcacttgagcctgggaggccaaggttgcaatgagctgtgattgcaccactgcactccagcctgggcgacagggcaagaacctgtcttcataaaacaaacaaaaacaacaacaaagttggtgcaacagaagtgtaggaccctattttttaaaaatcttgcatgaattaatgcttaaaagttaaaatgagttgccttgctcacagccaggaaacaagtcctcagcatgcaaaccacagccacacaagtgccagagggctggccctgctccacgctgccctgctgctgaggacgctagagctgacaccaggttcatagtgaacaaaggcatcttggacctttgactcctccaggtttgagaccgctgtcaggagcaaagggaaggccaaaggcgatagctgtttgtcccgccccctgctttgcacacaggtcatgggcagctgagctggctcggggctgagatggcagagggcagaggggattctcttggtggaggagcgcatctgtatttagcatggcaggggtgcaagccttgaggccttagaatagacgtcatctaagccattgtttctttcttggcaggaccacgccaaaagcacctgctcagataaagtatgtctgcctttagaatacctccaagtactgaaactagatgtatgtggatccgtttagaaggttgtcagagtagaaaactacaggagctggatgccctcatggggtctttgaacccctccctccccaaaggccaagcctgtggtcatcagaacgcatgccccggccagagtgcctcatattctttccccacagcccaaacctggcctgctggggagtgaggagggaacacagtctgtgttcccttcacagaagcagggtcccaggctgcccaggcagctcctttccctctgggaggctgtgattatccacgttcctgggaaggtgaacttgagccatccctggcaccctggagagcatgagcttttgcaaaagccagaggcatgactgcattgcagggaaggtgggcccggtttgtgctaagttcctttgtcacctctgccctcctccttcttgcccagcttattgggagtcacccaggcagcctaggttctctccagccggaaactcctgttcatttcctccaaaccaaacgagctgctgcccgttgaaagtgcagagtcccggggcggctggtataatgttgaccatcggcagcctaagctgggaagcccttccttctggccatggacagaggcactgccgtggagcccttgcaggagggaagggatccttttctgccggtgtggccaggaccgtgtaaggagcatcggaagtattgatgggtgaaggtggtgggagtccagggagcctgctcagagccatcgattgttgactccattggatgggcttggccacatgaggatgtgcaggtaccacagatggctccgtacatctgccatgagcctgctggacagcagcacgtgaaggaacccagaccctcctgtgcctgggccatgttgaacttctggcctggaattgaatgagttcacacaaggcagtggaagtgggggacgcatctgcctggcaggtccacatccgtcacttttctctcaggcccagccctctccagaccagtgtgaccaacctgagaagcgtgcactcctctagccccagtaacttttctctttggctgttttctagcttcagtgatcacagtagaggtctgaaacggagaggacccaccagcaagaaggagccacggaagaggcggaaggtggacgaggcaccgtccgaggacctgctggtggccatggctctgtcccggtcggagatggagccgggtgcggctgtaccagcgctcaggctggaaagtgccttttctgagaggataagaccagaagcaggtttgtgtgatcagaagagtgaccctgggagaggccatcagcaggtcccgggtgagtggaccgactccaccgttgatggtgtcgcttttgtttctctctagagaataaaagtcgcaagaagaaacccccggtatcccccccattgttgttagtccaggactctgaaaccacaggccgacagatagaggaccgtgtggccctgctcctctctgaggaagtggaattgtctagcacgccaccacttcctgccagcaggattttaaaggaagggtgggaaagagcgggccagtgtcctcctccacctgaacgcaagcagagctttctgtgggagggcagcgcactgactggggcctgggccatggaggacttctacacggccaggctggtccctcctctcgtgccccagcggcctgcccaggtgagtccctcccctcaggcacatggataggcttttgggggaggttggcaatcccagaactgcaacactgggtacccacagccaggtgatggaaagtccaggaaggaaaggcagaggcgggaggaggccagaggggcacttggtggctgcagctttcttctctgtccagcaactacatggtactctgggtaggatcagggaggacccttggtgtccaccagagtgtgttcctggagtttgttgaaaatgcagagtcccggccgggcgcagtggctcacgcccgtaatccctgcactttgggaggctgaggtgggcggatcacgaggtcaggagttcgagaccagcctggctaatatggtgaaaccccatctctactaagaatacaaaaattagccaggcatggtggcacacacctgtaatcccagttacttgggagactgaggcagaagaatcgcttgaaccggggaggcggaagttgcagtgagccgagaccgtgccattacactccagcctgggcaacaaagtgagactctgtcttgaaaaaaaaaaaaaaaacagagtcccagggcaactggcaaaatgcctcagatggagcccggaaactggcattcggagcacacactccagacagtcgtgcggcaggtagccctacagtcagtacgcagctgcctgaggcagcttggaggacttcaggagggcggcaggcctgggcccccctggcctctgacaagcctttgtgcaaacagatgccacaggcctggccttggccgtgacagaggaggagcatgttgacatgagtgctggggaaaagcatcccaggactgctccaggctgtggctggagccccggggacagtctgtccccacagcccacatcctgctctgtagttttaggtccagccgtgcataccacatgtgatggcttctgcagtgtgtgcgtcaatgacagtgaccacgtggtcactctccttactggcttctttcagggccttatgcaggagcccgtgccgcctctggtgccacctgagcactcagagctgagcgagcgaaggtcacccgctctccacggcacccccactgcaggctgtggctccaggggcccgtcgccttcggccagccagagggagcaccaggccctgcaggacctcgtggacctggcgagggagggactgagcgccagcccgtggcccggcagtgggggcctggctggctcggaagggactgcaggtgagatgctgggtgggactctagggccagccctgccctcccgggcctcccctccccgcggctgaggctgccatggactggctcttgtgccgccgcgacggcagctctgacctggtgggagaacacgcagcctctgggcgctttcattttttctcaaaggtcaatgtggtgtagacaactctgtcatgattttccttccactttaaccaaagacagagctgtctgcccacagcgagtgaatcctctgggtgaactgtctgttttgctcttctcttacctccctggtggagtggtggtgagacagggtgtgcgggtttgctttgcatgaaggtgtcctcggatagcaagcaccttccgaggcaccgcaggggctggctcagcctgtggtcaacgctgtcttcttggtggtggatgtggctgggctgtgacgttcctttaacctgtgaatcctccactcagggttggacgtggtgcccggcggccttcctctgactgggtttgtggtgccatcgcaggacaagcacccggacaggggcggccgcaccttggtaagaactggctctggcccgcgctctctggtcccggccatcccacttgccatgtgtgtggtggggttggctcaccgctggcctctggcccccaacgcaagtgcagtggcctctcaaggcctctgctttccagaaggctgccacatcctgacatccgtgagcagagccacggacccacagccacctcagcgcccctctgggggctctgccacgagacttctgccttttctgtctgtgactccatggggcaccttggggttgaggccccagagcctgccctgtcctgggtcccaggagtgtagagggaccacagtttctcagcgcggttgccccatccaggcacgctctgctcgttcctcagtagttgggagctcaccaagggcttgctctccctcccctctgtgcgggtcctgggctccagagcacagctgagcagcctggcctggcctccctgtcagtgcgctgtctggggaagaaccggggtgggaactggcttttccctagagtggacctcctcccatttgcatgtcagtgtcaaccaagcacttcatgccaaggccagcctagggacatcatcacagactggacccggctgtcctcttggccaggtccccgagctgcttggactcagggtgcttgtccgtcacaggggatgggtgcacctcctcaaagcccaggtatcccgcagcctgtcccactcagtgcgggagctgccagcactgtgagttcacatctagccccatgtctggcatctccacgggggccagggaacccactggcaagagccagaggaacaagctagtgctttgctcttctgtgctactcagggccttagggtcactcagaggttgaggccatcgtgggaagcgttttggagaggaaaggagaatgcaggtcctggctcccggcccaccctagcgccacctccatgcggggagcttcccactgcccagttagcagagcagaggtggggaggtgacggctcttcctctcctcctgcttcagctctccctcgggctgctggttgctgactttggcgccatggtcaataacccacacctgagtgatgtccagtttcagacggacagcggggaggtgctttacgcccacaagttcgtgctttatgcccgatgcccgctcctcatccagtatgtaagtacgtgggctgccgtgtgccctcctttcctctctctccctctctcctcctgcctttctccaaccaggtcttcccatgtctcaggtgccctttccacccccccactctccctcacttcctgccccaccatgttctcaccttctccctcccaaccatccgtttctgcaacacgtggagaagagataaagacccacgcttgaggttaggagtgggtgtgaggggatggcctcacaactgggaaacatcagtgttttcgttctgttgaatgaaaatccattgtttggccgggcgcggtggctcacgcctgtaattccagcactttgggaggccgaggcgggcagatcacaaggtcaggagatcaagaccatcctaacacagtgaaaccagtctctactaaaaatacaaaaaaattagccgggcatggtggcgggcgcctgtagtcccagctactcgggaggctgaggcaggagaatggcatgaacctgggaggcggagcttccaatgagctgagattgcaccactgcactccagcctgggcgacagagcaagactctgtctcaaaaacaaaacaaaacaaaaagaaaatccattgtttcccagaattgttttctcttttctctatttgcataattacaaaggctcataattgatctcctcagggatgagttgctgatgaacctgccttctgacttgaaagcatttgacttgagtgtgggcaggaactcagggagctattctcagtctttgtcaaagttctggatcccatatgtgtctatcaggaggactcttaacggggtcctggaatatctagtcccaatacgatttgacaaaagaggagtgttaggcctcacctgtaaaattattggccaaaaatctgcataaacagtggctaatgcttttcctggggcatggagctgcttttaagactagggaccaggcacggcggctcatgcctgagatccccgtactttgggagactaaggtgggaggatcgcttgaggccaggagttcaagaccagcctgaacaacacagtgagagcccatctctacaaaaaaatttaaaaattagcctaggggctgggcgcagtggctcacgccagtaatcccagcactttgggaggccgaggagggtggatcacctgaggtcaggagttccaagaccagcctggccaacatagtgaaaccttatctctactgaaactataaaaaattagccgggcatggtggtgggcggctgcaatcccagctactcgggaggctgaggcaggagaatacgctggaaccgaggaggtggaggttgcagtgagccgagatctcaccactgcactccagcctgggcaacagagagagattccaactcaaaataataaaattaattaaaatttaaaattagcctaggagttcaaggctgcagtaagccatgatcacaccactgtactctagcctgggtgacaaggggagacactgtctctaaaaagaaaaataaaaagactagtgacttgcaggacaccccagaccgtctgctttgctccaagttacaactctctgatcagtaaaccctctgtgttgcatttcacctgcaggtgaacaatgaaggcttctccgctgtagaggacggggttctgacccagcgtgtcctgctgggtgacgtgagcaccgaggccgcccgcacgttcctgcactatctctacactgcggacactggccttcctcctggccttagctctgagctgagctccctggcccacaggtctggattgctccccagcttttgaaattaactgacgaggactggcaggttaacagctctggagggttgtgctgcagagggctcggggctgaggccaagagaactaacagtcctgtttataccttttaatcccaagtccatgaccagtgatgaccctgtggaacagggcatgttaggtgaaagtcaggccagaacagacccttgcaggggtgccaagcactggatcaggaggactctattgagtcccgtggtttttaaccccctaggtgtgataagagaatggcccttggctacagcgccccccaacactgctgctcagtgattgttccaccactagacctgaacaacagcagtcctttccagagtcccataaaacaggcatggagagaatgcttaggctgcatcccagatgccacagctctcctggcttgtccagccagcatcttaggagagaggcagcagctcagagggacaagtgttgtgcctctggacagggcctgggccgctgatccgagcctgcgtcctccctccgctgctttcttaggaaaggaacagctcagcctctggagttggaaatatactgacgggccacagagccttcaagcaggtggctggctggcttgcccgttggcctgggctgactcaaggacttggtgtgctgtggattgtgtctgatgccatgtcttttcatttattttttattttttggagagacggagtgtcgctgtgttgcccaggctgttcttgaactcctgacctcaagcaatcctcctgcctccgcctcccaaagtgctgggattatgggcatgagccaccatgcatgaccttttttatccttttagagacagagtctcttgctgttgcccaggctggatggcagtggcatgatcacagctcactgtagccttgaactcctaggctaatttttacatttttttgtagagatggagactttctatgttgtccaggctgatctcaaactcccggccttgagtgatcctcggcttcccaaagtgctggaatttcaggcatgagccacaatgcctggctctgacaccatatcttaagagcctctgaggcagcacagactccccagttttgtagctctgccaatccctgttaccttacattcagtccgacacacccctttatgtctgcagctatagttaggaagccctgctttaagtgttgtcagtccccggtttctggaactaagtggcctgggtgtttctggcaaggagtgtggacaccgtcttcaaagggaagcagggcctgggtcatggtcattcctcctggtgaagactctgctctggtccgccaccccaccggggcacccagagcccatctccacgcagaggggcgatgactgtcgatgtttcgtgttgcaggtttggcgtgagtgagctcgttcacctgtgcgaacaggtgcctattgccactgactcagagggcaaaccatgggaggagaaggaagcagagaattgcgaaagcagggccgagaatttccaggaactcttgaggtcaatgtgggcagatgaagaggaggaagcggagactttgttgaaatccaaggaccacgaagaagatcaagaaaacgtgaatgaagcagaaatggaagaaatttatgaatttgcagctactcagcgaaagcttctccaggaagaaagggcagcgggtgccggcgaggacgctgactggctggagggtggcagtccggtttctgggcaactcctagcaggtgtccaggtgcagaaacagtgggacaaggtggaggagatggagccgttggagccaggaagagatgaggccgccaccacctgggagaagatgggacagtgcgctctcccgccaccccagggccagcactcaggggcacggggagcagaggcccctgagcaggaggcgccagaggaggcgcttggccattccagctgctccagcccttccagggactgccaggcagagagaaaagaaggctctcttccgcactcagatgatgccggggattacgaacagctcttctcatcaactcagggagagatctcagagccgtcccaaataacaagtgagcccgaggaacaaagtggcgctgtcagggaaagggggctggaggtttctcatcgcctggctccctggcaggcatctccaccgcacccgtgccgcttcctattggggcctccccagggcgggagtccccgcgggtctcatcacacaagtgggtcgtccctgtcaacaccccggtcccgtggcggaacttcccaggtgggctccccaaccttgctgtctccagctgtgccatcaaagcagaaaagggacaggagcatcctcacgctgtctaaagagccagggcaccagaaaggcaaagagcgtcggtccgtgctggagtgcagaaataagggggtcctgatgttcccagaaaaatctccgtctattgacctaacccagtcaaatcctgaccattcgagctccagatctcagaaatcttcatccaaactgaacgaagaagatgaggtcatcctcttactggactcggatgaggagctggagctagaacaaaccaaaatgaagtccatttctagtgatcctctggaagaaaagaaagctctagaaattagccctaggtcctgtgagctgttttccatcattgatgttgatgcagatcaggaaccttcccagagcccaccaagaagcgaagctgtgctgcagcaggaggatgagggggcgctgccggagaatcggggctctttgggcaggagaggggctccctggctgttctgtgaccgtgagagcagccccagcgaggccagcaccacagacacctcgtggctggtgcccgccaccccgctggccagcagaagccgtgactgttcttcccagacccaaatcagcagcctcaggagcgggctggccgtgcaggcggtgactcagcacacgcccagggcctcagtaggaaacagggaagggaacgaagtcgcacagaagttttctgtcatcaggccccagacaccaccgccccagacaccgtcctcatgcctcactcccgtctctccaggaacttctgacggcagaaggcaaggccacagaagcccttcccgtccccaccccgggggccacccgcactcctctccgctggctccacatcccatctcaggggaccgcgcccacttcagcaggcggttcctgaaacactcgccgcctgggccaagcttcctgaaccagaccccagcgggtgaagtggtggaagtcggagacagtgacgatgagcaggaggtggcctcccatcaggccaacagaagccccccactggacagtgaccccccaattccaattgacgactgctgctggcacatggagcccctctcgccaattcccattgaccactggaacctggagcggaccggccccctgagcaccagcagccccagccgcaggatgaacgaggccgccgacagccgtgactgtcgctccccgggactcctggacaccacccccatccgaggaagctgcactacccagaggaaattgcaagagaagtcctcgggcgcgggctccctggggaatagcaggccgagctttctgaattcggctctgtgggacgtttgggacggggaagagcagaggcctccagagacccctcctccggcccagatgccaagcgctggtggagctcagaagcccgaagggttagagacacccagtgagtagccaggagagctggggaaggggactgtctttgttactattttacactaagagggtgggaagatcagtcatgagacccaggggctgccctctgaatgcctgctgacctgaggcatgacacttccgctgccttccagactcccctccacagtggaggagagccgggctggttctcatgctacacttctcagccagtaagtcagtgtttcccaaacttgcctggctccagtgctcacctgggcatgtgttaaaaatccacatctgtggacccttctccagaacacggagccggcacctccaaaggccacaactcattcagcaagtatcggcatgccttaagattggaccagggtggttctccagaatgttaaccgtagattgactgcaggacccagcaattccacttttacctgtatatccaaaagaattaaaaacagggactcagacatgcatgttcatagaagcgctgttcacaatcgccaaaagctggaagcaacccaaatgcccgtcaggagatgaacagggaaaccaaacgtggtccatctagaccactagaaaatggaatagtgttcagccacaaagaggagtgaggcactgccacacgctaccgcgtggacgacccagaaaacatgctgccgggtgagagaagccagacatagaaggtcatgtactgtctgcactcatggatatgaaatgtctagaataggcaaatccagagaaaatgcaggttagtggttggcctgggttggagggagggggaatggggagtgactgcttatgggatacagggtgtccttttggggtggtgaaaatgttttgcaaatagatagaggtgatggttgtacaacattgtgaatacttaatgccactgaattattccctttacgatttttttatgtgaatttcacctcaattaaaaaaagaatcaggtgggacaagtgtgagaggctgttaggcctgttcttcctggtcctcccaggtgcagggatgccacctccctgctcatttcagtccccggggagagtcagagccccaggtgtcggccccctcggtgctgctgctcccatccaggcacctccggggagggcaaggacaggccgggctgggctgagcatgactgggagaaaggccaggctgtgagtgagcacctgcctgcggcctgggggcccatttcctcccaaaatccagatgaatgaggccactgatagtgtcctcggccctcaggggcttcagaaacacctggagagcttcttatagcacgcccgtggcccagcctgccccagagccttgcttcgggagggtgactaagaatttgcatttctaaccagttcccaggcagtgctgtgagaacagctgcaggaggctgcacagcagatctgaggtgggcttcaggacgacgctgcggccacaggaagaatcgtgcttttctcaggagacagagcctgccgctttcatcgggggctcaaagggctccatggtcataaaaggcagaagaaccaaagtctgactgtttccaatgtgtcaccaggctggagtgcagtggggctatctcggctcactgcaacctccacctctcgggttcaagggattctcctgcctcagcctcccgagtagctgggattacaggcacccagcaccacgcccagctaatttttgtatttttagtagagtcgggtttcaccatgttgatcaggctggtcttgagctgctgacctcaggtgatccgcccacctcggcctcccaaagtgctgggattacaggcgtgagccacctcgcccagcctattattttttaaagtaacagctttatttagatataattcacataccataatatccacccttttaaaatggacagttcagtgcttctcagtacattcacagtgttgtacaattgtccccactctctaattctagaacattttcatcatctcaaaaatcctgtacccatgagcagtctctcaccttccccttcccccagccctggcaaccaagaacctttctgtctctatggatttgcctgtcctggacatttcatataaacagagccatatataactaatatgtggccttttgtgtctgtgtctggcttctttcagttagcatacagttttcaagattcatacatgttgtagcatggatcagtattttattcctttttattctttttttttttttttgagacggagcctctctctgttgcccaggctagagtgcagtggcacgatctcggctcactgcaacctccacctcctgggtccaagcgattctcccgcctcagcctcccgagtagctgggattacaagcgcccatcgccatgccatgcccggctaatttttttgtatttttagtacagatggggtttcaccatgttggccaagctggtctcgaactcctaacctcaagtgatccacccactttggtctcccacagtgctgggattacaagcctgagccactgtgcctggcctgtttttgagtcaggggtcttgctctgtcacccaggctgaagtgcagtggcgcaattacagctcattgtagcctcgacctcccaggctcaagtgatcctcccacctcaacctcctgagtagctgggactacaggcagctgccaccatgcccagctaattttttttttttagtagagactgggtcttgctatgttgccctggctttgggcatacattcctttgtatgtctaataccccactgatggtatgccacattttgcttatccattcatctactagtggacacacgggttgtttttaatttgtggttattaataatgccacttaggaatattgatgtgcaagttttcgtgtagacatgttttccttcttcttggttctgtacttaggagtggaattgctgggtcatatggcaactgtgtttagcattgtgaggaactgcgagactgttttccaaagtgactgcaccattttaaatctccaccaacacttgttattctgtttttgttgttgttgttattgttttgagacaaggtcttgctctgtcgcccaggctggagtgcagtggcgtgttcatggcttgctgcagcctcaaccttcctggctcaggtgatcctcccacctcagcctcccgagtagctggaaccagccacaaacagctgcccacattggtgacttgggccaccacaccctgctaactttttttgtatttttttttttttttttttgtagagatagggttctgccattttgcccaaaccctctgtgttttttgttatggccatcctagtgggcgtgcagtggtatctcactgtggttttgacttgcatttccctgatgactaatgatgtcgggcaccttttcatgtgcttattggccatttgtagatcttctctggagaaatgtctgttcacatcctttgcccttttttttttttttttttgagacagagtcttgctctgtcgcccaggctggagtgcagtggtgtgatctcggctcactgcaagctccgcctcccaggttcacgccattctcctgcctcagcctcccaagcagctgggactacaggcgcccgccaccacgcccagctaattttttgtatttttaatagagacggggtttcaccgtgttagccaggatggtctcgatctcctgacctcgtgatccgcccacctcggcctcccaaagtgctgggattacaggcgtgagccaccgcgcccggcccctttgcccattttttaactgggtttttttaaattgatgaattatttttaaaaagcaaaactgatgtctaagcctgtttgaagagtatcagtgtggcccattgtctcaagttgtcactgtgggtcagatatttttaagtttacatgcataagttttagtcacgtgccgggctgttgggttcagtggccccaggagctctgttcacccggcacccgtgttatacaaggtgtggtcctcagtgcgtgtcaccgatgctatcattgggaagcccctgctccagacagggaaggggtgaccactgttgctttcatggagcaaaacgatgcttgggttatcttcaagtgcattattcctcttggtcacgctactgggatcagatgtgggaaatccgtgtccctcatgctaaaacgtgtgcttcttttgttttacccagaaggtgctaatcggaagaagaacttgccccccaaagtgcccataacgccgatgccacagtattccattatggagacgccggtgctgaagaaggaactggataggttggcggtcttcaaagcttgttgcccacagtggtcttttccctcccataagtaactgggtttcacacacctgggggcggaagggccccccgtgtggtctctgggtctggtggatgcagctggcctgggcttgggaagaaaggtctgcagtcagctccttagggagcatgtgtgactgctgggtgccggggtgagcctcccagttctctctgcgtaccattccccagggaggcaacacacaggattcgtgcatgtcacccctgggcagcaggtccccatattccatgtagatggaaatggccccctagccagagcagtctgagtgaggaggtctgattttttttttgaaagacagagtcttgctctgtcgcccaggctggagtgcagtggcgcagtcccggctcactgcaacctccacctcccgggttcaagcgattctcctgactcagcctcccgagtagctgggactacaggcacacgccaccacaccaggctaattgttgtatttttagtagagacggggtttcaccatgttggccaggctggtctcgaactcctgaccacgtgatccacccgcctcggcttcccaaaatgctgggattacaggcgtgagccactgtgcccggcggaggcctgattttttttaaaagaacatttaactctcacatccacatgacactgctcttccactcgggcacccggggaagctgctgctgccaccatccctcagaactgggagcagcatatcttttgtttattttttatttttggagacaggatctcactctgttgcccaggctggagtagagtgatgtgatcttggctcactgtagcctcagcctcccgggcttaagcgatcctacctcatcctccctagtagctgggactacaggtgacaccaccacgcctggctaatttttgtattttttgtagaggcggggtcttgctatgttgcccaggctggccttgaactcctgagctcaaactgtcctcctgcctcagcctcccaaagtgctgggattgtaggcgtgagccattgtgcctggctggcaatgtttcttttggaatattcagagtaagcttagttggcgcctagaatagacactaacctctgatgctcacagaagtcaggcatctatggtttgtcacacaagccattcgctgaatgcattgggtatcactctttgctaagatagggaacgtggagtgtggaccagctgtgtgggtgggtcctgagatccacctgttcctccgtcaggtttggagtccgccctctgcctaaacgccagatggttctgaagctgaaggagatattccagtacactcaccagaccctggactcagactccgaggacgagagccagtcctcacagccgctgttgcaggcgcctcactgccagaccctcgcctcccagacctacaagccttcaagggcaggggtccatgcccagcaggaggccaccacaggacctggggcccataggcccaagggacctgctaagaccaagggcccccgacatcaaaggaagcatcatgaaagcatcacacccccaagcaggtcgcccaccaaggaggcacctccaggcctcaatgatgacgcccagatcccagcctctcaagaatccgtggccacctctgtggatggcagtgacagctccttgagctcacagaggtaaccggatggatgcgatggggtcagtggcctcatgtatcctctggcccgtgggcgtgagggttggcacgagtgagacctaatggccaatcttcaaaaacccccgtcaccttctgggtttgacctgtgggaaaaccaggtgggtttagggggctggttccctgaccccagccctgcgcaggcctcctggttcctgccccacatgctagacatttctggctggggcaggatcccgctggcgtagcctgcagggatctctcaggcccgtcctgccttgctggggatcgtgccacaggccaggctccatgggacccgtagacaccttccttcctttaaagaggctcatggtctcaggggctggagagaaaggggttgcacaacgtcctggtctggctcttttcagttcttcctcctgtgagtttggagcggcatttgagtctgcaggtgaagaggagggcgagggggaggtcagtgcctcgcaggcagccgtgcaggcggcggacacagacgaggcgctgaggtgctacatccgctccaagccggccctgtaccagaaggtgctgctgtaccagccctttgagctgcgggagctgcaggcagagctgaggcagaacggcctccgtgtgtcctcgcgcaggctgttggacttcctggacacccactgtatcaccttcaccactgccgccacccgcagggagaagctccagggcaggaggcggcagcctcggggcaagaagaaggtggagcggaactgatggggccatcccgaccccaccccaacctgccatcagcagcccccacccccgccatttgcagggaggacctgggacacccagcgtgggtcaggcctccacaggcatttctgggcctggggaccacatcagctctgcgctgtgatgatgaccacagcccaatccagggcttcctcctctgggctctgctttctagggtggcatttggagcatgtcacccactggatttacagactccagccccttcctctgtccgtgctcacagtgtgtctccctttttggttttctttttttttttctttttgagacagtcgtgctgtgtcacctaggctggagtgcagtggcacaatctcggctcactgcaacctccgcctcccgggttcaagcaattctcctgcctcagcctcccagatagctgggactacaggcacacgctgccacgcccagctgattttttatattttagtagaaacggggtttcaccatgttgctcaggctggtcacaaactccagagctcaggcaatccgcctgctgcggcctcccaaagtgctgggatcacaggcgccagccactgcgcccggcccagtgtgtctcccttaacccaagagggccctcagctgtcccagggggcagtgggccatcaccagctggccagggcatggcctattctgccacatttgccaccctctgagcccaccagtcctgggcacagctgccctacatgtctgtcctgagatggacgtcaggtccagcctgccccggcagcccgggcccgtcctcctcagcactcaggccaaccccagccaccgccagcctgagaccaggtgtcctgaggctccctgcactgccacagcccagatgcagttctcctgacccagccgtgctacccggacacttgtcattgttaccagcagtctccaaactggacagtgcacaagggcccagaacaactctgatgccaccacaaaacaaacatgttcactagcggattccattctttgggttaaagctgcctccagcctcaggagcagtgtggaggaagatgagggccaggaaagaaggaaaccttggtttctccatccttgtgaatgtcctcgtctgtttcaaatacagtgcagtcagttttatatgatgtgcaataaaccaaaaaggctttatta

SEQ ID NO: 596 - DNA, 4275 bp, Homo sapiens
  source 1..4275: mol_type = other DNA
gacgaagttgacgagggtgtcggcatgagggggtggagcaaggagcgcgtggcgcggtgcgcagtgggtggctccacctcgactgcgaattactgtttatgaggtgactcgctggttctatcggtggacagtgggacattctgaagggaggcaaggaggcggactgagcgctcccaattggggtgagcccgcccgagcggagagtggacggcgggtgtccagggggcggggctttcggctgtggggttcggtcgtagggcgggaactccccaactggggtgcgctggcgctcggagggggcggggccacaggccgcgaggctgccgggagccgatgacgcccgaacgccgaacctattgcgtccgggaggaggcggggctacggattcggccgagccgagaacacccgaacgtcaaattgctggcgttcgggaagggggcggggctgcggattcggtggagccgaggacgcccgaacgccgaacttcctgtgctcgggagggggcagggttttgtactgtgggagtctgagagcgaggaggtccgaaagccgaatcacagtcgttcggaaagaggaggagcgaaggctcgagcgtccggaagagggtgtggcctcggcggtgccttagcctccagagcttctgaccgctgacgggaacacccgaagggggacgcccactttgcaagagggtggtgccaaaatggacctttgtaagggggcgtgtcgccgcgcttgcggaggtttgtttttcacgctccaaggcgcaatggtaggtacggcagtgcgggcacagagcgggtgccgaccgcagggtcacaagggtagagcgggaccctgggggcttggcgaggggcgagggtcgggggcttgtctccggcgtctcgtctccggcggccgcgaggcctggtgggatcgcccgggggcggggcctggcgctcgggcccagcaggtggtgaacggcggctgagcgaggccccgccccctgaggcctaggggcggggcttcgccgagaccccggaggctttgggtgcgctgcagcggtctgcggcgcgcagctgtttcggtaactgctttgcctcccggctcccgcaggaggatgctggtggtggaggtggcgaacggccgctccctggtgtggggagccgaggcggtgcaggccctccgggagcgcctgggtgtggggggccgcacggtaggcgccctgccccgcgggccccgccagaactcgcgcctgggcctcccgctgctgctgatgcccgaagaggcgcggctcttggccgagatcggcgccgtgactctggtcagcgccccgcgtccagactctcggcaccacagcctggtaagggggcggggctcgaactcgggttcggtgggagcgggacctgggagtcaagtttcctggcttctgaagggaccataagcttggaggttccagcgaagtgtgcttctcaggccctgacatccttcaagcgccagcaagaggagagcttccaggagcagagcgccttggcagctgaggcccgggagacccgtcgtcaggagctcctggagaagattacggagggccaggctgctaagaagcagaaactagaacaggcttcaggggccagctcaagccaggaggccggctcgagccaggctgccaaagaggatgagaccagtgatggccaggcttcgggagagcaggaggaagctggtgagcatgggaggtggagtccagggaccacgggaaggagaggagagatcttttaggaattttagctgggaatccagtgcctgggtctccctgagggtgagaagactttaccccttgaatttaccaaactcttctctgtactccccaccaggcccctcgtcttcccaagcaggaccctcaaatggggtagcccccttgcccagatctgctctccttgtccagctggccactgccaggcctcgaccggtcaaggccaggcccctggactggcgtgtccagtctaaagactggccccacgccggccgccctgcccacgagctgcgctacagtatctacagagacctgtgggagcgaggcttcttcctcagtgcggctggcaagttcggaggtgacttcctggtctatcctggtgagtatgggttggggcctctggttgctgtgcctttccatacgatcccaatgtattctgcgtttttcttttttttttttttgtcttaatagaggtggggtctcttgttgcttaggctggtccctattcctgggctcaagcaatccttccacctcggccccccaaagtgctggaattataggcccagctgcatttttcttttttgtctcactttctcttagcctctgaaattcatagacagacaggaaacatttgggagctcctgaactcattgggcaagcagtttaacgacttttattaaatgattactgtgatccagaagattcacttagaagtagttagacatcaggctgggcgcaatggctcacgcctgtaatcccaacactttgggaggccaagacaggtggatcacctgaggtcaggagtttgataccagtctggccaacatggtgaaaccccatctctactaaaaatactaaaactaactgggcgtggtggtgggtgcctgtatttccagctactcgggaggctgaagcaggagaatcatgtgaacccagggggcagaggttgtagtgagccaagatcgtgccattgcactccagcctgggggacaagagcgagactttgtctcaaaaaaaaaaaaaaaaaaaagcctagaagtggaatagttgtgtccaagagcatctgttttagagtatctatagtgatggctgaaatgatctcagatctcctcccagtggtcgttcccgtggcgtccagccgtctgccattggtcactgcttcagtgcctctctccttcccccaggtgaccccctccgcttccacgcccattatatcgctcagtgctgggcccccgaggacaccatcccactccaagacctggttgctgctgggcgccttggaaccagcgtcagaaagaccctgctcctctgttctccgcagcctgatggtaaggtggtctacacctccctgcaatgggccagcctgcagtgaactccagagacctaggggatgtggctgtgtcggcagcaagagcctttctggatgttccccagctcttctctgggagtctagaacatcctcctacctttctccgcggttagtttttgattccaggttttcgaacactacatcttttttatgttcttccttgtttcaaagcacttattggctgtgtttttgtagttacctattttcacactgtgagcttcccgagaatggggcctgggtttgattcatctgttttctacagggtttaagtctcaggaggtctcaataaacttggtatataaatgttcatgatttgaatgtttgcgacagtcctggaacccgtggatggtctcatctgcatgtacaggtgagaaaaaggcctggaggggggggactgacttgcccaaagtcacacacttagtaaatagcaggcctggcctttcaaaattggtttttctgactcctaaatctgcactctttctacctcactaaacttcctcttgaaaagatttctatgaaatttcccagatgcatacaaacgttataaataaaaatataggctgggcacgatgacccacacctgtaatcccacagaacttttggaggccaaggcagggggatcgcttgagcccaggagtttgagaccagctctggcaacattgtaatacccagtctctacaaaaaataatttaaaaaaaaattagccagggatcccttgagcctgggaagttgaggctgctgtgagctgtgattgcaccactgccctccagcctgggagacagagcaagaacctgtctcaaaaaatatatatatgtgtgtgtgtatatatgtaaatatacacacatgtatgtatatatatgtgtgtgtatatatatatatattatgaaaggaaatgagtattgtaattttaggagttcagagcctggggagaaaggaaggactctggaaggcgttctgctttttcatggcctgggtagtggtggagaatttttttgatactgtatatttatattttagactcttttttggatgtgttatattctgcaatttttataaaagctaaaacacatgtatttgtaaaaaatttgcacttatgaaatcatttacccatgtttttgcttaagaaagtactagaacactaccactattccaataattacacctttatcttatcaatgtg

SEQ ID NO: 597 - DNA, 6042 bp, Homo sapiens
  source 1..6042: mol_type = other DNA
tacacaaagaccccgctctcgaatctggggtgacaggaaggagccggtccaggctccgggggctgggaaagggcgcgtctcaaaggctggctggagtggagccaagggaaaagatcgttagagacagcgcccctgaccaaccacttagagcagcgcaggggtgggagggcggccgcaggctctcctctcgttagtgccccctgtgtttggggccccgtgatctcaacggtcctgccctcggtctccctcttcccccgccccgccctgggccaggtgttcgaatcccgactccagaactggcggcgtcccagtcccgcgggcgtggagcgccggaggacccgccctcgggctcatggcggccccggtccgcctgggccggaagcgcccgctgcctgcctgtcccaacccgctcttcgttcgctggctgaccgagtggcgggacgaggcgacccgcagcaggcgccgcacgcgcttcgtatttcagaaggtgggtcctggcgtggcccgatgggaaaagctgctggccaggtcaggcctgccctgaccaggtaccctacccctgcccggccaggcgctgcgttccctccgacggtacccactgccgctgcgcagcgggaaggaagctaagatcctacagcacttcggagacgggctctgccggatgctggacgagcggctgcagcggcaccgaacatcgggcggtgagcgcctcggaaaggggtcggtgatcccccacctcccccaggtggagcctccgtactctcctgggagcccttggcttttaagctccccactcctgtcccagttgccgttcggcctagggctagtggctggcgctccctgagcctccctcaccggtctcacgtaaccatctgagtaggttgcatcccagatcctcgcagctgccggattcgtggagtgtggagttaactcttttctctcccgcaggtgaccatgccccggactcaccatctggagagaacagtccagccccgcaggggcgacttgcggaagtccaggactcttccatgccagtgaggaaggggcaaggggagtggaaggcaaagtgggagtgcgggagtatgattttctggcttgggggatttggcaagcctgagtccaaatctcaccagtgatgcctggccttgagcaaatgacttatcctcttttcgacttagtattttaacctgtgaatagaaatattggtaacagccaatgagagaattccatgatcaagctacttaaggatcccagctcagttagttacggggtcaccattattgagttttcctgtctaattacacctgtcctgcagcgcatggtagaagtgaggccaggctgggcagacacccccacccactgccccgaaactgcctgctgttttatcccagatttgcagcggatcatcccatcacctggcccattttacagagaaggaaactgagagacaactgagtgacttacccagggccacaaagcctgctggggacttattcaaagatgactggctggctttcatgttcagaactcctctgtacctttcaggttcctgcccagcccaaagcgggaggctctggcagctactggccagctcggcactcaggagcccgagtgatactgctggtgctctaccgggagcacctggtgagcactgggctacaccgggaggcggaaccatggcagtggggtgggaggttccccgaggggcctggcccaggcagggcaggcaaagattatcccagccacctgagcgggatgaggaggggccctggcactgagcctaccctgtcttttctaccttggtttcagaatcctaatggtcaccacttcttaaccaaggaggagctgctgcagaggtgtgctcagaagtcccccagggtgagcacagggatcagggaggacaggcccaagtggctctggggcccaccaaagactgccttttcttgcagtgggcccatgtgtggcccatggctggggacacagggaacatggacttgtggtggtaccaggtgctctctgagggtctcttttctgatccacaggtagcccctgggagtgctcgaccctggccagccctccgctccctccttcacaggaacctggtcctcaggacacaccagccagccaggtggggccaactgcaggagatacaggagagcatgagtgaacttcttagtagggccttagagtcacccaacaactcccagagctgatgctgttgagattggggggggtgggcctttcctcaggagcccccactgttggaatacctggagggtgtgaaaccgcagcagcgggggtgggagggtgcggtggttattggaggaggagaaagccttttcagaggagatagcatttgacacgttttaggatttggcgggtagagatgcaggataagtattccgaggaggaggaaacagcattagtgaagacaggaggaaggaaattgtctgagacacacttcttgcagacctgagaatggcgctgagcaggcccaaggaactgctctaagagccaagaagaccaggaggagcaggagccactggggtcatttgtgcagggcgccaagggggtggtgaggccagcccagctgggggcaggcaggaaagcctgccaggaatgagtgaagaaggtagagctgtgttgtcccctctgcctcccaggtactcattgaccccagagggcctggagctggcccagaagttggccgagtcagaaggcctgagcttgctgaatgtgggcatcgggcccaaggagccccctggggaggagacagcagtgccaggagcagcttcagcagagctgtgaggaggagggcagaggagtggggaaaacagggaggaggggatgggaaatgaggccaaagccccgccccaacccatcacctgcagctgaactgtggctgcctccctactgtgggtgggtggtgggtgtcgggtggcatgggtgtggggcaactgccctggcacaaggggttctggcctcacataccaacaccccccacttagtgccagtgaagcaggggtccagcagcagccactggagctgaggcctggagagtacagggtgctgttgtgtgtggacattggcgagacccgggggtgagtgaggtggggagaaacgagggagatgatcagaggaggctggggggtaggcactgccctgctctgatctaggcttccctccttgccactccaggggcgggcacaggccggagctgctccgagagctacagcggctgcacgtgacccacacggtgcgcaagctgcacgttggagattttgtgtgggtggcccaggagaccaatcctagagacccaggtgaagggccgtggacaggctggcaccaggggcagggcctggtgggtaggggatcgcaagctaacggctggcttgtcagcagcaaaccctggggagttggtactggatcacattgtggagcgcaagcgactggatgacctttgcagcagcatcatcgacggccgcttccgggagcagaaggtaattttgctggctttgccaggcttccctgcctgctccgaagccccgttttcagcccagagcaatccaggggcacttctggcagcctccttgaggcagagccctttggaatccagccacacccaccctgtggctgctccaggatcagacccccacaggcccatccaggcgcacagtaggaagccaggtacctgcattcttgggctgaggtcaggagcattttaaagacctcttgggtacccagcccctgcagtcttggataaacaaggcataaacctccaggagtggaaatacagaggctgtaccttggtacttgctgctgggtggacccctagtcacagaggccatgtgccggcccaggggaggcttgaaggatgggcagtgttgagagatggagaaaaggctttctagacaagagtgtcagcatgagcaaagctgcggaggcccctgtgaggcaggtggagaggctagggaggatgcagaggctaactggtgggaacagggtcccggcaccattttgagtgtgacatcatggatgcccaggcatgtggtcatccagcctgaccctccctgtccactctgtacacttccctagttccggctgaagcgctgtggtctggagcgccgggtatacctggtggaagagcatggttccgtccacaacctcagccttcctgagagcacactgctgcaggctgtcaccaacactcaggtgagctgggagggcagggccaggcaggcaggcaggggcccctgtggtccatggttcatggtctaggccaggagccaccttccctctcttgggtcctcttccccaggtcattgatggcttttttgtgaagcgcacagcagacattaaggagtcagccgcctacctggccctcttgacgcggggcctgcagagactctaccaggtgagcagaggcccctttcccagtgtcgggacagagcccacaaggaattcaccttgcctgggccctgtgcatccccaaaagaagcaaggtgggtgagatccccatttctcaggctggccccccaaggctgaggactgggcaggggctggctggagttgttccttcgagctccagcctggcctcagtcccttcttccctcagggccacaccctacgcagccgcccctggggaacccctgggaaccctgaatcaggggccatgacctctccaaaccctctctgctcactcctcaccttcagtgacttcaacgcaggagccatcaagaataaggtactgtctctgcctagcttctcagacatggcctggcccagacccccactgatccagccctttcccgaacccaggcccagtcggtgcgagaagtgtttgcccggcagctgatgcaggtgcgcggagtgagtggggagaaggcagcagccctggtggatcgatacagcacccctgccaggtaggccctaaagggcccttaggtgtcctcagcccctgccctccatgcatggaattcaccttaatccatgcttcgtggagggggcctggccttgtgtgggctctgcagaccagagatagacagatcccagggtgctcgtggaggtcaagtggggaggaagccagcaggcccacatagtgtcccaggtagtggaggccacaggagggagggagacgtcccacctggtggagaagaggcttcctggagaaggggttgggccattaaggggagtgagggtgaaggtttggagcctttgctggttttgccccagagttcccacagggagggaggacagcccggctggcatggggccttgagtgccaagctcaggaagtggggcagtgtcccaactcttccatcccatgctgacccctctgcctggcccctcatggtgctggcccagagtgggccactgtcagcctcagaaactcaaacccctgccccccagcctcctggccgcctatgatgcctgtgccacccccaaggaacaagagacactgctgagcaccattaagtgtgggcgtctacagaggtgagggcaagagacggaacctggagggagtggcagggactggggctgccctaggcccagggcgtgaccctcgctgcctctcttcctgcaggaatctggggcctgctctgagcaggaccttatcccagctctactgcagctacggccccttgacctgagcttatgccgtgaaacagcccccagcccccgtctgtcccccaacccaggctagccagccttttaacaacatcttttggggtacaattagaatctaagtgtttgcagccatatgtgtcatgtagaagatgcctagccctggggaccttgtgaaatacgcaggaaccagggataccatctggtccagtggtttttaaacaaagctgcttagcacctggaattccctggtcagggagatggagtcagtggggcattgcagcttggaatctattttatgtcaccagttggtcctcatcaaataaaatttccttaggagtgcagagggctcattgggaaaataaaaataataaaaataaataaaacttcctaaaagaaaagattgaaaaccactaa

SEQ ID NO: 598 - DNA, 32744 bp, Homo sapiens; identical to SEQ ID NO: 590
  source 1..32744: mol_type = other DNA

SEQ ID NO: 599 - DNA, 964 bp, Homo sapiens
  source 1..964: mol_type = other DNA
ctgcccctgaaccccagaacaaccagctggatcagttctcacaggagctacagcgcggagactgggtaagtcaacgatccccagagctgggacagaaggggcagcaatggggcagcaactgagggagaagagagctgacgttagtgcttaggagacgttgcacactttgcagacaggaagtaaaggaaatgggaccccagagtggccgcagaggggcctgtggggtaagacactacagtgtgtgtcataaccaagacccgatcagggagtagttacttctcttcttttcttacaggaaacatggttccaaaactgttcacttcccaaatttgtctgcttcttctgttggggcttctggctgtggagggctcactccatgtcaaacctccacagtttacctgggctcaatggtttgaaacccagcacatcaatatgacctcccagcaatgcaccaatgcaatgcaggtcattaacaattatcaacggcgatgcaaaaaccaaaatactttccttcttacaacttttgctaacgtagttaatgtttgtggtaacccaaatatgacctgtcctagtaacaaaactcgcaaaaattgtcaccacagtggaagccaggtgcctttaatccactgtaacctcacaactccaagtccacagaatatttcaaactgcaggtatgcgcagacaccagcaaacatgttctatatagttgcatgtgacaacagagatcaacgacgagaccctccacagtatccggtggttccagttcacctggatagaatcatctaagctcctgtatcagcactcctcatcatcactcatctgccaagctcctcaatcatagccaagatcccatctctccatatactttgggtatcagcatctgtcctcatcagtctccataccccttcagctttcctgagctgaagtgccttgtgaaccctgcaataaactgctttgcaaattc

SEQ ID NO: 600 - DNA, 6310 bp, Homo sapiens
  source 1..6310: mol_type = other DNA
gagtctgtaccctcgtgatgtccccgccccggttcccaggcaagtttagggaagtgaaaggcgccaggtgccagtcctggcctctgatgtaacccagcgccccgcagtcccgacacagattcctggatctcagccccatagcagctatgatcccgctgctgctggcagcgctgctgtgcgtccccgccggggccctgacctgctacggggactccgggcagcctgtagactggtgagtgcgcagcggggggcctaccatcgccccggggtccggctgcggtcactcaaccgggatggctacctcctcggggaaccctggggtgccttctcttccctctctcctatttctgtgcattctccgacctccaggttcgtggtctacaagctgccagctcttagagggtccggggaggcggcgcagagagggctgcagtacaagtatctggacgagagctccggaggctggcgggacggcagggcactcatcaacagcccggagggggccgtgggccgaagcctgcagccgctgtaccggagcaacaccagccaggtgaagggggccccgggccaactaggggcgaaactctagggctgccctgcctgggaggaatttcacgttgcctccgtttatccgcccgcagctcgccttcctgctctacaatgaccaaccgcctcaacccagcaaggctcaggactcttccatgcgtgggcacacgaagggtgaggcctggattgggggctggggagagactcgggtcccatttttccaaggtaacccctgacgtgcatggggtggtcggggagatctgcactgtcagaccctgggcatctattccccccaacttttttttttctttgtttttgagacggtgggagttcgctctgtcacccaagctggagtgcagtggcacaatcttggctcactgcaatctctgcctctggggttgaagcaattctcctgtctcagcctcccaagtagctggtattaaaggcgcaccatcacaccaggctaattttcatatttttagtacagacgaggtttcaccatgttggccaggctggtctcgaactcctggtttctacctcaagtgatctacccgccttggcctcccaaagtgctgggattacaggaatgagccaccctgcccagccgagttcctatgcatttttccaagctaacccctgacctccatagtggggtgggagatctcccctgtcagaccttgggcatctatttcccctattttattttcttttagacaaggtctcacccagtcacctaggctggagtgcagtatcacagctcactgcagccttgacctcccagggctcaggtgatcctcctacctcagcctcccaagtactgggcctgccggtaccccccaccacgcctggctttttttttttttttttttttttgcggcactctctctccatcacccaggctggagttcggtggtgcaatctcagctcactgcaatctccatctccccagttcaagcgattcttctgcctcagcctctggagtagctgggattacaggtgtgcgccaccatgcccagctaaatgttgtatgttttagtagagatggggttttaccaggttggacaggctgatattgaactcctgacctcaggtgatccacctgccttggcctcccaaagtgctgggattacaggcgtgagccaccacacctggcctactttttgtatttttgtagagtgggcttttgccatgttgcctaggctggtctctaagtcctggttcaagcaatccacccaccttggcctcttaatgtgctgcgattaccggcatgagccgccacacctggcctgtttccctaccttacattactcttggcgttattctggactataagaatttatgcctgcaaaaactgagctcagctgtggttctaacactgctggcaccctctctaagccccgctgcaaactgagggtgttcctgattgcagatgagcttgctgggaggcctggagcaataccctctaattgccttttttttttttttttttttgagaaggagttttgctcttgctacccaggctggagtgcaatggtgcaatctcggctcactgcaacctccgcctcctgggttcaagtgattctcctgcatcagcctcccgagtagctgggattacaggcatgcaccaccatgcccggctaatgttgtatttttagtagtgatgaggtttctccatgttggccaggctggtcttgaactcccgacctcaggtgatccgccctcctcggcttcccaaagtgctgggattacactgcgtggggcctgccttctttttttaaatttttatttatttatttatttatttatttatttacttacttacttacttatgtttgagatgaaattttgctctgtggcccaggctggagtgcagtggtggatctcagctcactgcaacctccacctcctgggttcaagcgattctcctgcctcagcctcctgagtagctgggattacaggcgtccaccaccacgctcagctaatttttgtatttttagtagagatggggtttcgccatgttggccaggctgatttctaactcctgacctcaggtgatctgtgtgtctcggtctcccaaagtgctgggattacaggcgtgagccactgcgcccgacctcccctaatgccttcttttggtccaggtgtcctgctccttgaccacgatgggggcttctggctggtccacagtgtacctaacttccctccaccggcctcctctgctgcatacagctggcctcatagcgcctgtacctacgggcagaccctgctctgtgtgtcttttcccttcgctcagttctcgaagatgggtaagtcgagtcagggacacaggatgagtcctgggtttactgaccagaacctggaacgatcttgcatttcctcctccccttgtcctccaggcaagcagctgacctacacctacccctgggtctataactaccagctggaagggatctttgcccaggaattccccgacttggagaatgtggtcaagggccaccacgttagccaagaaccctggaacagcagcatcacactcacatcccaggccggggctgttttccagagctttgccaagttcagcaaatttggagatggtgagtctcaaggttgagggttggagagctccttctctgcagacagggtgactggtgtggccatggctgagttcaagtcagcggtagagaccaggtctgtttgggagctataatcacatgatcagtgaacagacctgggttcaaaccctgggttttgctgtgtgatgtataacttcacctgagccttggtctactcatctgaaaaatggggatactgacatctacttaaaaaattgtgaatgaagtggtacctgtaagtcatttgggtgccagaggtggtgcctcactcctgtaatcccagttacttaggaggctgaggcaggaggatcatttgaagacaggcatccaagacaagcctgggaaacatagcaagacctcatctctacaaaattaaaaattagccaagcaacttgggaggctgaggcaggaggataaattgagcccagagtttcagactgcagtgagctataatgactccactgcactccagcctgggtgacagagcaagaccctgtctttatttaaaaataaataaataggctgggcacagtggctcatgcctgtaatcccagcactttgggaggctgaggtgggcagatcacgagctcaggagatcgagaccatcctggctaacacggtgaaaccctgtctctactaaaagtgcaaaaattagccaggcatggtggcgggcacctgtagtcccagttactcgggaggctgaggcaggagaatggcgtgaacccggaaggtggagcttgcagtgagtcaagatagtgccactgcactccagcctgggtgacagagtgagactgtgtctcaaaataaataaataaataaataaatacaaataaataggccaggcacagtggctcacacctgtaatcccagtcgaggcaggaggattgcttgagcccaggagtttgagaccagcctgggcaacacagcgggaccccatctctacaaaaaaaattttaattagtggggcatagtggcacacacgtgtagtccccactactcaggaggctgaggtgggagaacagcttgagcccaggaggtcgaggctgcaagtgagtcatgatcctgccactgcactccagctggggtgtcaaaatgagacccagtctcaaaataaataagttaattaattaaaaacactcagggccggacgcggtggctcacctgtaatccccacattttgggagaccaaggcgggtgggtcacttgagcccaggagttcaagaccagtctggccaacatggtgaaactccatctctactaaaagtacaaaaattatctgggcatggtggagggcgctggctgattacacggtcaggagtttgagaacagcctggccaacatggtggaaccccatctctactaaaagtacaaaaattagccgggtgtggtggcgggcacctgtaatcccagctactcaggaggctgaggcatgagaatcgcttgaaaccaggaggcagaggttgcagtgtgccgagattacaccactgcactccagcctgggcgacagagtgagactctgtctcaaaaacaaatttgggaagggcaattaatattaatgtcatcattcccaggactgggaattgacaactgagctcagaaatatggaaactgtggcagggcgcggtgacacacacctgtagtcccagcattttggaagaccgaggtgggcggattgcttgagatcaggagtttgagaccagcctggtcaatatggtgaaacccctctttattaaaaaattagccgggtatggttgtgcatgcctgtagtcccagctactcagaaggctgaggcaggagaatcacttgaacctcggaggcagaggttgcaatgagcctagattgcaccaatgcactctagcctgggcgacagagcaagactccatgtcaaaaaaaaaaaaaaaaaaggaaatatggaaactgagctgagagaggggaagtggactagggactccctcgcagtggccctgaccctacctgtgccctctctccatcctttgcagacctgtactccggctggttggcagcagcccttggtaccaacctgcaggtccagttctggcacaaaactgtaggcatcctgccctctaactgctcggatatctggcaggttctgaatgtgaaccagatagctttccctggaccagccggcccaagcttcaacagcacagaggaccactccaaatggtgcgtgtccccaaaagggccctggacctgcgtgggtgacatgaatcggaaccagggagaggagcaacggggtgggggcacactgtgtgcccagctgccagccctctggaaagccttccagccgctggtgaagaactaccagccctgtaatggcatggccaggaagcccagcagagcttataagatctaacccttatggccaggtgcagtggctcacgtatgtaatcccagcactttgggaagccaaggagggaggatcacttgaactcaggaattcgagaccagcctgggctacatagtgagaccacatctctactagaacttaaaaaaagttagccaggcacggtgataaatgcctgtagtcccagccactgaagccagaggatcgattgaaccagggagatcatggtcacagtgaactatgattacgccaacctgggtcacatagcaagactctgtttcaaaaaaaaagggggggcgggggacgggtgggtgcagtggctcacatctgtaaccccagcactttgggaggctgagatgggcagatcacttgaggtcaggagttcgagaccagcctggccaacatggtgaaaccccatatccattaaaaatatttaaaaattagccagacatggtggcacgcgtctgtggtcctagctcctcgggaggctgaggcaggagaatcgcttgaactcgggaggcagaggttgtcatgagctgagctaacaccacggcacttcagcctgggtgacagaatgagactctgtgtcaaaaaaataaaaaataaaaaatctaagggctcaggaaccagtttggacttgattttgaatcccagttcatccccttcctagctgtatgaccttgattgtgtgccttaaccgctctgtgacacagtctacctgtctgcaaaatgggaaacataatacctgccatcaggattgttgaggagtaaataaatggaaattggt

SEQ ID NO: 601 - DNA, 31455 bp, Homo sapiens
  source 1..31455: mol_type = other DNA
gcgggtgggggaagctggtaggcacgggcggctccgcagtgaccggactcgggggaggtgagtgatttgcctaagtaaaagggaaagataattgagcgcccccggcagctggtctacgcatgcgtccgctaggccggctgggagccggcaagggaaagccgagcgggccccattgggggaaaggggtcagtcacttcccggaagaggcggggccgcgcgggcccggcgctggattcgaaacgcttcctggtgctcctgggcctggcggttgagcccggggagctagtctttgcttgggtaaagaaagaggactttcctttttttttttccttttgagaaaattcagaaatttggaggcacagtagttaggattcaggccaaactggtaaatgacgaaggggcttcttccagagccaaggaggaagggttgtccgggtaagtcccgcgggacgtggagagacggcgccgcccgggtcctcccactgattcctttgaccatctggcttacggacgagctctttgttcgctgctcctccgaaaacgccttcaatgactccctttgaataaagtaggaagtccgaaccgagccgccaggccgcgacttggcccctgttttccactcgcgagggccctgcgtcaccccgcctcgggaaagctgcgcgttctccggccgcttgcgcttggccgaagctgctgggtcccgctgtgcttcccccgggcatgcgatggggataattcccacgcctcgctcaaagccatcccgggagagccctccctggtccccataggcacagttgggtgttcccttttccgtgttaaccttgtatttcggatatagttctgttatagtaattactttaaggtattgtagttatttacaatcagtctttcccccacggtaacctagagtgtaaaccccctaaataaacgtcagaagtaatgaagtcttaacttccttggcttaggtttcagcgcccttctcaaccccacactcccgcttcagtctttacacaacccttcccatgaatatgctgacctaacaagtaacctacttttcatactccaaaatcttctcttctgtgtggggaaaataatgcattgactgccacctcactccacctccaaataaattgatgttgaaattctggcctccggtaatggaattctttacatcaaagtcactttttatttctaaaagtaatcacatatatattatattcctactgtggcccttgccatggatcaacgaaaaatatgacatagtcaaaatagaccaaaacatctggccttgttgtaaccaatgggaaacacggttgggaggtccctacttacatgtcacttgcttcaggaaccgttccttgattcctaagtgggggaccttttttcctaaatacaactatagcttgctttcttacctcttaagccctttttatctgcagtctcacttaccctactaaggtctttaaatgcagggcttgatcttccattattgtatctccagcacctataaagctttcctgttaaatagtagacatttaataagtatttattgataaacgtgaagtatgcctcaacgtttaggctaaattcatatgaaaataaaattgaaaaaataattttaaagaacagcattagttactgagattatgtggtaaatcccttaaaatataatcttgcattgaaatagttttcaccatttaccagtctttatatgaatatatactcatctaaatggaaattgggaaatttaagcattttctgcttttccgaagtaaattttctaatgtttttcttaaagctgaactaaattgcaaaacttgctttaataaagtgtgtatttttgcatcagttaagcccctgacctctttatgttctttaaatttgattcattagtgaaattaacaaggttctgtgtttttctcacctcattcagttttataattaaccaataaaagcttattagcttttaaggaagttttaggaacttaaattgatttatgggcaccatatggttacatcaaaggacttgtttttgttttaactggaagtggattcttaagtcctttaagatggaaatttatgttctttctattataccaagcaatactttctgaaatagagtgatttttttttattccatgctaccagttggtcatgcaattcaaatattaaatactagattacagatattagaatcttgtaatgcatctggtttaatacctgtcattttgtagaacggttaaatgtcttcccaaggtcatacacctaatcagtggtatattcaaaacccaaatcctaggcttcctatctgaagtccattgcttatgaagtggtttgctatgtgttctgactttgttgattcaaataagtaagctaaatcaatttaagccattaataggtttataaagttatttgctatgtgttgttcttacatcattgattcatgtaagtagacttgtgtgacagctaattcttaaaaaattatgaagatgttagacttcttttgatatatatatgttgattgtatgaacagattgacatcaatatacttattcattataaaagatttgagtgggaactcaccaaatcccacaccaaaaaaatttaaaattttaccatagtaaaaaaaactaaaaagcaagatgaaattatacatagttcttggtgtagtatttttaatttttattatttatttttatagaaatggggtctcaccattttgccaggctgttctcaaactcctggcctcaggtgatccgcctgcctcgacctcccaaagagccaggattataggcatgagctaccatgcccggctagtgtagtatttttaaattttacttaatgctgagccattttcaaataacctcatcacattgattatgacctcatgcaagaaccatctgttctatctttcagtgtagttgtactttaatatcttagaagctattgcattctgtccttttttggaatgttttatgcttttacagtcttaaccattgcttcttaatatcacttccgcggaacagctggtgcaaagaacatgtgataaggaatggaaaacaattgatgatggaaacagagatttggagttaattgcgttcttaaaatattatgatgttctttctaataaaatgtacatttcacataattttcctctttcagaactaaccatggttaatcattctttaaaccaggtttgtttccgacaaaagaaatgaaataataaaaactaaattctaactgtagtaatcatgtgatattaaagatattatttatggggttaaaagccctctttatcttgcttaggggtttccaataatcgaatcagtgctggactttttttttttttttttaggcatggctgccccctgttaataatatatttaattaacagctttacacaatgatcttaatatacttgaaatacttagaggactgcagtttataaaatcaagagtctaccttattgctgttttatttttttttttaccataaccctcagaaggaatacagttaacatcacagtcctatatataaatgtgtgtttatgtgtgccatcataaacatcactgcactaggtggcaatcttcactactattcatttgtgtatgtgtagtcaacctacgaaaggaatcattagaaacagggtaggaatgttgaaccttagaaccggaagttgccagagaaaatatgtgccctggccaactccacaggactagttctaggcaatctgaaggaaaccagaaaatgtgaatttctcttccctcaaaaagctatactgaagtagtatttaatattcaagtacttgtaaatttgcagaacagtactttttaatttgacccatgaattctatttaaatttgtcacttaatatttagccaagaagcaaaccatctaaaaagatttctggtttatttctccaactcctaataaatagggtcacatattttttaacttttttctaatttgaaaagtaatacaggcatatggtattttaaaaatgaaacaacacaaagggatatgttttgaaaagtggttcttgccatccctgaactgtaatcatccctaacatattcatacctgttttcattttaaaagttgggtcagtttttttattagtacatgtatttctatcctactgatttatttgctatatcatctaatttagtttgaatattccataatttacttaattagtcctgtatggagacctagctcttctcagtgtctactattataaacaatgctacagtgaatattgttgtataaatccatacacaccacgtaacatatcttaagttcctggaagagatattgctaaaccagaagataacctgcatttaaaattttgactgctagggtcagggtcacatttaaattaaattagaacaaaggaattgcataattgtcttcgatagcaatctattccagtgtgcaccgtgagtcacaaaggaaagcaaaactgtcaataactttcttctcagacttttggtttaatgtgttctgatgggttaataatttgtctcatttctcttcataataatgactttgagaatatttgtactgcactctttttccagaattaaccacaacttttcacagtaactgaattaatgccacaatggtacattcaaccagtggggcttcaggatgtgaaatagacaatattctgggccactgttactaccaaatactttctttacctttaagtctgtatatttttatctgtaaagtgacatccatagatgtcactgtacacttcatagaaatgagtacacagaataatactcatggcagggctgggtgtggtggctcatgcctgtaatcccagcactttgggaggctgaggcaggcagatcacttgaacctgggaggcagaggttgcactgagctgagatctcgccactgcgctccagccagcgtgacagagcgagaccctgtctcaaaaaaaaaaaaaaaaggaataatacttatggcagcactggccacactataaaattcaggttcagaaaaacagggtaagtcacagacagcaacgcttccagcatttattttctttgcacccatgggcaatttgagaaaatttacctttagaacgaactctgttaaaggtacagacaatacagtactttttattcagaaggtttctgcataaaggtgatagtcttttgacttaatatattattgtctcctgccttgtgtttctggaatgaatgaaggtcattatttagaggataatctgggttgtatttgtgtcgtcagattgaattttcattgcacatgctacttaatgtctttaccaaataataacaaagggaaagaaaaccaaatatagatgtataataaggaaaagctggcctatagaaaataccaaaccagataatagtagcaaagtttaagccaattttgtttttaaaatgtcatgtacgtggaaaaaggtttaactttagttttctttgggtggtggttaaaagttataagtgattaaaagtttttttctttttctacaatgaacattatgtgaccttgcaatttaaaaagccaacgcccttttaagaaagttatgtccatcagtattcctctaacttcattttctctcgtttcttcttccctcacttttctaagttttcctttattaaccccatttttctttagtttgtttgcatgcttccttgcttttctttttttttttcctgggtatgatagagaattagtcccattctctaagtatgtaaatcaaggagtgaattttcaagtagacaaaaatgatttacagcatccttgcattcgctaccgatctctgcttttgttagctcttgtttttagctgggaaaaagccaattaccgccattttaacgtttcaggtgttcttaattcattttgaaacgctgactgatgaaaaaaataaggaatatcctctatgaattatcctgaactggcttataatatattgtttgaattcctgttatgagcttctgtttctttaacaatattttgtaaagtgtgtttcacataacagcagataatcaccagaatgggagtgaatgacttgtggcaaattttggagcctgttaagcaacacatccccttgcgtaatcttggtgggaaaaccattgcagttgatctgagtctctgggtgtgtgaggcacagacagtcaaaaaaatgatgggcagcgtcatgaagccccacctcaggtatagtaaaagctcttacagtataaatgtatgatgtataaacagtcttggtatcttgattttgtttcacctttttttttcttttgttgttgttattcttttacattttgaggttttaagatctatttaacatgtctagattcaccatctttatattaaggactcacattcgtacctcttaccctttgagctccagactcacatagctatctcctacttaacgtatccactaggatgcttcagatactaaaagccggagatttgggagacattttctccctattttacttctctccacatctaatccgtcagtaagtcttgccagttctacctccaaaatatactttgtgttcacaaacttatctcagtgtccagaggcaccacctcagtctatgccaacctcatctctcatctatactcctgaagtgccatcttcactagtttcttgctcttggcctcccctaccccagactattttccacatagcaattagaataatcataaatctttcttgcttaaaaatattcagtggtttggccgcgtgcagtggctcacgcctgtaatcccagcactttgggaggccgaggcaggtggatcacaaagtcaggagtttgagaccagcctggccaagatggagaaaccccatctctactaaaaataaaaaaaaattagctgggtgtggtggcagatgcctgtaatcccagctacttgggatgctgaggcaggaaaatcacttgaacctgggaggtggaggttgcagtgagccgagatcacaccactgcactccagcctgggcaacagagtgagactccacctcaaaaaaaaaaaaaaaatcagtggttttggccgggcacagtggctcacacttgtattcctagcactttgcgaggctgagatgggcggattatttgagctcaggagttcaagaccagcctgggcaacatggtgaaaccccatctctacaaaaaatacagaaaattagccgggcatggtggcacacacctgtagtcccagctgcttggggactgaggcaggaagatcacttgagccaggagattgaggctgcactgagacaagatcatgccactgcactccagcctgggtgacagagtgagactctgtcaaagaaaaagaaaattcagtggttttccactctaattaaagcttaagtaaaatgttattacattaacgtttttgatactagtctaatgttcttgcctttgtgttatactattttgacttttactatcagtgtttgatgattaatgtattactaatttatatatttcaggaacttattttttcgtatctcatatttaacacaaatggatgtaaaactggtatttgttatggaaggggaaccaccaaagctgaaagctgatgtcataagcaagaggaatcagtctcggtatgggtcttctggaaaatcgtggtctcagaaaacagggagatcacattttaaatcagtcttaagagaggtgagcattcagatttgattcagtaattccgatttgaattaaagggtgcattttactcttaatagtttgtcatctttaatacttattaattttattgtgactagcagggatgtgcctagagaaaagagtttattttttagagtgaaattgacctgagtttcattcttggcactggtatgtagaaactctgagacactgagcaaaatttgtaacctatctctaccttgtatgttaccttgtgaaatgacaacagtaatactcagcagggatgtgataaaaataagagaaagtatatctaaagcaactagtacatggtaggaacttgatcatattaccttttataacaccttcaggacttaaagaagtcccagaatacatgagatctcattaattcgtacttcactcattcagaattcatgatagttcatatacagaatatatatttggcttcccttagggcttgtaattttaaaaactgtcgttacattataatatattatttatatgttactttaatattgctatattttatatttgtatgaaacttaagaaagaaatcatctatagtatataattaaaacaataggaagcttttttttttctgttttctttttttggttgttttttttttttttttgagatggagtctcgctctgtcacccaggctggagtgcagtggcgcaatctcggctcactgcaagctccgcctcctgggttctcaccattttcctgcctcagcctcccgagtagctgggactacaggcgcccgccaccacacctggctaagttttttttgttttttttttagtagagacagggtttcactgtgttagccagaatggtctcgatctcctgacttcgtgatccgcctgcctcggcctcctgaagtgctgggattacaggtgtgagcccctgtgcctggccttttttgtctgttttcaaatgtgtgtatttttaaagagttgtagtagtacacatgatttttaacctagccttttcacttaatgcttcatgttgtcatatttcccttttgtcacattctaatcaaaatcataacttgtagtggttgtgcaacatgtatgaagctatgaatcatacccctgattgtatatgttatttacttttttagtttttctctactatacatggaagtgtgattaacattttttgtgtatataatgttttcttgtgatttgaaattttagataaaattacccaatgttggattgatgggtcaaagttttggaatgattttattgctcttgctgattaatttctgctaatgcagatgtcagagaagcagtgtcggtgcactcacaagaacattggatgttaggaggcttgtctttgtaatatttagtgtgcaacaacaaagatatttaatatgcatttgtcttttaatagtaatgttaaacatttcatctatttttagtctccctttgggtaatggctatcatcatgtcctttacctacttacctcttgaggttttaatttttcttttgtgcaagttctttatgtattaaggatataagcttctatcatatttgctttgaatttgtttttctttttaattttagttaaaaaattatgccatttttctcctcttctgaaattttattttctactcacttttaaaaatagttttcaattagtgaatattccaccctaatgactatcagcagttgaagaaaatatctgtgctaagttctaattacttcttgtataatcaattcctggaaatattcatggtcctcaatcttagagtgttaaagaaccagcataaaacaaaaaaagagatgtccatctcttcttaagaaaattgctccattcctgtttctttattgctgcagtaattatggtgttcttaggcattttgtgtcagttcagtattgcctgttagtcatttttatatttctgtactcttcagttactaggccctgcttcctcctaatccactgctatcttttaggtattcgcatgaaaagcacaaattagtagtcctccaataccacctccaccccacatggtagagacatagagtgggaaaaattgcaacagccttataggaaattctgtgctggttctttgaaaaaatttgaagtggcaaatagtacaagaagttgaaataactgtattatgaaaggctattttttacctaggggtaaggtcgaagcaacactgtcacaaaactgtctctctaaaatcacggggccagcgtcctgaaaagtgatatttttcaacatagtactttgactttttgaaccttgtctgccttgggcaacatctgacagtggtagttattatgtaatgtggcgtggaagtgattaatcaaagcaagaaatggtatttattctgtcagtctctagaaactacaagtaagtagccttttctccccaccatactcagtagtccctgatagagaatgatacatgacaaaaaagaatggcgtattacaagaaagaatgaactaggctataaggccagactacaagctacccagcggggttaaattcataaaccagaggaaagtcacagcaaattatttgtgcatcagcaaaatgatgtaatcattctgcacaaacatttgatttcctaggaggacactgacagctgacttctccgcagtttcccacaatacgagagtttcattgtacagggaaggcaagatgagaaaaaaatgcaaacattaaaattcaagccaaaactgtatgatagcatcttctttggaagtacgcgtattgggttgaccatcatgtgagaaaaattattgaagtcttctagatgtaaatcttaatatgattaattattatttaaagatattttcagaatctgactataatagcaatgaaatgtgaatatggattactttgtaattaacattaaaatcttaattttttattacagaaaatttaaatcaacacaaaagtaacccatcactaatcttaaaccattatcttggctcatcttgtttcatctattcccctatccacacatcattttgaagcaaatcgtagacataatattgtatcattccctgtatttcatgttttctaaaagatgattcctaaaaaataaaaagaaacataaccacaatataatttttattagcacacgtaaaagtttggcagttcattccttaaagccctcaaatattcagtcattgttcaaatttccaagtgtttcttaaatatcgtaatttttaaaacaccaaaatagctactattaatatttgtaatacagaaataggtttaatagtaaataaatgagcagtgaaaacattctttaacatcttgcacctgctttttgttttcagtgcctccatatgctcgaatgcttaggaatcccctgggttcaggctgctggggaagctgaagccatgtgtgcttatctcaatgctggtggtcatgtcgatggctgcctcaccaatgatggagatactttcctttatggggcccagactgtttacaggaatttcactatgaatacaaaggtgtttattttctttctctttttcagcatttgtttacgaactaccttttttaaagggctgattaaatgaaatagtagatataaaatgcttactgtaatgccttgcacgtagcaattgctaattaaaatgcttactgttattaaaaatcattgccacatagttcattctcttcaaaatgtggatttatctcataagaacttgacttgtttgtttcacatggtttgattctaaatcattttcaaaaatacatcacgaattgcatatgaaaatgtgttgctttgatcctgaatttccagtttagtgtttcatcctcagaaatacctccaaatatgcaaagagagagatataaagatgttcaatgtagcattgttaataattacaaaaatttggcaagcagcccgagtgctcattgatagggacatggttaaatccttcacacttactggttcccagttggagagatactgctgggagacattttggttgcaacagttcaggcttgggcaaaggagagtatagatatgtgatggcttggtgccaaccaaactaaaccttctgccagacatttctgctatccctcccgaaatgctaatattagcacccccattgagaaacactgtttcagagtccatatgatgtaatacagtgcagtcattgaaaaggctattattgacataaaagatatccagacatattaatggtggaaaatttctcaaaatagtatttttatataatcctacttttacttaaaaaacgtaattaacaataaatattcatatatatgtatcaaaggagatggttttttggaagaatatgcaccaagctattaatgatagctcaggcagtgcagttacggggaatgtttactttctataatatatatatatatatatgttacagtgttttattttgtaagatggaaatctacattttttagacaccagaaagcaataaaatggaaaaaattggctagcatagttatttttaagccatttttgaaactacaactttattttcatatattgaaatgtcagattctataaagattctgctgatcaggataattttcttatataaagtttttggaataattaaactttttttctttttttgagacgtagtctcactgtgtcacccaatctgaaatgcagtggtgtgatctcagctcactgcaacctcctcctcctggcttcaagtaattcttgtgcctcagcctcccaagtaactgggactacaggcacatgccaccacgcctggctaatttttttgtatttttagtagagatggggtttcaccatgttggccaggctggtctcaaactcctgacctcaagtgatacacccaccttggcctctcagagtgctgggattacaggcatgagccaccatgcccagcctggaataattaaacatttaaagataacattgacaaattatttttgtaatgtggtttaatgtataaatatgtactttttgaggattaaactaaatctgttctttctttaggacccacatgttgactgttacacaatgtcatctatcaagagtaaactaggtttggatagagatgctctggttggattagcaatacttcttggctgtgattatctcccaaaggtaagctgaaattgtcatatttatttgctattcataaagtctttttcgtactttatgtgctgtataaatatgaatataatatggctatatgattaaaaatcgaatttaaaatataatttcaggcataataagctattcagtgactaaaataatcggcatttcagatggcactaaaaagctgacttgtgacacttaatattataagcaagaatagaataatgtagtaccacagcttgaatctcagtaaactgttactctagattaagagattcacatttatgtttgactatctttttaaataaatataggagttattcttttcttgtattatgccattgtttctttcactcttttttctgttttttagttttcagtattctttgtgcacatgctcaatgctattactgttgctaagtcacgtgatcattgggataagccattcatatttccatgcctctcagcgttgtgctgggttttgttcatggaaatatttgtatcttaagatgcacaatctagtgctctgtaacaaataggtataacaggtgagtgatgagttaagtattatgagaataatcccatttttttaaatgtagtgtttaaaaatagaaaatgactggtattgtaggtcttactatgtagttcccttattatgttcctactgattatttctgtatccttacaatccgtcattttacctctattcccaagagaagtataaagaagaatgacatgtaattttttttccatctgagctcaggagaaaggaaaatatagcagggtaataaaattattaagcctaatttgtaatttatatcatcaaagaactttttttaaactgtgaggaaaagaaagcaggaggaaagaaacttttaaataccacaaaccattattttgtaattctccttctaaagtaaaagacgatttcctaaataaaattatatcataattaaaatctataaacagcccaatgtttaatttaagaaaaaatttgctgacttgaactcacagaaaccaactttagctacagtggtatttaaattatgcattagccatagctatattgaccttttgtgttttttaaaaccaaaactgctatgtatttacattgttctacttaaagacttttaagactatgtactaacttgatttgccttcaaaaacttaaagctaatgctaatacaagaagaatgatattcaagatatctaataacgtgtatgccaaagacataggcaatagagatggaagagacttctgggtatccctgctgtgccatagactctctttttagtagctggattctgggtataggtggattgggaagtattcaggttagatgggacattcctgtgcaggcagatactcagaatgcttgggcagtagctatttactaaccagttaacacgagtgtgtaaatcctagtgtgtactggttaaataacagctctgcttataaggacatattcatacacttataggggctggaagactcagtttaaatcagaaattgtgacaggaatatacattaaggcatatcattttcgtatattggaaattcacactttaaattttcttaagtttttaatttcaagagttaacttaaaacgttccttcgttctctgtttatgtctgggttttggaatattaaatgttcatgtaattaaatgaacttgctttttcctgattacaaacataaagttaggttaaattaaaatattatccaaataattaacatagtaaatgaaagccctctaaaattatgaccctcccttccctaaaataaacaccatcagtggtttggtatataactcgctgaaatttttgtttacatagataacagtgtaattgtcatttactttacaaatcctgatcatatacactattgtgaagtttttgttttatgcatagcagtgtatcttgcatatcttttcctatctttattgaagagttacctcattctttcagctgctgactcttccgttcaattaatatacttttaaccattcctagtgattaacattggaattattttttttcccactttctgaaagggagtccctggagttggaaaagagcaagcattaaaacttatacagattttgaaagggcaaagtttacttcagaggtaactaataattactttctcttgtgacattgaacctttattcttgctgaacttaataacgaatagtacaggaaacaattgttttccaaaaaagggttttgtatttttaaactgacctatattttgtttgatttaagataatttatttttatttattttgaaattttccaaaggaaggatgagaatacatgttccaagccgtattgcatttttttttctttttttggagacaaggtctcactgtgtcgcctaggctgcagtgcagtggcgcaatcactgctcactgcaatctcaacctgccggagtcaagtgatcctcctacttcagcctcctgagtaactgggacaacagatatgcaccactgtgcccagccaccatactacatttaaaatatacatattatttatattaaacatgttaatatattaatttttaatttttttttttgtagagatagggtctccctatgttgcccaggttggtcttgaactcctgggctcaagtgatccccctgccttggtttcccaaagtgttaggattacaggcatgagccacggtgcccagccaccatactgcattttaaaaaatctattattagctcactaaacacatttagtacaatgtcaagtgcatttatgtatgaccatgggcattttgccactagctattttaaacccttttaccaaaaggtaaagataaacatgacattaaaataattttgtatttaatactttgatattgtattttctttctataaatgaaatgtctgtggcgtgttgtaaatatttaataataagcaacattaattgaaatcttactcgactggcctttgctttatagctacatatttaataataacattaattcgtttagtctctatagttggaggattcagaacaagatgcagattatatagaagttaacaaactatgctatttactatctcaaaaacacatgaattatatttgctgatgaaagcaatgttttataaaaattaatattaatgatgataggtatagaatcaataagaaaggaactaggacactgggaaacttaaaacagtcttggcctccagcaggttcgagatggcaagtgcctgaaaaaaatgttaagaggtaaaaatgaaaaaggaatgaccataaaaaatacatcaaatcactgtattctttcctatgatacttctcttttagctgtaaaactgttgataaatgtaagacttcagtaaatccattattgacatcagttattactgtgcccaagcaagaaaggaaaggtataatttggcctgggtgtgagttaaggaatcatttgggaattgtaaaaaataatataaagaaggaaaagcaagtgaatataacacctggctaactccaaaccattcttattgaaacagtttcagcaaataagcactgttgacacttgaaaataataaaattacatttattttataattatctattattctgttttatatactgacttttcctctcagttatttttaatttttgccgtgctattctttatctggaagcaattaatgctaatttttaacaggcttgtacttggtctttgtagtaaatgaattagaaattccagaagctaaatagtaactcttaagtaccagatactgcacaatgacctgaagagataatttagcttttataaaaacttcaacttgtttaagtagaggaacataattcagaacacatacgttttatgattaatacctaaccataccctttgtggctttatgttaacctggaactttagccaaaaacgaaattaacttttaattagtagaaatctttatagtactatacatttttcttaaaatcttttatgaagcaggtaatgttttgctctttgcacaagagattaagaaatgattattttacatgatttagctttttgatacagttttcacccagaagattaatgttttatttaattttatatattactctttactcttctttctgatatagagaaatgttcatgattctgttttgtactctggcacacagagtcagtctgctcacatactgctgcctaacttaagattcttcaaaaaaaaaagactgattggatatatatatacatacatatatatatatacaattttttttaatagagataccgatatatagatacacacacacatatactctctctcctgtcttgcagttctgctgtccttgggccttggggccacatttaaagcttgtgactgagggttttcccacactaggccagcaactttatcagccaccaaagggaaaataattaggtaggtgaaagggaatagatcagcctgatatttgagaacataccgtttttgtgacctcattttttttcctttttttaaaaaccactttctattaaaggtttaatcggtggaatgaaacatcttgtaactctagtccacaactgctagtcactaaaaaactggctcattgttccgtatgttcccatccaggtaaggagacatagggaatggttattagtatctcatacccatgttttaattcttgttcacatagtactttttacatgccaatattaataatactttgaagggttttacattgtcttctccactagattaggaattccttgcagtcagttttgttatatacacatagtagtcactcagtaaatgtttattgaaaccaataatgtgatgtagatgataaatataagtacagtttcaaactatgataccaaattacttagatcttaaaactatgttttcaatatagaaatccattttaagaaaaaaatatatactaataagtcttagggaaaatggaactgaaaccatttgttaatatattggtgatttatatttatctacttaaatgattcttcattgtcctgtaatgcattttgtgtgtgaagacagtgacttaaaactaatttctaatacatgttcactattcttgaaaatagcttggatcttcttcattagtcttggtttaaaaaaaaaaaagacactacggaacacgtactggatcagaaaggcctttcattcccaaaagagattaggatatcatgttaactcatcttttaaaagaaattctgctatatctagttgtcttaatatatttttattaacattattaaattatagataaaatcatggaagaaaatcaatgtttttataaataagatgctattgtatagttttttgataacttataaatgacaattttaggtcatatcaagtatatgtgctcttacatattctcaagacaatgttgaaagtaatcacactttgcttttaaagggaattaaatttccacacccgtgccacagtcatcatttgttcatgttccaaggatagtttaaaaataactgtaactgagagctagacactagcagaggtaattaactgctatattcttttaatacactcgttaaagaaactattctattagagctattctattaagtaaataatcttttttgctagtaattacatcctactttttatgcatgtagcttccacctaaaccagaaagttttctgttgttgattattgtaaatgtataatttcaagtgtctaattaacactttcagatagaagaataattttttctaaagtgtcatgtgatagtaatagctcaagatctacttgagcccaagaattactatggtgtctattactctattcatcctaaatgtattgaaacctttctatatgctaggtagtgtgctaggcaatattaattttggaaaatttagatactggcaaaaagaatgtatgtagaaagtaattataaaaggcaaaaaatattatactttttttgggtctccataaaggttcacctaaggatcatgaacgtaatggatgcagattatgtaaaagtgataaatattgtgagccacatgactatgaatactgctgtccttgtgagtggcaccgtacagaacatgataggcaactcagtgaagtagagaacaatattaagaagtaagtttttttaaaaactcatgatttttcctggcatgacctatacacatacctttggttgaattatttccatataatctttccccatatctagattagtcacatgtttaactaaatttttttttcatttctgttcaaaaatttagctaacctaggagatagtaatgtaatagttattcaaagggaagcttgactgtttgggatactgtaaattcacatttcttattaaatgggaggagattggctgagatgatttcagagtctaaaattgtctgattatagtaataacatgtatataatttttttttcaggaaagcttgctgttgtgagggattcccattccatgaggtaatatccagtaattcaactctattaattttagaaactttcttaaaagtttaaatctcagtttctattttcttttttcttgctaggttattcaagaattccttttaaacaaggataaattggtgaaggttatcaggtaccaaagacctgatttgttattgtttcaggtatctgaaaataaattcttctttactgtatgaagttatatgctggaaagataggaacagatattcactctgattggtcttagaggaggtttaaaattaaaacaggcagctcttatattttttcagcatttatttctactctctcatttgccatacagtggccatctttgcacactataagacaaagtatagttatgctgttttagaagatgccttaattagcatatgtggatatattgcatccatggatattttgggggaagagggtttaataacaagagaatgttaagatcaagtatataattatggaaggtagtatcatttacaaaaacattgatatctgaaattaatgacctaaatttaaatttggaccgtattccacctactgtgtgaccctggatgtgtgttattctcaaaacagaaataatattacttatctcataaagtcaccatgaggattaaatgagattatttatattaactcctaatatagtggctagggacacggagtggctcaataaattgcaacaactgggtacttacaagtaccagctgtaagtaatgacagccacattaagaacgacagccacattaataatgacagccaacatttgttagacatttaaatttgctgttatgtttaatgcattgcatgtaatctcaatctttgtaatctgtgaagtgggttgtaatattttcacattacagatggtaaaactgaggctaagagagtttaagtaagttacccaacatctaagaaatatcatcctggcgttcaaaccgagagccttcactcttaatcattatgcaataatgattcttccttaggaggctcattgtttctagaatattctcattgatactactttaacttacgttaattctaaaggaaaaaatattaatatcacctaggagtgctatttgtctccaagagataacaaaatcttgttttatttttattatatttatagagatttactcttgaaaaaatggagtggcccaatcactatgcatgtgagaaattgctggtacttttgacccattatgacatgatagaaagaaagcttggtagcagaaactctaatcaactacagccaattcggtaatgtaaagaactgtatggtgaaggtggtgtttttacttgagtattttataattaaaatattcctaatatctttaagctcgtttttgtaaaggtggaggaaaggcctcctggaatattaaaagcttattcagggcttataatcagaacaacatagtaagtcatgctttatcatacttttctacttcaaacacatagtaataatagattataaaaagaaacaagcataaaaggatatagccaggctttataagacaactatttcagtggaccagaaaaggaacaaacgtgttaagggaatgtgggaactaaaactggttttgcagagccttaaatctagaagcagccgtatcatccaggaggtaaatcgcttcagagaaaaaaaaaaaaatggggaccaaaagtgcaagatgttgatggagtcaggcttatttcttgaaacccagtagctagggtggaatttctctgttcctatcaggagattagaggctggggtagataataaaaaactaaccaaatgctgcctgaagcccagaaagcccactggaaattactcaaagagactagagagatagaagtgaagacagataaaatataaaagaattgaagaagaaagcttaacatataaagaaatataatatttttaaaatcaacaattgcgtcatgaattcacttcggattaaattaagttttaaaacagtctgacaggttttatgcaaggggtgggtgtggttggcctttcagaatgctagaatcctcaaaaagatgaagacatatgtctgtaagcaacagaaggcaaaattataaaaatgtgtgtaaatggatggatataaaaagtgaactattagcttaaaaatagttgttgaaataaaaagcaatcaaggggtctctaggctaaacttggtccaaaaaaattagtgatttggaagacaaatcaagtcacacagaaatgatctcaaagactctcatataaaaaatgcttaagagtagttttggattagttcctagaagctaataaaagaaaaggttgaaaagtaatttttgaagagatgatgtctgagagttttccaaaatttaagacagatagttatactacaaattatagtcgcaatacatgaaatacccaaggcatattgtagacatcaacgataaaaggaatattttaaaaagtaccaaaccaatcaggcaacaatcatcaatggatgttaaaaccattagatgaaagattgctgcagagaaaggatagtcacagtctcaagtaccgctctacagattaattacaaaggaaaaatggtatcttcaaaagtggagaaatccagtggacatcagtttaactcagtgattaattaccaataaaagaacaatagactgctttcatatgctttctaatacgttaaactgagaaagatactacattatcatataatatttttgccaaaaaagcttgagctaggtggggcgtggtggctcgcacctgtaatcccagcagcattttgggagactgaggccggtggatcgactgagctcaggagttcaagacccatctcttccaaaaatacaaaaaattagccaggcgtggtggagagcacctgtgatcccagctacttggaaggctgagttgggaggattgcttgagcctgggaggtggaggttgcagtgagctgagttcataccactgcactccaaacttggtgacagagtgagaccctgtctcaaaaaaaaaaaaaaaaaaaaaggaaagtttaatctgtatctaatcatgaggaaacaatctaatgaatccaagtgaaaaacgttctgtggagctattatcctggactcttcaaaaataaaaaatatctaggtagttttctggattaaaataaagagacaacacaattcaagaaaaatgatcctgattgaattctgaattgtttttaagtcataaaggaccttttttttaggacaattggggaaatttgaatatggtctatattgtatcattgttaaacttccagagtgtgaaagttttttgtggcaatgtaggaaaatactctacatagacaggctgcagtatttaggggtgatgtgccatgagacatgtttgcaactaacttgcaaatggagaaagcaaatgtgataaaatgttaacaattgatgaatctcagtaaaagtatgtgagtattcattgtactatttttgcaacttttataaaggtttgaaatttttcagaataaacagtttgctgggaagtataaaagaaaaaagatcagctatctgatagcacacatctttcataaccgtaatagatgccagaagatgctggagtgatgtttcaaagtaccgagtaaaaataatttacaaccttgaaatcattaaaacattattcataggaaaagcgtttttaaacatatgaagagtaagagagtttaccactcaaaccttccttaaaagtgcagttaaagggctgggcgtggtggtttatgcctggattagcactttgggagaccaaagcaggcggatcagttgaggccagggattctagaccattctggccaacatagcgaaaacacctgtctactacaaatacaaaacattagctggacctggtggtacatgcctgtaatcccatttacttgggatgctgaggcacgagaatctcttgaacccaggaggcagaggttacagtgagctgagatggtgccactgcactccagcctgagcaaacagagcaagactcaaaaaaaaaaggataatttattttttaaagtgttgttaaaggatatacttcagcaagaaaaaaaatgaacacagagggaagatgtgaattacaagaaacagtggtcagcccaggaattgattaaaacgtatttggataatttaataaactgactagaaaaaattatgtatataaatatttgtataatatttaatgattaatacatgatgatgatgatgataagccaaaactcccaaagtatgcattcaaacacttaagagtacctgctagaaatataatctctgtcttccaaaccagtacaattaaaataagaaagtaaaactatcaaaccaaaataatacaggcagaaggaagatggaagtaacaaagaaaaagctggtgacagcaaacaaaataaggtgcatgaatgaatccagcagctttatcagtaatcaccaaaaatgtaagcagattaaactcacctattaaaagacagattatattggataagtaaataaaattcagcaatattcagcttacaaggtacatgtagaataatactacacagagtttgaaaataaagagatttaagaagacttagtagacaaatactgtacttaccaaagtaatataacaaattttaaaacaaaaatcattattgtgaagatgaggaacactgcataataaggtaagaaacaacttacttagaagaactaacagtaataaactctatgtacctaacaatattatcttttgaataaactagtcaaaggaataggcagtaattccttaaaatgtttttacctgggaaaaaaaaatctatggaaattattcaggttagaaatggaaaatttccaaatatcttatgcaattagacttcattaaatgaatttgtttttcagaattgttaagactcgaatcagaaatggagttcattgttttgaaatagaatgggaaaagcctggtatgtattcactttaagcaaaatattccatttataatatttgaccatgtatgtctagtaaatattgtatatgtgtatatatatatatatacacacacacatagatatgtgtatatatatatatacacacacacatatatgtgtatatatatgtatacacacacatatatgtgtgtacatatatgtatacacacatatgtgtgtacatatatgtatatacacacacatgtgtgtgtacatatatgtatatacacacacacgtgtacatatatgtatacacacacatgtgtgtacatatatgtatatacacacacatatatgtgtgtacatatatgtatatacacacatatatgtgtgtacatatatgtatatacacacacatatatgtgtgtacatatatgtatatacacacacagcatgtgtgtgaaaaataaagatgaaacccatcacatgcaccacaggttgatttcatagtttgcctgtgttattttagataggttttgactaatagtaaatatgataaactttgattttattttaatgtctcaatttgacatttcttttgtaatgtttaaggaagtaataccgaaataatttttatttatatttctcaaatacatgcttttacaaatgctgtggtcattcaatgtcatgtatagttgcatctgaaaaaattgagattgttaaaatactcctggggtacacttcctttcctttttttttttaaccctgcttagttttcagtgggaattttttattgtcaaattattcttatttttgctccagacagaaatacagtgaactctgaattagctcccaaactggagatagtgaaaaacagataatttaaaatgaaagtaataatactttttttttgagacggagtcttgctctgttgcccaggctggagagtgcagtggcaccaccttggcttacagcaacctctgcctcctggttcaagtgattctcctgcctcagcctcccaagtagctggggttacaggcacctgccatcatgcctggctaattttcatatttttagtagagatggagtttcgttattttggccaggctggtctcgaacccctgacctcaggtgttccacccacttcggcctcccaaagtgctgggattacaggcgtgagccactgcgcccagcctggaaagtagtaatacttttgatggccctttcaattgtgttcttttcagaagctatcactaaagaaagctgatgttgagttttaggaaactgtttcatttcttacctggaattttaacacttaactgaattaaaccaaccaaccttacctaaacaaagttttctgtcctttcagctactgctaccatctctgaaataagaggatttaaagttctaatttagaaagaatctccatccggccattgccaggcaaaaagaaaataaattatgtactgctatcaacagattgttagaatatagtgttataaagcaagatttgcaatgaatagttcatttgtgaatgatttattttacctgataaagctagttacctggaaagattgatttttttttttttgagatggagttttgctcttgttgcccaggctggagtgtagtggtgcgatctcggctcactgcaacctctacctcccaggttcaagtgattcttctgcctcagcctcctgagtagctgggattataggcacgcaccagcatgcccggctaatttttgtattttttatagagacatggtttcaccatgttgatcgggctggtctggtgttggtcaggctggtctcgaactcctgacctcatgatccgcccgccttggcctcccaaaatgctgggattacaggtgtgagccatcaagcctgaccgattgaatttttttaaatgcctaattaaggacactttgctgtatttttaatcttttagaacattatgctatggaagataaacaacatggagaatttgctttattaacaattgaggaagaatcattgtttgaagcagcatatcctgagatcgttgctgtttaccaaaaacaaaagttagaaattaaagggaagaaacaaaaacgtaagttttgggtttgatagctatttatgccacatgcaaatgttatagaagagccacctcttctgtttgaatctgctgtgtctaaattttactgaaaaatctataaactcaaaagtcaagaattgtattcttccttctttgtcttcacatactttcttttaaagctgaaaagccaggaataaatcattctgttctgtctactaacttagacacgtgttaataataatagttatactgactagttgttcagcagctactgtttatagcatattcggattttaaatgttttctttatttcccagaactcagtgaggaaaacaactcaattataacattgttttcagagggaaatattttataatctagcaatgcactgagatcaaaaaaaggcagaaactattcatagagatttctctctgaactgtttatttttttattttttacccaagttaaagcaaagaaaataaatgttgattatatgtattttttttcttttcaggtattaagcctaaagaaaacaatttgccagaaccagatgaagtaatgagctttcagtcacacatgactttaaaacccacatgtgaaatctttcataagcagaattccaagttaaattcggggatttcccctgatcctacattaccacaggaatctatttctgcctcattgaatagcttgcttttacctaaaaatactccatgtttgaatgcacaagaacagttcatgtcttctctaagacctttggctatacagcaaattaaagctgtcagtaagtctctaatttcagaatctagtcaacccaatacctcatctcataatatatccgtgattgctgatctacacttgagcactattgactgggaaggtacttcttttagtaattctccagctattcaaaggaatactttttctcatgatttaaaatcagaagttgaatcagagctatcagccatccctgatggctttgaaaatatcccagaacaactgtcctgtgaatcagaaaggtacactgcaaacataaagaaagtgttggatgaggattctgatgggattagtcctgaagagcatctactttctggcattactgatttatgtcttcaggatttgcctttaaaggaacgaatatttacaaaattatcatatcctcaggataatctacaaccagatgtcaacctgaaaactttgtccatacttagtgtaaaagaatcttgtattgctaacagtggttctgattgtacatcacatctttcaaaggatcttccaggaattcccttgcaaaatgaatccagagactctaaaattctaaaaggagaccagctgcttcaagaagactataaagtcaatacttctgtcccttattctgtcagtaacacagtggtaaagacctgcaatgttagaccaccaaatactgctttagatcatagtagaaaagttgatatgcaaaccactcggaaaattttaatgaagaagagtgtttgccttgacagacattcctctgatgaacaaagtgccccagtgtttgggaaagctaagtacacaactcaaagaatgaagcacagttctcaaaagcataattcatcccatttcaaagaaagtggccataacaagttgagtagccctaagatacatattaaagaaactgaacagtgtgtcagatcttatgaaacagctgaaaatgaagaaagctgtttcccagattcaacaaaaagttctctgagttctctacaatgtcataagaaagaaaacaactctggtacttgtttggatagccctcttcctttacgccagagattaaaactaagattccaaagcacttgaaatttaaaacacttaggtataacttaactattttagtactatcagcaatagcagagacagagggaaggtatctagttcatgtgtggtaaaaattttaatgttctctgtgtcatgaaacacttgccattttaatcaaagttgtaatttttaaaaagtcacctaaaactctggttttaaaagatcctctgtattgaaaacttctgataatgtatgtcattatgtccttactattccttaattgtagttttaaaatattggtatagtacttgacagagtaaatacttcatctgattgttcatttttactttttcttccacaagcctctaaagtatttatattccagcttgttcccaagaggataattctttatacttctcttcattcttttaaggccttgcaaggtcttccgttataactcgctttcctaaaagctattttctccctcagtgtgaagatacctttagtgtgctcttccactttggaaggccatgcaaggtgttccattataactctttttcctaagagttatattctccctcagtttgaagatacctttagtgtgctcttccacttttggtgtcttagtctcttttgaggggcaaaaatagaaaaggagagaagatgtcagtatgtttagtaaaaatcatgctcgtaatggctgaataaactgagcaaagtaactccttatgtatccccagaagttcacaggtatatcgggtggaaaaagatttggaaaatcaaatgtataaccaaaaggattagaaactagcccaggatcacgtagctaactaataatcctgtgggaatcagttttcttgcctgctaatttttttatttttctattttttccttctatagcacttttcccccttttgttttgaatctatgcaatattgactttaataccaccaaatattaagtcatgcattaatttaggtcgcactcaaaaattctagagaggcatccagattgaaaaggaaaatggtgtctgcagatgacaagattgtatgcatcaaaaattctaagaaatccactagaaaactattaaaactgataaagcgagttcatccaggtcgtagaatacaagaccaatgtgcaatgatcattgcattttgtttttgtttgtttgtttttttttgagacagagtctcactcttgtcgagactggggtgtagtggcgccatcttggctcactgcaacctctgcctcccaggttcacgcaattcacatgcctcagccacctgagtagcagggattacaggtgtgtgccaccatgcctggctaatttttagtatttttagtagagatgggattttcccttgttggtcaggctagtcatgaactcctggcctcaagcgatccacccatcttggcctcccagagtgctgggattacaggtgtgaatcaccatactcagcctcaattgtatttctgtacacctctaaataaatggaaatacattccatgttcatgaatcagaagacataagatgaccatactccccaaactgatctacaggttaaatgtaattcccattaattccagctggtttctttgctgattctaaaattcatatggaaatttcaggaacacagaatattaggaagaatcttgaaagagtttgaatgacccacccttcctgattttaagtatacagaactacagtaatgaatgtgttgtactggtataaaggtagacatataggtcaatatagatcaatggcatagaattgagaattcagaaaaaaagccttcacgtttatggtcagttgattttaaaccagagtgccaagacaattcaatgggaaaaggaaacagtctttgaaccaactgtcttctggatctattggatatctatgtaaaaaagagtgacatttgattcctacttcacatgatatttaagaagtaacttaagatggatcaaatacctaaatgtaagctaaagctataaaactcttagaagaaaacatagacgtaaatctttgtgactttggattaggcaaggatttcttaaatatacccaaagcataggcaacaaaagagaatacacaaactggacttcatcaaaactaaaaactgttgtttgaaatgacaccatcaagaaagtgaaaagacagcttacagaatgggagaaaatatttgcaaatcataaatgtgataagggacttgtatcttggtggtatataaagaactcgtaactcaattataaaaagacaactttgaaatgggcaaaatagctcaacaggcttttctgcaaagaagaaatacaaatgaccaagaagcacatttaaaaattttcagtactattactcatcaggaaaatgcaaatcaaaaccacaagacacccaatgtctacaatcaaaaagataataactagtattgatgaggatgtggagaaattgaaattctcataacatgctggtaggaatgtaaaatggggcagccactttggaaaaagtctggtagttcttcaaatggttaaatgtagagttacgatatgatccagcaattcctctcccaggtatatacccaagataaatgaaaacttatatccacataaaaacctgtgcacaaatgtccatagcagcgttattcataatagcctaaaagtggaaacaatcccagttccagaatgaggaaggggagaaactaatgtgtattagctattgtgtgctaagcattcaactagattatttacaaaccttgtatcatctcaactctttaaggactgtattgcaatgttttgaatattcagagagaaaaaagtcgttgctaaaacattttccaaggttctgcttattctgatttgttcagtcgtggctgtgatagttcaggaccatctagaccaggtaaataaaatatctagaggcattcttgagattgtatgagatgaaaataacaaaattagttgggagtggccagtctgagttcattttgctatatagctcaggagtccccaacccctgggctatggacaggtaccagtccatcacctgtcaggaaccggcctgcacagcaggtgttgagcggcatgcaagcgagaattaccgcctgagctctgcctcctgtcagatcagcggtggcattagagtctcataggagcatgaaccctattgtgaactacgcatgcgaggatctagtttgtgcactcctactgagaatctaatgcctgatgatataaggtggaacagcttcatcccacagccatctccccctcatcatccgtggaaaaactgttttccacgaaagtggtcctcggtgccagaaaggttggggactgctgatatacctaatataggcataagtgtaaaattatagttcctcctcctcaaggatttctctgttttcattgtccaggttataccaattctttttaaagcattccatgttcttgttccttgatgtggtcatgttatcacttgtaaat

SEQ ID NO: 602 - DNA, 8211 bp, Homo sapiens
  source 1..8211: mol_type = other DNA
tggcggcgcgcgcagcggcaggcggcggcgggatggagcccgagcccgagcccgcggccgtggaggttcccgcggggcgcgtgctcaggtgcggcgcggcccggccggagtgggtgtcgggggcgcggggccagcgcgggtagggaaaccggcgcccgggacccggccaggcggcccccgatgcgcggcgctgaccccgcgtccccttctcccccagcgcccgggagctcttcgccgcccgctcgcggtcgcagaagctgccccagcgctcgcatggccccaaggactttctgcccgacggctcggcagctcaggccgagcggctgcgccggtgccgggaagagctctggcagctgctggcagagcagcgcgtggagcgcctgtgagaggggcgggcccaggggtaagggaagcgggggcgaggcgggccgcggggtctccggaatggactgacgcagacccctccccactcctcgccaggggcagcttggtggctgccgagtggaggccagaagagggcttcgtggagttgaagtctcccgcggtgagcggcgggctcggggaccggggaccgccctccctgccctccctgccctccctcccttgtgacacttgctctgggccccacacagggcaaattctggcagaccatgggcttctcagagcagggccggcagcgccttcacccggaagaggccttgtatcttctggagtgtgtaagtggggcccgggaggtggggaaggagttgggaccaaagaacgggaaggacacgttttatcggagaaaaagcacacacaacccggtctttagagaactgataaccaaacttctaaagcaggaggtggtacgttgcagggagcagggattccagtccacattagtgatgctgccccactttcctggttggccacattcttgatgcgctgctgagagggggagggggaggtatcagagctgggaagttgccccattcctctgtggcactgtagtgagggctcataagctgagctgttggccccacttccagggctccatccacctcttccaccaagacctgccactgtctatccaggaagcttaccagctgctgctgaccgaccacactgtgaccttcctgcagtaccaggtatctgccaccaccccgcctccgggagccacccatccactgaatcaatgagtattgacaagtacccataaggtgccaggcacagtgtcacatgctggggctgcagggcagacgagggctatgctgtcacgaggcttacattgtggtggtggcctgttggcttcacatagaccccagtgctgtcagaagataaggtgggggaagagaatccaaagagactgggctgttcattcaggtgagagaagctaggggcttgtcgcaggttgggggtgggtagagttgcagtgagtgaaaaatagatgaatctcagaaatattttggagaaagaatggataggactgccaatggattggatgtcaggattaaggagagagaagaacccaggattaccgcccatgatttgggcatgcaccagtggatgaaggtgctgtcattttctgagtgggaagaatgaagaggagcagatttgggaggacaagaccagtcgaaagaactgtgtcagataagttaattttgaggagcttcttggacatccaagtgagtgtaaagcagacagacaattggaatccaagtctggagtgtgaggagaggtcaaggctagatgtaaatatgggtgccatgagcacatggatggtatttaaactactgggctgtatgggagtgccatcagagtagagggctgggtctgagccctggggctctctgtgtaggttagggggcagataagaagcagaaacagaccgaggagtgtctggtgatgcaggagaaaaaccaaagtcgcatcacagaagccaaaagaaggtctttcaaggaggaagtggttagctgtgctaaagcctgctgagatcaagcaggatgggggacattcttatctatgttcctctgatatgaatgcagggacacaaggttgaatatgtggctccctaccagaaacttcccaccggcatctgtggaggtgtggggctggagagatgcccaccacctgccatcattttgttcacatggtgatcggcagcttcactcctatgagctttgtatcaaaatactcaagtatttcagggcgtggtggttttctggtttcatggctatcagtttttttggatttggctaaatgtcatttgtgccgagtaaggtaagtgggaggacaggaattcagagcctgagatctttagggatggtgttcgtaatgaagcatggtccaaccttaatcacagggtttagaatctgggggtgtacaggaggggcagagagggctgtggggatggcctgtgtctggagaaaccatttggtgttttccagagtggccatctgagctttcattttttttttttcttttgaggtcttcagccacctgaagaggttgggttatgtggttcgacgattccaaccaaggtaaatccccttcctgttccccttccatatattctagtcctgggacctggctgactagtctaaggtagaaaatggcctctccttacctggaacccttggctggagtgcagttccttgggcacagactgggggcgcctgctggaagcgttctgagagaggcaggttgggaggaatccaggtcattttgttttattctggtttatgaactcgagccgcatcttcagatgacctgcgcctgcagctgagtgtgtgtgagcactgagaggcaggattggaacagtgcctggcacttagtaggtgcgcaggcaggtatgtagagtgtatgcttaaatgaaggactgggtgaagaatttaccattagtagggtttcacatttttcatgccaggttaaatgttttttccttcatcaccttagtaatccagcattggtaaaaggcagagaccttcagacttggagtggaaacgggtacagcttttgcagttacagtatgtcacaaaagctctaaagcaggcacatcttttcttttctttttgagacggagtctcactctgtcgcccaggctgtagtgcagtggcatgatctcagcttactgtagcctctgcctcctgggttcaagcagttctcctgcctcagcctcccaagtagctgggattacaggcgtgtgccaccatgcctggctaatttttttattttattttatttttagtacagatggggtttcactgtgttgcccaggctggtctcgaactcctgacctcaaatgatcctcccgcctcagcctcccaaagtgctgggattacaggcatgagtcaccacgcccagctctacatcttttcttttctgaaagtggaacctatcctaaggaaataatcgtggacgtgtacagtggttcacctgtgagaatgatcaacgatatttattatttgctgggggtcaggccctgtacacatcgctgagaacagaagagcaaaatcactgccctcacagagcttgcatttagtgaggagtcacacagaacacactcactgtgcaaaatcagtgtacttgcaaacaagagttgaacaagaggcaggctcacacaaatgagaggttatcccttagagcagctctgtccaatagaactttctgtaatgatgaaaatgttctgtgtctgtgatgtctaatacatggggctagagcaactgtgggactgaatgtttaatttcatttaatttaaatgtatttaaatctaacttaaataggctggtgtggtggctcacgcctataatcccagcattttgggaggccgacgcgggcggatcgcgtgagctcaggagtacgagaccagcctggacagcgtggtgaaaccctgtctctactaaaataccaaaaaaaaaaaaaaaaaaaaatcagccaggtgtggtggcaggcgcctatagtcccagctattcaggaggctgaggcacgagaattgcttgaacctgggcagctgaggttgcagtgagccgagatcttgccagtgcactccagcctgggcgaaaaagcgaaactctatctcaaaaaaaaaagcaaacttaaatagccacctgtcgctagtggctcttttttgaacagcattgccttaaagccttaattcacagccaggaggccaggcacagtggctcacacctgtaatcccagcactttaggaggccgaggcaggtggatcatgaggtcaggagatggagaccatcccggccagcatggtgaaaccttgtctctactaagaatacaaaaattagctgggcatggtggcacgcgcctgtagtcccggtactactcgggatgctgaggcaggagaatcgcttgaacccaggagatggaggttgcagtgagccaagattgtgccactgcactccagcccggtgagagaacgagactgtgtctcaaaaaaaaaaaaaaaagaaaaaggaaaaaattcacagcagggaagaatgctgcagtgacggggctgtgtccacaatatattattgagtgaaaaaaaagatcacaaagcagtatgctagtacaatgacatttttgttagaaaaaaatatatggagagagattagtgtgtacataaacgaaagaaagatgttaacaatagttatccaaggtttttatttttctatatttaccaagtttgctagctcctctgggccattgcctaggcagaggcacatggctgggccccctggctgggcctgtacccctcatgggggtctgcttagggccttagcacttgggtgtggctccgatcctggcccactgactgtcctcttggcccgtttccttacacatcccaccagatccccaggctgaggaggtgggtcagtggcccacccgctgttctcaccccacagctctgtcctgtccccgtatgagaggcagcttaacctggatgccagcgtgcagcacttggaggatggagatggcaagagaaagaggagcagctccagccctcggtaactcccacatcacggtggccccccagggagtgctggtgtctgggaccttggaaaatgcacaggctttctaagaaccagcagctcccatgcaggctcagggagacactaggggacctgccttcagctcccatgggacgtgtgcaccttagcaaccaggggcagatgtgctgcttttcccccacgtccctcaggtccattaataagaaggccaaggccctggacaactccctgcaacccaagagtctggcagcctccagcccacctccctgcagccagcccagccaatgcccagaggagaaaccccaggagtcaagccccatgaagggcccagggggcccctttcagcttctggggtccctgggccccagccctggcccggccagggagggggtggggtgcagctgggagagtggcagagccgagaacggagtcacgggagccggtaagcggcgctggaacttcgagcagatctccttccccaacatggcttcagacagccgccacacccttctgcgcgccccagccccagagctgctcccggccaacgtggctgggcgggagacagacgctgagtcctggtgccagaagctgaaccagcgcaaggagaagctctccaggcgggaacgggagcaccacgcggaggccgcgcagttccaggaagatgtcaacgccgatcccgaggtgcagcggtgctccagctggcgggagtacaaggagctgctgcagcggcggcaggtgcagaggagccagcgccgggcccctcacctgtggggccagcccgtcaccccgctgctgagtcctggccaggccagctccccaggtaccccctcagcctgccacatcttcgagggccactggcagctgaggaatcacaggactttggaaagggcatggatgaactgggatggattgaggcttaaggaagatgtgggaggagggagtggacccacaagcacggtcagttctccggcggctgcagcagggcctgtgtgggaaggcttagagatggtgagtcaggagaggtaaggaggggtggaaactatgaccatatccttaaaaagataaacaacatgcatgtggatggctttgccaccaactagctgtgatcccaacctgttagatgggaaaaggaggtgccttcttggccaagtgaaagaaaggcttgctgtctgctctaagcccagggaaccaatggggaaagaataagctaaatgtgttaacggattccaaattacttaaagcctttatgggaacacggtagattgtaggtaactagatagggttgccagatcagtttgatttgactttcagtataatttttcagtatatgttccaaaaattgcatgggatatgcttatactaaaaaaaaaaaaaaaatgttgctaggctggacacggtggctcatacccgtaatcccagcactttgggaggccgaggcgggcagatcacctgaggtcaggagttcgagaccaacctgggcaacatggtgaaaccatctctactaaaaatacaaaaattagccgggtgtggtggtgcacacttataatcccagctactcaggaggctgagacaggagaattgcttgaacctgggaggcagaggtcacagtgagccaagatcacgccactatactccagcctgggtgacagagtgagactccgtttaaaaaaaaaagttgctaaatctggccgtcctaaactagatggcagactgagaaatgtgactcccctccccagtaccttgttttctgtgtccttgtagccgtggtccttcagcatatctctgtgctgcagacaacacaccttcctgatggaggtgcccggtaagtttccaagcagtgccgtctctgcagtaccttgaccgccaggagttggtggttaggaactggctcctgaagtagggtgtaaactagaggactgttccagggactcctacccctacgcctagctctgagcaataactagtgttcgtgtgtgtctagggaagagggagaataaccagtgggttagcccaagggttcagagcccccaaccctcaagtggcacctctgtgaggctgcttcctggaactggtggagggaaagggtgggatggaaaagaaaggttggggagaagagttcatgtcataacgtttctcattgtattgtcaggctgttggagaagtctgggggcttggaaatcatctttgatgtttaccaggccgacgctgtggccacattccgaaagaataaccctggcaaaccctatgcccggatgtgcattagtgggtacgcagtgagccagcactgcccctcccccagctgctgccagttctcctgtgaaccaagtgggactcctctgtactcccctggccagcgtgccaatctctgagaggaacaggaggtccagagaggctaagtgacctacacaaggccacacagccagtttgtgctgccctactctgagctcctcgttgctggcattttagggtagtctttctccaatgccattttagtctaggactcacccagcagaagggatgtggattgtggggatttacaggctaagagtggtgagcaccttgctcttcctagcacctccccaaccagtgctctggggcgctcttcatcagagccctgtgttttggagacagaactcatgggtcagaattcttgcaccccaactccttccgtagaatctcttctctgggagccctagagcttaggagtgggctatggctgggtctcactctaaccctttgtccctgcagatttgatgagcctgtcccagacctctgcagcctcaagcggttgtcttaccagagtggggatgtccctctgatctttgccctggtggatcatggtgacatctccttctacagcttcagggacttcacgttgccccaggatgtggggcactgacctcacagctctgcagaggatggagcttgctccgggggaccgggactgtctgttctcagggaccatctcggctgcctcctgtacccagactctaacctgtagcttcagaggccagtctgggccttggccctgggtgtctgatactcacagagtgaaactgtgaccctctcccttccctgctgccttgcagtgacccctctggaactcaggactcgattttaaggacccaggaggtggggcagaagagaggactgtgtgcctttaacgagagggtgcctgcttcgtgctataaagccaaagccattaaaaatagatttcttttctgct

SEQ ID NO: 603 - DNA, 32744 bp, Homo sapiens
  source 1..32744: mol_type = other DNA
acgtcacgccgcacgccccagcgagggcgtgcggagtttggctgctccggggttagcaggtgagcctgcgatgcgcgggaagacgttccgctttgaaatgcagcgggatttggtgagtttcccgctgtctccagcggtgcgggtgaagctggtgtctgcggggttccagactgctgaggaactcctagaggtgaaaccctccgagcttagcaaaggtaacgactcctgatggcaagctgaggcacaccggccgccgtcagcgccgcctcagtcttcgttctctcgcctcggccttcagcccagtctccgttagattctgcttcctcccacgtccatgtttacagcgtgaaagagctcctcgactccacttacaagttgtctgaatggttaggagaactgtggtcgtgaaaacatttactaattgcttttcctctggcaatgcctgctgaatgctttgaggattgtctcatttaaccctcaacccgcttacgtagattattatattcagtatatggatgagagaactgatatcttggggagcttaggtaacttttcatgctaactgggttaggaaatactggagtcagaattggttgtctaatttttgctgttccaagatccaaggggtaagggttaaatttcagaaatgcaggattttgtgtaggactagagacactaagaatgagaaagagagtagaatccccggaatcttgaggaagcatagaaagaatattctcttacgtaattaactgaaacacccaaaacctcatattccagagcattgcagatgggaaccactgcatcctgagacatacaaatatgaggctggcggtggtcacttgttgtgcacatctctctatgacatgtctggacctgtgctattcactgaagaagatggaacagaattttaagttactgcccttactgatggaaaatacagaggtttcaattcgcctctaaagaataagtctcgtggacccagccttaactgtttaagtcataccgcgcgcagactgtgtcccccaagatttgatgggctcttttttcttcaacaagttggcttttcaaagaagaaatgtgagaccctgaataataatgatcactaacaactattgactactttagatggtcttgatattctaccaagctttttacatgtatcgtctcattcccattttatagacgaaaaaaatctgagcaaaaaagaaaaagtgaagtaacttgcccaaagtcatgcagtaagtggtgccaggatttacaaacccaggcaatctaattccagcattcaggctcttgataggattttcatttcctaaatgctgtcatcaccattgtcttttattagccccatatttatggctcatattcttatcagatcaagcactgatatatcaaactgataagtgatgtcatcctcaccattatttcttcaccagcttgttttgtaattgccattttcttttctcaggccacactgtcagatgggtgaaattgtgtagtcgaggaagcataaatgtattctttaaaatgcttgtgccttgaataattgttctcattagtttggagtgatacatgaattttttacatcagttatttccatgaaaagtttttattataaataatacatgcatatgtgcttcttaaagttgtaccttgttttaggcagttaaaacatctattttcattctcatctgaaaaataatttgtataccttatgagagcgagataattatggcttcataagaccaaaagggatagtaaaaatatggtaatagtgagtacatttttatttctgcttcctgagacacttgtaggtactcagaaatgctttagttgaattgtttctgaggtaataggtaattctttatgtgatgactaagaaaacgaatacctttattaagctgaatttttttttttttttttttgagacggagtctcgcactgtcatccaggctggaatgcagtggtgcgatccaggctggagtgcagtggtgcaggttcaagtgattgtcctgcctcagcctcccaagtagctggaattataacgcgtgccaccatgcccggctaatttttgtatttttagtagagacggagtttcaccatgttggccaggctggtcttcaactcctgacctcaggtgatctggctgcctcagcctcccaaagtactgggattttaggcatgagccactgtgtccggccaaactgaaaaattaaatggttgatagaatgttgcatttttatgtttctccactcctagcatcactgttgtctacaaattaataaagacaatcgattatcatgttacacttttaaatctctaaaattagggttctttttttcttattttactttcagaagttgggatatctaaagcagaagccttagaaactctgcaaattatcagaagagaatgtctcacaaataaaccaagatatgctggtacatctgagtcacacaagaagtgtacagcactggaacttcttgagcaggagcatacccagggcttcataatcaccttctgttcagcactagatgatattcttgggggtggagtgcccttaatgaaaacaacagaaatttgtggtgcaccaggtgttggaaaaacacaattatggtaaaataaagtgttctccttttaagggtgggtttaataacatattatgaaagtagtattttgtactatcgtcaggaaaccaaataagatatatatgtgctcttaattttaagtgtgtatgtgcattaaacaaaaattagcttactatttgtgttacttcattatcccttcttgataaatgtatgcaattattctgatgtgaaaaagtgtttcttttgcaaattgtactgcagtcataaggttaaacaggaagtttctgcgttattcattcctgagactatatttgaaagtcagatgtttgaaagtagatttatggctaggggtagtggctcatgcctataatcccagcactttgggaggccgaggcaggaggattgcttgagcccaggagtttgaggcctgcctgggcaacatagtgagacctcgtctctactaaaaatggaaaattagctgagtgtggtggcacatgcctgtggtcctagctacttgggaggctgaggcaggaggatagcttgagccggggaggtcaaaactgcagtgagccttaatcacatcactgggcagcagagtgagaccctatctcaaaaaaaaaagaggccggggatggtggctcacacctgtaatcccagcactttgggaggctgaggcgggtggatcacctgagatcaggagttcaagaccagcctagtcaacatggcgaaaccccatctctactaaaaataaaaaaattagccaggcatggtggttcacgcctatagtctcagctcctcgggaggctgaggcaggagaatcgcttgtacttgggaggtggaggttgcagtgagccgagatcatgccactgcactccagcttgggtgacagagcaagactctgtctcaaaagaaaaaaaaaaaaggtagatttatgtataataaggggctccattttgagaggcctggaaatgattaaaatattcttaattggctgggcgcagtggctgacgcttgtaatcccagcactttgggaggccaaggcaggcagatcatgaggtcaggagatcgagaccatcctggctaacacggtgaaaccccgtttctactaaaaaatacaaagaattagccgggcgtggtggcgggtgcttgtagtcctagctactcgggcagctgaggcaggagaatggcgtaaacctgggaggcggagcttgcagtgagcctggatcacgtcactgcactccagcctgggcgacagagcgagactccgtctcaaaacataaataaaataaaataaaatatccttaatcttggttttataggcatgccctccccgaatccagttgatttacatatagtcgattggttcacattatatctggagtcatgaagagttagacatttctgttgccttggggagtatatttacatttataaaactttagtgatacctaacttgtcattatctggagttcaaaaacactaccttagatcatcatcatgatttggttgtttgtcatctttctgttgacagtatgcagttggcagtagatgtgcagataccagaatgttttggaggagtggcaggtgaagcagtttttattgatacagagggaagttttatggttgatagagtggtagaccttgctactgcctgcattcagcaccttcagcttatagcagaaaaacacaagggagagggtaagttagtaaatgatcttctttttttctgtattaataaaagtaatttgcatttgtgcccatctgagacctcagcaacactccatttggaatgtgaagcctaattactggacagttaactagtgttaaactcttttactactgttacaaaatgagaaatgccacagcctggactggcttttttttgttccccttttatggccctcacttcttcctgtaggagctttgggacaaaacctatgtatgtatttcagtcatcatactccatcttatcaggtgtaagttaacggtgccggacaccttaatataagcaactgttgttaaatgctttccaatgtataaggacttccatattggttttccaaaaaccaaaggtagctttgaaaaccacgtctgaggccggatgcagtgctcatgcctgtaatcccagccctttgggaggccaaggcgggtggatcacgaggtcaggagttcaagaccagcctggccaacatgatgaaaccctatctgtactaaaaataccaaaattagccaggtgtgatggcacatgcctgtaatctcagctactaaggaggctgaggcaggagaatcacttgaactcaggagttggagattgcagtgagcccagattacgccactgcactccagcctaggcaacagagtgagactactctgtctcttaaaaaaaaaaaaaaaaaccaaaaaaaaaaaccacgtctgaaatgtttggattgttaagcagattgacttgggggctttgattatatagctgatttcataactgcactaattgttaaagtgtttgggaggtgttgttttggtgcttgttatgtgaaaataaagtgactgtaaaacgatttttttttttttgagacaaagtttcgcttttgctgcccaggctggagtgcagtggcacaatcttggctcactgcaacttccacctcctgggttcaagggattctcctgcctcagcctcccgagtagctggaattacaggcatgtgccaccacgcccagttaattttgtatttttagtacagacagggtttctccatgttgatcaggctggtctcaaactcctgacctcaggtgatcctcccgcctcagcctcccaaagtgctgggattacgggcgtgagccaccgcacccggccaatttttttttcttttttgagacagagtcttgctctgtggcccaggctagagtacagtggcgcgatctcggctcactgcagcctctgcctcccaggttcaagcaattctcctgccttagcctcctgagtagctggaattataggcatgtgttaccatgcccagctaattttttttttttttttttttttgagacagggtctcactctgtcgcccaggctagagtgtaatggcacaatctcggctcactgcaagctctgcctcctgggttcatgccattctcctgcctcagcctcccaagtagctgggactacaggcacccaccaccatgcccagctaattttttttgtatttttagtagagacagggtttcactatgttagccaggatggtctcgatctcctgacctcatgatctgcctgccttggcctcccaaagtgctgggattacaggcatgagccaccgcacccggccacacccagctaatttttgtattttttgtagagagggggtttcaccatataggcaagtcaggtcttgaactcctgacctcaggtgatctgcccacctcggcctcccaaagtgctgggattataggcgtgagccaccacgcccagccttaaacagttttttgaaagataatttataggccgggtgcagtgtctcattcctgtaaacccagcactttgggaggccgaggcgggcggatcacctgaagtcaggagccatggcgaaaccccgtctgtactaaaaatacaaaaaattagccgagcatggtggcaggtacctgtaatcccagctactcaggaggatgaggcaggagaatcgcttgaacccaggaggcggaggttgcagtgagccgagatcgtgccactgcactccattctgggcgacaaaagtgaaactccttctcaaaaaaaaaaaaggaaatttatattcaagttcttattctttcaattacttataaattaaatggcttatgggttgactgttttcttatttatttatttattttaagatggagttgcgctctgtcacccaggctggagtgcagtggcatgatctcagctcactgcaacctctgcctgctgggttcaagcaattctcctgcctcagcctcctgagtagctgggactacgggcatgtgccacaatgcccggctaattttttgtttttttagcagagatggagtttcaccatgctggccaggctggtctcgaactcctgaccttgtgatcttcccgcctcggcctcccaaagtgctgggattacaggcatgagctacagcgcccggcctattgttttctttttctttgttttatttattttttggatgtgcggtctttattctttccaataaaagttttaaaaaaaatgcttttcataagatttcctttaaatgagtatatttcctttaaatgagtgtagtcagctggatttttttttttcatggaggtactaagtgtcccatttcgctgatgaccagcatggttactgaaagccctttggaccctagcagaatatgccaccctgaaatatgccactttggcataaggattattttgagctgaaggcaattgaaaagaaacagataaatctgtctgcccttcctaaaaacaggacataaatgcacagaagagttccatcttccctctcttacaggaagacaaaagttaatcaccacagacaactttagaccattatcagcgtacataacaaattttactagctatcttttatctccagttagtttcaatatttgctgcctttagagacttagggtccttttcctttgtcttgttacttctctaaaaatttactgtaccttcgggacgataagctcaaatcttttttttttgagacagaatctggctctaccgcccgggctggagtgcagtggcgcaatcttggcttactgcgaccttcacctcccaggttcaagcgattctcctgactcagcctcctgagtagctgggagctgcgaatacaggcacgtgccaccatacctggctaatttttgtatttttagtagagacagagtttcatcatgttggccagactggtctcaaacttctgacctcaagtgatcctcctacgtcggcttccctaagtgctgggattatgagtgtgaacacctgtgcccagctccaaatctaaccaaacttttgagttactaatctctggactcccctgtgttgttacatgcactatgcacaattaataaactctttctcttgttaatccatcttttgtcagtccgatttacagggctccagccaagaaacctaagagggtggcaggaaaaggagtttttcttcccttataccttaaagctacctatttcacaatgtgtgtttgtaatagtgtcttaaaaccttactgtaactagagtaggtgtagcactaggatataaagtttttatttttattttaattaattaatttattttttaagatggggtctcagtccatcatccaggctggagtgcagtggcgcgatctgggctcactgcaagctctgcctcctgggttcacgccattctcctgcctcagcctcccaagtagctgggactacaggcacccgccaccacgcctggctgactttgtatttttagtagagatggggtttcaccatgttagccaggatggtctcgatctcctgacctcatgatctgcccacctcagcctcccaaagcgctgggattacaggcgtgagccaccacacctggcctaaagtttttaaatgattgatatgagattaaattgtcattgttttggtgaaaatttgactctgctaagtgtctatttgcaataggaaatgttttctattttaaaatatagcttcttgttttttcagtgttaatatttaagtacattttatttatttttaatattttactttttgtgaaacagggtctcactttgtcatccaggccggattgcagtggcatgatcacaattcactgcagccttgacctccctgggctcaggtgatcctctcacttcagccccccaagtagctggggctacaggtgggcactaccatgcccagctaattttttttgcattttttgtagagacggagtttcaccatgttgcccaggctggtcttgaactcacgggctcaagagatctgcgtgccttggcctcctaaagtgttagaattacaggcgtgagccaccacgcctggctaagtgcattttaaaatgcagtaactggccgggtgtggtgactcactgcctgtaatcccagcacttcgggaggcagaggcaggcagatcacgaggtcaggagatcgagaccatccttgctaacatggtgaaaccccgtctctactaaaaatacaaaaaattagcctggcatggtggcgggcgcctgtagtcccggctgctggggaggctgaggcaggagaatggcatgaacccaggaggcagagcttgcagtgagctgagatcacggcactgcactccagcctggaggacagagcaagactccgtctcaaaaaaatgaaaaagaaaaaatgcagtaactgattggtttctctctgaaatatgtgcaaaatcaaacttttttttttttctgagacagagtcttgctctgtcgcccaggctggagtgcagtggcgggatctcagctcactacaacctccgtctcccgggttcaagccagtctcctgcctcagcctcccgagtacctgggattacaggcatgcaccaccacaccaagctaatctttatatttttagtcgagatgtgttttaccatgttggccaggctggtcttgaactcctgacctagtgatccacccagcttcccaaagtgctgtgattacaagtgtgagccaccacgcccagcctcaaactgtttgttttaaacatccaatctaagaaagattttatataattgttgccagttaaatatcaaattatactatagcattcaagagaaaaaatgcttcatttgaacattttttctaactgtgttttatttttttgtttttttttttgagacagagttttcattctgtcacccaggttggagtacagtgccgctatcattgcttactgcagccttgacctcccaggctcaagcaatcctctcaccttaacctcctgagtagctacgaccagagttgcacaccatcacacctgactaatttctgtattttttgcagagatggggttttccatgttgcccaggctgccgttaactcttaatttgtagtcctatagaaaaaagcaagaaagagaaacttccattatgttacttctgttcaatgaagccagtgactagaaatatgaaaaggcaggcattaaaacactagttgtatatgtttataaataattttacatagcctaatatgtaaggaaacagtggaaaaatgtgaaaataatagatcaggtcgggtgtggtggttcatgcctgtaatcccaggcgtgaatttgggaagctgaggtgagcagatcacttgaggtcaggagttcaagaccggcctggccaacaaggtgaaaccccgtctctactaaaaatacaaaaattagctgggcatggtggcgagtgactgtaatcccagctactcaagaggctgaggcaggacagtcgcttgagcccaggaggcagaggttgcagtgtgccaagatcgcatcactgcactccagcctgggtgacagagtgagactttatctaaaaaaaaaaaaaaaaaatcaagtggctgggcacagtggtttatgcctgtaatcccagtgctttgggaggctggggcaggaggatcccttgagcctaggaattcgaggttgcagcgagctatgattgtgccactgtgctccagcctgggcgtcagagtgagaccttatctctaaacagattaagagagacatcaggtggggggcggcgacggatagcattaggagatatacctaatataaatgacgagttaatgggtacagcacaccaaaatggcacatgtatacatatgtaacctgcacgttgtgcacatgtaccctagaactttaattaaaagatcaggaattatgaactgtttatagtaattttgctataatttgtcatctttcagttaaagaattttgttatccaaaggagaacattttgttattaaaaagcattgtttttctacaattgccaatacatccaaacaggtaaaactaattaagagtgttttgttgtttcagaacaccgaaaagctttggaggatttcactcttgataatattctttctcatatttattattttcgctgtcgtgactacacagagttactggcacaagtttatcttcttccagatttcctttcagaacactcaaaggtatgagtcagactactgaaatgtaactaaccaagtattttttgaggtgtttgataagcatgaaaaaataaccagtacagtagcataaaatcaaagtcaaagccaattgagaaaatctcttccttccttgacctacaatttatttatatttatatttgttttgtgtatgtatatgtatatatagtttatgctcagagtaagaaattgaaataatatagaagtttcatttccagtaatagtggaatagctcctatcaaaccacattgtatagaaaggtatgaaatgaaaaataaaaacttccttgtgctactgttttctagtgcctctccccaaaggtgatcactattggccaggtgcagtggctcatacttgtaatcccagcacttagggaggccatggtgggaggatcatttgagcccagtagttcaaaaccagcctgggcaacatagtaagacattgtccccaccaaaaaaaaaattagccgtgtgtggtgtagctgtagtctcagctaccaagggctgggtggagcaggcctgaggtgggaggattgcttgagcccagcagttcaaggctacattgagctaccgtgccatcatgtatcacctttttttttttttttttttttttttttgggtagaaatggagtcaactcctggggttaagcgattctcccacctcagcctcccagagtgctgggattataggcatgagccactgtgcctggccctttaattttggtaaacattatcagtgacaaagattctccttgactgaacttggccccatcctgtctttggcctacccagtccagtcttagcaaagaatcctgctgtcagttcagagagattctctcacatttgatagtctgagcacctttgatacctgatcacgttcctcattccccacctttgatatttaaatccttggcttgcctttatttatttattttttattttttaatttgatggagtctggctctgtcgcccaggctggagtgcattggcgtgatcttggttcactgcaacctctgcttcccgggttaaggcaattctcctgcctcagcctcccaagtagctgggactacaggcatgcgccacaacgcctggctaatttttttttttttttatatttttggtagaaacagggttttgcatgttggccaggctgctcacctggctggcctgccattagtaagaatcctgttcggtcagtttagcaagaatttccctacccttgatgtctcactgttagtaattgttcatccactgaccccttcaccttgctcttggttgtgaatccccagttgtccttgtattctgatttgaacccagtctctctcccctattgtgatacccctattagaatagtcttgaatacagtctccttactgttttaagaagtgttagaataattttttcttgaacacatatcgcccttcagaaagactgcaccaatttctactcttactgacaatatatgagaatgcctattacccatcatcctgaccttttgaatatttttgccaagattctgcatggaaaatgccatctctttgttattttatttattttaattaattaattaattttttttttgagtcgcccagtctgactaacatggcaaaaccccgtctctacctaaaaatacaaaaattagcctggtgtgttggcatgcacctgtgatcccagctacttgggaggctgagacaggagaatcgcttgaacctgggaagcagaggttgcagtgtgctgagatcgtgacactgcactccagcctgggagacagagagactctgtctcaaaattaataaataaaaattaaataaataaatacaatagaaattaattttcttagagttctggagcctaaaagttcaagatcaaagttctagctgattcagtttctggcaagggctttcttcctggcttgcagacagccatcttttctctgtgtcctcatatgatagggaggaaaagaaggagagagtgaattccctggtgttttttcttttttttggggggggggtggagtttcgcttttgtcacccaggctggagtgcaatggcgtgatctcagctcactacaacctccacctcccggattcaagcgattctcctgcctcagcctccagagtagctgggactacaggcgcatgccaccacgcctggctaatttttgtatttttagtagagacagggtttccccatgttggccaagatgttctcgatctcctgatcttgtgatccgcccacctcggcctcccaaagtgctgggattacaggcgtgagccaccgtgcctgacccctaatatttcttcttacaaggacgctaatcatcttagattagggtcccatctttatgaacttatttgattacttccttagaagtcctttctccacatacattcacattggggtttagggattcaacatacgaattttaaggggacataattgagttcccagaagtttgcccctggccccttgcccccctaccccctacctgcccgccaaattcatgtttttcttgtatccattccatccacacagccccaaacgtcttaaccggttccatcatcaactctaaaagtcccaggcttcatctaaatattatctaaatcagagattggtgagactcaagttataattcatcctgaagtgaaattcccttccagctgtgaacgtttgaaatcaggcaagttatatgctttcaaaatacaatagtaggaaatgcataggatgaacattcccaaaaggattatgggtgcctagcaaggcaaatttcattggaccataaggctcaagaataatcctttgctggccaggcacggtggctcatgcctgtaatcccagcactttgggaggctgaggcaggcagatcacgaagtcaggagtttgagaccaccctggccaatatggtgaaaccctgtctctactaaaaatacaaaaattagccgggcatggtggtgcgtgcctgtagtcccagctactagggaggctgaggcagaagaatcacttcaacgcaggaggcagaggagattgcagtgacatgagatcatgccactgcactccagcctgagtgacagagtgagactccatctcaaaaaaataataataattaaaaaaagaatgatcctttgctttgatgctctgccttccaggcccactgcagtagcagaatcaccctactgctctgtggggtggccctgccccttcctctctctgcaagggccccaccctctgaaaccaaggacgacatagcattgccccctgggcttatggtaagagtgacagctctgaggatctgtgatcccctttggcaccattctttccttttcttgaggaatagggcacattcacagtcaagtagctcatggttttctcttgtggaatcaaggaagtccaacagccttcgttcattctttcccacttactctgtcctctttacttcaaactagcagtgtttctgctgttataatcccttatctatcactggcttctgctgagatggctgattaacatcatggataatctatttatagagtcattgttcaaccgtacctttggtcttctctctagagcaagctttcttatttttagcaatatggataggctgagaattttctacatctctaagttctggttccttcttgctgaacaattccttcttcaattcatctgtctcctctttcatttttactataagtggtctaggagaaaccaagccacttcctctacactttgcttagaaatctcctgagataaatagccaatttcatttctcacaagttttaccttccataaaatactagaacacagccaagttctttgccactttatactaagcaccagctttccttcagtttccagtaacttgttcctcatttctgtataaatcctcaccagaatagccgggcatggtggctcacacctgtaatcccagcactttgggaggctgaggtgggcggattgcctgaggtcaggagttcaagaccagtctggccaacatggtgaaaccccgtctctactaaaaatacaaaaaaattagctgggtgtggtggcgtgtgcctgttaatcccagctactagggagtctgaggcgggagaattgcttgaaccagggaggtggaggttgcagtgagccaagaacgcaccactgcactccagcctgggcaacagagcgagactccatctgaaaaaaaaaaaaagcctcaccagaattgcccttaatgtccatattttcagtatgtgcctcaaaactgttccagcctttgcttattacccaatttgaaaatcacttccacattttaggtatttgttatagtagtaccttgcttctctcactacctaacccaccatacctcatttcttgatactaaaatttgttgtggtcacctcaggctgccataacaaaaatactatagtctgagtggcttgaacaacagaaattttattttcttacagttctggagactagaagctcaagataaggttctggctgattggtctctggtgagagctctctccctggcatgtagatggccaccttcttgctgtgtcctcatggggaggaaggaggaagagtgagctctttggtgtcttttcttcaaggacactaatcctctcaaatcaggatgtcattctcatgacctaattttacgttaattactaccttagaggccctctctccaaatacagtcacactgggagatagggcttcaatttacgaatattggggggacacagcagtggtcatgtgtggagtcatgaaaaatcgaatcaacctgtgcacatattcccagctgacgttgaacaaggtcatgttctgcctttttatttcagctctctactgtaaacaagtgtccttttcacagtctttataatgccacttttttttgcatttttgtgctttttattagtgttcacctgttcttcatcacttcaaccagtttcattttcttataattatcggaaattaccttatttgtgtgtttgtttgcatattaatggtcccttactccactaaaacataacctccaagagagcagggaccttctctcttatttactatattcttctctcttatttactatatcatccccaatgcctggaacagtaaatagcatataggaaaggaggtgtcaattaatacttgctaaatgaagaaacaaatactctaaataaaacaacttacttaggcattgcttcataaaagcctcttgtttaatccaacccttactagatagaaaaaaacatagcattggagtcttttgtttgtttacatttgggttagtttccagattctttttgatttggggatcttaaggtttatatattggtttatttttctaacttcactgtttattttttgctttggggggggctttcttttgaaagggttttgctctgtcccccaggctggagtgcatggcagggtttcaccacgttggccaggctggtctcaaactcctgacctcgtgatccacctgcttcggcctcccaaagtgctgggattacagatgtgagccaccgcgcccagcctgaaggtttttttgttttttgttttttgttttaggaaacataaaaagaacccggaaggtaaaattggtatatttaattgacaaatgtgttgttttaccaagactttttctttaagccttttcagaatgttttacaaagactttaaatgtgctttttatcagtaaagactgtgtacagtggcaagttaaagaaaattataattattcctttttctttttgaattacttttttttttttttttttttgagacaaagtctcactctgtcgcccaggctggagtacagtggcgcaacctctgccaccagggttcaagagattctcctgcctcagcctcctgagtacctgggattacaggtgcctgccactgtgcctggctaatttttgtagttttagcagagatggggtttcaccatcttggccaggctggtcttgaactcctgacctcgtgatccacctgcctcggcctcccaaagtgctgggattacaggtgtgagccaccgcgcccagcctttgaattacttttttaaagttgagaaattatcaaagcagagtccgttttaacttttagtgattattgcagaaagcactggctgaacagctttgtaactttccaaaagaaagccatactttagacagttggaaataaagccctgggttttaaggttttttcctgtaatggactatggtttttccaatgctatgtttttttctatctagtaagggttggattaaagaagaggcttttatgaagcaatgtctaagtaagttgttttatttagagtatttgtttcttcatttagcaagtattaattgacacctcctttcctatatgctatttactgttccaggcattggggatgatatagtaaataagacagaagaatatagtaaataagagagaaggtccctgctctcttggagagagagagcatttttattattattattttatttttcgtaacaaatctaatattatctcttctgtatttaggttcgactagtgatagtggatggtattgcttttccatttcgtcatgacctagatgacctgtctcttcgtactcggttattaaatggcctagcccagcaaatgatcagccttgcaaataatcacagattagctgtaagtattaactagtgaagagagttttataacaaagtcaagactgtataaaatgttaatgtctagaaatgtcaaaatagcgtttgcctgacaaataatatagacatgcagttttgagtaaagttacgtttggttggtttccattaaaaaattctggtcataagtgtcagttttcctggaaaataacaagcataattaatggactttgtggttgagcgcggtagctcgtgcctgtaatcccagcactttgggaggccgaggcaggtggatcatgaggtcaggagtttgagaccaccctcgccaacatggtgaaaccctgtctctactaaaaaaaaaaaaaaaaaaaaaaaaccaaaaattagcccggtgtggtggcatgcccctgtaatcccacctactcgggaggctgaggtaggagaatcacttgaacccaggaggcggaggttacagtgggtggagaacgcgccatcacactccagcctgggcagcagcaagactccgtctcaaggcaaaaaaaaaaaaaaaggactttgtttgataaagaaatgccacctttgttaattgcagtgtcttctttgtttaaatatactttggatgtttttcaggttaactcttccaacatccctggttttcttctcctttgagtctttgattattatgtggtatgtaatcacagattcagatggattgaaacataaccggtgtaaacaacctagatgctttgaggtagagctaaataactcttgaagatttgaaatgtgaggagagaagtaaatatcggctcagaagggaagagatttttttttttaaagttttacctcactcctctttaactgcttgtttgccattacttcccaccctgaatccacatcccaccactgacacaaatacacacatttgtctgggagtaagatgtaaggtcaaactgcttaacttgatttctttgtctttaccttaattagagagaccttagcacatacctgtaatacatcataagtaaataaagaacttcctcagtaaagtcattttaaagcatacttttttctttgaatttccaattttttttgccatatgctgaaaagcatagtgccctgtgtttgaattactttttgcttaaattaattgtaatttagccttttgttaatatcagtgaagagcctccagtagggggcactcaagactaataggttgcatagttccttatgtttttaacagaaatagcttcaccttttccgactaaaaaagcaatccaaacaataacatcaaatagtaggtagtgtttaagaagagtgatgtaaatataaacgtcctaacatggaagaagatatatacatatatgttattgagtgaagaaatttaagttgtatataaaatatatttaatgttacctcagtttagagaaaacttataattatatgtatgcatttatatttgtatatatgaagagaaagatctgaaaggaccaaaacattaacagtggctacttcttttttatttttttggagacagaatcttactgaagtgcagtggtacaatcagggctcgccacagcctcgacatctcgggctcaagtgatcctgccacctcagcctccctagtagctgagactagaggcacatgccaccatgcccggctaatttttgtatttttttttttgtagagatggggtttcaccatgttgcccagctggtcagaaggcggaggttgggctcaagcgatcatctgccggcctcagcctcctaaagtactaggattacatgcataagccactgtgcccagacttggcttcttcaaaggatgggattttgtagggttagggacacactttccctctcttactttataatttctttgcttgaaggttttttttcccaattaacatatatataacatgtatggcttttgataatgtattttataattttaaggccagatgtggtaactcacacctgtaatcccagcacttttggaaggccaaagtgggaggaccgcctgaagccaggagtttgagaccagcctgaacaacaaagcttgaccccatctctaaaaaaaaaaatacataaaataagaataattggccgggcacggcggctcacatctgtaatgccagcactttgggagactgaggtgggcggatcatgaggtcaggagttcgagaccagcctgaccaacatggtgaaaccccatctctactaaaaatacaaaaaatagtcaggcgtggtggcatgcctgtaatcccagctactcaggaggctgaggcaggggaatcatttgaacccagaaggcggaggttgcagtgagccaagattgcgccactgcactccatcctgggcgagagagcaacactccatctcaaaaaaaaaaaaaaaaaaaaagaaattttaagttatgtatgctttttgtaaaagaaaaaaaaagttctaaacaataaaaaatgtaggaagcgattattcattactcagagattgtgtaaatattgttgtctggtgtaaatatttttgcagacttcatgcatatacaaacttacgttttagaaaatgaggtcataggccaggtgtggtggctcacgcctgtaatcccagcactttgggaggccaaggcgggcagatcacgaggtcaggagatcgagaccatcctggctaacacggtgaaaccccatctctactaaaaatacaaaaaagtagctaggcttgatggcgggcgcctgtaatttcagctactcgggaggctgaggcaggagaatggcatgaacccgggaggcggagcttgcagtgagctgagatacgccactgcactccagcctgggcgacagagcaagactccgtctcaaaaaaaaaagaaaatgaggtcatgccaccgcagtggctcacgcctgtaatcccagcactttgggaggccaaggtgggaggatcacttgagcccatgagtttgagaccagcctgggaaatatagtgagacttcatcgctacaaatttttaaaaaaatcttagccaagcatagtggcatgcacctatagttctagctacttaagcggctgaggtgggagtattgcttgaggctgggaggcaaaggttgcagtgagctgagatcgcaccactgcactccagcctaggcagcagagcaagaccctgtcttcaaaaacacaaaaagaaatgaaaatgaggtcatattatacatgctattatgcaaagcagttttctgtttttcacttaatatattgtgaacatctttccatgtatactactttttttttccatgtacactacttataagtctgctttacactaacagctgcatagtattttgctgtatgactgtagcataggttttttttgtatttgtatttgtttttgggttttcttttttatgagacagggtctcgctctgtcatccaggctagagtgcagtggcatgatcttggttcactgtagcctcaatctcctgggcttaagcaatcctttcacctcagcctcttgagtaactgagaccacaggcacacaccaccacacccagccaatttttaaattttttgtagaggctgggcacggtggctcacacctataacccaccactgtgggaggccagggcaagcagatcacttgaggtcaggagttcaagaccagccttgccaacatggtgaaaccttgtctctactaataatacaaaaattagccaggtgtgttggtgctcacctgtagtcctagctacttgggaggctgaggcaggagaatcacttgaactcgggaggtggaggttgcagtgagccaagatcacactgttgcactccagcctgggagacacagtgagactctagctccaaaataaataaataaataagttttttgtagagatgaggtctcactatgttgcctaggctgttcttgaactcctgggcttaagggatccatctgcttcagccttccataggcatgagccactgtgcccaccctgtagcgtagtttttttaaccacctccttattgatggtctctctcttttttttttttctgttttagatagagtcttcctctctcacccaggttggagtacagtgtcacactcttggctcactgcagcctccacctcccaggttccagagcttctcattccacagtctcccgaatagctgggattacaggcgtgcaccaccacacctggctaatttttgtatttttagtagagatggggtttcaccatgttggccaggctggtctcaaactcctgacctcaagtgatcgaccctcctcggcctcccaaagtgctgggattacaggtgtgagccaccacagctagtctagaataaatttcttaaagtgaaaatattaagccaaaggaatcgatttttgaacattttgttttatgttataaaattaccctcagaaactatgctccaaagtatgtctctacagcaatgaatgggaactcttgttttcccatatctttaccaactttgggtaccagtcttttatttatttatttatatctttgagacggagtctcgctctgtcgcccaggttggagtgccatggcgcgatcttggctcactgcaacctgtgcctcctgggttcaagagattctcctgcctcagcctcccgagtagctggaactacaggcgcgtgccaccatgcccggctaattttttatatttttagtagagatgggtttcactgtgttagccaggatggtctcgatctcctgacctcgtgatccacccgcctcagcctcccaaagtgctgggattatacgcgtgagccaccacgcccagctaggtaccagtcttttaaatctttgccaaattgatatggagaaagtcctttaaaaatatgttttttggattattggcataattttttaaacagccttaatgacatatatgattcatccttgcagtgtgcacaattcagtgattttcagtgtatccacagagttttgcaaacatcaccactgtataattttagaatatttccgtcatcctaaaaaagaaaccccaacctcacagtgaatttcagaatatttaaaatgtctgctccttcagtgtcacgtttcaaatctcatgcaaatttttcttgcggtcaactataactttgtaccctatggagaaagtaattctggttctgggaaacacacagttccagattattaaaaaaaaaaaaacaaaaaaaaacaaaaaacctcttttcagctgggtgcaatagctcacccctgtaattccagcactttgggaggccaaggtgggtggatcacctgaggtcaggagttcacaaccagcctggccaacatggtgaaaccccatctctactaaaaatacaaaaaaattagccagttgtggtggcaggtgcctgtaatcccagctactcaggaggctgaggcaggagaattgcttgaacccaggaggcggaggttgcagcaagccaggaccgcgccattgcactccagcctgggcaacaagagcgaaactctgtctcaaaaaaaaaaaaaaaaaaaaacccttttcattagctgtcattctctattctaccctcccccagtccctcacaaccactagtatgctttctgtttctgtgaatttgtcttttctggacattttatataagcagatcatacagtatatggccttttatgtctgacttctttcacttagcgtgatgttttcaaggtttatctgtattttagcacccatcagtatctttttaatgactaattttgcattttatggatatatcacattttgtttatctgttcattggttgaaggacattgcatggcagaaatatttttaaagctctgaagttcataatttcaagtgattgttactttactgttttaaacttttgacctggcatggtggctcacgcctgtaatcccagcactttgggaggccaagctgggtggatcacctgaggtcaggagttcgagaccagcctggccaacatggtgaaactctgtctttactaaaaatacaaaatttagccaagcgtggtgggggacacctgtaatcctagctacttgggaggctgaggcaggaaactctcttgaacccaggaggcagaggttgcagtgagccgaggtcatgccactgcactccagcctgagcaacagagcaagactctgtctcgaaaaaaaaaaaaaaaagcacttattctttagaagcttggcataatcacatactaattttcagttgtatcatggaggccaatcgttttgcaaaagtaatataattgctatataaatatttgctaataatggaaattctaattttggcatgttgaatacctggtaaatcagtagtttgatttatattttcctaaagatacgtagtgcgtaaactaagtactctctctaaaccagcactgtccagtagatctgatggaaagatgaaaatgtacagtctagtacagtagctgcatgactgttcagcacttgaaatatagctaatactactgagctactgaatttatgattttaatttaacttttttatttattttttttgagatggagtctcactctgtcgcccaggctggagtgcagtggcgcgatcttggctcactgcaacctcctcctcccgggttcacgccattctcctccctcagcctccctagtagctgggactacaggcgcatgccaccatgcccagctatttttttgtatttttagtcgagacagggtttcaccatgttagccaggatggctttgatatcctgaccttgtgatcctcccacctctgcctcccaaagtactgggattaccggcacaagccaccacgcctggcttctaatgtaacttttttttttttttttaagacggagtctcgctctgtcacccaggctggagtgcagtggcgcgatcttggctcactgcaagctctgcctcccgggttcaccattctcctgcctctgcctcctgggttcacaccattctcctgcctcagcctcctgagtagctgggactacaggcacacaccaccacgcccggctaattttttgtgtatttttagtagagacggggtttcaccgtgttacccaggatggtctcgctctgacctcgtgatccgcccgcctcggcctcccaaagtgctgggattacagtcgtgagccaccgcacctggctaatttaacttttaaaagctacacctgggccaggcacagtggctcatgcctataatcccagcactttgggaggccaaggtgggaggatcacttgaggccaggagttcgaagttaatctgggcaacatagcaaaaccctgtttctacaaataatttaaaaattagttaggcatgcctatagttctagctagtagaacttgtgcttgaactatagttctagctactggggaagctaaggcaggaagattgtttgagtccacaacttcaaggctgcagtaagctatgattgtgtcattgccccccagcctgggtgacagagtgagaccccatttctaaaaactattcttaagaaaagctgccggccgggtgtggtggctcatgcctgtaatcctagcactttgggaggccgaggtggagatcacctgaggtcaggagttcgagaccagcctgaccaacatggagaaaccccgtctttaccaaaaatacaagcttaaccaggcatggtagctcacacctgtaatcccagctactcatgaggctgaggcaggggaatcgcttgaactcaggaggcggaggttgcagtgagccaagatcatgccattgcactccagcctgagcaacagagtgagaccttgtctcaaagaaaaaaagaaaaagaaagaaaagctgccaatttaaattcctgcttagctttttctaaggtgcccgatgagaggtaacaaatggagaatgccctgtggcatgtaaggggaggggagctagaagaaaatcatgtcatccacttggtatctaattgagatctagatggatcacagatttctcctttgcggtgaaacagaaattttagggtgttaccactgcagtgggaacagccaaacaaccttttttctttcgcagttttctttttctttttttttgagttggagtcttgctcctgttgcccaggctggagcgcaatggtgcaatattggctcactgcaacctctgcctcctggatttcagtgattctcctgtctcagcctcccgagtagctggggttacaggtgcccgccccaacgttcggctaattttttgtaattttggtagagatggggtatcgccatgttggcctggctggtctcgaactcctgacctcaggtgatctacctgcctcggcctcccaaagtgctgggattataggcatgagccaccgcgcctgggctgtttctcggttttcttacataaaaaactcattttcagagtagacacctttttcttactgcttttcatggaatttcattatcagttttagtttgcaatattaactctttttttctggagggaagatatgtattagaagagtatataaagtaaccatttctggagatttggggatggaaagataacagatctgacttctgtgttaagtcagccttaaacgcttttgttttccctgctttatttaaaattactgtctttcaaaacctggaaccttttttgtaggtcagtatttatacaaagagaattagcaatatgaaaccttgagggccatctgtgagttgcaaagcaacacctgtggctgttaatagctgagtagcataatcataatttggagtcatttgacctgactactaggattttttttttcctagttcatctacttatattgtaccttctttatgagttttaagtctcttctcataatttgttgcctcagtttctttttttcctataaaattataaacagtaatactatatttgcttccttcttaaaagtataaacattgaggtatttgttaaggatttcatattcctttcaataaaaatattctagggaggcaatagtgataaagaacatggactcaggccaggcacagtgacacatgcttataatcccggccctttgggaggccgaggtgggtggatcacttgaggtcaggagttcgagaccaggccggccaacatggtaaaaccccatctttactaaaaatgcaaaaaattagccaggcatggtggcaggcacctgtaatcctagctacttgggaggctgaggcaggagaatagcttgaacccgggaggcggagattgcagtgagccgagatcgcgccattgcactccagcctgggcaacagagcgagactcagtctttcttttttgagacaaggtcttgcttggtcatcaggctggggtacggtgacagaatcatggctcactgctgcttcaacctcctgggctcaaccaattctcctgcctcagcctcctgagtagctgggactacagttgtgcaccaccatgcccagctaattttttaaaaagttttttgtaggtcaggtacagtggcttatgcctgtaatcccagcattttgggaggctgaggcaggaggattgtgtgagcccaggagttcaagatcagcctgggcaacatagcaagaccctgtctcttaaaaaaaaagttttatgagctagatgtggcaaacacctctagtcccagctgttcaagaggctgaggtgggaggatcatgtgagtctaggacttcaaggaccacctgggcaacatagcaagaccccatctctaaagtatgaaaataaaatactttatgatcagtagaatcatattttcaggtaactacatctttttatgggtggatttttaatttttttttttttttttgagatggagtctcactctgttgcccaggctggagtgcagtagcgctatctcagctcactgcaggctctgctccccgggttcacgccattctcctgtctcagcctcctgagcaactgggactacaggcgcccgccaccacgcccagctgattttttatatttttagtagagacagggtttcaccgtgttagccaggatggtctcgatctcctgacctcgtgatccgctcaccctgttagccaggatggtctcgatctcctgacctcgtgattcgcccgtcttggcctcccaaagtgctgggatttaaaattttttatcagaaaaatttgtattacttaaatggctggctataataggtagattaatttcatattactaaaatcacaggctgggcgcggtggctcacacctgtaataccagcactttgggaggccaaggcaggcagatcacgaggtcaggagatcgcgaccatcctgactaacacggtgaaaccccgtctctactgaaaaaatacaaaaaaattagctgggtgtggtggtgggcgcctgtagtcccagctacttgggaggctgaggcaggagaatggtgtgaacccaggaggcagagcttgctgtgggcagagattgtgccactgcactccagcctgggtgactgagcgagactctgtctcaaaaaaaaaaataaaataaaaaataaaatcacaagactgtttacttgattatttatttatttatttatttagtgagacagagttttgctcttttgtccaggctggagtgaagtggcacgctcttggctcactgcaacctctgcctgccccaggttcaaatgattctcctgcctcagcctccggagtagctgggattacaggtgcatgccaccatgtctggttaatttttgtatttttagtagagatggggtttcacaatcttggccagactggtctacttgataattttcaaagagactcacctaattttcttacattttgtttttgtaggtaattttaaccaatcagatgacaacaaagattgatagaaatcaggccttgcttgttcctgcattaggtgggtaattaatcagataaacattttagtttatcacagtttttcttatctctttcatttgattctcattgagtactatacgcttcatgaaagcagactgtatttgtcttgttcactggttaatcttagcactaagcacagtaccgttagatactgattgttccttttagttatttaacatttattgagtggccagacacagtgtcccacacctgtaatcccaacaccttgggaggccgaggcggatcacttgaggccaggagttcaagaccagcctggccaatatggtgaaaccccatctctactaaaaatacaaaaaattagccaggcatggtggcacacacttgtaatcccacctacttgggaggctgaggagtgagaattgcttgaacttgggaggcgcaggctgcagtgagctgggatcgtgcatctgcactccagcctgggggacagagtaagactctctcaaaaaattgcgtatctactgtctggcaactgttgtgtcaaagattcttgcccccagggagttcacagtgttagggagaaggaaaggtgaatccacttaaatacaaatcacactacagtgaatatcgtggttttgttagaatgtagtgcttcaagatttatttccactaaaatcttaaagaatattctaccagagtcttggccaggtacagtggcttatgcctgtaatctcagcactttgggaggctgaggcgggtggatcacctgaggtcgggagtttgagagcagcctgaccaacatggagaaaccccatctctattaaaaatacaaaattagatgagcatggtggcacattcctgtaatcccagctacttgggaggctgaggcaggagaatcgcttgaacctggggggcagaggttgcagtaagccacggtcgcgccattgcactccagcctgggcaacaagagtgaaactctgtctcaaaaaaaaaaaaaatgtatctgcccttgactagttttcaactaatggcatagatcattctataaacagataatgtagtaaaggttacaatagaaagtacagggtactgtacaaaggacggattctaacctggcccaggtgagcaggatgaaaaggaggaaggttagggaagggagtgtaatagtctgtcatgtttcttccagctgtttttgtcattttctatcacccacttaagcaagagcttcctaatgtttggatccactcaggggtaatcaaactcagcctttctcaaactcatgccctcagcacactatgataaatcagaaagcaaatttataaatttagtgagaattacagttgtcaagcagaatgaagtttatgttttctagtcagtttattttcttcccagataccaggaagttgggaaagcaggggttcagagttggtaagcagagaagcaaataaatggaaatggatgccctcaggaatattatgcttaagttgtgataattctgatgccctccttggtttactagcagaacgccctttaccttggatattgctaggatattgttcaatagaatggtcagttatgatagaagtgttctatgtctgtgctcttcagtacagtagcccttgctacatgtggctattgaggcatttaaaatgtggctaatgcagctgtggaatggaatgtttaattgaattttacttaaatttaaattgcacatgtggcaagtgactgccctgttgtgtagtgcagcactggataaacataactcctgtgttctagactccaatcccaccattagctttctgtttttgacagtgtttgctagtatgataggtcactgctcattttacattactatcagtttagtttcctttatatttcagaggctccctaatcccttaaagagatttaaaaatcaacgtagaccacttctgtatgaaaataagatggctgaatttgctttgattggaattaggaactggcgctctctttgctagttctggaatttggccaggatgcacatcaaaatctcattcctaccctcctgatttgcctcatgcaaactttgttgctgtgtctgttctttggtcttctattgctgtgtctcagctttagattatatgtcttgcgtagaaatggatcatcagaatgcaacaggcagaagacttagaattgcaaatcagtagggtaatgacaaaccctttgagctgagtgggactgaaaagtaacctaacatataacctattagtaattgttaaccatgaagattttcagtgctggacacataaattgctgagttcaactgccctctttgccctccaaatctagcataaaacaaattggtgatctcaggccagtttcacacctaatatgactaataataaaagtcttgtgtttcaggaactcagtttgtccaaacctgagcccatcatctctacctcacaaattatatccaccttttcatttccttgcactgtgtctgcatgatatgataatactcccaagcactattgcttaaatcttgagttacacttaatgcttttttttttggtcttttttctttttaatgtgaaatagaatatacaaatgaaaatgtatatttagaagaacaataataaatgtccaggtgcccattgctcagactgacaaatggaacattactaccccccaggagcctcgtatgctctccccccaagaggcaaccactatcctgaattttgtgtaattgtcacctagcttttatagattttactgtctgtgtatccctaatagttgcttatttctagcctttatataaatagaattatactgtatatgactgacaacttttgctcattattattttttgattcatccatgttgatgtgtgacactgtagttcatttcgatgacatgaatatgccacaacttaattatatattctgttgatgtcaaaaaaaaaaaaagaatattctaccagagtttttacttttcttctggaggtcagaaatacgttaggcttgatgatatggaaaattgacacatatatggactcagacaataaagttttctaaaagcaaatagagaataatgatttgcagtatttccctagataggtaaaaaccttgtaatctcaggatattactcattttccaggttttttgaaagcaagtatactttcgttatgttaaattaataaagtaagattatatttgatcagaggcgttctgagaaatgtataaccaagtcagtaaggccatatacagttattatgttttttactctcaggggaaagttggggacatgctgctacaatacggctaatctttcattgggaccgaaagcaaaggtcagtacagaaacaagttaataactccgaatattgggttaattatactgaatgaacacttacaggtttcttagagctagtcctgtggatgagatatacagtgacccatgaagtgacacttttgttgccttgtctgatatcacctagagcaaacatagaaatgtgttgttattactgcatatttagctacataggaaattctctggaatatttaaatgatggggcgcatgcacctgaaatgagtaggtggccaaggaatgccattttctaaagctcttcgaaataatttattagccatgtagaaggaggtgagtactctgtgttcctggaagagattgaaaaaaaaaagaataaaatcaggacaaaaggaaaattgttgaggttacctttaaaattaatttatttggaacatacgatggtttctcttatttgcttagtatatttcttgtatgaaattgtgtctgtttttttttttattttgtattttgctgtccagcttttattatccagttacttacctgcatttcacaagtattgttctttaaaagtatggcagcatgaaatctttgtatttgtttttaaagctgctgagcaagtgaacaaaccagcttttattttcttgaaaatagaccattgaaagctgtgaagtcttttctacacttctagaaaatgtcagattcatgctagcctctccgctttgtgattaattggtataacctagaggtcttggtttggaaatgctctaataaagggagaaattaaaatggcatgtgggcaaagatggaataaaaggtcacttaaatacatattgggcctagccagtgaaaatgtctattttttaatctatatttctttgttgttctacaaactgaaaaaaatcctgcctgaccaagttaggttttacggacctgaagctcataacagaatgattacacttctgtatatatcttttgcaactgatcgtgcagtttgggtcttctttaaaaatggtatttgcaaagagctcaggtagtgttttttttcccccacaatacgtagtgctttactattgactgtcgccccctaatttaaacacattttttactctaaaccagtatgactggtaaatcctccccctaattttttttctatgatcacaatttaaggtagttcctcctagttttgtaagtaagttgctgtatactagagtcacaaaaggagttattttctcggcacca
